United States Patent Application Publication US 2018/0126003 A1 - sequence listing, part 52

SEQ ID NO: 90576 - DNA, 2937 bp, Artificial Sequence
  derived and/or modified sequence
ggtttcaccatgatggtcaggctggtcaagatctcctgacctcaagtgatctgcccgcctcggcctcccaaagtgctgggattacagacatgaaccacaacacctgccgagcccaggtgttttgaatccagcacgggcaatggcaagaccctgtcccaacaaacaaaaaaacactggtgcctgaggcccaccccgagagattctgattgagttgatttggatttgaattatctttaaaattttggatgtgaattttttttttttttcttggaatggagtttcactcttgttccccaggctggagtgcaacgggacgatcttggctcaccgcaacctccgcctactgggttcaagccattctcctgcctcagcttcccaagtagctgggattacaggcatgtgctaccatgcccagctaattttgtatttttagtagagacagggtttctccatgttgctcaggctggtcttgaactcctgacctcaggtgatccgcccgcctcggactcccaaagtgctgggattacaggcatgagccaccatgcctggccggatgtgaattatcttaaaaattttcaggtaattctaatgggccaaggttgagaacccctgctctgggcccatccgagcaccaggctgtcacaaacgcatgcatgcactcacgcccgtgggcttggggggcttcggaaatgtgcttctgcttttttgagatggggtctttctgttgcccatcccggagcacagtggcacgatcacagctcactgcagcctcgacctcctgggctcaggtgatcctcccgcctcagcctcctgagtgtctgcttctggttttcatgatgacctggggcccaggcatactacacttgtgctgttcaggggccagtcctgcaccaggagcccatcagccacagctccgccgagaagcactgatatgcagagctaagcagctttgtttccacgtggatcctgcgtaggttttcttggtccatccgtagacaccgcactcctgcagaggatcttctcgggatgccccactgtctctgttttccctcttcactgaacactcagtcggggctcgccatgatgcctctgtgtctgctggcttctcccccattggaacagccttcttggcacgccacactgctagctgctgggcactgtgctttctgcctttaccgttctgccgtgatgttgccaaaatagcagcaacaacaacaacaacaaaggctgggcacctggctcatgcctgtattcccagcagttcgagatcagcctgggcaacatggtgagaccctatctctacaaaaataaaaaatgaaatgagctgggtggggtggcgcatgcatgcctgtggtcccagctacttgggaggctgaggtcggaagatcgctggagcttaaccttgaggtcaaggttgcagtgagccgagattacatcactgcactccagcgtgggagacagagaccctgtattaacaaacaaaaacacaaaccacaaagggcaggtctgaaactgccatttaaaaaaaaatttaataaacttaaaaaaatatatatccacagatgcaggtgaagaacctgttgtcttcctcaagcctctttttcacccatgggtggaaatggtgccctggacacccaggcccacgaggtctttgcgtggggtccctacacagggctttagcttacactgtgctgccctcctgtcccccgagttcccagtctgtcaaaatccaacctggtctcccaggcccagggcaaatgccacctcctccatgaagcctgccacatcctttgcacacccttgggcgctgaccttgttctcccagcgcacaggcacgggtacagtttgcccctgtagtagtaactcaggcacaaaacgaactcttgctgaggctcggccgcgcagagctgagggttgccgcttccaggttcaagtgcattttgagtttcattcccagcttccttctttttctggtctttaatttcttctccggattaggtcccactcaatgctttccttctcaatttccaaaagagtatggtcagagccagcagcacaccaccttccccatgggtgggggggggccagcctgtggcgggggtgcgggtcccatcttttcgaaggaattgacccacagtgggcgggtccacctttgaccttgccccagggagcgcagacagaaaaaagatccttgcttagtttgaggggccgctggggtgctcggtttgtcttcagaggcctgtctgtaacaccaatgccaacccggtggcactgactggtcaccctgaaggccacggccagtgtcctaggaagggactcaatttctagctgtgccacctgagattctggggttaggctggttgtgcttctgaagttccactgtgctcaaagtgcttggtgaaagttagcgaaggtgattttacaaaaatagatgcataaaatgtctaggaaacacaaaaaatcctcattactcttctctccaaatattttttaagccccaactggaccctaggcaaaagtgagtggcactcctctgccaggactccaggcaagccccggcatcttcttgctgccgtcccagacaacagaagttaccagatgaacagacttggatgggccacgggggtggagagctggaaagcttggctgtgcctctcgatgatgattaagatttcaatatttacagcaaaaccacaaagcaaatgatagaataaagcaaaacaatggaaaatctgagttcactcgtgagagaggtacgtatgtgagctctgaggaaattacagagggaacgcatgcagcgggacagctctcccaatcgcagcgtgcaaagtagacatccatagtgtcttttgaaaaatgaaaaacacattactttgaacagccaagaaaaaaattgcaatttattaagattcaataaagcgttgtactttcgaaagc

SEQ ID NO: 90577 - DNA, 1601 bp, Artificial Sequence
  derived and/or modified sequence
cagcaaagggcaacacattctgcgggctcaaagtcaagcagatgatctgcttgatccagaccatcagttactggatcagtcacagtcctccagagaagcagaacccataggttacatatttaaggaactgactcatgagattgacaggtctgaaatccgcagggcaggcagcaggccagagaccccggcaagagctgattggatgaggcctacccacattctccaggataatctcctttccttaaagtccactggctggagttgttatccacatctacacaatgccttcccagccgcacctcagtgcgtgttctgttgaatctccgggtgctgcagccaggttgacacagcgacacctcacaggtgttgctcgtggaggtgggcagaccggtacattccatatggggttactgcccagcagacaagagtgtgctcctgtctcagccttgaccctcacaaccaccatggggcggctatttagtgtgcactggcaaatctgggggccctgttctccctgcatcgtttaccccaaaggtgatagtgaacaatctgcttccaagtcgaaacaggctttcccattgctattgagaaagggaatggaatggcctctgtccgcatggctggaatcctcctcccctgccccctgcatgcctctctggagacgcaactcattctgggaatcccgcccgagtccttgcaggattagggggctttgctccatgagaccccacgggctttgatgtatccacactctccggagtctcctccccaggggccacagacttgcccatttttctagacacctggctggccacttctcagacgctgtccttagcagcatggaagagcagggcctgggaacatggacttcagagccagaaagcgcaatgtcacacacccgtcccattagtgtgcgaccccagccagccacctctccaaaccttagcttcctcatttgtccctacagagtctagcaaacataaatagctaattgaggaatctgtcttaaaatcctataggtaggaaaacagtgaccaaaagcaaccctaaaaatggtagggatcaggcctccttcctcagaggcggctggggaatataattgagggtccagtctacagaactgcaaacctcagtccccacccgcacatgactgtgccctgttcgagaagttgatgccatccccctagaagctgtgacaaattatcaggttaggggaaagtgtgcaagtcacacaaacgatttcaggaagatttgcacacgggcacatatgaccataatctggtttctggcattgatgttgaactatgaaattcaacaaaacaggccaggagccgtggctcacacctgtaatcccagcactttgggaggccgaggtgggcggatcacgaggtcaggagttcgagaccagcctgaccaatatggtgaaaccctgtctctactaaaaatacaaaattatcgaggcatggtgatgtgcacctgtaatcccagctgcttgggaggctgaggcagaagagtcgcttgagcctgggaggcggaggttgcagtgagctgagatagcaccactgcactccagcctgggcgacagagcgagactccgtctc

SEQ ID NO: 90578 - DNA, 2440 bp, Artificial Sequence
  derived and/or modified sequence
actgcaagaacgtaaggctgcagggaatacatttttaaagcgtcggtggggaactttctgggacgctcaaccccctgaatgcctggaccccctcagtaagagtcccatcaatagaggcagtccaacagcaatctctctgaggcagcctgagttaggtcacacttctggtctgtcctgctgttgcatctgctcagaactgttagtgaaggtgtaaactcctcccctgacagaacaagataatacccagtttcctttaaggccatcagtctacccaaataatctccgatgaattcccttttctgctgatagagtgtgtaccatgcccaaagtggtaaaaaccttccatccccagaccccctccaaggatgggaaaggtgagcctgatcctggaagagtatcttaccttccccttctggggatgactccccttggtgactccccttcccacacacgctatacccagtagctcagtcctaggcacacagaagcttcataccactggcgagcaactgttattggctgtaaggcagcaatgtgcactggatttttattctgctatccagttatgccctctccatactcattgccacagaattgggaggaccctgtggctaccttttgtccacaatagagagtagagtaggagagtggcatcccgatgagcaggcagtttctctctgcctgtcaggaatgccttgcctgatgtgtgtttctgcctatattgctcctagtcccaagtttctactactctgtgagaagaaaaatagatgctcacagacagaccaacatgattcctcccccgcttcctggaacccctgacaccctcccagatatgtcttgatctcctctttatcagatgtagattctcttcattggtgagtctttcatcaaacatccattttgcccataaggaagagtgtgtacatgtaaaaaataagattgaacgttctcttttggcaaaagagagagatcttatctgtcttcccttttcctaggacttttccttgagaaaaacctatatttattaatccttcctcttcactttgatatgtagataaatcttttgtttttgcagacagggtctcactttctcacccaggctagagtgcagtgggcatgatcagggcagccttactggagcctcaacctcccaagctcaagcaatcctctcacctcagcccccaaggagctgggactacaggtgcaggcccccacaccccactaacttttttatacttttttcgtctggaactcctgcaagcagccctcccacctcagcctcccaaagtgctggtaagacagccaggtgggaaggattccttggcagaatctccttttgacctgagcactgggaggaatgcaccctgtggtggagccttgggaaatttgcgccatttgcagtggggaggagcctggcccctccttttcctaggtggaacctgggattcagtctaccaggcaggaagcactctggctttggggagagtctctgtttccctttttttctttttgcccaataaattccattctcacccttcaaggcatctgtgagcctaatatttcatggccatgtgaccaggacccagctcttagctgaactaaggagaaagtcgtacaacagctttggcacccaatgtggggcttgagaagcggttgagtgacacggggactcaaaacttttcactgtcatttctaagccttttcatgcgtggacttctgagggtagggaaaccatgcccccactcccatcgctccctggggtcaggggcctttccatggcctttgccttcgttttttgggaaggataggcaagtcgcagctcctcattccctctcccctcccagctggggctggggaatgccacatgtccacagcatcttccccttccctggccaaggctcaactccatctgataagcttctctccctggtagaggaaccatttgcctaagaataaaaggtttattcccccaggcatccttttttcttcaccccatcaacagttaacttttaaaccagatgttttttttctttttcactaggctaggaatgataaggatccctgtttatattctccttaaagtttggttgtgaaaaaggatcttatggggactggttttcttctgcctgtctgtgtagctatatatatgttgtgtacatgatgtctatgaaaagagctcaaaggccaggcacggtggctcacacctgtaatcccagcacattgggaggctgagtcaggcagatcacctgaggtcgagagttcaagaccagcctgaccaacttggagaaaccccatctctactaaaaatacagaattagccaggcatggtggcacatgcctgtaatcccagctacttgggaggctgaggcaggagaatcacttaaacctgggaggtggagattgcactccagcgtgggcagcaggagcaaaactccatctc

SEQ ID NO: 90579 - DNA, 1796 bp, Artificial Sequence
  derived and/or modified sequence
gcactcgcaggtcgagcgggcgtcgtccacccttcggagccccgctttcatgcgtgaaattcccagaagtcgcctgcgaccgcctccctgcttcaaacaccagagagggcccggggtcctggccggagacaggccgaacctccggagctgcttctgcacccggtacattgatcgatctgatgggctgcgcgcccggaagagctggagagatgaagccagcgtccagcttctcccccaaaccacagcacgccgagctttgtccccggggagcgtgaagtcaccagctccgggaggcgacaatatgagggcgatggacggggcagggacccccggaagccccagcaatcctcagggaagtgggggtgccggaggagtcggggacaccctcaggcctctccaagcccggagcatccccagcgcccgcagccctgtgagacgccgggtgctctggtaatgggccctgccgccaggcctcggcgctttgtccccggcccgcccggggatgctaccacgctagagttgtacaccaaggtttgtcttcccaggaagcgctggcggctgcctttgggccgcctggcgcggagccccaggctgcaggcgccgcgtgtgcgggcgggaagttcccacagttgcaaagaggcagcgaagtatgtgttccaaactttccacggttccaaactgagcgcttccattaagagaagcggtgtgcgggggaaaagcattctgggtattagcatgcaaatgaacgggcccggcttccaactccgctcgggattcccaccgctgcgcgccgagctcgcgcccagccacgcgcgccctgaggcttccgggcgttgccctggcggatgatccgagttcaaaatcgagacctctgccttctggtttcgtgtcctggtgcttagtcacttggcctccctgagattcagttaaactgtttcttaacctgtgcacagggacagcagcacctgtcctgcacacctccgctctagggcatagtacatgccaaactcctgttggagagaatgaattagaggcatgaagaaagttccctggacacgaagccaggagatctgtgttctaagcccagactcactgtcaccttaggctagtgcctccctctctgagccacagctttcttgggcggattttgggaactggcacgttttatttttgagagagctgctgggaacatccacagagaaagagaaaggggccgggcgcggtggctcacgcctgttatcccagcactttgggaggctgaggcgggcggatcacctgaggtcgggagttcgagaccagtctgaccaacacggagaaaccccatctctactaaaaatacaaaactaggccgggcgcagtggctcatgcctgtaatcccagcactttgggaggtcgaggcaggcggatcacctgaggtcgggagttctagaccagcctgaccaacatggagaaaccccgtctctactaaaaatacaaaattagccgggcgtggtggcacatgcctgtaatctcagctactagagaggctgaggcaggagaatcgcttgaacctgggaggcggaggttgccgtgagccgagatcgtgccattgcactacagcctgggcaacaagagcgaaactccgtctcaaaaaaaaaaaaaatacaaaattagccgggcgtggtggcacatgcctataatccgagctactggggaggctgaggcaggagaatcacttgaacccgggaggcggagttgcggtgagccgagatcgcgccattgcactctagcctgggcaacaagagcaaaactgtttc

SEQ ID NO: 90580 - DNA, 921 bp, Artificial Sequence
  derived and/or modified sequence
atgagacagcacgacaccagaaacggcagaatcgtgctgatcagcggcagaagaagcttctgcagcatcttcagcgtgctgccctacagagacagcacccaggtgggcgacctgaagctggacggcggcagacagagcaccggcgccgtgagcctgaaggagatcatcggcctggagggcgtggagctgggcgccgacggcaagaccgtgagctacacccagttcctgctgcccaccaacgccttcggcgccagaagaaacaccatcgacagcaccagcagcttcagccagttcagaaacctgagccacagaagcctgagcatcggcagagccagcggcacccagggcagcctggacaccggcagcgacctgggcgacttcatggactacgaccccaacctgctggacgacccccagtggccctgcggcaagcacaagagagtgctgatcttccccagctacatgaccaccgtgatcgactacgtgaagcccagcgacctgaagaaggacatgaacgagaccttcaaggagaagttcccccacatcaagctgaccctgagcaagatcagaagcctgaagagagagatgagaaagctggcccaggaggactgcggcctggaggagcccaccgtggccatggccttcgtgtacttcgagaagctggccctgaagggcaagctgaacaagcagaacagaaagctgtgcgccggcgcctgcgtgctgctggccgccaagatcggcagcgacctgaagaagcacgaggtgaagcacctgatcgacaagctggaggagaagttcagactgaacagaagagagctgatcgccttcgagttccccgtgctggtggccctggagttcgccctgcacctgcccgagcacgaggtgatgccccactacagaagactggtgcagagcagctag

SEQ ID NO: 90581 - DNA, 921 bp, Artificial Sequence
  derived and/or modified sequence
atgcggcagcatgatacacgaaacggtcgtattgtgctcatcagtgggcgccgctctttctgtagcattttcagtgtcctcccctatcgcgattccactcaagtgggcgacctgaagctggacgggggccggcagtcaactggcgccgtgtcactcaaagagatcatagggcttgagggggtggaattgggagccgatggtaaaactgtcagttacactcaatttctgctccctacgaatgcttttggtgccagaagaaataccatcgactcgactagttcgttttcacagttcaggaatctctctcataggagtctctcaattggccgggcaagtggaacacagggctcacttgacacaggttctgacctaggcgactttatggattatgacccaaatctgctcgatgacccacagtggccatgtggcaagcacaagcgggtgcttattttcccctcatacatgactactgtcatcgactatgtgaagccatccgatttaaaaaaagacatgaatgagacctttaaggaaaaattcccccacatcaagctgaccctgtccaaaattcgttcactgaagcgtgaaatgcgcaagttagcgcaagaagattgcggcttggaggaaccaactgtggctatggcattcgtatactttgagaagctcgctctgaagggcaaactcaacaagcagaatagaaaactatgtgccggagcttgcgtgctgcttgcagccaagatcgggtcggacctgaaaaaacatgaggttaaacacctaatcgacaaactggaggagaaattcaggctgaacagacgcgaactgatcgcattcgaattccccgtcctggtcgccctcgagttcgccctgcaccttcctgagcatgaggtgatgccacattacaggagactggtgcagtcatcctag

SEQ ID NO: 90582 - DNA, 921 bp, Artificial Sequence
  derived and/or modified sequence
atgaggcagcacgacaccagaaatggaagaattgtgctgatctctggaagaagaagcttctgcagcatcttctctgtgctgccctacagagacagcacccaggtgggggacctgaagctggatggcggccggcagagcactggagctgtgtccctgaaggagatcatcggcctggagggcgtggagctgggcgcagatggcaagacagtgtcctacacccagttcctgctgcccaccaatgccttcggggcccggaggaacaccatcgacagcaccagcagcttcagccagttcaggaacctgagccacaggagcctgagcatcggccgggccagcggcacccagggcagcctggacaccggcagtgacctgggggacttcatggactatgaccccaacctgctggatgacccccagtggccctgtgggaagcacaagagggtgctgatcttccccagctacatgaccaccgtgattgattatgtgaagcccagcgacctgaagaaggacatgaatgagaccttcaaggagaagttcccccacatcaagctgaccctgagcaagatccgcagcctgaagcgggagatgaggaagctggcccaggaggactgtggcctggaggagcccaccgtggccatggcctttgtgtactttgagaagctggccctgaagggcaagctgaacaagcagaacaggaagctgtgtgccggggcctgtgtgctgctggccgccaagattggaagtgacctgaagaagcatgaggtgaagcacctgattgacaagctggaggagaagttccggctgaacagaagagagctgattgcctttgagttccctgtgctggtggccctggagtttgccctgcacctgcctgagcacgaggtgatgccccactaccgccgcctggtgcagagcagctag

SEQ ID NO: 90583 - DNA, 921 bp, Artificial Sequence
  derived and/or modified sequence
atgcggcagcacgacacccggaacggccggatcgtgctgatcagcggtaggcggagcttctgctctatcttctcggtgttgccttatcgagactccactcaggtcggagaccttaaactggacggggggagacaatcaaccggggccgtgagcttgaaggaaatcatcggcctggaaggagtcgagttgggagcagatgggaagactgtgtcctatacacaatttctcctgcctacaaacgcgtttggggccaggcggaacactatcgacagcacaagctctttttcccaattccgcaacctgtcccaccggtcattgtctatcggccgcgcttccggcacgcaaggcagtctcgacaccgggtctgacctgggggactttatggattacgaccccaacctcctcgacgatcctcagtggccctgtgggaagcataagcgtgtcctgatctttccaagctacatgactaccgtgattgattacgttaaaccctccgaccttaaaaaggacatgaatgaaacgttcaaagagaagtttcctcatattaaactcacactgtcaaagatccggtcacttaaacgcgagatgcgcaaactggcccaggaggactgcgggctggaggagcctaccgttgctatggccttcgtttattttgagaagctcgccttaaagggcaagcttaacaaacagaatcgcaaactgtgcgccggtgcttgcgtgcttcttgcagccaaaattggttctgatctcaaaaaacatgaagtgaagcacttaatcgataaactggaggagaagtttcgcctcaaccggagagagctgattgcattcgagtttcctgtgctggttgcgctcgagtttgcactgcaccttcccgaacacgaggttatgccacactaccgccggcttgtccagagctcctag

SEQ ID NO: 90584 - DNA, 921 bp, Artificial Sequence
  derived and/or modified sequence
atgaggcagcatgataccaggaatggcagaatcgtattaatttcaggccgtcggagtttttgttccattttcagtgtgcttccctatcgtgattcgacccaagtaggggacctgaagctggatggaggccgtcagtcaacaggtgcggtgtccttgaaagaaattatcgggcttgagggagtcgagctgggcgcagatggcaagaccgtgtcctacacccagttccttttgcccaccaacgccttcggggcaaggcgcaatactattgacagcacatcaagctttagccagttcagaaatctttcgcaccgctcactgtcaattggcagagccagtgggacgcaagggagcctcgacacgggcagcgacctgggggatttcatggattatgaccctaacctgttggatgatccacagtggccctgcggcaagcataagcgagtgctgatttttccatcatacatgacaactgtgattgactatgtgaagccatcagacctgaaaaaggatatgaatgagacttttaaggaaaagttcccccacattaaattaactctgtcaaaaatccggagcttgaaacgggagatgcgtaaattggctcaggaggactgcgggctcgaagaaccaactgttgccatggcctttgtgtatttcgagaaactggccctgaagggcaaactgaataagcagaacaggaagctctgcgctggagcctgtgtccttctcgcggcaaagattggttctgatctaaagaagcatgaagtgaaacacctaatcgacaaacttgaggaaaaattccggctcaacagacgtgaactaatcgcgttcgaattccccgtgcttgtcgctctggagtttgccctccacctgcctgagcacgaagttatgccacattaccgccgattggtccagagctcctag

SEQ ID NO: 90585 - protein, 299 aa, Artificial Sequence
  derived and/or modified sequence
MAASSSEISEMKGVEESPKVPGEGPGHSEAETGPPQVLAGVPDQPEAPQPGPNTTAAPVDSGPKAGLAPETTETPAGASETAQATDLSLSPGGESKANCSPEDPCQETVSKPEVSKEATADQGSRLESAAPPEPAPEPAPQPDPRPDSQPTPKPALQPELPTQEDPTPEILSESVGEKQENGAVVPLQAGDGEEGPAPEPHSPPSKKSPPANGAPPRVLQQLVEEDRMRRAHSGHPGSPRGSLSRHPSSQLAGPGVEGGEGTQKPRDYIILAILSCFCPMWPVNIVAFAYAVMVSPMGP

SEQ ID NO: 90586 - DNA, 900 bp, Artificial Sequence
  derived and/or modified sequence
atggctgccagtagtagcgaaattagcgagatgaagggagtggaagagagtcccaaggtgcctggcgagggacctggccattcagaggccgaaacaggacccccacaggttttggccggagtccctgatcagcctgaggcaccccagccagggcccaataccacagctgcacctgtggattctgggcctaaggctggtctggcccccgagactacagagacaccggccggagcgagtgaaacggctcaggcaaccgacctgagtttgtcgccaggaggggagtcaaaagctaactgctctcccgaggacccttgccaagagactgtgtcaaaaccagaggtctccaaagaagcgactgccgatcaagggagcaggcttgaatccgcggcacctcccgaaccggcccctgagcctgcaccccagcccgatcctcggcccgactctcaaccaactccaaaacctgcactgcagcctgagcttccaacccaggaggacccaactcctgagatcctttcagaatccgtgggcgaaaagcaagagaacggagcggtcgtgccattgcaagcaggggatggggaggagggccccgcccccgaaccacattcccctccctcaaagaaatctcctccggccaatggtgctcctccacgggtgctgcagcagctcgtggaggaggataggatgaggagagctcattcaggccatcccggctcgccacggggctcgctttctcgtcacccgagcagccagctagccggtcccggggtggagggcggggaaggcacacagaaaccgcgggactacattatcctcgccatcttaagctgcttttgccccatgtggccagtgaacattgtggcatttgcttatgctgtcatggtgtcgcctatgggcccttag

SEQ ID NO: 90587 - DNA, 900 bp, Artificial Sequence
  derived and/or modified sequence
atggccgccagcagcagcgagatcagcgagatgaagggcgtggaggagagccccaaggtgcctggagagggccctggccacagcgaggccgagaccggccccccccaggtgctggccggcgtgcctgaccagcctgaggccccccagcccggccccaacaccacagctgcccctgtggacagcggccccaaggccggcctggcccctgagaccacagagaccccagctggggccagcgagacagcccaggccacagacctgagcctgagccctggaggagagagcaaggccaactgcagccctgaggacccctgccaggagaccgtgtccaagccagaggtgtccaaggaggccacagctgaccagggcagccggctggagagcgctgcccctcctgagcccgcccctgagcccgccccccagcctgaccccaggccagacagccagcccacccccaagccagccctgcagcctgagctgcccacccaggaggaccccaccccagagatcctgtctgagagcgtgggggagaagcaggagaatggagctgtggtgcccctgcaggccggagatggagaggagggccctgcccctgagccccacagcccccccagcaagaagagccccccagccaacggggccccaccccgggtgctgcagcagctggtggaggaggacaggatgagaagagcccacagcggccaccctggcagcccccggggcagcctgagccgccaccccagcagccagctggccggccctggggtggagggcggggagggcacccagaagccccgggactacatcatcctggccatcctgagctgcttctgccccatgtggcctgtgaacatcgtggcctttgcctatgctgtgatggtgagccccatgggcccctag

SEQ ID NO: 90588 - DNA, 900 bp, Artificial Sequence
  derived and/or modified sequence
atggccgccagcagcagcgagatcagcgagatgaagggcgtggaggagagcccaaaggtgccaggagagggccctgggcatagcgaggccgagactggaccacctcaagtgttggctggggtgcccgaccaacccgaagccccgcagcccgggccaaatacaacagccgccccagtcgatagtggccctaaggccggtctggcccctgagacaacggaaacacccgccggggcatcagagacagcacaagctaccgacctgtctctgtccccaggaggcgaatctaaggccaactgctcccccgaggatccgtgtcaggagactgtgagcaagcccgaagtcagtaaagaggctacagcagatcaagggtccagactggagtccgccgcccccccagagccggcgcctgaacccgctccccagccagaccccaggcctgattctcagccgactccaaaacctgccctgcagccggagctgcccacccaagaggatccaaccccagaaattttatccgagtctgtgggcgaaaaacaggagaacggggcggtggtccctttgcaggccggagatggcgaggaggggccagcccccgagcctcactcccccccctccaagaagtcccctccggctaatggcgcaccccctcgagtcttgcagcaactggtggaagaagatcgcatgcgcagggcccattccggccaccctggctctcctcggggcagcctgtcccgacatccttctagccagctggcagggcctggagtggaggggggtgaaggtactcagaagccaagagactacataatcctggcaatattgtcatgtttctgccctatgtggccagtcaacatcgtagcatttgcgtacgccgttatggtttcacccatgggaccatag

SEQ ID NO: 90589 - DNA, 900 bp, Artificial Sequence
  derived and/or modified sequence
atggctgccagtagctccgagatctcagaaatgaaaggagtcgaggagagtccgaaagtgcctggggaaggccctggacatagtgaagctgaaacagggcctccgcaggtgctggcaggcgtcccagaccagccggaggctccgcagcctgggccaaacacgacggccgcacctgtcgattctggcccaaaggcaggcctggccccagagacaaccgagacgcccgctggcgcttccgagaccgcacaggccaccgacctatctctctcacctggcggagagtccaaagcgaactgtagcccagaagacccctgccaggagacagtaagcaaacctgaagtctcgaaggaggccactgccgatcaaggtagccggctggaaagtgctgcccctccagagccagcaccagagcctgctccacagcccgaccccaggccagactctcagcccaccccgaagccagcgctgcagcccgaactgcctacccaggaagaccccaccccagagatacttagcgaaagtgtgggagaaaagcaggaaaatggagccgttgttccactgcaggctggggatggggaggaaggccctgcccctgagccccatagtcctccatcaaaaaagagtccacccgcaaacggcgcaccacctcgggtactacagcagttggttgaggaggaccggatgcgtcgggctcatagcggtcaccctggttcgcctcgcggatcattgagcagacatccctccagccagctagccggtcctggggttgagggcggagagggcacacagaagccacgcgactacattattcttgctatcctgtcttgcttttgtcctatgtggcctgtgaacattgttgcgtttgcttacgcggtgatggtttcacccatggggccttag

SEQ ID NO: 90590 - DNA, 3000 bp, Artificial Sequence
  derived and/or modified sequence
agctgacttgctccctcccgggctgcggctgctgcaaaagccagcagcggcagcgggagctgtccggaggccggcgtcgaggtgagacccgggcagactgaggctgcggggtttgccgctgtctctgctattccatcctccccataggggctctctcccctctcccatctcaagatggcagccagcagctctgagatctctgagatgaagggggttgaggagagtcccaaggttccaggcgaagggcctggccattctgaagctgaaactggccctccccaggtcctagcaggggtaccagaccagccagaggccccgcagccaggtccaaacaccactgcggcccctgtggactcagggcccaaggctgggctggctccagaaaccacagagaccccggctggggcctcagaaacagcccaggccacagacctcagcttaagcccaggaggggaatcaaaggccaactgcagccccgaagacccatgccaagaaacagtgtccaaaccagaagtgagcaaagaggccactgcagaccaggggtccaggctggagtctgcagccccacctgaaccagccccagagcctgctccccaaccagacccccggccagattcccagcctacccccaagccagcccttcaaccagagctccctacccaggaggaccccacccctgagattctgtctgagagtgtaggggaaaagcaagagaatggggcagtggtgcccctgcaggctggtgatggggaagagggcccagcccctgagcctcactcaccaccctcaaaaaaatcccccccagccaatggggcccccccccgagtgctgcagcagctggttgaggaggatcgaatgagaagggcacacagtgggcatccaggatctccccgaggtagcctgagccgccaccccagctcccagttggcaggtcctggggtggaggggggtgaaggcacccagaaacctcgggactacatcatccttgccatcctgtcctgcttctgccccatgtggcctgtcaacatcgtggccttcgcttatgctgtcatggtgagccccatgggaccctagcccaggcctgctgtggctcccagcttcccgccagcgctgcaatagagcctctggagtaatcatgccttccttcccctctcctctctgcatggatcccacctccccaattccagggcctttgtttgcctctccctaggacctaaccctctgagccaccactgccctgcccctttgggtgggagggatatggaaacacgtgtcacacagcctcgctgacctgtgccctcctccccctgccccttcactcctccttcctcccttacccgccatctatggggctggcctctctctcttctggatgacttttccacctgatcccttctgggctggcttctcctgaccccggctatgtgcctccacccctcgccctaaccccagtcccggaacagcctgcagcagggggacgtggacggggcccagcgtctgggccgggtagccaagctcttaagcatcgtggcgctggtggggggagtcctcatcatcatcgcctcctgcgtcatcaacttaggcggtgagtgggggcttgggacaggcaggggaggaatggaagggttggcaagggcagctttactaacccctgcccctgctctctcctgtctgtcctccttacctctcctttgtctctccttgtctccccctccccccgtctgtccttccctctcctctcccacagtgtataagtgaggggctctgccccgcatcccaagacttttcttcctgttgggagctgccttgggcccatccctcccctggggggagcccaactgatggccctggcccccacccctaaggaccaagggagcctgagcggccttgtttacagcttctgtcctgctcctgcatcttgccaggctcctctgccaactgtaggcctgcctcatccctgcactggttccaacctccctgcactaatgcctgcatcccctccggcctcttggccccctatccctgcacttctggaaacctccctgcactctggaaacctccctgaacacctccccaactctgcgctctcagcctccctgcatctctcctggcctccctgcacttcttccagccccccaaattctctggacctccaccctggccgcctcctcccaactttcattgtcttggcatctctcaaccctcagtcctctcttccttcccttctttatcatctcccctttcctctccacgtcccgcccccttcctcttcctgcctcctcatctcccttaagcatcctcttctccaacctcccgtcaccgtttactctgcaaaattgacagcacttagacgaggcttgggggcagggagcagtgttgggagagggctccccaaccccaggctcggactgttctctgctgggaccacccagggtcggacacccaagggtgcctggcaggtcgcagagttggcaagccgggcctcgtatggggactcgggtgagggtggcgagtactggttccgaacgcacgcaggggagaagggagggacgcggcgctgacccttccaggtcagctggagttgacccgcccacctgggcttttcaaccccagtccgcgagtttctttcttgaaggtgtgggggctagattcattcacgtgcttcgtaatgaaataatccaaaaaataggaccaaagcgcccactggcaggagcgagggcggggcgccgcgctctataattattttctaagatgatgggggaggtttgttgcacgcgacagcccgctgaggaggcggggaccgagctacaacgcggttcggatttggcgggggtttttttccttaaaaaaaaaaaaaaaaaaaaaaaaaaagtctgggggaagaaaaaaactaaaattcttaaaaaaaaaaaaaaaaggctattatcaaactgatttctccctttttgtatgccggatgctgcatgagtctgaaacaccaataaacggagactgcatgag

SEQ ID NO: 90591 - DNA, 900 bp, Artificial Sequence
  derived and/or modified sequence
atggccgccagcagcagcgagatcagcgagatgaagggcgtggaggagagccccaaggtgcccggcgagggccccggccacagcgaggccgagaccggccccccccaggtgctggccggcgtgcccgaccagcccgaggccccccagcccggccccaacaccaccgccgcccccgtggacagcggccccaaggccggcctggcccccgagaccaccgagacccccgccggcgccagcgagaccgcccaggccaccgacctgagcctgagccccggcggcgagagcaaggccaactgcagccccgaggacccctgccaggagaccgtgagcaagcccgaggtgagcaaggaggccaccgccgaccagggcagcagactggagagcgccgccccccccgagcccgcccccgagcccgccccccagcccgaccccagacccgacagccagcccacccccaagcccgccctgcagcccgagctgcccacccaggaggaccccacccccgagatcctgagcgagagcgtgggcgagaagcaggagaacggcgccgtggtgcccctgcaggccggcgacggcgaggagggccccgcccccgagccccacagcccccccagcaagaagagcccccccgccaacggcgccccccccagagtgctgcagcagctggtggaggaggacagaatgagaagagcccacagcggccaccccggcagccccagaggcagcctgagcagacaccccagcagccagctggccggccccggcgtggagggcggcgagggcacccagaagcccagagactacatcatcctggccatcctgagctgcttctgccccatgtggcccgtgaacatcgtggccttcgcctacgccgtgatggtgagccccatgggcccctag

SEQ ID NO: 90592 - protein, 178 aa, Artificial Sequence
  derived and/or modified sequence
MSLQWTAVATFLYAEVFVVLLLCIPFISPKRWQKIFKSRLVELLVSYGNTFFVVLIVILVLLVIDAVREIRKYDDVTEKVNLQNNPGAMEHFHMKLFRAQRNLYIAGFSLLLSFLLRRLVTLISQQATLLASNEAFKKQAESASEAAKKYMEENDQLKKGAAVDGGKLDVGNAEVKLE

SEQ ID NO: 90593 - DNA, 741 bp, Artificial Sequence
  derived and/or modified sequence
atgagcctgcagtggaccgccgtggccaccttcctgtacgccgaggtgttcgtggtgctgctgctgtgcatccccttcatcagccccaagagatggcagaagatcttcaagagcagactggtggagctgctggtgagctacggcaacaccttcttcgtggtgctgatcgtgatcctggtgctgctggtgatcgacgccgtgagagagatcagaaagtacgacgacgtgaccgagaaggtgaacctgcagaacaaccccggcgccatggagcacttccacatgaagctgttcagagcccagagaaacctgtacatcgccggcttcagcctgctgctgagcttcctgctgagaagactggtgaccctgatcagccagcaggccaccctgctggccagcaacgaggccttcaagaagcaggccgagagcgccagcgaggccgccaagaagtacatggaggagaacgaccagctgaagaagggcgccgccgtggacggcggcaagctggacgtgggcaacgccgaggtgaagctggaggaggagaacagaagcctgaaggccgacctgcagaagctgaaggacgagctggccagcaccaagcagaagctggagaaggccgagaaccaggtgctggccatgagaaagcagagcgagggcctgaccaaggagtacgacagactgctggaggagcacgccaagctgcaggccgccgtggacggccccatggacaagaaggaggagtag

SEQ ID NO: 90594 - DNA, 549 bp, Artificial Sequence
  derived and/or modified sequence
atgagcctgcagtggaccgccgtggccaccttcctgtacgccgaggtgttcgtggtgctgctgctgtgcatccccttcatcagccccaagagatggcagaagatcttcaagagcagactggtggagctgctggtgagctacggcaacaccttcttcgtggtgctgatcgtgatcctggtgctgctggtgatcgacgccgtgagagagatcagaaagtacgacgacgtgaccgagaaggtgaacctgcagaacaaccccggcgccatggagcacttccacatgaagctgttcagagcccagagaaacctgtacatcgccggcttcagcctgctgctgagcttcctgctgagaagactggtgaccctgatcagccagcaggccaccctgctggccagcaacgaggccttcaagaagcaggccgagagcgccagcgaggccgccaagaagtacatggaggagaacgaccagctgaagaagggcgccgccgtggacggcggcaagctggacgtgggcaacgccgaggtgaagctggaggaggagaacagatag

SEQ ID NO: 90595 - DNA, 537 bp, Artificial Sequence
  derived and/or modified sequence
atgagcctgcagtggaccgccgtggccaccttcctgtacgccgaggtgttcgtggtgctgctgctgtgcatccccttcatcagccccaagagatggcagaagatcttcaagagcagactggtggagctgctggtgagctacggcaacaccttcttcgtggtgctgatcgtgatcctggtgctgctggtgatcgacgccgtgagagagatcagaaagtacgacgacgtgaccgagaaggtgaacctgcagaacaaccccggcgccatggagcacttccacatgaagctgttcagagcccagagaaacctgtacatcgccggcttcagcctgctgctgagcttcctgctgagaagactggtgaccctgatcagccagcaggccaccctgctggccagcaacgaggccttcaagaagcaggccgagagcgccagcgaggccgccaagaagtacatggaggagaacgaccagctgaagaagggcgccgccgtggacggcggcaagctggacgtgggcaacgccgaggtgaagctggagtag

SEQ ID NO: 90596 - DNA, 564 bp, Artificial Sequence
  derived and/or modified sequence
atgagcctgcagtggaccgccgtggccaccttcctgtacgccgaggtgttcgtggtgctgctgctgtgcatccccttcatcagccccaagagatggcagaagatcttcaagagcagactggtggagctgctggtgagctacggcaacaccttcttcgtggtgctgatcgtgatcctggtgctgctggtgatcgacgccgtgagagagatcagaaagtacgacgacgtgaccgagaaggtgaacctgcagaacaaccccggcgccatggagcacttccacatgaagctgttcagagcccagagaaacctgtacatcgccggcttcagcctgctgctgagcttcctgctgagaagactggtgaccctgatcagccagcaggccaccctgctggccagcaacgaggccttcaagaagcaggccgagagcgccagcgaggccgccaagaagtacatggaggagaacgaccagctgaagaagggcgccgccgtggacggcggcaagctggacgtgggcaacgccgaggtgaagctggaggaggagaacagaagcctgaaggccgactag

SEQ ID NO: 90597 - DNA, 417 bp, Artificial Sequence
  derived and/or modified sequence
atgagcctgcagtggaccgccgtggccaccttcctgtacgccgaggtgttcgtggtgctgctgctgtgcatccccttcatcagccccaagagatggcagaagatcttcaagagcagactggtggagctgctggtgagctacggcaacaccttcttcgtggtgctgatcgtgatcctggtgctgctggtgatcgacgccgtgagagagatcagaaagtacgacgacgtgaccgagaaggtgaacctgcagaacaaccccggcgccatggagcacttccacatgaagctgttcagagcccagagaaacctgtacatcgccggcttcagcctgctgctgagcttcctgctgagaagactggtgaccctgatcagccagcaggccaccctgctggccagcaacgaggccttcaagaagtag

SEQ ID NO: 90598 - DNA, 567 bp, Artificial Sequence
  derived and/or modified sequence
atgagcctgcagtggaccgccgtggccaccttcctgtacgccgaggtgttcgtggtgctgctgctgtgcatccccttcatcagccccaagagatggcagaagatcttcaagagcagactggtggagctgctggtgagctacggcaacaccttcttcgtggtgctgatcgtgatcctggtgctgctggtgatcgacgccgtgagagagatcagaaagtacgacgacgtgaccgagaaggtgaacctgcagaacaaccccggcgccatggagcacttccacatgaagctgttcagagcccagagaaacctgtacatcgccggcttcagcctgctgctgagcttcctgctgagaagactggtgaccctgatcagccagcaggccaccctgctggccagcaacgaggccttcaagaagcaggccgagagcgccagcgaggccgccaagaagtacatggaggagaacgaccagctgaagaagggcgccgccgtggacggcggcaagctggacgtgggcaacgccgaggtgaagctggaggaggagaacagaagcctgaaggccgacctgtag

SEQ ID NO: 90599 - DNA, 741 bp, Artificial Sequence
  derived and/or modified sequence
atgtctttgcaatggaccgccgttgctacattcctgtatgctgaggtctttgttgtcctcttgctctgcatcccattcatatccccaaaaaggtggcagaaaatcttcaaaagtaggctcgtagagctgcttgtctcgtatggtaacacatttttcgttgtcctgattgtaattttggtcctgctggtgatcgatgcagtgagagagatcaggaagtacgacgacgtgactgaaaaagtgaatctccagaataaccccggcgccatggagcacttccacatgaagttattcagagcacaacgaaacctctacattgcagggttctctttgctgctgtccttcttactgaggagactggttaccctcatctcccagcaggctacattactggctagtaacgaagcttttaaaaagcaggccgagtcagcctctgaggctgccaaaaaatatatggaggagaacgaccaattaaagaagggagccgcagtcgatggagggaaactggatgtgggcaatgccgaagttaagctggaagaggaaaatcgatccctgaaggctgacttgcagaagttaaaggatgaactggccagtaccaagcagaaactggagaaggccgagaaccaggtgctggcgatgcgcaagcagtctgaggggcttaccaaggagtacgataggctgctggaggagcacgccaagctgcaagccgccgtagacggacctatggataagaaggaggagtag

SEQ ID NO: 90600 - DNA, 549 bp, Artificial Sequence
  derived and/or modified sequence
atgagcctccagtggacagccgtagcaaccttcctttacgccgaggtattcgtggtcttgctgctatgtatacctttcatcagccccaagcgctggcaaaagatcttcaagagccggctggttgagcttctggtgagctacggaaacacatttttcgttgttcttatagttattctcgtgcttctcgtcatcgatgccgttcgtgaaattagaaagtatgacgatgtgaccgagaaggtgaaccttcagaataaccccggggccatggaacattttcacatgaaactctttcgcgcgcagagaaacctttatatagccgggttctcactactcctttcgtttctgctgcgccggttggttaccttgatatcccaacaggccacacttttggcctctaatgaggcctttaaaaagcaggcagagtcagcgtcagaagcagctaaaaagtatatggaggagaatgaccagctgaagaagggcgctgcagtggatggcggtaaactggacgtcggcaatgctgaggtcaagctggaggaggagaatcgctag

SEQ ID NO: 90601 - DNA, 537 bp, Artificial Sequence
  derived and/or modified sequence
atgagcctgcagtggacagctgttgccaccttcctgtacgccgaggttttcgtagtgcttttgctttgcatcccgtttatcagcccaaagcggtggcagaagatcttcaagtcccggctggtggaactcctggtatcttacggcaataccttcttcgtggtgttgatcgtaatcctcgtgttgctggttattgatgccgtcagggagatcagaaaatatgacgacgtgactgagaaagtgaatctccagaacaaccctggcgctatggaacactttcacatgaaactgttccgagcacagagaaatttatacattgccgggtttagtttgctgcttagctttctgcttcgcaggctggtgaccctgatctcccagcaggccaccctcttagcctctaatgaggctttcaaaaagcaggctgaatctgcctcagaagcagccaagaaatatatggaggaaaatgaccagttgaaaaaaggggccgctgtcgatggtggaaaactggatgtgggcaacgccgaggtgaaattagagtag

SEQ ID NO: 90602 - DNA, 564 bp, Artificial Sequence
  derived and/or modified sequence
atgagtctgcaatggacagccgtggctacctttctctacgctgaagtctttgtggtgctcctgctatgcattccctttatctctccaaaacggtggcagaagatctttaaaagccgactggtcgagctgctcgtaagctacggcaacacttttttcgtggtgctgatcgttatacttgtactgctcgtgattgacgcagtacgagagattcgtaagtatgacgacgttacagagaaagtcaacctgcagaacaacccaggtgccatggagcactttcatatgaagctctttcgagcccagcgcaacttgtacatcgctggatttagcctgttgctgtcctttctcctgaggagactcgtgacactgatttcacagcaggccacgctgctagcaagcaacgaggcgttcaagaaacaggctgaaagtgcatcagaggctgctaaaaagtacatggaagaaaacgaccagcttaaaaaaggcgcagcagtggacggaggtaagctggatgtaggaaacgcagaggttaaattggaggaagagaaccgaagccttaaggcagactag

SEQ ID NO: 90603 - DNA, 417 bp, Artificial Sequence
  derived and/or modified sequence
atgtctctccagtggactgcggttgcaacatttctatacgccgaggtgttcgtggtcttgcttctctgcattccgtttatatcgccaaagcgctggcagaaaatattcaagtcccggctagttgagttgctggtgtcatacggcaacactttcttcgtagtgctgatcgtgatcctggtgctgctggtgatcgatgctgtccgcgaaattcggaagtacgatgatgtaactgaaaaggttaacttgcagaacaaccccggcgccatggaacatttccatatgaagttattccgcgctcagcgcaatctgtatatcgctgggtttagcctcttgctgagctttttgttgcgtcgcctggtcactctaatttcgcagcaagctactctgctggctagtaatgaagcttttaaaaagtag

SEQ ID NO: 90604 - DNA, 741 bp, Artificial Sequence
  derived and/or modified sequence
atgtctcttcagtggaccgcagttgcaaccttcctctacgccgaagtgtttgttgtgttattgctctgcataccttttatcagtcccaaacgctggcagaagattttcaaatcacgcctggtggagctgctggtttcctacggcaacacttttttcgtggtgctgatagtgatcttggtgctgctggtgatcgatgctgtacgcgagattcggaaatacgatgatgtgaccgagaaggtcaatctacagaacaatccaggggcaatggagcacttccacatgaaactgttccgagctcagcgaaatctgtacatcgccggattttctttactgctctcatttttattgagaagactcgtcacactgatatcgcaacaagctactctccttgcctctaacgaggccttcaaaaagcaggccgagtccgcttctgaggcagccaaaaaatatatggaggaaaatgaccaacttaagaaaggtgctgccgtggacgggggcaagttggatgtggggaacgctgaggtgaaactggaagaagaaaaccgctcccttaaagcggatttgcaaaaattgaaggacgaactggcgtctacaaaacaaaaactggaaaaagccgagaaccaggtcctggctatgaggaagcagtccgagggcctgacaaaagagtacgaccgactcctcgaggaacacgccaaacttcaggcagctgttgacgggcccatggacaagaaagaggagtag

SEQ ID NO: 90605 - DNA, 567 bp, Artificial Sequence
  derived and/or modified sequence
atgtcactgcaatggaccgctgtcgctacatttctatacgcagaagtatttgttgtgctcctgctctgtattccgtttatatcacccaagcgttggcagaagatttttaagagtagactggtggaactcttggtgtcttatggcaataccttcttcgtggtcctgatcgttatcctggtcttactggtaatcgatgctgtgagagagatacggaagtatgatgacgttacagagaaagtgaacctgcagaacaacccgggcgctatggaacatttccacatgaagctctttcgagcgcagcgaaacctttacatcgctggcttctctctgcttctgtcatttttactgcgcagactagtcaccttgattagccagcaggcgacactgctggcttccaatgaagcattcaagaagcaggctgaatctgcatctgaggccgcaaaaaagtatatggaggagaatgaccagcttaagaaaggagccgcggtcgacggggggaagttagacgtcggtaacgcggaggtgaagctggaggaggagaatcggtcactaaaggccgacctgtag

SEQ ID NO: 90606 - DNA, 741 bp, Artificial Sequence
  derived and/or modified sequence
atgagcctgcagtggacagctgtggccaccttcctgtatgcagaggtgtttgtggtgctgctgctgtgcatccccttcatcagccccaagcgctggcagaagatcttcaagagccggctggtggagctgctggtgtcctatggcaacaccttctttgtggtgctgattgtcatcctggtgctgctggtgattgatgctgtgcgggagatcagaaaatatgatgatgtgacagagaaggtgaacctgcagaacaaccctggggccatggagcacttccacatgaagctgttccgggcccagaggaacctgtacatcgccggcttcagcctgctgctgtccttcctgctgcggcggctggtgaccctcatcagccagcaggccaccctgctggccagcaatgaggccttcaagaagcaggccgagagcgccagcgaggccgccaagaagtacatggaggagaatgaccagctgaagaagggagctgctgtggatggcggcaagctggatgtgggcaatgctgaggtgaagctggaggaggagaacagaagcctgaaggctgacctgcagaagctgaaggatgagctggccagcaccaagcagaagctggagaaggccgagaaccaggtgctggccatgaggaagcagagcgagggcctgaccaaggagtatgaccggctgctggaggagcacgccaagctgcaggccgctgtggatggccccatggacaagaaggaggagtag

SEQ ID NO: 90607 - DNA, 549 bp, Artificial Sequence
  derived and/or modified sequence
atgagcctgcagtggacagctgtggccaccttcctgtatgcagaggtgtttgtggtgctgctgctgtgcatccccttcatcagccccaagcgctggcagaagatcttcaagagccggctggtggagctgctggtgtcctatggcaacaccttctttgtggtgctgattgtcatcctggtgctgctggtgattgatgctgtgcgggagatcagaaaatatgatgatgtgacagagaaggtgaacctgcagaacaaccctggggccatggagcacttccacatgaagctgttccgggcccagaggaacctgtacatcgccggcttcagcctgctgctgtccttcctgctgcggcggctggtgaccctcatcagccagcaggccaccctgctggccagcaatgaggccttcaagaagcaggccgagagcgccagcgaggccgccaagaagtacatggaggagaatgaccagctgaagaagggagctgctgtggatggcggcaagctggatgtgggcaatgctgaggtgaagctggaggaggagaacagatag

SEQ ID NO: 90608 - DNA, 537 bp, Artificial Sequence
  derived and/or modified sequence
atgagcctgcagtggacagctgtggccaccttcctgtatgcagaggtgtttgtggtgctgctgctgtgcatccccttcatcagccccaagcgctggcagaagatcttcaagagccggctggtggagctgctggtgtcctatggcaacaccttctttgtggtgctgattgtcatcctggtgctgctggtgattgatgctgtgcgggagatcagaaaatatgatgatgtgacagagaaggtgaacctgcagaacaaccctggggccatggagcacttccacatgaagctgttccgggcccagaggaacctgtacatcgccggcttcagcctgctgctgtccttcctgctgcggcggctggtgaccctcatcagccagcaggccaccctgctggccagcaatgaggccttcaagaagcaggccgagagcgccagcgaggccgccaagaagtacatggaggagaatgaccagctgaagaagggagctgctgtggatggcggcaagctggatgtgggcaatgctgaggtgaagctggagtag

SEQ ID NO: 90609 - DNA, 564 bp, Artificial Sequence
  derived and/or modified sequence
atgagcctgcagtggacagctgtggccaccttcctgtatgcagaggtgtttgtggtgctgctgctgtgcatccccttcatcagccccaagcgctggcagaagatcttcaagagccggctggtggagctgctggtgtcctatggcaacaccttctttgtggtgctgattgtcatcctggtgctgctggtgattgatgctgtgcgggagatcagaaaatatgatgatgtgacagagaaggtgaacctgcagaacaaccctggggccatggagcacttccacatgaagctgttccgggcccagaggaacctgtacatcgccggcttcagcctgctgctgtccttcctgctgcggcggctggtgaccctcatcagccagcaggccaccctgctggccagcaatgaggccttcaagaagcaggccgagagcgccagcgaggccgccaagaagtacatggaggagaatgaccagctgaagaagggagctgctgtggatggcggcaagctggatgtgggcaatgctgaggtgaagctggaggaggagaacagaagcctgaaggctgactag

SEQ ID NO: 90610 - DNA, 417 bp, Artificial Sequence
  derived and/or modified sequence
atgagcctgcagtggacagctgtggccaccttcctgtatgcagaggtgtttgtggtgctgctgctgtgcatccccttcatcagccccaagcgctggcagaagatcttcaagagccggctggtggagctgctggtgtcctatggcaacaccttctttgtggtgctgattgtcatcctggtgctgctggtgattgatgctgtgcgggagatcagaaaatatgatgatgtgacagagaaggtgaacctgcagaacaaccctggggccatggagcacttccacatgaagctgttccgggcccagaggaacctgtacatcgccggcttcagcctgctgctgtccttcctgctgcggcggctggtgaccctcatcagccagcaggccaccctgctggccagcaatgaggccttcaagaagtag

SEQ ID NO: 90611 - DNA, 567 bp, Artificial Sequence
  derived and/or modified sequence
atgagcctgcagtggacagctgtggccaccttcctgtatgcagaggtgtttgtggtgctgctgctgtgcatccccttcatcagccccaagcgctggcagaagatcttcaagagccggctggtggagctgctggtgtcctatggcaacaccttctttgtggtgctgattgtcatcctggtgctgctggtgattgatgctgtgcgggagatcagaaaatatgatgatgtgacagagaaggtgaacctgcagaacaaccctggggccatggagcacttccacatgaagctgttccgggcccagaggaacctgtacatcgccggcttcagcctgctgctgtccttcctgctgcggcggctggtgaccctcatcagccagcaggccaccctgctggccagcaatgaggccttcaagaagcaggccgagagcgccagcgaggccgccaagaagtacatggaggagaatgaccagctgaagaagggagctgctgtggatggcggcaagctggatgtgggcaatgctgaggtgaagctggaggaggagaacagaagcctgaaggctgacctgtag

SEQ ID NO: 90612 - DNA, 741 bp, Artificial Sequence
  derived and/or modified sequence
atgagcctgcagtggaccgccgtggccaccttcctgtacgccgaggtgttcgtggtcctgctcctctgcatcccctttatctcgcctaaacgctggcagaaaatatttaaaagtaggctggtggaactgctggtgagctacggtaacacattcttcgtggtcctgatcgtcatattggtgctcctggtgatcgatgccgtcagagaaattaggaagtacgatgatgtcacagaaaaggtcaacctccagaacaatcccggggctatggagcattttcacatgaagctatttcgggcccaaagaaatctttacatcgcagggttttccctgctgttgagcttccttctgcgtaggctcgtcaccttgatttcacagcaggcaaccctgctggcttctaatgaagcattcaaaaaacaggctgagtctgcgtctgaagctgccaagaagtatatggaggagaacgatcaactgaaaaagggggccgccgtggacggcgggaagttagacgtcggaaacgccgaagtgaaactcgaggaggaaaacagatcgctgaaagcagatcttcaaaaactcaaggacgagcttgcatcaaccaaacaaaaactggaaaaagctgagaaccaagtccttgccatgagaaaacaatccgaggggctgaccaaggaatacgatcgcctactggaggaacatgccaaacttcaggctgccgtagacggcccaatggataagaaggaggagtag

SEQ ID NO: 90613 - DNA, 549 bp, Artificial Sequence
  derived and/or modified sequence
atgagcctgcagtggaccgccgtggccaccttcctgtacgccgaggtgttcgtggtcctgctattgtgtatacctttcatctccccgaagcgatggcagaaaatcttcaaatcccggctagtagagctgctggtgtcttacggaaacactttcttcgtcgtacttatcgtgatccttgttctgctcgtcattgacgctgttcgggagattcgcaagtatgacgacgtgaccgagaaggtgaatctccagaacaatcccggggcaatggaacattttcatatgaagctgtttagggcacagaggaacctatatattgctggcttcagcctgttgcttagttttctgctacgccggctggttacattaatctcacaacaggctacgctgttggcctccaatgaagcctttaagaagcaggccgaatccgccagcgaggctgccaaaaaatacatggaagaaaatgatcaactgaagaaaggagctgctgtggatggcggaaaactagatgtgggcaacgctgaagtgaagttggaggaagagaatcgatag

SEQ ID NO: 90614 - DNA, 537 bp, Artificial Sequence
  derived and/or modified sequence
atgagcctgcagtggaccgccgtggccaccttcctgtacgccgaggtctttgtcgtgcttctgctctgcattccatttatttcgccaaagaggtggcagaagatattcaaaagccgcttggtggagcttctcgtgtcttacggcaacacatttttcgttgtattaatcgtcatcctcgtgttgctggttattgacgctgtgagggaaatccgcaagtacgatgatgtgaccgagaaggtaaacctgcagaacaaccccggcgctatggagcacttccacatgaaactgttccgagcccagcgcaacttgtacattgcagggttttcactgttactgtcatttctgctgagacgcctcgtcacacttatctctcaacaggccacactgctggcatcaaatgaggcttttaagaagcaggctgagtcggcttccgaggccgcgaaaaaatatatggaggagaatgaccaactcaagaagggagccgctgtggatggtggaaagctggacgtgggaaatgccgaggtgaaactcgaatag

SEQ ID NO: 90615 - DNA, 564 bp, Artificial Sequence
  derived and/or modified sequence
atgagcctgcagtggaccgccgtggccaccttcctgtacgccgaggtcttcgtggtgctgctgttatgtatcccttttattagcccaaaacggtggcaaaaaatattcaagtctcgactggtggagttactcgtgtcatatgggaatacattcttcgttgtcctgatcgtaattctagttctccttgttatagatgctgtgcgggaaatcaggaagtatgacgatgtaaccgaaaaggttaatctgcaaaataatcccggcgcaatggagcacttccacatgaagctgttcagagctcagagaaatctgtacattgctggcttttcattgttgctctccttcttgctccgcagattagttaccctgatcagccagcaagccacactgctggctagtaatgaagctttcaaaaaacaagccgaatctgcgtcggaggctgcaaagaagtatatggaggagaacgatcaactcaaaaaaggggcggccgtggacggaggcaaactagacgtgggaaacgccgaggtcaagctggaggaggagaaccgctcactgaaagcagattag

SEQ ID NO: 90616 - DNA, 417 bp, Artificial Sequence
  derived and/or modified sequence
atgagcctgcagtggaccgccgtggccaccttcctgtacgccgaggtgttcgtcgtgctgttgctttgcatcccattcatcagccccaagagatggcaaaagatctttaaatcccgtctcgtagaattgctggtttcttatgggaacacattcttcgtagtcctaatcgtaattctggtgctcctggttatcgatgctgtcagggagattcggaaatacgatgacgtgaccgagaaggtgaatcttcagaataacccaggcgccatggagcatttccatatgaagctcttccgcgctcaacgaaatctgtatatagctggattttctcttttactgagcttcctgctgcggcggctggtgaccctcattagtcaacaggcaacactcctagcaagtaacgaagcctttaagaaatag

SEQ ID NO: 90617 - DNA, 741 bp, Artificial Sequence
  derived and/or modified sequence
atgagcctgcagtggaccgccgtggccaccttcctgtacgccgaggtgttcgtagttttgctgctgtgcatccccttcattagtccaaagcggtggcagaaaatctttaagtcacgcttagtggagctccttgtgtcttatggtaacacttttttcgtggtacttatcgtcatcctcgtcctccttgtgattgatgctgtacgcgaaattagaaagtatgacgacgtaacggagaaggtcaaccttcaaaacaacccaggagccatggagcactttcacatgaaattgtttcgagcccaacggaatctttacatcgccgggttcagcctcctgctgtcattcttgctccggcgtctcgtgacactcatcagtcagcaggccactctccttgctagcaacgaagcatttaaaaagcaagcagaaagcgcgtcagaagccgcaaaaaaatatatggaagaaaatgaccaactcaaaaagggcgctgccgttgacggcggaaaactcgacgtgggaaatgccgaggtgaaactggaagaggagaataggagccttaaagccgatttgcagaagctcaaagatgagctggcttccaccaaacagaaactggagaaagccgaaaaccaggtcttggccatgcgcaaacaaagtgaggggcttacaaaagaatatgataggttactggaggaacatgccaagctccaggcagctgttgacggcccaatggacaaaaaagaagaatag

SEQ ID NO: 90618 - DNA, 567 bp, Artificial Sequence
  derived and/or modified sequence
atgagcctgcagtggaccgccgtggccaccttcctgtacgccgaggtctttgtagtgctgctgttgtgtatcccttttatctctccaaaacgctggcagaaaatctttaaatctcgcctggtggaactacttgtatcttacggaaatacattttttgtggtcctgatcgtgattcttgtgcttctcgtcatcgacgcagtgcgcgagattcggaaatacgacgacgtcaccgaaaaggtgaatttgcagaataacccaggagcaatggagcacttccacatgaaactgtttcgggcacagaggaacttgtacattgctgggttcagcctgctcctgagctttctcctacgccgccttgttactttgatcagtcagcaggctaccctacttgcctcaaatgaagcattcaagaaacaggccgaaagcgccagcgaggctgccaagaagtatatggaagaaaacgaccagcttaaaaaaggggcagctgttgatggcggtaaactcgatgtgggaaacgccgaggtgaagttggaggaagagaaccggtcgctgaaagccgatctctag

SEQ ID NO: 90619 - DNA, 741 bp, Artificial Sequence
  derived and/or modified sequence
atgtctctgcagtggaccgctgttgccaccttcttatacgctgaggtgtttgtagtactgctactgtgcatccccttcatctcacctaaaagatggcagaagatattcaagagtaggctggtggagttgctcgtgagctatggaaacacttttttcgtcgtcctcatagttatccttgtgcttctggtgatcgacgcggtcagggaaatacggaaatatgatgatgttaccgagaaagtgaatttgcagaataaccccggagcaatggaacacttccacatgaagctgtttcgcgctcagcgcaatctgtacatagccggattcagtcttctgctgagcttcctgctgcggagactggtgacattgatcagccagcaagcaaccttgctagcctctaatgaagccttcaaaaagcaggctgagagcgccagcgaggccgctaagaaatatatggaggagaatgatcagctcaagaaaggcgcagccgtggatggcggtaagctcgatgtcggaaacgctgaagtgaaattggaagaggagaaccgatcgcttaaggctgacttacagaagctcaaggacgagctggccagcacaaaacaaaagttagagaaggccgaaaaccaggtgttagcgatgcggaaacagtcagaaggcctgacaaaagaatacgacaggctgttagaggaacatgccaagctgcaggctgccgttgatgggccaatggataaaaaggaggagtag

SEQ ID NO: 90620 - DNA, 549 bp, Artificial Sequence
  derived and/or modified sequence
atgagtctgcagtggactgcggtggcaacttttctgtatgccgaggtcttcgtggtcctgctgctgtgtattccatttatctcaccaaagaggtggcaaaagattttcaaaagcagacttgttgagctgttggtttcttacggcaacaccttcttcgtggtcctcattgttatactcgtactgctggtcattgacgcagttcgagaaatcaggaagtacgacgacgttacggaaaaagtcaatctgcaaaacaatcctggcgctatggaacatttccatatgaaactgttccgagcccagcgcaacctgtacatcgcgggtttcagtctactgttgtcttttttgctcaggagactcgtgacactcatcagccagcaagctacacttctagcctcaaacgaggccttcaagaagcaggcggaatcggccagtgaggcggctaagaaatacatggaagagaacgatcaactaaagaaaggcgcagcagtggacggaggaaagctcgatgtggggaacgccgaagtcaagctcgaagaggaaaacagatag

SEQ ID NO: 90621 - DNA, 537 bp, Artificial Sequence
  derived and/or modified sequence
atgtctctccagtggacagccgtcgctacatttctgtacgctgaagtcttcgtcgtgctccttttgtgcataccattcatttcccccaagagatggcagaaaatcttcaagtcccggctggtagagcttctggtttcttatggaaatacattttttgttgtactgatagtcattctggtactgcttgttattgatgctgttcgcgaaatccgcaagtatgacgacgtgactgaaaaagtgaaccttcaaaacaacccaggagcaatggagcattttcacatgaaactctttcgggctcagcgtaatttgtatattgccggttttagtctgctcctctcctttctgctaagacgactcgtaaccctgatatcccaacaggccacactgctcgcctccaatgaggcgttcaaaaagcaggctgagtcagccagtgaggccgctaaaaagtatatggaagaaaatgatcagctgaaaaagggagctgccgttgatgggggaaaattagacgtcgggaacgcagaagtcaaacttgagtag

SEQ ID NO: 90622 - DNA, 564 bp, Artificial Sequence
  derived and/or modified sequence
atgtcattgcagtggactgcagtggccaccttcctctatgctgaggttttcgtggtgcttctgctgtgtatcccatttatcagtcccaagcgatggcagaagatctttaaatcccgcctcgtggaactgctggtttcctacggaaatacttttttcgttgtgttaattgtgatcctggtgcttctagtcattgatgctgtgcgagaaatccgaaaatatgatgacgtgacagagaaagtgaatctgcagaacaaccccggtgctatggagcatttccatatgaaactttttcgagcccagagaaacctctatatagcagggttctctcttctactttcttttttattgcgtaggctggtcactctgatctcacagcaggcaacgctcctggccagcaacgaagcttttaagaagcaagccgaaagcgcttctgaggctgctaaaaaatacatggaagagaacgaccagctcaagaagggagcagccgtcgatgggggtaagctggatgtgggaaatgccgaagtgaaactcgaggaagagaatagatcgctgaaagccgattag

SEQ ID NO: 90623 - DNA, 417 bp, Artificial Sequence
  derived and/or modified sequence
atgtccctgcagtggactgcagtagctacttttttgtacgccgaggtgtttgttgttctgctgctgtgtatacccttcattagccccaagaggtggcagaaaatttttaaatcaagattggtcgagctgctggtatcctatggaaatactttcttcgtggttttgatagtcatcctcgtgctcctagtcatcgacgccgttagggaaatacgaaaatacgacgatgtgaccgagaaggtcaatttgcagaacaaccccggagcgatggagcacttccacatgaagttatttcgagcacagcgcaatctctatatcgctggattttccctgctgctttcattcttgctcagaagactggtcacattaatatctcagcaggcaacacttctcgcgagtaatgaagctttcaaaaaatag

SEQ ID NO: 90624 - DNA, 741 bp, Artificial Sequence
  derived and/or modified sequence
atgtctctccaatggaccgcagtggcaacctttctctacgcagaggtattcgtagtgctgctgttgtgcatccccttcatcagcccaaaacgatggcaaaaaatctttaagtcaagactcgtcgaactcctggtgagttatggcaacacttttttcgttgtgctgatcgtgatcctcgtgctactggtgatcgatgctgtccgggagataaggaaatatgatgacgtcacagaaaaggtcaacttacagaacaacccaggagccatggaacattttcacatgaaactctttagggctcagagaaacctatatatcgccggatttagcttacttctgagctttctcctgaggagacttgtaaccctgatctcccagcaggctaccctactagcttccaacgaggccttcaaaaagcaggcagaaagcgccagcgaggctgctaagaagtacatggaggagaacgatcaactaaagaaaggcgcagccgtcgacggagggaagctagacgtcggaaacgcagaagtgaagcttgaggaggagaacagatcactaaaggctgatctacagaagctgaaggacgagcttgcgagcacaaaacagaaactggagaaggcagagaaccaggtgttggctatgcgcaagcagtctgagggactgaccaaagagtacgacagacttcttgaagagcatgcaaagctgcaggctgctgttgacggcccaatggacaaaaaggaagaatag

SEQ ID NO: 90625 - DNA, 567 bp, Artificial Sequence
  derived and/or modified sequence
atgagcctccaatggacagctgtggccactttcctgtatgctgaggtgttcgtggtgttgctgttgtgtatcccattcatatccccgaagaggtggcagaagatttttaaaagtcgactcgtcgaattgcttgtctcttacggcaacacattcttcgtggtccttatagtaatactggttttgttggtgattgatgcagtcagggagattagaaaatatgatgacgtaaccgagaaggtcaatttgcagaataacccaggcgctatggagcacttccacatgaaactgttcagagcacagagaaacctgtatattgcaggtttttcactattgctgagtttcctgctcaggagactggtcaccctgatcagccagcaagccacactgttggcctctaatgaagcttttaagaaacaagcggagagtgcctccgaggccgctaaaaagtacatggaggagaacgaccagctgaaaaagggagctgctgtggatggtggaaaactggatgtaggcaacgcagaagtgaaattggaagaggagaacagatccttgaaggccgacctatag

SEQ ID NO: 90626 - DNA, 741 bp, Artificial Sequence
  derived and/or modified sequence
atgagcttgcagtggactgcagtggccacgttcctctacgccgaggtgtttgttgtcctgctgctttgcattccctttatctctcccaagcgctggcagaagatttttaaaagccggcttgtcgagctattagttagttatggcaacacctttttcgtagttctgattgtaatcctggtcctgctggtcatcgatgccgtgcgggagattcgcaaatacgacgacgtgactgaaaaggtaaacttacagaacaatccaggcgcaatggagcactttcacatgaaactgttccgggcacagagaaatctgtatattgctggattctctctgttactgagcttcctcctgcggaggctcgtgaccctcatcagccagcaggcgacactgctcgcatccaatgaagcctttaagaagcaagccgaatccgcatcagaggcagcgaaaaagtacatggaggaaaacgatcagctcaagaaaggcgcagccgtggatggcgggaagcttgatgttggaaatgcggaagttaaattggaggaagagaaccggagcctgaaggctgatctccagaaactgaaagatgagttggctagtaccaagcaaaaattggagaaagcagagaaccaggtgctcgcgatgagaaagcagagcgagggtctaactaaagagtatgatcgtctcctggaagagcacgctaaactgcaagccgccgtggacggtcccatggacaagaaagaggagtag

SEQ ID NO: 90627 - DNA, 741 bp, Artificial Sequence
  derived and/or modified sequence
atgtcattacagtggaccgcggttgcaactttcctctatgccgaggtttttgtcgtccttctgctttgtatcccttttatttcccctaagcgctggcaaaagattttcaaaagcaggctcgtggaactcctggtgagctacggtaacacttttttcgttgttctcatcgtgattctggtcctcctggtgattgacgctgtcagggaaatcagaaagtacgatgacgtgacggagaaagtgaatctgcaaaataaccccggagctatggaacactttcacatgaagctctttagagcccagcggaacctctatatcgccgggttctctctcttgctgagctttttacttagaaggcttgtcactctgatctcacagcaggccaccctgttggcaagtaatgaggccttcaaaaagcaggctgagagcgccagtgaggctgcaaaaaagtacatggaggaaaacgaccagctgaagaaaggggcggctgtggacggcggaaagctcgatgtgggcaacgctgaggtcaaactggaagaggagaatcgatccctgaaagcggatctccaaaagctgaaggatgaactggcaagcaccaaacagaagctggaaaaggctgagaaccaggtgctggccatgcgaaaacagtctgagggcctcactaaagaatacgataggctccttgaggagcatgccaaactgcaggcagctgtggatggaccaatggacaagaaggaggagtag

SEQ ID NO: 90628 - DNA, 741 bp, Artificial Sequence
  derived and/or modified sequence
atgagcctgcagtggaccgccgtggccaccttcctgtacgccgaggtattcgttgtgctcctcctttgcattccctttattagccccaaacgatggcagaagatctttaagagcagactggttgaacttcttgtgagttatggcaatacatttttcgtggttttaatcgtgattctcgtcctcctcgttatcgatgccgtcagagagattcgcaaatacgacgacgtcaccgagaaagtcaatctgcaaaacaatccgggagcaatggagcacttccatatgaaattattcagagcccaacgaaacttatatattgccggcttctcactgctgctctcattcttgctgagacggttggtgacactcatctcacagcaggctaccctgcttgcttcaaacgaggccttcaagaagcaggcagagtccgcatccgaggcagcaaaaaaatatatggaggagaatgaccagttaaaaaagggcgctgccgttgacggcggaaaacttgacgtgggcaatgccgaggtcaaactcgaggaagagaaccggtccctaaaagcagatttgcagaagctcaaggatgaactggcgtcaaccaagcaaaaactggagaaggccgagaatcaggtcttagcaatgcgtaagcaaagcgaaggactaaccaaggagtacgatcgcctgctggaggagcacgccaagctgcaggctgcggtcgacggacccatggacaagaaggaagagtag

SEQ ID NO: 90629 - DNA, 741 bp, Artificial Sequence
  derived and/or modified sequence
atgagcctgcagtggaccgccgtggccaccttcctgtacgccgaggtgttcgtggtgctgctgctttgtattccctttattagcccaaagaggtggcagaaaattttcaagtcccggctagttgaactgctggtttcttatggtaacacttttttcgttgtcctcatagtcattctggtactcctcgtaattgacgctgtcagggagatacgcaaatacgatgatgtaacagaaaaagtgaacctccaaaacaatcccggggcaatggaacatttccatatgaagctatttagagctcagagaaacctatacattgctgggtttagcctgttgttatcatttctcctacgaaggctagtgacactgatatcgcagcaggctactctgctggcgagcaacgaagcatttaaaaaacaggctgaaagtgcctccgaggctgctaagaaatacatggaagagaatgaccagcttaaaaagggggcagctgttgacggtgggaagctcgacgtgggaaatgccgaggtaaagctagaggaagagaacagatccctgaaggcagacctgcagaaactaaaggatgaactggcgtccacgaaacagaagctcgagaaagctgaaaaccaggtgctggctatgcggaagcaaagcgagggcttgaccaaggaatacgatcggctattggaagagcatgccaagctccaggcggcagtggatgggccaatggataaaaaagaggagtag

SEQ ID NO: 90630 - DNA, 741 bp, Artificial Sequence
  derived and/or modified sequence
atgtcccttcagtggacagcagtagcaacctttttgtatgcagaggtgtttgtcgtattactgctttgcatcccgtttatctctcccaagcgctggcaaaaaatattcaaatcccgcttggtggaattacttgtgagctatggcaacacatttttcgttgtactgatcgtgatcttagtgctcttagtaattgacgctgttcgagagatccggaagtacgacgatgtcactgaaaaggtaaacttgcagaataatcctggggcaatggagcactttcatatgaaattgtttcgcgcacaacgcaacctctacatcgccggtttttctctgctgctctcttttcttttgcgacggttagtgacactcatctcccagcaagcaactttactggcaagcaacgaggcctttaagaaacaagccgagtcagcaagtgaggctgctaaaaagtatatggaggagaatgaccagctgaaaaaaggcgcagccgtcgacggcggaaagctggatgtgggcaatgcagaggttaagctcgaggaggaaaatcgttccctgaaagctgacctccagaaactcaaggacgagctcgcttccaccaagcagaagctggaaaaggccgagaatcaagtgctcgcgatgcgcaagcagtctgaaggactgaccaaagaatatgacagactgctggaggaacacgccaagctgcaggctgccgtggacggtcctatggataaaaaggaagaatag

SEQ ID NO: 90631 - DNA, 741 bp, Artificial Sequence
  derived and/or modified sequence
atgtcactccagtggacagctgtggccacatttctgtacgctgaagtcttcgtcgttctactgctatgtattccattcattagtccaaaaaggtggcagaagattttcaaatcacggttggtggaacttctcgtctcgtacgggaacaccttctttgtggtgctcatcgttatcctagtgcttctggtcattgatgccgttcgagagattagaaagtatgatgacgtgactgaaaaggtcaacctgcagaataatcctggggcaatggagcacttccatatgaaactgtttagggctcagcgcaacctctatatcgcgggattttcattactgctttctttcttgctaaggcgacttgtgactctcatatcccagcaggcaactctgctggccagtaacgaagccttcaagaagcaagcagaatctgccagcgaggcagccaaaaaatacatggaggagaatgatcaactgaagaagggtgccgctgtggacgggggaaaactcgatgttggcaatgcagaggtaaagttggaagaagaaaaccgttcattgaaggcagatcttcaaaagctgaaggacgaactcgcatccactaaacaaaagctggaaaaggccgaaaaccaggtacttgctatgaggaagcaaagtgagggtctcaccaaagagtatgatcgcctcctggaagagcacgccaaacttcaagccgcagtggatggaccgatggataagaaggaagagtag

SEQ ID NO: 90632 - protein, 432 aa, Artificial Sequence
  derived and/or modified sequence
MKSTKPSLSPSKPQSSLVIPTSLFCKTFPFHFMFDKDMTILQFGNGIRRLMNRRDFQGKPNFEEYFEILTPKINQTFSGIMTMLNMQFVVRVRRWDNSVKKSSRVMDLKGQMIYIVESSAILFLGSPCVDRLEDFTGRGLYLSDIPIHNALRDVVLIGEQARAQDGLKKRLGKLKATLEQAHQALEEEKKKTVDLLCSIFPCEVAQQLWQGQVVQAKKFSNVTMLFSDIVGFTAICSQCSPLQVITMLNALYTRFDQQCGELDVYKVETIGDAYCVAGGLHKESDTHAVQIALMALKMMELSDEVMSPHGEPIKMRIGLHSGSVFAGVVGVKMPRYCLFGNNVTLANKFESCSVPRKINVSPTTYRLLKDCPGFVFTPRSREELPPNFPSEIPGICHFLDAYQQGTNSKPCFQKKDVEDGNANFLGKASGID

SEQ ID NO: 90633 - protein, 690 aa, Artificial Sequence
  derived and/or modified sequence
MFCTKLKDLKITGECPFSLLAPGQVPNESSEEAAGSSESCKATVPICQDIPEKNIQESLPQRKTSRSRVYLHTLAESICKLIFPEFERLNVALQRTLAKHKIKESRKSLEREDFEKTIAEQAVAAGVPVEVIKESLGEEVFKICYEEDENILGVVGGTLKDFLNSFSTLLKQSSHCQEAGKRGRLEDASILCLDKEDDFLHVYYFFPKRTTSLILPGIIKAAAHVLYETEVEVSLMPPCFHNDCSEFVNQPYLLYSVHMKSTKPSLSPSKPQSSLVIPTSLFCKTFPFHFMFDKDMTILQFGNGIRRLMNRRDFQGKPNFEEYFEILTPKINQTFSGIMTMLNMQFVVRVRRWDNSVKKSSRVMDLKGQMIYIVESSAILFLGSPCVDRLEDFTGRGLYLSDIPIHNALRDVVLIGEQARAQDGLKKRLGKLKATLEQAHQALEEEKKKTVDLLCSIFPCEVAQQLWQGQVVQAKKFSNVTMLFSDIVGFTAICSQCSPLQVITMLNALYTRFDQQCGELDVYKVETIGDAYCVAGGLHKESDTHAVQIALMALKMMELSDEVMSPHGEPIKMRIGLHSGSVFAGVVGVKMPRYCLFGNNVTLANKFESCSVPRKINVSPTTYRLLKDCPGFVFTPRSREELPPNFPSEIPGICHFLDAYQQGTNSKPCFQKKDVEDGNANFLGKASGID

SEQ ID NO: 90634 - DNA, 2073 bp, Artificial Sequence
  derived and/or modified sequence
atgttttgcacgaaactcaaggacctgaaaataaccggcgagtgtcccttttctctgcttgcccccgggcaagttcctaacgagagcagtgaagaggccgccggctcctccgaatcctgcaaggcaaccgtccctatatgtcaggatatcccagagaagaacatccaggaaagtcttcctcagcgaaaaaccagcagatcaagagtatatctgcataccctggcagagagcatctgtaaactgatattccctgaatttgagcgacttaacgttgctttgcagagaaccctggcaaagcacaaaattaaggagagcagaaaatctctagaacgggaggattttgaaaagacaattgcagagcaggcggtggccgcaggggtgcccgtggaagtgattaaggaatcacttggcgaagaggttttcaaaatttgctacgaagaagatgaaaatattctgggtgtcgtgggagggacactcaaggactttctgaattccttttccaccctgctcaagcagtcatcgcattgccaggaagctgggaaaagaggtcggctagaggatgcctcaattctctgtttggataaggaagacgatttccttcatgtttattattttttccccaagcgaactacctccctgattctcccaggtatcattaaagctgcagcccatgtgctgtatgagacagaagtggaagtgtcgctcatgccgccatgttttcacaatgactgttccgaattcgtaaatcaaccctatctgctctattctgtccatatgaaaagcactaagccaagtctgtcaccgtccaaacctcagtcaagtctggtgattcctaccagcttgttctgcaagacttttccattccactttatgttcgacaaggacatgactattcttcagttcgggaacggcatcagaaggcttatgaaccgccgggactttcagggcaagcctaatttcgaagagtattttgaaattctcacacctaagatcaatcagaccttttctgggatcatgactatgctaaatatgcaatttgtggttcgtgtcagacgttgggacaatagcgttaaaaagagtagcagagtgatggatctcaagggccagatgatctatatagtggagtcatctgcaatcctgttcttgggttctccctgcgtggacaggctcgaggatttcacaggaagaggcctctacctgagcgatatccccatacataacgcactgcgagatgtggtgttgataggcgagcaggcccgggcccaggacggactcaagaaaagactggggaagctgaaggctactcttgagcaagctcatcaggctctggaggaagagaagaagaagacggtagacctgctgtgttcaatatttccctgcgaagtggcacaacagctctggcaaggccaggttgtccaggcaaagaagttcagcaatgtcacgatgttgttttccgatattgtagggttcacggccatctgctcacagtgtagccctctgcaggtcatcaccatgttaaatgctctctatacacgcttcgatcagcagtgcggtgaactcgatgtgtataaggtggaaacgatcggggacgcgtattgtgtggcaggagggttacacaaagagagcgatactcacgctgtgcaaatcgccttgatggcgctgaaaatgatggagctgtccgatgaagtgatgagcccacacggagagcctatcaagatgcggatcggattacatagtggcagcgtgttcgccggcgtggtcggcgttaaaatgccacgctattgtcttttcgggaacaacgtaaccttggccaataaattcgagagctgctccgtgcccaggaaaataaacgtctcacccacaacatatcgtttactgaaagattgccccggcttcgtgtttaccccacgctcccgagaggaactcccacctaacttccctagcgaaatacccgggatttgccattttctggacgcatatcagcaaggtacaaatagtaagccatgctttcagaagaaagacgtagaggacggaaacgccaattttttgggcaaggcatccggtatagattag

SEQ ID NO: 90635 - DNA, 2073 bp, Artificial Sequence
  derived and/or modified sequence
atgttctgtacaaagttaaaggatctgaaaattaccggggagtgcccattctctttgctcgccccaggacaagttcccaatgagtcctctgaggaggctgccggatcctcagaatcatgtaaagccacggtacctatttgtcaagacatcccggagaaaaacatccaggagtccctgccccagagaaagacctcaagatctagggtttatctccataccctcgcagagagtatatgcaaactgatctttccggaatttgaacgcctgaacgtagctctccaaagaacactagcgaaacataaaataaaggaatcgagaaagtcactggagcgagaagacttcgaaaagacgatcgcagaacaagccgtagccgccggcgtgccagttgaagtgatcaaggaatcactgggggaggaggtctttaagatctgctatgaggaagatgaaaatatcctgggggtcgtgggcggtacattaaaagactttcttaactccttctccaccctgttgaaacagtcctcacactgtcaggaggccgggaagagaggcaggttggaagatgctagtatactttgtctggataaggaggatgatttcctgcacgtgtattatttcttcccaaagagaacgactagtctgatccttccaggcatcattaaagcggccgcgcatgtcctgtatgaaaccgaggtggaggtgtcactcatgcccccgtgctttcataacgactgcagcgaatttgtcaatcagccatacttactttattccgtccacatgaagagcacaaaacccagcctaagtccctccaagcctcaatcatctctggtgatccccaccagcctgttctgcaagacattcccatttcatttcatgttcgacaaggatatgacaattctccagtttggaaatggcattcgaaggctgatgaaccgccgagatttccagggcaagcctaatttcgaggagtatttcgaaatccttactccaaaaatcaaccagaccttctctggcattatgactatgctcaatatgcagttcgttgtccgcgttcgcagatgggataattccgtcaaaaagtcatcaagagtgatggatctcaaggggcaaatgatctacatcgtggagtctagtgccatcttgtttctggggagcccctgcgtggacagactcgaggattttacaggaagaggactttacttgagcgatattcccatccacaacgcactgagggatgtcgtgctgataggtgagcaggcgagggcccaagacgggctcaagaagaggctcgggaagcttaaggccactcttgaacaggctcaccaggccttggaagaggagaagaagaagacagtggacctgctctgctctattttcccatgcgaagtcgcacagcaactttggcagggccaggttgtgcaggctaaaaagttttccaacgtgacgatgttatttagtgatatcgtgggattcaccgcgatctgcagccaatgttctcccttacaagtaatcactatgcttaatgcgctgtatactcgatttgatcagcaatgtggagaactcgacgtctacaaagtggagaccattggggacgcctattgcgttgctgggggcctgcacaaggaatcagacacacacgctgtgcagattgctctgatggccctgaaaatgatggaactatccgatgaggttatgagccctcacggagaacccattaagatgcgaatcggtcttcatagcggaagtgtttttgccggcgtcgtcggcgtgaagatgccacgctattgtctgtttggaaataacgtgaccctcgcaaataaatttgagtcatgcagtgtgccccgcaagataaatgtctcccctacaacctaccggttattaaaggactgtcccggatttgtgtttacacccagatctagggaggaactcccccctaattttccttcagaaattccaggcatctgtcatttccttgatgcataccagcagggaacaaattctaagccttgtttccagaagaaagacgttgaggacggaaacgcgaactttctcggtaaggccagtggaatagattag

SEQ ID NO: 90636 - DNA, 2073 bp, Artificial Sequence
  derived and/or modified sequence
atgttctgcacaaagcttaaggacctgaagatcacaggcgagtgtccatttagtctgcttgcaccaggccaggtccccaacgagtcttcagaagaggctgccgggagctctgagtcgtgcaaggccacagtgcccatttgccaggacatccccgagaaaaacattcaggagtctctgccccaacgaaagaccagtaggtctcgtgtatacctgcataccctggcggagtccatttgtaagctgatctttcctgagttcgaaagactgaacgtggctctccaacggacactggcaaaacacaaaatcaaggaaagcagaaagtccctggagagggaggactttgaaaagaccattgcggagcaggcagtggcagccggggtgccggtggaagtgataaaagagtctctcggagaggaagtgttcaagatttgctacgaggaggacgagaatatattgggggtcgtggggggtacacttaaggattttctgaactctttttctactttacttaagcaatcctctcactgccaggaagcaggaaagagaggacggctggaggatgcctcaattctttgtctggataaggaggacgacttcctccacgtatactatttctttcctaagcgcactacttccctaattctccccgggataatcaaagcagctgctcatgtgctgtacgagaccgaggttgaagtgagtttaatgcctccctgcttccataatgactgcagcgagttcgtaaatcagccatatcttctgtacagcgttcacatgaagagtacaaaaccctccctttctccgtcaaagccgcagagttccctggtcattccaacctcgttattttgtaaaaccttcccatttcactttatgtttgacaaggacatgactatactccaatttggtaacggaatccgcaggcttatgaatagacgggacttccagggcaagccaaacttcgaggagtacttcgaaatcctcacgcctaagattaatcagacatttagcggcattatgaccatgctgaacatgcagtttgtggtccgggtgaggcgctgggacaactccgtaaagaagtcctcacgcgtgatggatcttaagggacagatgatctatatcgtcgagagcagtgcaatcctctttttgggctcgccatgcgtggacaggttagaggatttcacaggacgagggttgtacctttcagacatcccaatacacaatgctcttcgcgatgtcgtgctgattggagagcaggctagagcacaagacggcttgaagaagcggctgggaaagttgaaagccaccctcgagcaagcgcatcaagcattagaagaggaaaaaaagaagacagtcgacctcttgtgttctatctttccatgcgaagtagcccagcagttatggcagggccaagtggtccaggccaagaaattttcgaatgtcacaatgctcttctcagacatcgtcgggtttactgcaatatgctcacagtgtagtcccctgcaggtcatcaccatgctaaacgcgctttataccagattcgatcaacagtgtggagaactggacgtgtataaagtggagacaattggcgatgcttactgcgtcgcagggggcctgcataaggaaagcgatacccatgccgtgcagattgcacttatggccttgaagatgatggagctttcagacgaggtcatgagcccccatggagaacctattaagatgaggatcggacttcacagcggctctgtgtttgctggcgtggtgggcgttaaaatgcctcggtactgtctctttgggaacaatgtgacgctggccaacaagttcgaaagctgctcagtaccgcggaagatcaatgtgagcccaacgacttatcggctgcttaaagattgccctgggtttgtgtttacgccacgaagtagggaagaacttccccccaactttccatctgaaatcccaggcatttgtcattttctggatgcataccagcagggtacaaatagcaagccatgctttcagaaaaaagacgtggaggatggaaatgcaaacttcctgggcaaggcttcggggattgactag

SEQ ID NO: 90637 - DNA, 2073 bp, Artificial Sequence
  derived and/or modified sequence
atgttctgcactaaactcaaggaccttaaaataaccggggagtgcccattcagtctgctggctcccggccaggtcccaaatgagtctagtgaggaagcagctggctctagcgaaagctgtaaggccaccgtgccaatatgccaggacatccccgaaaagaatattcaggagtcactgccacaaagaaaaacgagcaggtctcgtgtgtatctacacacccttgcagaatccatctgcaagcttatctttccagaatttgaacgtcttaatgtggccttgcagaggacactggccaaacataagatcaaggaatctcgcaagtcactagaacgagaggacttcgagaagaccatagccgagcaggctgtggctgctggagtgcccgtggaggtgatcaaagaatcgttgggcgaagaggtttttaaaatctgttacgaggaggatgaaaatatcctcggggttgtaggtggcaccctgaaagattttttgaattcattctccacactactgaaacagagctcccactgtcaggaggccggaaaaagagggagactagaagatgcttctatcctgtgtctcgacaaggaggatgattttctgcacgtgtactacttttttcccaaaaggaccacaagcctgatcttaccaggaatcattaaagccgcagcccatgtcctgtacgaaacggaagtggaagtgagccttatgcctccttgtttccacaatgattgtagcgagtttgtgaatcagccatacctcctgtactccgtgcatatgaaatccaccaaaccttccctttccccatctaagccacagagttcgctcgtgattccaactagcctcttctgtaaaactttcccttttcattttatgttcgacaaggacatgaccattctgcaattcggaaacggcattagacgcctaatgaatagaagagatttccaggggaaacctaattttgaagagtatttcgaaatactgacccccaagattaatcaaacgttctcggggataatgactatgctgaatatgcagtttgtcgtgcgggtgcgtaggtgggacaactcagtgaaaaagagtagccgggtgatggatcttaaggggcagatgatctatatcgtagaaagcagtgccattctatttttaggatccccttgcgtcgaccgcctggaagattttaccggccggggactttacttgtcagacatcccaatacataatgctctaagggatgtagtcctgattggggagcaggcacgggcgcaggatgggctgaaaaagcgcctgggcaagcttaaggctactttagagcaagctcatcaggccctggaagaagaaaaaaagaagacggtcgatctgttgtgcagcatcttcccttgtgaggtcgcacagcaactgtggcaaggccaagtggtgcaagcaaagaagttcagtaacgtcactatgctcttctcagacatagttggattcacagcaatttgtagtcagtgcagccctcttcaggttattaccatgttgaatgctctgtacacccgtttcgaccagcagtgcggagaacttgatgtatataaggttgagactattggtgatgcatactgcgtggctggcggactgcataaggaatccgatactcatgcggtgcagatcgccctaatggctctgaagatgatggaactgtctgatgaagtgatgagtccccatggggaaccaatcaaaatgcgaatcggtctgcactcggggagcgtttttgccggagtagtgggcgtgaagatgcctcggtattgcctgtttggcaataacgtgaccctagcgaataaatttgaaagctgtagtgtgccccggaaaatcaatgtatcgcctacgacatatagactgctgaaggattgtcccgggttcgtgtttactccacgatcacgcgaagaactgcctccgaatttcccaagtgagattccaggtatttgccactttctcgacgcataccagcagggtactaactccaagccttgttttcagaagaaagacgttgaggacggtaacgcaaacttccttgggaaggcttcggggatcgactag

SEQ ID NO: 90638 - DNA, 2073 bp, Artificial Sequence
  derived and/or modified sequence
atgttttgtactaaattaaaagatcttaagatcaccggggagtgcccgttctctttgctggcaccaggccaggttcccaatgagagctctgaggaagcggctgggtcatctgaatcatgcaaggcgacagttccaatatgccaagatatcccagagaagaacatacaagagtctctcccccagcgaaagacatccagatctcgggtgtacttgcacacccttgcagagtccatctgtaaactcatttttcccgagtttgagaggctcaacgtcgcgttacagcggacccttgccaagcataagatcaaagagagccgcaagtcattagagcgtgaggatttcgaaaagacaattgccgagcaggccgtggctgctggagtcccagtggaggttataaaagaatcactgggagaggaagtattcaaaatctgctacgaggaagacgaaaacatattaggcgtggttggcggaaccctgaaggattttttgaatagtttcagtacgctgctgaagcagtccagtcactgtcaggaggccggaaaacgcggcagattggaagacgcaagcattttatgcctagataaggaggatgattttctacacgtgtattattttttccctaaacgtaccacatccctgatcttaccaggcattatcaaggccgccgcccatgtgctctacgaaacagaggttgaggtgtctttaatgcccccgtgttttcacaacgattgtagtgaatttgtcaaccagccctatctactttacagcgtgcacatgaaaagcaccaagccctccctttctccgtctaaaccacagagcagcctggtcatcccaacatcactgttttgcaaaacattcccatttcactttatgttcgacaaggatatgacaatcctgcagtttggaaacggaattagaaggctcatgaatcgcagggatttccaggggaagcccaatttcgaagagtacttcgagatactgacccccaagatcaaccagaccttcagtggcatcatgacgatgcttaatatgcagttcgtggtcagagtgcgccgatgggataactcggttaaaaagtcaagtcgcgtaatggacctgaaaggacagatgatctacatagtcgaaagctccgctattttatttctcggcagcccttgtgtggaccggctggaggacttcaccggcaggggcctttatctttcagatattccaatccataatgctttaagggatgtagttttgattggagagcaggcccgagcacaagacgggctcaagaagcggctcgggaaactcaaggccacacttgagcaggcacatcaggccctcgaggaggaaaaaaagaaaactgttgacctcctgtgcagtatcttcccctgcgaggtcgctcagcagctttggcagggccaggtcgtgcaggcaaagaaatttagtaacgtgacaatgctgtttagtgatatcgttggcttcaccgccatctgtagccagtgttcgccattgcaagtgattaccatgctgaacgcactgtatactcgattcgatcagcagtgcggagaacttgacgtatataaagtggaaactattggagatgcctactgtgtggccggcggtttgcataaagaatcagacacacatgccgtgcagattgcactgatggcccttaagatgatggagctgagtgatgaggtaatgagccctcacggtgagcccataaaaatgcgcattggcttgcactctggaagcgtctttgccggcgtggtgggcgtgaaaatgcctcgctattgtctgttcgggaacaacgtaaccctggccaataagtttgaaagttgtagcgttcctcgcaaaattaatgtttccccaacaacttatcggcttctaaaggattgccctggatttgtatttacacccaggtcccgtgaggagttgccaccgaacttcccgtctgaaatacccggcatctgccacttcctcgacgcatatcaacagggaaccaattccaagccttgctttcagaaaaaagatgtggaggacggcaatgctaactttctcggaaaagcgtcgggtatcgactag

SEQ ID NO: 90639 - DNA, 4286 bp, Artificial Sequence
  derived and/or modified sequence
ggactgtctgggagccacgcgggcgatacagtttccgaggcacgccgcgtcccgcctagcctgttgaacaggtagacatgagcgacccaagctgcggatttgcgaggcgcgccctggagctgctagagatccggaagcacagccccgaggtgtgcgaagccaccaagtcaagttcctaacgagtcttcagaggaggcagcaggaagctcagagagctgcaaagcaaccgtgcccatctgtcaagacattcctgagaagaacatacaagaaagtcttcctcaaagaaaaaccagtcggagccgagtctatcttcacactttggcagagagtatttgcaaactgattttcccagagtttgaacggctgaatgttgcacttcagagaacattggcaaagcacaaaataaaagaaagcaggaaatctttggaaagagaagactttgaaaaaacaattgcagagcaagcagttgcagcaggagttccagtggaggttatcaaagaatctcttggtgaagaggtttttaaaatatgttacgaggaagatgaaaacatccttggggtggttggaggcacccttaaagattttttaaacagcttcagtacccttctgaaacagagcagccattgccaagaagcaggaaaaaggggcaggcttgaggacgcctccattctatgcctggataaggaggatgattttctacatgtttactacttcttccctaagagaaccacctccctgattcttcccggcatcataaaggcagctgctcacgtattatatgaaacggaagtggaagtgtcgttaatgcctccctgcttccataatgattgcagcgagtttgtgaatcagccctacttgttgtactccgttcacatgaaaagcaccaagccatccctgtcccccagcaaaccccagtcctcgctggtgattcccacatcgctattctgcaagacatttccattccatttcatgtttgacaaagatatgacaattctgcaatttggcaatggcatcagaaggctgatgaacaggagagactttcaaggaaagcctaattttgaagaatactttgaaattctgactccaaaaatcaaccagacgtttagcgggatcatgactatgttgaatatgcagtttgttgtacgagtgaggagatgggacaactctgtgaaaaaatcttcaagggttatggacctcaaaggccaaatgatctacattgttgaatccagtgcaatcttgtttttggggtcaccctgtgtggacagattagaagattttacaggacgagggctctacctctcagacatcccaattcacaatgcactgagggatgtggtcttaataggggaacaagcccgagctcaagatggcctgaagaagaggctggggaagctgaaggctacccttgagcaagcccaccaagccctggaggaggagaagaaaaagacagtagaccttctgtgctccatatttccctgtgaggttgctcagcagctgtggcaagggcaagttgtgcaagccaagaagttcagtaatgtcaccatgctcttctcagacatcgttgggttcactgccatctgctcccagtgctcaccgctgcaggtcatcaccatgctcaatgcactgtacactcgcttcgaccagcagtgtggagagctggatgtctacaaggtggagaccattggcgatgcctattgtgtagctgggggattacacaaagagagtgatactcatgctgttcagatagcgctgatggccctgaagatgatggagctctctgatgaagttatgtctccccatggagaacctatcaagatgcgaattggactgcactctggatcagtttttgctggcgtcgttggagttaaaatgccccgttactgtctttttggaaacaatgtcactctggctaacaaatttgagtcctgcagtgtaccacgaaaaatcaatgtcagcccaacaacttacagattactcaaagactgtcctggtttcgtgtttacccctcgatcaagggaggaacttccaccaaacttccctagtgaaatccccggaatctgccattttctggatgcttaccaacaaggaacaaactcaaaaccatgcttccaaaagaaagatgtggaagatggcaatgccaattttttaggcaaagcatcaggaatagattagcaacctatatacctatttataagtctttggggtttgactcattgaagatgtgtagagcctctgaaagcactttagggattgtagatggctaacaagcagtattaaaatttcaggagccaagtcacaatctttctcctgtttaacatgacaaaatgtatgtactcacttcagtacttcagctcttcaagaaaaaaaaaaaaaaccttaaaaagctacttttgtgggagtatttctattatataaccagcacttactacctgtactcaaaattcagcaccttgtacatatatcagataattgtagtcaattgtacaaactgatggagtcacctgcaatctcatatcctggtggaatgccatggttattaaagtgtgtttgtgatagtgtcgtcaaaaaaaaggtttttgaatagaaattacattctttgacaccctcagttctttcaaactttcaactctgcattttattgcattttctcatttaactgttagtatatgtttgaatataggctgactttttttctctattgcactttcttctttttttctttttagaaaataagcaattaggggttagatgcaatatgaatataaaatagttctgtaaataccaaatattatttttagttctggaagttaaaaatactctccatagtaacgtgtgttataataataaatatttcttttgtttgacttttttaaaattctacaatggtaaaagctattttaatccatgttagcaatttaattcctattaattcattttactatcataatagcaaagtattcagaataaaagaggtttatatcttctattaaaatgcagtaatactattcaaatctaatttagctggaagcaacatgggagtaaagtaatcatccaggggacccaccataaaggacattggtaaaacatttacacacgtaaacacacgtgcaggcacacttggaacaatatggacccacttcagcagacatcttctattgccatgctgagctgtttaaagttttaagaagaaaatctaagtatggaagtagaaaataagacttgttcttttggtggatatctcatttttcttgagtatttgtgctgaacattttggtgtatgtctatgaactaagaatcaagtttttgtctcattaaatatacatatatgaagtgtttttattctacttgaaatatcttgacttaaaaaaaacgactgttagtattgatgaagcaaatgaggcagtgactacattatggaaatgtctaagtattttttccggaacttcaactttttctttttgttttacataaacatttaagcagctaggaacttttagttttagttaggtcagttgaagttctctggtgaactaaaaaatctacattttggttggggataaagatttgattttaaaaacagcttgaatttaaagcaagaaaaagatgaacgttatagttttaaaatcaatattagcagagccatagataggctgagctcttatttggggttctgagaaataactcagtttaaaacttctttaactgcctcccttagtacccaggctagcccatggtgacatcagggatattcattactgattggcctctagtattccaagggtactactatagatattacaatgatgctgtttactaagtgataaccccgtatcttacaggactgactttgactcaataaaccactcagcctattattggaaagtgccataggccttgagaaagtatagttacatcctcacaaatatatgaagttaagtcactacttacaaggaaaaaaaatgtaaatacatttttctttctggaaccgaactcttattatggggaaataatagaaataaagaaaatgtaaaagcatgaaatggaatgtagtcttgatcaaacatttcagcagacctcaatttgcttacaatctgtactcaaaaagtttataattcaatcagaattcaaaaagtattttgtgtgtttgtgatgtattagcatatacacaaaacaaatgaggggaatgtatataatcttggtgaaaagttgtatgggagttttttgtacgattcctgcaacttttctataaacgtggcattatatctaaataaaaaattaccaaaaaa

SEQ ID NO: 90640 - DNA, 4400 bp, Artificial Sequence
  derived and/or modified sequence
aggtagacatgagcgacccaagctgcggatttgcgaggcgcgccctggagctgctagagatccggaagcacagccccgaggtgtgcgaagccaccaaacatcccagttaccagtgtccttgaattgatagtggcttctgtttgtcagtctcatataagaactacagctcatcaggaggagatcgcagcagggtaagagacaccaacaccatgttctgcacgaagctcaaggatctcaagatcacaggagagtgtcctttctccttactggcaccaggtcaagttcctaacgagtcttcagaggaggcagcaggaagctcagagagctgcaaagcaaccgtgcccatctgtcaagacattcctgagaagaacatacaagaaagtcttcctcaaagaaaaaccagtcggagccgagtctatcttcacactttggcagagagtatttgcaaactgattttcccagagtttgaacggctgaatgttgcacttcagagaacattggcaaagcacaaaataaaagaaagcaggaaatctttggaaagagaagactttgaaaaaacaattgcagagcaagcagttgcagcaggagttccagtggaggttatcaaagaatctcttggtgaagaggtttttaaaatatgttacgaggaagatgaaaacatccttggggtggttggaggcacccttaaagattttttaaacagcttcagtacccttctgaaacagagcagccattgccaagaagcaggaaaaaggggcaggcttgaggacgcctccattctatgcctggataaggaggatgattttctacatgtttactacttcttccctaagagaaccacctccctgattcttcccggcatcataaaggcagctgctcacgtattatatgaaacggaagtggaagtgtcgttaatgcctccctgcttccataatgattgcagcgagtttgtgaatcagccctacttgttgtactccgttcacatgaaaagcaccaagccatccctgtcccccagcaaaccccagtcctcgctggtgattcccacatcgctattctgcaagacatttccattccatttcatgtttgacaaagatatgacaattctgcaatttggcaatggcatcagaaggctgatgaacaggagagactttcaaggaaagcctaattttgaagaatactttgaaattctgactccaaaaatcaaccagacgtttagcgggatcatgactatgttgaatatgcagtttgttgtacgagtgaggagatgggacaactctgtgaaaaaatcttcaagggttatggacctcaaaggccaaatgatctacattgttgaatccagtgcaatcttgtttttggggtcaccctgtgtggacagattagaagattttacaggacgagggctctacctctcagacatcccaattcacaatgcactgagggatgtggtcttaataggggaacaagcccgagctcaagatggcctgaagaagaggctggggaagctgaaggctacccttgagcaagcccaccaagccctggaggaggagaagaaaaagacagtagaccttctgtgctccatatttccctgtgaggttgctcagcagctgtggcaagggcaagttgtgcaagccaagaagttcagtaatgtcaccatgctcttctcagacatcgttgggttcactgccatctgctcccagtgctcaccgctgcaggtcatcaccatgctcaatgcactgtacactcgcttcgaccagcagtgtggagagctggatgtctacaaggtggagaccattggcgatgcctattgtgtagctgggggattacacaaagagagtgatactcatgctgttcagatagcgctgatggccctgaagatgatggagctctctgatgaagttatgtctccccatggagaacctatcaagatgcgaattggactgcactctggatcagtttttgctggcgtcgttggagttaaaatgccccgttactgtctttttggaaacaatgtcactctggctaacaaatttgagtcctgcagtgtaccacgaaaaatcaatgtcagcccaacaacttacagattactcaaagactgtcctggtttcgtgtttacccctcgatcaagggaggaacttccaccaaacttccctagtgaaatccccggaatctgccattttctggatgcttaccaacaaggaacaaactcaaaaccatgcttccaaaagaaagatgtggaagatggcaatgccaattttttaggcaaagcatcaggaatagattagcaacctatatacctatttataagtctttggggtttgactcattgaagatgtgtagagcctctgaaagcactttagggattgtagatggctaacaagcagtattaaaatttcaggagccaagtcacaatctttctcctgtttaacatgacaaaatgtatgtactcacttcagtacttcagctcttcaagaaaaaaaaaaaaaaccttaaaaagctacttttgtgggagtatttctattatataaccagcacttactacctgtactcaaaattcagcaccttgtacatatatcagataattgtagtcaattgtacaaactgatggagtcacctgcaatctcatatcctggtggaatgccatggttattaaagtgtgtttgtgatagtgtcgtcaaaaaaaaggtttttgaatagaaattacattctttgacaccctcagttctttcaaactttcaactctgcattttattgcattttctcatttaactgttagtatatgtttgaatataggctgactttttttctctattgcactttcttctttttttctttttagaaaataagcaattaggggttagatgcaatatgaatataaaatagttctgtaaataccaaatattatttttagttctggaagttaaaaatactctccatagtaacgtgtgttataataataaatatttcttttgtttgacttttttaaaattctacaatggtaaaagctattttaatccatgttagcaatttaattcctattaattcattttactatcataatagcaaagtattcagaataaaagaggtttatatcttctattaaaatgcagtaatactattcaaatctaatttagctggaagcaacatgggagtaaagtaatcatccaggggacccaccataaaggacattggtaaaacatttacacacgtaaacacacgtgcaggcacacttggaacaatatggacccacttcagcagacatcttctattgccatgctgagctgtttaaagttttaagaagaaaatctaagtatggaagtagaaaataagacttgttcttttggtggatatctcatttttcttgagtatttgtgctgaacattttggtgtatgtctatgaactaagaatcaagtttttgtctcattaaatatacatatatgaagtgtttttattctacttgaaatatcttgacttaaaaaaaacgactgttagtattgatgaagcaaatgaggcagtgactacattatggaaatgtctaagtattttttccggaacttcaactttttctttttgttttacataaacatttaagcagctaggaacttttagttttagttaggtcagttgaagttctctggtgaactaaaaaatctacattttggttggggataaagatttgattttaaaaacagcttgaatttaaagcaagaaaaagatgaacgttatagttttaaaatcaatattagcagagccatagataggctgagctcttatttggggttctgagaaataactcagtttaaaacttctttaactgcctcccttagtacccaggctagcccatggtgacatcagggatattcattactgattggcctctagtattccaagggtactactatagatattacaatgatgctgtttactaagtgataaccccgtatcttacaggactgactttgactcaataaaccactcagcctattattggaaagtgccataggccttgagaaagtatagttacatcctcacaaatatatgaagttaagtcactacttacaaggaaaaaaaatgtaaatacatttttctttctggaaccgaactcttattatggggaaataatagaaataaagaaaatgtaaaagcatgaaatggaatgtagtcttgatcaaacatttcagcagacctcaatttgcttacaatctgtactcaaaaagtttataattcaatcagaattcaaaaagtattttgtgtgtttgtgatgtattagcatatacacaaaacaaatgaggggaatgtatataatcttggtgaaaagttgtatgggagttttttgtacgattcctgcaacttttctataaacgtggcattatatctaaataaaaaattaccaaaaaacata

SEQ ID NO: 90641 - DNA, 2631 bp, Artificial Sequence
  derived and/or modified sequence
atggtgcgttttggctgctactttctttttcagtctttcggtgcggagaaggggaggaggcgggcagaggtctgaaaaaatcgaatgccttatggaaaggaactgcaagggttcctttggggtgatcaaagagggagacacagacacagagagacaaaggcaaggaggactgtctgggagccacgcgggcgatacagtttccgaggcacgccgcgtcccgcctagcctgttgaacagtgcggatttgcgaggcgcgccctggagctgctagagatccggaagcacagccccgaggtgtgcgaagccaccaatctcatataagaactacagctcatcaggaggagatcgcagcagggtaagagacaccaacaccatgttctgcacgaagctcaaggatctcaagatcacaggagagtgtcctttctccttactggcaccaggtcaagttcctaacgagtcttcagaggaggcagcaggaagctcagagagctgcaaagcaaccgtgcccatctgtcaagacattcctgagaagaacatacaagaaagtcttcctcaaagaaaaaccagtcggagccgagtctatcttcacactttggcagagagtatttgcaaactgattttcccagagtttgaacggctgaatgttgcacttcagagaacattggcaaagcacaaaataaaagaaagcaggaaatctttggaaagagaagactttgaaaaaacaattgcagagcaagcagttgcagcaggagttccagtggaggttatcaaagaatctcttggtgaagaggtttttaaaatatgttacgaggaagatgaaaacatccttggggtggttggaggcacccttaaagattttttaaacagcttcagtacccttctgaaacagagcagccattgccaagaagcaggaaaaaggggcaggcttgaggacgcctccattctatgcctggataaggaggatgattttctacatgtttactacttcttccctaagagaaccacctccctgattcttcccggcatcataaaggcagctgctcacgtattatatgaaacggaagtggaagtgtcgttaatgcctccctgcttccataatgattgcagcgagtttgtgaatcagccctacttgttgtactccgttcacatgaaaagcaccaagccatccctgtcccccagcaaaccccagtcctcgctggtgattcccacatcgctattctgcaagacatttccattccatttcatgtttgacaaagatatgacaattctgcaatttggcaatggcatcagaaggctgatgaacaggagagactttcaaggaaagcctaattttgaagaatactttgaaattctgactccaaaaatcaaccagacgtttagcgggatcatgactatgttgaatatgcagtttgttgtacgagtgaggagatgggacaactctgtgaaaaaatcttcaagggttatggacctcaaaggccaaatgatctacattgttgaatccagtgcaatcttgtttttggggtcaccctgtgtggacagattagaagattttacaggacgagggctctacctctcagacatcccaattcacaatgcactgagggatgtggtcttaataggggaacaagcccgagctcaagatggcctgaagaagaggctggggaagctgaaggctacccttgagcaagcccaccaagccctggaggaggagaagaaaaagacagtagaccttctgtgctccatatttccctgtgaggttgctcagcagctgtggcaagggcaagttgtgcaagccaagaagttcagtaatgtcaccatgctcttctcagacatcgttgggttcactgccatctgctcccagtgctcaccgctgcaggtcatcaccatgctcaatgcactgtacactcgcttcgaccagcagtgtggagagctggatgtctacaaggtggagaccattggcgatgcctattgtgtagctgggggattacacaaagagagtgatactcatgctgttcagatagcgctgatggccctgaagatgatggagctctctgatgaagttatgtctccccatggagaacctatcaagatgcgaattggactgcactctggatcagtttttgctggcgtcgttggagttaaaatgccccgttactgtctttttggaaacaatgtcactctggctaacaaatttgagtcctgcagtgtaccacgaaaaatcaatgtcagcccaacaacttacagattactcaaagactgtcctggtttcgtgtttacccctcgatcaagggaggaacttccaccaaacttccctagtgaaatccccggaatctgccattttctggatgcttaccaacaaggaacaaactcaaaaccatgcttccaaaagaaagatgtggaagatggcaatgccaattttttaggcaaagcatcaggaatagattagcaacctatatacctatttataagtctttggggtttgactcattgaagatgtgtagagcctctgaaagcactttagggattgtagatggctaacaagcagtattaaaatttcaggagccaagtcacaatctttctcctgtttaacatgacaaaatgtatgtactcacttcagtacttcagctcttc

SEQ ID NO: 90642 - DNA, 2715 bp, Artificial Sequence
  derived and/or modified sequence
acacagtgatttctgttatggcgattgggcggctgcagagaccaggactcagttcccctgccctagtctgagcctagtgggtgggactcagctcagagtcagttttccagaagcaggtttcagtgcagagttttcctacacttttcctgcgctagagcagcgagcagcctggaacagacccaggcggaggacacctgtgggggagggagcgcctggaggagcttagagaccccagccgggcgtgatctcaccatgtgcggatttgcgaggcgcgccctggagctgctagagatccggaagcacagccccgaggtgtgcgaagccaccaaacatcccagttaccagtgtccttgaattgatagtggcttctgtttgtcagtctcatataagaactacagctcatcaggaggagatcgcagcagggtaagagacaccaacaccatgttctgcacgaagctcaaggatctcaagatcacaggagagtgtcctttctccttactggcaccaggtcaagttcctaacgagtcttcagaggaggcagcaggaagctcagagagctgcaaagcaaccgtgcccatctgtcaagacattcctgagaagaacatacaagaaagtcttcctcaaagaaaaaccagtcggagccgagtctatcttcacactttggcagagagtatttgcaaactgattttcccagagtttgaacggctgaatgttgcacttcagagaacattggcaaagcacaaaataaaagaaagcaggaaatctttggaaagagaagactttgaaaaaacaattgcagagcaagcagttgcagcaggagttccagtggaggttatcaaagaatctcttggtgaagaggtttttaaaatatgttacgaggaagatgaaaacatccttggggtggttggaggcacccttaaagattttttaaacagcttcagtacccttctgaaacagagcagccattgccaagaagcaggaaaaaggggcaggcttgaggacgcctccattctatgcctggataaggaggatgattttctacatgtttactacttcttccctaagagaaccacctccctgattcttcccggcatcataaaggcagctgctcacgtattatatgaaacggaagtggaagtgtcgttaatgcctccctgcttccataatgattgcagcgagtttgtgaatcagccctacttgttgtactccgttcacatgaaaagcaccaagccatccctgtcccccagcaaaccccagtcctcgctggtgattcccacatcgctattctgcaagacatttccattccatttcatgtttgacaaagatatgacaattctgcaatttggcaatggcatcagaaggctgatgaacaggagagactttcaaggaaagcctaattttgaagaatactttgaaattctgactccaaaaatcaaccagacgtttagcgggatcatgactatgttgaatatgcagtttgttgtacgagtgaggagatgggacaactctgtgaaaaaatcttcaagggttatggacctcaaaggccaaatgatctacattgttgaatccagtgcaatcttgtttttggggtcaccctgtgtggacagattagaagattttacaggacgagggctctacctctcagacatcccaattcacaatgcactgagggatgtggtcttaataggggaacaagcccgagctcaagatggcctgaagaagaggctggggaagctgaaggctacccttgagcaagcccaccaagccctggaggaggagaagaaaaagacagtagaccttctgtgctccatatttccctgtgaggttgctcagcagctgtggcaagggcaagttgtgcaagccaagaagttcagtaatgtcaccatgctcttctcagacatcgttgggttcactgccatctgctcccagtgctcaccgctgcaggtcatcaccatgctcaatgcactgtacactcgcttcgaccagcagtgtggagagctggatgtctacaaggtggagaccattggcgatgcctattgtgtagctgggggattacacaaagagagtgatactcatgctgttcagatagcgctgatggccctgaagatgatggagctctctgatgaagttatgtctccccatggagaacctatcaagatgcgaattggactgcactctggatcagtttttgctggcgtcgttggagttaaaatgccccgttactgtctttttggaaacaatgtcactctggctaacaaatttgagtcctgcagtgtaccacgaaaaatcaatgtcagcccaacaacttacagattactcaaagactgtcctggtttcgtgtttacccctcgatcaagggaggaacttccaccaaacttccctagtgaaatccccggaatctgccattttctggatgcttaccaacaaggaacaaactcaaaaccatgcttccaaaagaaagatgtggaagatggcaatgccaattttttaggcaaagcatcaggaatagattagcaacctatatacctatttataagtctttggggtttgactcattgaagatgtgtagagcctctgaaagcactttagggattgtagatggctaacaagcagtattaaaatttcaggagccaagtcacaatctttctcctgtttaacatgacaaaatgtatgtactcacttcagtacttcagctcttcaagaaaaaaaaaaaaa

SEQ ID NO: 90643 - DNA, 2992 bp, Artificial Sequence
  derived and/or modified sequence
ttatggcgattgggcggctgcagagaccaggactcagttcccctgccctagtctgagcctagtgggtgggactcagctcagagtcagttttccagaagcaggtttcagtgcagagttttcctacacttttcctgcgctagagcagcgagcagcctggaacagacccaggcggaggacacctgtgggggagggagcgcctggaggagcttagagaccccagccgggcgtgatctcaccatgtgcggatttgcgaggcgcgccctggagctgctagagatccggaagcacagccccgaggtgtgcgaagccaccaagactgcggctcttggagaaagcgtgagcagggggccaccgcggtctccgcgcctgtctgcaccctgtcgcctgagctgcctgacagtgacaatgacatcccagttaccagtgtccttgaattgatagtggcttctgtttgtcagtctcatataagaactacagctcatcaggaggagatcgcagcagggtaagagacaccaacaccatgttctgcacgaagctcaaggatctcaagatcacaggagagtgtcctttctccttactggcaccaggtcaagttcctaacgagtcttcagaggaggcagcaggaagctcagagagctgcaaagcaaccgtgcccatctgtcaagacattcctgagaagaacatacaagaaagtcttcctcaaagaaaaaccagtcggagccgagtctatcttcacactttggcagagagtatttgcaaactgattttcccagagtttgaacggctgaatgttgcacttcagagaacattggcaaagcacaaaataaaagaaagcaggaaatctttggaaagagaagactttgaaaaaacaattgcagagcaagcagttgcagcaggagttccagtggaggttatcaaagaatctcttggtgaagaggtttttaaaatatgttacgaggaagatgaaaacatccttggggtggttggaggcacccttaaagattttttaaacagcttcagtacccttctgaaacagagcagccattgccaagaagcaggaaaaaggggcaggcttgaggacgcctccattctatgcctggataaggaggatgattttctacatgtttactacttcttccctaagagaaccacctccctgattcttcccggcatcataaaggcagctgctcacgtattatatgaaacggaagtggaagtgtcgttaatgcctccctgcttccataatgattgcagcgagtttgtgaatcagccctacttgttgtactccgttcacatgaaaagcaccaagccatccctgtcccccagcaaaccccagtcctcgctggtgattcccacatcgctattctgcaagacatttccattccatttcatgtttgacaaagatatgacaattctgcaatttggcaatggcatcagaaggctgatgaacaggagagactttcaaggaaagcctaattttgaagaatactttgaaattctgactccaaaaatcaaccagacgtttagcgggatcatgactatgttgaatatgcagtttgttgtacgagtgaggagatgggacaactctgtgaaaaaatcttcaagggttatggacctcaaaggccaaatgatctacattgttgaatccagtgcaatcttgtttttggggtcaccctgtgtggacagattagaagattttacaggacgagggctctacctctcagacatcccaattcacaatgcactgagggatgtggtcttaataggggaacaagcccgagctcaagatggcctgaagaagaggctggggaagctgaaggctacccttgagcaagcccaccaagccctggaggaggagaagaaaaagacagtagaccttctgtgctccatatttccctgtgaggttgctcagcagctgtggcaagggcaagttgtgcaagccaagaagttcagtaatgtcaccatgctcttctcagacatcgttgggttcactgccatctgctcccagtgctcaccgctgcaggtcatcaccatgctcaatgcactgtacactcgcttcgaccagcagtgtggagagctggatgtctacaaggtggagaccattggcgatgcctattgtgtagctgggggattacacaaagagagtgatactcatgctgttcagatagcgctgatggccctgaagatgatggagctctctgatgaagttatgtctccccatggagaacctatcaagatgcgaattggactgcactctggatcagtttttgctggcgtcgttggagttaaaatgccccgttactgtctttttggaaacaatgtcactctggctaacaaatttgagtcctgcagtgtaccacgaaaaatcaatgtcagcccaacaacttacagattactcaaagactgtcctggtttcgtgtttacccctcgatcaagggaggaacttccaccaaacttccctagtgaaatccccggaatctgccattttctggatgcttaccaacaaggaacaaactcaaaaccatgcttccaaaagaaagatgtggaagatggcaatgccaattttttaggcaaagcatcaggaatagattagcaacctatatacctatttataagtctttggggtttgactcattgaagatgtgtagagcctctgaaagcactttagggattgtagatggctaacaagcagtattaaaatttcaggagccaagtcacaatctttctcctgtttaacatgacaaaatgtatgtactcacttcagtacttcagctcttcaagaaaaaaaaaaaaaaccttaaaaagctacttttgtgggagtatttctattatataaccagcacttactacctgtactcaaaattcagcaccttgtacatatatcagataattgtagtcaattgtacaaactgatggagtcacctgcaatctcatatcctggtggaatgccatggttattaaagtgtgtttgtgatagtgtcgtcaaaaaaaa

SEQ ID NO: 90644 - DNA, 2656 bp, Artificial Sequence
  derived and/or modified sequence
gacgggggtgggcgccgagcagcgccgcgccggctgctgagctcgcggggccgggccgtgagaacgcgcggggcgcgccggggccgctggtctcccacggccagggcgcctgggccccagagcccatcagccgcgtgcagcgctgcggcctccggcgcgccggcaggcaagcgagcgggcgcagctgggggatgcctggaccccggaggcagcagggctggaggcggtggcgggcttcagggcaacttcacccggccggctgcggcgtggacatcccagttaccagtgtccttgaattgatagtggcttctgtttgtcagtctcatataagaactacagctcatcaggaggagatcgcagcagggtaagagacaccaacaccatgttctgcacgaagctcaaggatctcaagatcacaggagagtgtcctttctccttactggcaccaggtcaagttcctaacgagtcttcagaggaggcagcaggaagctcagagagctgcaaagcaaccgtgcccatctgtcaagacattcctgagaagaacatacaagaaagtcttcctcaaagaaaaaccagtcggagccgagtctatcttcacactttggcagagagtatttgcaaactgattttcccagagtttgaacggctgaatgttgcacttcagagaacattggcaaagcacaaaataaaagaaagcaggaaatctttggaaagagaagactttgaaaaaacaattgcagagcaagcagttgcagcaggagttccagtggaggttatcaaagaatctcttggtgaagaggtttttaaaatatgttacgaggaagatgaaaacatccttggggtggttggaggcacccttaaagattttttaaacagcttcagtacccttctgaaacagagcagccattgccaagaagcaggaaaaaggggcaggcttgaggacgcctccattctatgcctggataaggaggatgattttctacatgtttactacttcttccctaagagaaccacctccctgattcttcccggcatcataaaggcagctgctcacgtattatatgaaacggaagtggaagtgtcgttaatgcctccctgcttccataatgattgcagcgagtttgtgaatcagccctacttgttgtactccgttcacatgaaaagcaccaagccatccctgtcccccagcaaaccccagtcctcgctggtgattcccacatcgctattctgcaagacatttccattccatttcatgtttgacaaagatatgacaattctgcaatttggcaatggcatcagaaggctgatgaacaggagagactttcaaggaaagcctaattttgaagaatactttgaaattctgactccaaaaatcaaccagacgtttagcgggatcatgactatgttgaatatgcagtttgttgtacgagtgaggagatgggacaactctgtgaaaaaatcttcaagggttatggacctcaaaggccaaatgatctacattgttgaatccagtgcaatcttgtttttggggtcaccctgtgtggacagattagaagattttacaggacgagggctctacctctcagacatcccaattcacaatgcactgagggatgtggtcttaataggggaacaagcccgagctcaagatggcctgaagaagaggctggggaagctgaaggctacccttgagcaagcccaccaagccctggaggaggagaagaaaaagacagtagaccttctgtgctccatatttccctgtgaggttgctcagcagctgtggcaagggcaagttgtgcaagccaagaagttcagtaatgtcaccatgctcttctcagacatcgttgggttcactgccatctgctcccagtgctcaccgctgcaggtcatcaccatgctcaatgcactgtacactcgcttcgaccagcagtgtggagagctggatgtctacaaggtggagaccattggcgatgcctattgtgtagctgggggattacacaaagagagtgatactcatgctgttcagatagcgctgatggccctgaagatgatggagctctctgatgaagttatgtctccccatggagaacctatcaagatgcgaattggactgcactctggatcagtttttgctggcgtcgttggagttaaaatgccccgttactgtctttttggaaacaatgtcactctggctaacaaatttgagtcctgcagtgtaccacgaaaaatcaatgtcagcccaacaacttacagattactcaaagactgtcctggtttcgtgtttacccctcgatcaagggaggaacttccaccaaacttccctagtgaaatccccggaatctgccattttctggatgcttaccaacaaggaacaaactcaaaaccatgcttccaaaagaaagatgtggaagatggcaatgccaattttttaggcaaagcatcaggaatagattagcaacctatatacctatttataagtctttggggtttgactcattgaagatgtgtagagcctctgaaagcactttagggattgtagatggctaacaagcagtattaaaatttcaggagccaagtcacaatctttctcctgtttaacatgacaaaatgtatgtactcacttcagtacttcagctcttcaagaaaaaaaaaaaaa

SEQ ID NO: 90645 - DNA, 2073 bp, Artificial Sequence
  derived and/or modified sequence
atgttctgcaccaagctgaaggacctgaagatcaccggggagtgccccttcagcctgctggcccctggccaggtgcccaatgaaagcagcgaggaggccgccggcagcagcgagagctgcaaggccaccgtgcccatctgccaggacatccctgagaagaacatccaggagagcctgccccagaggaagaccagccgcagccgggtgtacctgcacaccctggccgagagcatctgcaagctgatcttccctgagtttgagcggctgaatgtggccctgcagaggaccctggccaagcacaagatcaaggagagcaggaagagcctggagcgggaggactttgagaagaccatcgccgagcaggccgtggccgccggcgtgcctgtggaggtgatcaaggagagcctgggggaggaggtgttcaagatctgctatgaagaagatgagaacatcctgggcgtggtgggcggcaccctgaaggacttcctgaacagcttcagcaccctgctgaagcagagcagccactgccaggaggccggcaagaggggccgcctggaggatgccagcatcctgtgcctggacaaggaggatgacttcctgcacgtgtactacttcttccccaagaggaccaccagcctcatcctgcccggcatcatcaaggccgccgcccacgtgctgtatgaaacagaggtggaggtgtccctgatgccaccctgcttccacaatgactgcagcgagtttgtgaaccagccctacctgctgtacagcgtgcacatgaagagcaccaagcccagcctgagccccagcaagccccagagcagcctggtgatccccaccagcctcttctgcaagaccttccccttccacttcatgtttgacaaggacatgaccatcctgcagtttggaaatggcatccggcggctgatgaacagaagagacttccagggcaagcccaactttgaggagtactttgagatcctgacccccaagatcaaccagaccttcagcggcatcatgaccatgctgaacatgcagtttgtggtgcgggtgcggcgctgggacaacagcgtgaagaagagcagccgggtgatggacctgaagggccagatgatctacatcgtggagagcagcgccatcctcttcctgggcagcccctgtgtggaccggctggaggacttcaccggccggggcctgtacctgagtgacatccccatccacaatgccctgagagatgtggtgctgattggagagcaggcccgggcccaggacggcctgaagaagaggctgggcaagctgaaggccaccctggagcaggcccaccaggccctggaggaggagaagaagaagacagtggacctgctgtgcagcatcttcccctgtgaggtggcccagcagctgtggcagggccaggtggtgcaggccaagaagttcagcaatgtgaccatgctgttcagtgacatcgtgggcttcaccgccatctgcagccagtgcagccccctgcaggtgatcaccatgctgaatgccctgtacaccaggtttgaccagcagtgtggggagctggatgtgtacaaggtggagaccatcggagatgcctactgtgtggccggcggcctgcacaaggagagtgacacccatgctgtgcagatcgccctgatggccctgaagatgatggagctgagtgatgaggtgatgagcccccatggagagcccatcaagatgagaattggcctgcacagcggctctgtgtttgctggggtggtgggcgtgaagatgccccgctactgcctgtttggaaacaacgtgaccctggccaacaagtttgagagctgcagcgtgcccaggaagatcaacgtgagccccaccacctaccgcctgctgaaggactgccccggctttgtgttcacccccaggagccgggaggagctgccccccaacttccccagcgagatccctggcatctgccacttcctggatgcctaccagcagggcaccaacagcaagccctgcttccagaagaaggatgtggaggatggaaatgccaacttcctgggcaaggccagcggcattgattag

SEQ ID NO: 90646 - DNA, 2073 bp, Artificial Sequence
  derived and/or modified sequence
atgttctgcaccaagctgaaggacctgaagatcaccggcgagtgccctttttctctcttagctcccgggcaggtccctaacgagagcagcgaagaggccgccggttctagtgaatcttgcaaggccaccgtcccaatctgtcaagacattccggagaagaacattcaggagtcactgcctcaacgaaagaccagccggtctcgggtctatctacataccctggccgagagtatatgcaaattgatctttccagagtttgaaaggcttaacgtggctctgcaacggaccctggctaagcacaaaatcaaggaaagcagaaagtctctagagagggaggacttcgaaaaaaccatcgccgaacaggcagtggcagccggcgtacccgtggaagtgatcaaggaatcactgggcgaagaagttttcaaaatttgctacgaggaggatgagaacatattgggtgtcgtaggtgggaccttgaaagactttctcaatagcttctctacactgctgaagcaaagcagccactgccaggaggccgggaagaggggtaggctggaggatgcttcgattctgtgtcttgataaggaggatgactttcttcacgtgtattactttttccctaagcggaccacaagccttattttaccaggcatcatcaaagcggcggcccacgtcctgtatgagaccgaagtggaagtgtcccttatgcccccatgctttcataacgactgcagtgagttcgtcaaccaaccttatttactctattctgttcatatgaaatcaacaaagcccagcctttcccctagtaaacctcagagtagtctggtgatccctacgagtctgttctgcaaaaccttccctttccactttatgtttgacaaagacatgaccatcctgcagttcggaaacggcatccgacgactgatgaaccgacgcgactttcaggggaagccaaacttcgaagaatactttgagatcctgacacctaagataaaccagaccttctccgggatcatgacaatgctgaacatgcaattcgtcgtgcgagtgcgccggtgggataattctgtgaaaaaatcctccagagtcatggacctgaagggacagatgatctatattgtagaatcgagcgcaattctgttcctgggatccccatgcgtcgatcgtctggaagactttacgggccggggcttatacttgagtgacattcccatccacaacgcgcttagggatgtcgtgttaattggagaacaggctagagcccaggacggtctaaaaaagcggttgggcaagctcaaggctacgctagagcaggcacatcaggccctggaggaagagaagaagaagactgtggaccttctctgtagtatcttcccctgcgaggtggcccagcagctgtggcaagggcaggtggtgcaggcgaaaaagttcagcaatgtcacaatgctcttttcagatatcgtgggtttcaccgctatctgttcccaatgttctcctctccaggttattacaatgctgaacgcactgtatactagatttgaccagcagtgtggagaactcgacgtgtacaaggtggagaccataggtgatgcgtactgtgtcgctggggggctccataaggaaagcgacacacacgccgttcagatcgctttgatggctctgaagatgatggaactttccgacgaggttatgagcccacatggcgagccaattaaaatgcggatcgggctccactccgggtctgtgtttgccggcgtagtgggggtgaaaatgcctcgctactgcctgttcggcaataacgtaacgctggcgaacaaattcgagagctgctctgtgccccgcaagattaatgtgtcaccaaccacataccgactgctgaaggattgcccaggcttcgtgtttactcccagatcacgtgaggaactgccgcccaatttcccttcggagattcccggaatctgccattttctggacgcataccaacaggggacaaacagcaaaccgtgttttcagaagaaggacgttgaagacgggaacgccaactttttgggtaaggcctcagggatagattag

SEQ ID NO: 90647 - DNA, 2073 bp, Artificial Sequence
  derived and/or modified sequence
atgttctgcaccaagctgaaggacctgaagatcaccggcgagtgcccattttccctcctggcaccgggacaggtcccaaatgaaagcagtgaggaggctgcgggtagcagcgagtcctgtaaggccaccgtccccatctgtcaggatatccctgagaaaaacattcaggagtcccttcctcagagaaaaacaagcaggtcccgggtgtacctccacactctggcggaatccatttgcaaacttatttttcctgagttcgagcgtctcaatgtcgccttacaacgtacactggccaagcacaagataaaagaaagcaggaagtcgctggagagagaggattttgagaagaccatcgctgaacaagcagttgcggcaggagtgccagtggaggtgattaaagagagtttgggcgaggaggtcttcaaaatttgctacgaggaagatgaaaacatcctgggtgtcgttggcgggacacttaaagacttcctgaatagcttctctaccctgctgaagcagagtagtcattgccaagaagccggcaaacgcggccgcttggaagatgcttcaatattgtgcttagataaagaagatgattttcttcacgtatattattttttcccaaaacgcacaacctcattaatactgccgggaatcataaaggctgctgctcacgtgctgtatgagacagaggtggaagtaagtcttatgcctccatgcttccacaatgattgtagtgagttcgttaatcaaccctacctcctttattctgtgcacatgaagagtactaagccctcccttagcccgtccaaaccacagagttctctcgtgatccccacgtcactcttctgcaagacattcccttttcacttcatgtttgacaaagacatgacaattcttcagttcggaaatggcatcaggagactgatgaaccgccgggactttcaggggaagccaaattttgaggaatactttgagatacttacaccaaagattaaccaaacattttctgggattatgactatgttgaacatgcagtttgtggtgcgagttaggagatgggataacagtgtcaagaagtcgtctcgtgtaatggatcttaagggacagatgatttacatcgtggagtcatccgcaatcctgttcttggggtcaccgtgtgtggacagactggaggactttaccggacgcgggctgtacctctcagatattccaatccataacgctctgcgtgacgtggtcctcattggggaacaggctcgcgctcaggatggcttaaagaagcgcttggggaagctgaaggcaactcttgagcaggctcatcaggcgctggaagaagaaaagaagaaaaccgttgacctgttgtgctcaatatttccatgcgaagtggcccagcagctgtggcagggccaagtcgtacaggccaaaaaatttagtaatgtgactatgctattctcagatatcgtgggctttacagcaatttgttctcagtgctctccactacaggtgatcactatgctcaatgcgctctacactagatttgatcagcagtgcggcgagctggacgtgtataaggttgagacaattggggacgcctactgtgtggcgggcgggctacataaagagagcgacacacacgccgtccagattgccctgatggcgctcaagatgatggagctgtcagacgaagtgatgtccccacatggggaacccatcaaaatgcgaatagggctgcattcaggaagtgtttttgccggagtcgtgggtgtaaaaatgcctcgatactgtctttttggaaataacgtgaccctagcaaacaagtttgagtcctgctcagtgccacgcaaaattaatgttagtccaaccacatatcgcctgctgaaggactgccctggtttcgtctttacacctcgctcacgggaagagctgccccccaactttcccagcgaaatccctggaatatgccactttctcgatgcctatcaacagggcacaaattccaaaccctgcttccagaagaaagacgtcgaggacggtaatgcaaactttctaggcaaggccagcggcattgactag

SEQ ID NO: 90648 - DNA, 2073 bp, Artificial Sequence
  derived and/or modified sequence
atgttctgcaccaagctgaaggacctgaagatcaccggcgagtgccctttttccttgttggcccctggccaggtgccgaacgaatcaagtgaggaggctgccgggtcttcagaatcatgcaaggcgacggtaccgatctgtcaggatattcccgagaagaatatccaggagtccctgccgcaaaggaaaacttctcggtctcgcgtgtatctacacactttggccgagtctatatgtaagctgattttcccagaatttgaacggctcaatgtcgcccttcaacggacgttagccaaacataagatcaaggagagccgtaaatccctggaacgggaagatttcgagaaaacaatagctgaacaagccgtcgctgcaggtgtccctgtcgaagtgatcaaagagtccctaggagaagaagtgttcaagatttgttatgaagaagacgaaaacattctcggggttgttggcggcacactcaaggacttcctcaatagtttttcaaccttgctgaaacagagctcccattgtcaggaagccgggaagagaggccgactcgaggacgcgtctatcttgtgcttagacaaagaagacgactttctgcatgtgtattatttcttccccaaacgcaccactagcttaatcctgcctgggatcataaaggctgcagcccacgtcttgtacgagaccgaagttgaggtgtccctaatgcccccatgtttccacaacgattgcagcgaattcgtgaatcagccatacctcctgtactctgttcacatgaaatccactaagccatctttatctccctctaagcctcagagctctctggtcatccccacaagcctgttctgcaagaccttcccatttcactttatgtttgacaaagacatgaccatcctgcaattcgggaatggcatccggcggttaatgaatcgtagggatttccaggggaaacctaactttgaagaatactttgagatactgacacctaaaatcaaccagacctttagcgggataatgaccatgctcaacatgcaatttgtggtcagggtccgtcggtgggacaacagtgtaaagaagtccagcagagtaatggacctgaaggggcaaatgatctatattgtggaaagctccgcaattctttttcttggtagcccttgtgtggacagacttgaagacttcacgggcaggggcctctacctctccgacattccgatccacaacgcgctccgtgatgtcgtgctgatcggggaacaggcccgcgctcaggatggtcttaaaaagagactggggaaactgaaggcgactctggaacaggcccaccaggcattggaggaggaaaaaaagaagacagtcgacctcctgtgttccatctttccatgcgaggtggctcagcagctgtggcagggacaggttgtgcaagctaaaaaattttcaaatgtcactatgctgttcagcgacatagtcggtttcaccgcaatttgctctcagtgctccccactgcaagttatcaccatgctaaacgctctgtacactagatttgaccagcagtgtggtgagctggatgtgtataaggttgaaacaatcggtgatgcttattgcgtggctgggggactgcataaggaatctgatacgcatgctgtccaaatagctctcatggccttaaagatgatggaactatctgatgaggtgatgagcccccacggcgaacctattaagatgcgcataggattgcattccgggagtgtctttgctggcgtggtgggggtgaagatgcctcggtattgcttattcggtaacaacgtgaccctggccaataaatttgaatcctgcagcgtgcccagaaagatcaacgtctcccccacaacttaccgattgctcaaggattgcccaggattcgtgtttaccccgagatccagagaagagctgccaccaaactttcccagcgagattccaggaatctgtcactttctcgacgcctatcagcagggaacaaacagcaagccctgcttccagaagaaagatgttgaagacggaaatgccaactttctggggaaagctagtggcatcgactag

SEQ ID NO: 90649 - DNA, 2073 bp, Artificial Sequence
  derived and/or modified sequence
atgttctgcaccaagctgaaggacctgaagatcaccggcgagtgcccattctctctactggcgccgggccaggtgcccaacgagtcatctgaggaggccgctggatcttctgaatcttgcaaagccaccgtccctatttgccaagatattcctgagaagaacatacaggagtctctccctcaaaggaaaacctcaagaagcagagtgtacctacacacgttagccgaatccatatgtaagctgatttttcctgagttcgagagattgaatgtggccctgcagcgtacccttgccaagcataaaattaaggagagtaggaagtcacttgaaagggaggacttcgagaagaccatcgctgagcaggctgtggccgcaggcgtgcccgtggaggttatcaaggagagtttgggtgaggaggtgtttaaaatttgctacgaagaagatgaaaatatcctgggggtcgttggaggtaccctcaaagatttccttaattcttttagcacattactcaaacaatcctcacactgccaagaagccggaaagcgcggaaggctggaagacgcatctatcctttgtcttgacaaggaagatgactttctccacgtgtactacttcttccccaaacgaacaacatctctcatattgccaggtatcataaaagctgctgcacacgtgctgtacgagacggaagttgaggtatctctgatgccaccatgttttcataacgactgttctgaattcgtaaatcaaccatacctgctgtactccgtgcatatgaagtccacaaagccctcactctctccttcaaaaccacaatcttctctggtgattcccacaagcctgttttgtaagaccttccccttccacttcatgtttgataaagatatgaccatcctgcagtttggcaatggcatccgcaggctgatgaatagacgcgattttcaaggtaagcccaattttgaggaatacttcgaaatcttaacgcctaaaatcaaccagaccttttcaggcatcatgaccatgctcaatatgcaattcgttgtgcgtgtcagacggtgggacaactcagtgaagaaaagttccagagttatggacttgaaaggacagatgatctatatcgtagagtcttctgccattctcttcctgggaagcccatgcgtagaccggctggaagattttaccgggcggggcttgtacttgtcagatattccaattcacaacgcactccgcgacgtggtcctaatcggcgagcaagcacgtgcacaggatgggctaaaaaaaaggctagggaagttaaaggccacattggaacaggctcaccaagcattagaggaagaaaaaaaaaaaacggtggaccttttatgctctatattcccctgtgaggtagctcaacagctctggcagggccaggtcgtacaagccaagaaattcagcaatgttacaatgctattctccgatattgtgggtttcaccgctatttgttctcagtgctccccccttcaggttattaccatgctgaacgccctgtacacaaggtttgatcagcagtgcggcgagttagatgtgtataaagtcgagaccattggagacgcgtattgcgtggctggtggactccacaaagagtcagatacccatgccgtgcagattgccctgatggccctgaagatgatggaattgtcagacgaagtcatgtcaccccacggggagcccatcaagatgagaattggtcttcacagtggtagcgtgtttgccggagtcgtcggggttaagatgcccagatactgcttattcggaaataatgtgactttggcaaataaattcgagagctgctccgttccccgtaagattaatgtatcccctactacatatagattgctgaaggattgccctggtttcgtgttcacaccacggtcccgtgaggaactgcctcccaactttccgtccgagattcctggtatttgccacttcctcgatgcttatcaacaaggaactaattccaaaccatgcttccaaaagaaggacgtggaagacggcaatgcgaattttctgggaaaagctagcggaatcgactag

SEQ ID NO: 90650 - DNA, 2073 bp, Artificial Sequence
  derived and/or modified sequence
atgttctgcaccaagctgaaggacctgaagatcaccggcgagtgccctttctcactcttggcgccgggacaagtgcccaacgagagtagcgaggaggccgcgggctccagcgagagctgcaaagctactgttccaatctgtcaagatatccccgaaaagaatatccaggaaagtcttccacaacggaaaacctcccgcagtcgtgtgtacttacacactctggctgaatcaatttgcaagttgatattcccagagtttgagcgactgaatgtggccttacaaaggaccctggccaagcacaaaatcaaggaaagtaggaagtcactggaacgggaggatttcgagaaaactattgcagagcaggccgtggccgctggcgtccctgtcgaggtcatcaaagagtctcttggagaagaggtgttcaaaatctgctacgaagaggacgaaaacattctcggcgttgtcggcgggacactcaaggactttcttaatagtttttctaccttgctgaagcagagctcccactgccaggaggccggcaagcgtggccgattggaagatgcctccattctctgtctggacaaagaagatgactttcttcacgtgtactacttcttcccgaaacgaacaaccagtctgatcctgcccggcatcatcaaagctgctgcacacgttctgtatgaaactgaggtggaggtatcactgatgccaccttgcttccataacgactgttccgagttcgttaatcagccctatttgctgtatagcgtgcatatgaagtctacaaagccgtccctttccccgtcaaagccccagtcgtcgctggtcatccctacctccttgttctgtaaaactttccccttccactttatgttcgacaaggacatgaccattctgcagttcggcaacggcatccgcaggcttatgaatcgccgggacttccagggcaaacccaattttgaagaatattttgaaattctgacaccaaagattaaccagacattctctggtattatgacaatgctgaacatgcagttcgtagtccgggttcgcaggtgggataattcagtcaaaaagtcgagtagagtgatggaccttaaaggacagatgatctacattgtggagtcctctgctatcttatttctgggaagcccttgtgtggatcggctggaggattttacagggcggggcttgtacctttccgacataccaattcataacgccctcagggacgttgtactcatcggggaacaggctcgtgcgcaggatggccttaaaaagcgcctgggtaagttgaaggctacactggagcaagcccatcaggctctcgaggaggagaaaaagaagaccgtggatcttctgtgttcgatattcccatgcgaggtcgcacagcaattatggcagggccaggtcgtccaagctaagaaattcagcaacgtcacaatgctgttttccgatattgtaggcttcactgcgatctgctctcagtgtagcccgcttcaggtgataaccatgctcaatgcattgtacacaagatttgatcagcagtgcggggagctagatgtatacaaagtcgaaacaatcggtgacgcctactgcgttgccggggggctgcataaagaaagcgacacacacgctgtacagatcgctctgatggccctgaagatgatggagttatcagatgaggtcatgtctccccacggagagcccatcaagatgcgaatagggttacacagtggaagcgtgttcgccggtgtggttggagtaaaaatgcctaggtactgtttgttcggcaataacgtcactctggcaaacaagtttgagagctgtagcgtgccccggaagataaatgtctcccccacaacatatcgcctgctcaaggattgtccaggtttcgtgtttactccccgatccagggaagagctacccccaaatttcccctctgaaatccccggtatttgccacttcctggacgcataccagcagggcactaactctaaaccgtgctttcagaaaaaggacgtggaggacggaaacgctaattttttggggaaggcatccgggatagactag

SEQ ID NO: 90651 - DNA, 2073 bp, Artificial Sequence
  derived and/or modified sequence
atgttctgtacgaagctaaaagatcttaaaattactggtgaatgtcctttttcgctgctggctcccggacaggtccctaacgagtcaagcgaggaagccgctggcagtagcgaatcttgtaaagccaccgtgccaatttgtcaggatatcccagagaagaatattcaggagagcctgccccagcgcaagacttctcgcagcagagtgtatctccacaccctagctgaatccatctgcaagctgattttccccgagtttgagcgcctgaacgtagcattacagaggactcttgccaaacacaaaattaaggagtccagaaagagcctagagagagaggattttgaaaagacgatagccgaacaggccgtagccgctggcgtgcctgtggaagtgatcaaggagtctttgggcgaggaggtgtttaaaatttgctatgaagaggatgaaaacatcctcggggttgtgggtggaacactgaaagactttctcaactcttttagcactctgctgaagcagagttcccactgtcaggaggctggtaaaaggggcagactggaagatgcatccatactgtgtctcgataaagaagacgattttctgcatgtatactactttttccccaaacgaacaacctcactcatcctgcctggtataatcaaggcggctgcccacgtgctgtatgaaactgaggtggaagtttcgctcatgcccccatgctttcacaatgattgctctgaattcgttaaccagccgtatctgctctatagcgtgcacatgaagagcacaaaaccatcacttagcccaagcaagccacagtccagcctggtcatccctacaagcctcttttgcaagacatttcctttccacttcatgttcgataaggatatgactatactccagtttggcaacgggatcaggcgtcttatgaatagacgcgactttcagggtaagccaaatttcgaagaatatttcgaaatacttactcccaaaattaaccagacatttagcggcatcatgaccatgctgaatatgcaatttgtggtgagggtccggagatgggacaactcagtgaaaaaatcctccagggtgatggatctcaagggccaaatgatttatatcgtcgaaagtagtgctatactgttcctcgggtctccttgcgtggatcggctcgaggattttacggggaggggtttgtacttgtccgatattcctattcataacgccctccgtgacgtggtgctgattggtgagcaagctcgggcacaggacggactcaagaaacgactgggcaagttgaaagcgacattggaacaggctcaccaggctttggaggaggaaaagaagaaaaccgtcgacctgctttgttcaatttttccgtgcgaggtggctcagcagctgtggcagggccaggtggtgcaggcaaaaaagttctcaaacgtgaccatgctgtttagcgatatagtgggatttaccgctatttgtagccaatgctctcccctgcaggtgatcactatgctaaacgccctgtacacccgcttcgaccaacagtgcggcgagctcgacgtgtacaaagtcgagacaatcggtgacgcctattgcgtggcaggaggactccacaaagaatcagacacgcacgcggtgcagatcgctttaatggcactcaagatgatggaactgagtgatgaggttatgagtccacacggggagccgattaagatgcgcatcggtctccatagtgggtctgtatttgcaggtgttgttggtgtgaagatgcctaggtattgcctgttcggcaacaacgttacgcttgccaataagtttgagtcttgctccgttcctcgcaagattaacgtgagccccacgacatatcgtctcctgaaggattgccccggtttcgtgttcactccacgttctcgcgaggaactgcctccaaacttcccgtccgaaataccaggaatttgtcacttccttgacgcataccaacagggcaccaatagcaagccctgttttcagaagaaagatgtcgaagatgggaatgctaacttcctggggaaggcaagcggtattgactag

SEQ ID NO: 90652 - DNA, 2073 bp, Artificial Sequence
  derived and/or modified sequence
atgttctgcactaagttgaaagatctcaagataaccggagagtgcccattcagcctcctcgctccaggccaggtgcccaacgagagcagcgaggaggccgcaggttcatccgaatcatgtaaggccaccgtccccatctgccaggacatccccgagaaaaacatacaggagtctctccctcagaggaagacgtcccggtctagagtctacttgcatactttggctgaatccatctgtaagctgatcttccctgaatttgaacgactcaatgtcgccctccagcgaaccctggccaagcacaaaatcaaggagagcagaaaatcactcgagcgcgaggatttcgagaaaactattgctgagcaggcagtcgctgccggagtgccggtggaagtcatcaaggagagtctgggcgaggaggtctttaagatttgctacgaggaagacgagaacatccttggcgtggtgggcggtactctgaaggattttctcaacagctttagtaccctgctaaaacagtcgtcccattgtcaggaagcgggaaaaaggggtaggctcgaggatgcgtctatattgtgcttggacaaggaagacgatttcttacacgtgtactacttcttccccaagaggaccacatctctcattcttcccggtatcatcaaggcagccgctcacgttctatacgaaaccgaagttgaagtaagcctgatgcccccatgcttccataacgactgtagcgaatttgtgaaccaaccatatctgctgtactccgttcatatgaagtcaaccaaacccagcctctcgccaagtaagccccaatcctccctggtgatccccaccagcctcttttgcaaaacgttccccttccattttatgttcgataaggatatgacgatcctacagttcggcaacggtatccgtcgcttgatgaacaggcgggatttccaggggaagccaaactttgaggaatacttcgagatccttactcctaagattaaccagacattctccggaatcatgaccatgttgaatatgcagtttgtcgttcgggtcaggaggtgggacaattccgtcaagaagtcttcacgggtcatggacctgaaggggcaaatgatctatatcgtggaaagctccgcaatacttttcctaggctccccatgcgtcgatcggctcgaagactttaccggaaggggactgtacctgagtgatattccaatccataatgcgcttcgagacgtggtattaatcggggagcaagcacgtgctcaagatggccttaagaagcggcttgggaagctgaaggctaccctcgagcaggcccaccaagctctcgaagaggagaagaaaaaaacagtggacctgctgtgcagcatcttcccgtgtgaggtcgcacagcagctgtggcaggggcaggtcgtgcaggccaagaagtttagtaacgtcaccatgctctttagcgatatcgtaggcttcaccgcgatatgcagtcagtgcagccctttacaggttatcacgatgctcaacgccctctacactagatttgaccagcagtgcggtgaattggacgtgtataaagtggagaccataggtgacgcatattgtgtcgccggtggtttgcacaaggaaagcgacactcacgccgtccaaatcgcgctcatggcgctcaagatgatggagctaagcgatgaggtcatgagccctcacggcgaacccatcaagatgaggattggcttgcacagcgggagtgttttcgccggtgtcgtaggggtgaaaatgcctcgctactgcctgttcggaaataatgtgactctcgctaataagtttgagagctgcagtgtgcccaggaagatcaacgtctcaccaactacctatcggctgctcaaagattgcccaggattcgtctttacgccccgttctcgtgaggagctccctccaaactttccatcagaaattcccggaatctgtcacttccttgacgcctaccagcagggaacaaacagtaaaccttgtttccaaaaaaaggacgttgaggacggcaacgcgaattttctgggaaaagcttctggaattgactag

SEQ ID NO: 90653 - DNA, 2073 bp, Artificial Sequence
  derived and/or modified sequence
atgttttgcacaaagcttaaggacctgaagatcactggggagtgcccatttagcctactggcccctggccaggtaccaaatgagtccagtgaggaggccgctggcagttctgaatcctgcaaggccaccgttcccatctgccaagatatccccgagaagaatattcaggaaagcctcccacagcgaaaaacctcaagatcgcgggtctatttgcacacactggcagaatccatctgcaagcttatttttcctgagttcgagagattgaatgtagcactgcaacgcacactggctaagcacaaaatcaaggagtcccggaaaagccttgagagggaagacttcgaaaagactatcgctgaacaggccgtcgctgctggggtgccggtggaggtaatcaaagaaagcctgggagaggaggtgttcaaaatttgttacgaagaggatgagaacatcctgggcgttgtgggcggaacacttaaggattttctcaattcatttagcacactgctaaaacagtcatcccactgccaggaggcgggtaagaggggacgcctggaggacgcctccatactttgtcttgataaggaggacgattttctgcacgtgtactacttctttcccaaacgtactacatcactcatcctgcccggaattatcaaggctgctgcccatgttctatatgaaactgaggtggaagtttccctcatgcccccttgcttccacaatgattgctccgagtttgtgaaccagccttatcttttgtacagcgtgcacatgaaaagcaccaagcccagcctgtcaccatcaaaaccacagagctccctggtcatcccaacctctttgttttgcaagacatttccatttcatttcatgttcgataaggatatgactattctgcagttcggcaacggcatcagacggctgatgaacagaagagactttcagggaaagccaaattttgaggagtactttgaaatcctgacgcccaaaattaatcagaccttcagcgggatcatgactatgctcaatatgcagttcgtggttcgagtgcggagatgggacaattctgtgaagaaatcctcccgagtgatggatctgaagggccaaatgatttacattgtggaaagctctgccattctgttcctgggaagcccctgcgttgaccgcctggaggacttcaccggaagagggctctacctgtcagatatacccatacacaacgccctccgtgacgtggtcctgattggagaacaagcaagagctcaggacgggttgaagaaaagattgggaaaactgaaggctactctggaacaggctcatcaagccttggaagaagaaaagaaaaaaactgtggatctgctttgtagtatcttcccctgtgaggtggctcagcagttatggcaggggcaggtggtacaagctaaaaaattctctaatgtgactatgcttttctccgacatcgttggctttactgccatatgttctcaatgctccccgttgcaggtgattactatgctaaacgcactctatacacgattcgatcagcagtgtggcgaacttgatgtttataaggtagagaccatcggagacgcctattgtgttgcaggaggcctgcacaaagagtccgatactcacgccgtgcaaatcgccctcatggccctcaaaatgatggaactctcagacgaggtgatgagcccacatggagagcctataaaaatgcgtattggtcttcacagtgggtcagtgttcgccggtgtggtaggggtgaaaatgcccaggtactgcttatttgggaacaatgtgactctcgctaacaagttcgaaagctgttccgttcccagaaaaattaatgtgtctcctacaacttacaggctgttgaaggattgcccaggctttgtattcacacctaggtcccgagaggagctaccccctaactttccaagcgaaatcccaggtatctgccacttcttagacgcatatcaacaggggacgaactcaaaaccctgtttccagaaaaaagacgtggaggacgggaacgccaactttttaggaaaagccagtggcattgactag

SEQ ID NO: 90654 - DNA, 2073 bp, Artificial Sequence
  derived and/or modified sequence
atgttctgtactaagctgaaagatctgaagattactggcgagtgtccctttagccttctcgctccaggtcaagttcctaacgagagctcagaggaagcagccggttcatccgagtcatgcaaggccactgttcccatctgccaggatatcccggaaaagaacatacaggagtccctccctcagcgtaagacatcccgttctagagtgtacctgcatacactggccgaaagcatatgcaaacttatattcccagaattcgagaggctcaacgtggcgctgcagcgcactctagccaagcataaaataaaagaatcacggaaaagcctcgagcgtgaagacttcgagaaaactattgccgagcaggccgtggcagccggagttccagtcgaggtaattaaggagagcctgggagaagaagtgtttaaaatttgctacgaggaggacgaaaacatccttggagtggtcggaggcactcttaaagactttctaaactcttttagtacacttttgaaacagtcctcccactgccaggaggctggcaagagggggaggctggaggacgcctctattttgtgcctggataaagaagacgattttctacatgtttattacttctttccaaaacgtacaacctctctgatcttacctggcataatcaaggcagccgctcacgtgctgtatgagacagaagtcgaagttagcctgatgccgccttgttttcacaacgattgctccgaatttgttaatcaaccgtacttactctattcagtccatatgaaaagtacaaaaccatctctaagcccgtcaaaacctcagtcctccctggtcatacctacaagcctgttttgtaagacctttcccttccacttcatgttcgataaggacatgactattctgcagttcggcaatggcatacgcaggctgatgaatagacgggactttcaggggaagccaaatttcgaagagtacttcgagattctaacccctaagataaaccaaacgttttcaggcatcatgactatgttaaacatgcagtttgtggtccgggtgcggcgttgggacaacagcgtgaagaaatctagcagggtgatggatttgaaagggcagatgatttacatcgttgagtcaagcgccattttgttcctggggagcccatgcgtggatagactcgaggatttcactggaaggggcctttacctctccgacatccccatacataacgctttgagggatgtggtacttatcggagagcaagctagggcccaggacggtctgaagaagagacttgggaagcttaaggccacattggaacaggctcaccaggctctggaggaggagaagaagaagacggtagatcttttatgtagcatttttccctgtgaggtcgcacagcaactttggcaggggcaagttgttcaagctaagaaattctctaatgtcactatgctcttctctgacatagtgggctttacagccatatgttcccagtgctcgcctctgcaagtgatcaccatgttgaatgccttgtacactaggtttgatcagcagtgtggcgaacttgatgtgtataaggtagaaaccattggcgatgcatactgtgtagcaggtgggctgcataaggaatccgatacccatgccgtgcagattgcgctgatggcactgaaaatgatggaactctcagatgaagtgatgagtccacatggcgaacctatcaagatgcggattgggctgcacagcggctccgtcttcgcaggcgtcgtcggtgtgaaaatgccaagatactgtctgttcggaaacaacgtgactctggccaataagtttgagtcttgcagtgtgcccagaaagattaatgtgtctccaactacctacaggctcttgaaggactgtccaggattcgtgtttaccccccgatcacgggaagagctgccccctaactttccaagcgaaattcctgggatctgccacttcctcgacgcataccagcagggcactaatagcaagccatgtttccaaaagaaggacgtggaggatggcaatgcaaacttcctagggaaagcttccgggattgactag

SEQ ID NO: 90655 - DNA, 2073 bp, Artificial Sequence
  derived and/or modified sequence
atgttctgcaccaaactcaaagacctcaagattactggggagtgtccgttttctctactggcaccagggcaggtgcccaatgagtcttcggaggaagcagccggaagctcggaatcatgtaaagccaccgttcctatctgccaggatattcccgaaaaaaacatacaggagagccttcctcagcgaaagactagtcgatcacgtgtctatctgcacacattggccgaatctatatgcaaacttatttttcccgaatttgaacgcttgaacgtcgctttgcagagaacgctcgcaaagcacaagatcaaggagagccgcaaatcactggagagagaagatttcgagaagacaatcgccgaacaggcagtcgccgctggcgtgcccgtggaagtgataaaggagtccttgggagaggaggttttcaaaatttgttacgaggaagatgaaaacatcctgggtgtcgtaggaggaacactcaaagattttcttaatagtttctccacattgctaaaacagtcatcacactgccaggaagccggaaaacgcggaagattagaagacgccagcatcttatgcctggataaggaagatgactttctgcatgtttactatttcttcccaaagcggacgacatctctaattctgcctggcatcattaaggccgctgcccatgtgctgtacgagactgaggtcgaggtctctttaatgcctccctgcttccacaacgactgctcagaatttgtgaatcaaccttatctgctctattctgtgcacatgaagtccacaaagcctagtctcagtcccagcaagccacagagtagtctggtgattcccaccagcttgttctgtaagacatttccgttccactttatgttcgacaaggacatgacaatcttgcagttcgggaatgggattcgcagactgatgaacagacgcgattttcaggggaaaccgaacttcgaggagtactttgaaatcctgactcccaagattaatcaaacgtttagcggaattatgacgatgctaaacatgcaattcgtggtaagagtgagacggtgggacaatagcgtgaaaaagtcctctagagtgatggacctgaaaggccaaatgatttacatcgtagaatcatccgcaatcctttttctgggcagtccttgtgtggaccgcctggaggatttcaccggccgagggctttatctcagcgacatcccgattcacaatgcccttagagatgtcgtactgatcggagaacaagctcgagcacaggacggactcaaaaagaggctgggaaagctgaaggcaaccttggagcaagcccaccaggccctggaagaggaaaagaaaaagacagtcgatcttctatgttccatattcccctgtgaagtcgctcaacagctgtggcagggacaggtggttcaggctaagaagttctccaacgtgacaatgcttttttcagacatcgtggggtttaccgccatctgctctcagtgctctcctctgcaggtgatcaccatgctcaatgccctgtacaccaggtttgaccagcagtgtggagagcttgacgtctataaggtggagaccatcggtgatgcctactgtgtggcgggtggcttacacaaggaaagcgacacacatgccgtccagatagcccttatggccctaaagatgatggagctgagcgatgaggtcatgtctccacacggggaacccatcaaaatgcggatcggactgcacagcggctccgtttttgccggagtagtgggggttaagatgccgcgatattgtttatttggcaataatgttaccttggccaacaaattcgaatcctgttccgtgccacgcaagattaacgtttcccccacaacatatcgtctccttaaggattgtccagggtttgtgttcacacccagatctcgagaagagctaccacccaacttccccagcgaaatccctggaatctgtcattttttagatgcctaccagcaggggacaaacagcaaaccttgttttcagaagaaagacgtggaagacggaaatgccaacttcttgggcaaagctagtggcatcgactag

SEQ ID NO: 90656 - DNA, 2073 bp, Artificial Sequence
  derived and/or modified sequence
atgttctgcaccaagctgaaggacctgaagatcaccggcgagtgccccttcagcctgctggcccccggccaggtgcccaacgagagcagcgaggaggccgccggcagcagcgagagctgcaaggccaccgtgcccatctgccaggacatccccgagaagaacatccaggagagcctgccccagagaaagaccagcagaagcagagtgtacctgcacaccctggccgagagcatctgcaagctgatcttccccgagttcgagagactgaacgtggccctgcagagaaccctggccaagcacaagatcaaggagagcagaaagagcctggagagagaggacttcgagaagaccatcgccgagcaggccgtggccgccggcgtgcccgtggaggtgatcaaggagagcctgggcgaggaggtgttcaagatctgctacgaggaggacgagaacatcctgggcgtggtgggcggcaccctgaaggacttcctgaacagcttcagcaccctgctgaagcagagcagccactgccaggaggccggcaagagaggcagactggaggacgccagcatcctgtgcctggacaaggaggacgacttcctgcacgtgtactacttcttccccaagagaaccaccagcctgatcctgcccggcatcatcaaggccgccgcccacgtgctgtacgagaccgaggtggaggtgagcctgatgcccccctgcttccacaacgactgcagcgagttcgtgaaccagccctacctgctgtacagcgtgcacatgaagagcaccaagcccagcctgagccccagcaagccccagagcagcctggtgatccccaccagcctgttctgcaagaccttccccttccacttcatgttcgacaaggacatgaccatcctgcagttcggcaacggcatcagaagactgatgaacagaagagacttccagggcaagcccaacttcgaggagtacttcgagatcctgacccccaagatcaaccagaccttcagcggcatcatgaccatgctgaacatgcagttcgtggtgagagtgagaagatgggacaacagcgtgaagaagagcagcagagtgatggacctgaagggccagatgatctacatcgtggagagcagcgccatcctgttcctgggcagcccctgcgtggacagactggaggacttcaccggcagaggcctgtacctgagcgacatccccatccacaacgccctgagagacgtggtgctgatcggcgagcaggccagagcccaggacggcctgaagaagagactgggcaagctgaaggccaccctggagcaggcccaccaggccctggaggaggagaagaagaagaccgtggacctgctgtgcagcatcttcccctgcgaggtggcccagcagctgtggcagggccaggtggtgcaggccaagaagttcagcaacgtgaccatgctgttcagcgacatcgtgggcttcaccgccatctgcagccagtgcagccccctgcaggtgatcaccatgctgaacgccctgtacaccagattcgaccagcagtgcggcgagctggacgtgtacaaggtggagaccatcggcgacgcctactgcgtggccggcggcctgcacaaggagagcgacacccacgccgtgcagatcgccctgatggccctgaagatgatggagctgagcgacgaggtgatgagcccccacggcgagcccatcaagatgagaatcggcctgcacagcggcagcgtgttcgccggcgtggtgggcgtgaagatgcccagatactgcctgttcggcaacaacgtgaccctggccaacaagttcgagagctgcagcgtgcccagaaagatcaacgtgagccccaccacctacagactgctgaaggactgccccggcttcgtgttcacccccagaagcagagaggagctgccccccaacttccccagcgagatccccggcatctgccacttcctggacgcctaccagcagggcaccaacagcaagccctgcttccagaagaaggacgtggaggacggcaacgccaacttcctgggcaaggccagcggcatcgactag

SEQ ID NO: 90657 - protein, 1196 aa, Artificial Sequence
  derived and/or modified sequence
MEPRPTAPSSGAPGLAGVGETPSAAALAAARVELPGTAVPSVPEDAAPASRDGGGVRDEGPAAAGDGLGRPLGPTPSQSRFQVDLVSENAGRAAAAAAAAAAAAAAAGAGAGAKQTPADGEASGESEPAKGSEEAKGRFRVNFVDPAASSSAEDSLSDAAGVGVDGPNVSFQNGGDTVLSEGSSLHSGGGGGSGHHQHYYYDTHTNTYYLRTFGHNTMDAVPRIDHYRHTAAQLGEKLLRPSLAELHDELEKEPFEDGFANGEESTPTRDAVVTYTAESKGVVKFGWIKGVLVRCMLNIWGVMLFIRLSWIVGQAGIGLSVLVIMMATVVTTITGLSTSAIATNGFVRGGGAYYLISRSLGPEFGGAIGLIFAFANAVAVAMYVVGFAETVVELLKEHSILMIDEINDIRIIGAITVVILLGISVAGMEWEAKAQIVLLVILLLAIGDFVIGTFIPLESKKPKGFFGYKSEIFNENFGPDFREEETFFSVFAIFFPAATGILAGANISGDLADPQSAIPKGTLLAILITTLVYVGIAVSVGSCVVRDATGNVNDTIVTELTNCTSAACKLNFDFSSCESSPCSYGLMNNFQVMSMVSGFTPLISAGIFSATLSSALASLVSAPKIFQALCKDNIYPAFQMFAKGYGKNNEPLRGYILTFLIALGFILIAELNVIAPIISNFFLASYALINFSVFHASLAKSPGWRPAFKYYNMWISLLGAILCCIVMFVINWWAALLTYVIVLGLYIYVTYKKPDVNWGSSTQALTYLNALQHSIRLSGVEDHVKNFRPQCLVMTGAPNSRPALLHLVHDFTKNVGLMICGHVHMGPRRQAMKEMSIDQAKYQRWLIKNKMKAFYAPVHADDLREGAQYLMQAAGLGRMKPNTLVLGFKKDWLQADMRDVDMYINLFHDAFDIQYGVVVIRLKEGLDISHLQGQEELLSSQEKSPGTKDVVVSVEYSKKSDLDTSKPLSEKPITHKESKGPIVPLNVADQKLLEASTQFQKKQGKNTIDVWWLFDDGGLTLLIPYLLTTKKKWKDCKIRVFIGGKINRIDHDRRAMATLLSKFRIDFSDIMVLGDINTKPKKENIIAFEEIIEPYRLHEDDKEQDIADKMKEDEPWRITDNELELYKTKTYRQIRLNELLKEHSSTANIIVMSLPVARKGAVSSALYMAWLEALSKDLPPILLVRGNHQSVLTFYS

SEQ ID NO: 90658 - DNA, 3591 bp, Artificial Sequence
  derived and/or modified sequence
atggagccccgccccaccgcgccctcttcgggcgctccaggcctggcgggtgttggtgagacaccttctgccgccgctctcgcggctgctcgcgttgagctccctgggaccgcagtgcctagtgtgcccgaagatgctgccccagcctctagggatgggggcggagtaagggacgaaggacccgcagctgctggtgatggactcggacgccccctgggccctacgccctctcaaagccggttccaggtggacttagtttccgagaatgccggccgggccgccgccgctgctgctgctgccgccgccgctgcggcagcagcaggcgctggcgcaggggctaaacagactcctgcagacggggaagcatctggcgagtctgaaccagcaaagggctctgaggaagccaagggccggtttcgagtgaattttgtagaccctgctgccagctcaagtgctgaagactctctcagtgatgccgcaggagttggggtggatggcccaaacgtaagtttccagaacgggggcgacactgtgctcagcgaggggtcctcattgcatagtggcggtggcgggggctccgggcaccaccaacattattattacgatacgcacacgaacacctattatttgcggacatttggacacaacacgatggatgcagtcccaagaatcgaccattatagacacaccgctgcacagctgggggagaagttactccgcccctccctcgctgaattgcacgatgagcttgagaaggagccttttgaagatggctttgctaatggcgaggagagtacccctacaagagacgccgtcgtgacctatactgcggagtctaaaggcgtggtgaaattcggctggataaaaggcgtactggtgagatgcatgctgaatatttggggtgtaatgttgttcataagactgagctggattgttggccaggccgggatcggactcagcgtgctcgtgatcatgatggcaacagtagtgaccactatcactggcctcagcacaagcgccatcgccacaaacggctttgttagaggggggggagcctattatctcatctcaagaagcctggggccggaattcggcggcgctattggtctgattttcgcattcgcaaacgcagtcgcggtcgcgatgtacgttgtgggcttcgccgagaccgtggtcgagctgctaaaagagcacagcattctgatgattgacgaaattaacgacatccgaattattggagccataacagtggtgattttgctgggcatttctgttgctgggatggaatgggaagcaaaggcacaaatcgtattgctggtaatccttttattggctattggcgatttcgtgatcggcacatttataccactggagagcaagaagccgaaaggtttttttggttacaagagcgagatattcaacgaaaactttgggccggactttcgtgaggaggaaacattttttagcgtctttgctatcttttttcccgcggctaccggcatactcgccggagcaaacatctctggagatttggctgacccacagtcggccattccgaagggcacgctactcgctattttgattacaaccctggtttacgtcgggatcgccgtgagtgtcgggtcatgcgttgtccgagacgccacaggcaatgtgaatgacacaatcgttaccgaactgactaactgcaccagtgccgcgtgtaagttgaatttcgattttagtagttgtgagtcttctccctgcagctacggactgatgaacaactttcaggttatgtccatggtcagcggatttactccgcttatcagtgccgggatcttcagcgctacgttatcatccgctctggcttctttagtgagtgcaccgaagatttttcaggccctttgcaaggacaatatctaccccgcctttcagatgttcgccaaagggtacggcaaaaataacgagcccctccgtgggtatattctcacattcctgatcgcactgggtttcatccttattgcagagctcaacgtcattgctccaattatctccaattttttcctggcaagttatgcacttataaatttttcagtgtttcacgccagtctggcaaagtcaccgggctggcgccccgccttcaagtattacaatatgtggatttctctgttaggcgccattctgtgctgcatcgtgatgttcgtaattaactggtgggccgctcttttgacctacgtgatcgtgctgggtttatatatttacgtcacctacaagaagccggatgtcaactggggttccagtacccaggccttaacctacttgaatgccttgcagcactcgatcaggctttccggagtggaggatcacgtgaaaaacttcagacctcagtgcttagtgatgacgggagccccaaacagcagacccgcgcttctgcatctggtccatgacttcacaaagaatgtgggcctcatgatttgcggacacgtgcacatggggcccaggagacaggccatgaaagaaatgagcatagaccaggcaaaataccaacgctggcttatcaaaaataagatgaaggctttttatgctccagtccatgcagacgatttgcgagaaggagcacaatacctgatgcaggcggctgggttgggaaggatgaagccgaatacattggtgctgggattcaaaaaggactggctgcaggctgacatgagggacgttgacatgtatatcaatctttttcacgacgcatttgatattcaatatggagtggtggttatcagactgaaggaaggcctggatatctctcacctgcaaggacaggaagagctcttgagctcacaggagaaatccccaggaacgaaggacgtcgtcgtcagcgtcgagtacagcaagaaatctgatctggacacgagtaaacctctgtccgagaagccaatcacacataaagagtccaagggcccaatcgtgcctctgaatgtggccgaccagaaacttctcgaagctagtacacaatttcagaagaaacaaggtaaaaatacaattgacgtgtggtggctgttcgatgatggcgggctgaccctcctgatcccctacttgctgaccaccaagaaaaagtggaaagattgtaagatcagagtgtttatcgggggtaaaatcaaccgcatcgatcacgaccgcagagccatggccacactcttatccaagtttcgaatcgacttttccgatattatggtgctgggtgatattaacaccaagcctaaaaaggagaacatcattgcatttgaggagataattgaaccatacaggcttcatgaggatgataaagaacaggatattgccgataagatgaaggaggatgagccatggcgaatcactgacaacgagcttgagctctacaaaactaaaacttacagacagatcagacttaatgagttgctgaaagaacacagctcgactgccaacattattgtaatgagcctgccggtcgcaaggaagggagctgtaagttccgccctgtatatggcatggctcgaggctctctccaaggatcttcctccaatcctgcttgtgcgtgggaaccaccaaagcgtgctgacattctatagttag

SEQ ID NO: 90659 - DNA, 3591 bp, Artificial Sequence
  derived and/or modified sequence
atggagccccggcccacagcccccagcagcggggcccctggcctggccggcgtgggggagaccccatctgctgctgccctggccgccgcccgggtggagctgcctggaacagctgtgcccagcgtgcctgaagatgctgccccagccagcagagatggcggcggcgtgagagatgagggccctgctgctgctggagatggcctgggccggcccctgggccccacccccagccagagccgcttccaggtggacctggtgtctgaaaatgccggccgggctgctgctgctgctgctgctgctgctgctgctgctgctgctgctggagctggagctggggccaagcagaccccagcagatggagaggccagcggggagagcgagcccgccaagggcagcgaggaggccaagggccgcttccgggtgaactttgtggaccctgctgccagcagcagcgctgaggacagcctgagtgatgctgctggggtgggcgtggatggccccaacgtgtccttccagaatggaggagacacagtgctgtctgagggcagcagcctgcacagcggcggcggcggcggcagcggccaccaccagcactactactatgacacccacaccaacacctactacctgcggaccttcggccacaacaccatggatgctgtgcccagaattgaccactaccgccacacagctgcccagctgggggagaagctgctgcggcccagcctggccgagctgcatgatgagctggagaaggagccctttgaagatggctttgccaatggagaggagagcacccccaccagagatgctgtggtgacctacacagctgagagcaagggcgtggtgaagtttggctggatcaagggcgtgctggtgcgctgcatgctgaacatctggggcgtgatgctgttcatccggctgtcctggatcgtgggccaggccggcatcggcctgtctgtgctggtgatcatgatggccaccgtggtgaccaccatcaccggcctgagcaccagcgccatcgccaccaacggctttgtgcggggcggcggggcctactacctgatcagccgcagcctgggccctgagtttggaggagccatcggcctcatctttgcctttgccaatgctgtggccgtggccatgtatgtggtgggctttgctgagaccgtggtggagctgctgaaggagcacagcatcctgatgattgatgagatcaatgacatccgcatcatcggggccatcaccgtggtgatcctgctgggcatctctgtggccggcatggagtgggaggccaaggcccagatcgtgctgctggtgatcctgctgctggccatcggggactttgtgattggcaccttcatccccctggagagcaagaagcccaagggcttcttcggctacaagtctgagatcttcaatgaaaattttggaccagacttccgggaggaggagaccttcttctctgtgtttgccatcttcttccctgctgccaccggcatcctggccggggccaacatcagcggggacctggccgacccccagagcgccatccccaagggcaccctgctggccatcctgatcaccaccctggtgtatgtgggcattgctgtgtctgtgggcagctgtgtggtgagagatgccactggaaatgtgaatgacaccatcgtgacagagctgaccaactgcaccagcgctgcctgcaagctgaactttgacttcagcagctgtgagagcagcccctgcagctatggcctgatgaacaacttccaggtgatgtccatggtgtctggcttcacccccctcatctctgctggcatcttcagcgccaccctgagcagcgccctggccagcctggtgtctgcccccaagatcttccaggccctgtgcaaggacaacatctacccagccttccagatgtttgccaagggctacggcaagaacaatgagcccctgcggggctacatcctgaccttcctgattgccctgggcttcatcctgattgctgagctgaatgtcatcgcccccatcatcagcaacttcttcctggccagctatgccctgatcaacttcagcgtcttccacgccagcctggccaagagccctggctggaggcctgccttcaagtactacaacatgtggatcagcctgctgggcgccatcctgtgctgcatcgtgatgtttgtgatcaactggtgggccgccctgctgacctacgtgattgtgctgggcctgtacatctacgtgacctacaagaagccagatgtgaactggggcagcagcacccaggccctgacctacctgaatgccctgcagcacagcatccggctgagcggcgtggaggaccacgtgaagaacttccggccccagtgcctggtgatgactggagcccccaacagcaggcctgccctgctgcacctggtgcatgacttcaccaagaatgtgggcctgatgatctgtggccacgtgcacatgggcccccggcggcaggccatgaaggagatgagcattgaccaggccaagtaccagcgctggctgatcaagaacaagatgaaggccttctacgcccctgtgcatgctgatgacctgcgggagggcgcccagtacctgatgcaggccgccggcctgggccgcatgaagcccaacaccctggtgctgggcttcaagaaggactggctgcaggccgacatgagagatgtggacatgtacatcaacctcttccatgatgcctttgacatccagtatggagtggtggtgatccggctgaaggagggcctggacatcagccacctgcagggccaggaggagctgctgagcagccaggagaagagccctggcaccaaggatgtggtggtgtctgtggagtacagcaagaagagtgacctggacaccagcaagcccctgtctgagaagcccatcacccacaaggagagcaagggccccatcgtgcccctgaatgtggccgaccagaagctgctggaggccagcacccagttccagaagaagcagggcaagaacaccattgatgtgtggtggctgtttgatgatggcggcctgaccctgctgatcccctacctgctgaccaccaagaagaagtggaaggactgcaagatccgggtcttcatcggcggcaagatcaacagaattgaccatgacagaagagccatggccaccctgctgagcaagttcagaattgacttcagtgacatcatggtgctgggggacatcaacaccaagcccaagaaggagaacatcatcgcctttgaggagatcatcgagccctaccgcctgcatgaagatgacaaggagcaggacattgctgacaagatgaaggaggatgagccctggaggatcacagacaatgagctggagctgtacaagaccaagacctaccggcagatccggctgaatgagctgctgaaggagcacagcagcacagccaacatcatcgtgatgagcctgcctgtggccaggaaaggagctgtgagcagcgccctgtacatggcctggctggaggccctgagcaaggacctgccccccatcctgctggtgcggggcaaccaccagagcgtgctgaccttctacagctag

SEQ ID NO: 90660 - DNA, 3591 bp, Artificial Sequence
  derived and/or modified sequence
atggagccccggcccaccgcccccagcagcggcgcccccggcctggctggggtcggtgaaacaccatccgctgctgccttagcggccgccagagtggaactgccgggcactgctgtgccctccgttcccgaagacgcggctcccgctagccgcgatggaggcggcgttagagatgaaggcccagctgctgccggggatggactggggcgtcctttaggaccaacaccatctcagagccggtttcaggtggacctggtctcagaaaacgccggtagggctgcggccgctgctgcggcagccgccgccgccgctgccgccgccggtgctggggcgggtgccaaacagacccctgccgatggggaggcttctggggagtccgagcctgccaagggaagcgaggaggctaaagggagattcagggtgaacttcgtggatccagccgcaagctcctccgccgaagactctttatccgacgccgccggcgtaggcgtcgatggccccaatgtaagtttccagaacggtggtgacacagtcctctccgagggttcgtcactgcactccggcgggggaggcgggtctgggcaccatcagcactattattacgatactcatacaaacacctattacctgagaacctttggccacaacactatggatgccgtgcctcggatcgatcactataggcatacggccgcccagctcggcgaaaagttgttgcggccgtctctggctgagctacatgacgagctcgaaaaggaaccattcgaagacgggtttgccaacggggaggaatcaactcccactcgcgatgctgtggttacttacacagcggagagtaagggcgttgtcaagtttggatggatcaagggtgtcctcgtccgctgtatgttgaacatttggggcgtgatgctcttcatcagactgtcctggattgttggccaggccggaatcggactctctgtgttggtaatcatgatggccacggtggttactaccattactggattgtccacctcggccattgctacaaatggcttcgtgagaggcgggggtgcttactatctgatatctcgctcgctggggccggagttcggaggggctatcgggcttatctttgcattcgcaaatgctgtggccgtggccatgtatgtcgttggatttgcagaaactgtggtggaactgttgaaggaacactctatcctgatgattgatgagatcaacgatatacgcatcatcggcgccatcactgtggtgattctgctagggataagcgtggccggcatggagtgggaagcaaaggcccagattgtgctactggttattctgctgttagccataggcgatttcgtgatcggtacttttatcccgctggagtctaaaaaacctaagggtttcttcggctataaaagtgaaatttttaatgagaacttcggcccagactttcgggaagaagaaactttcttctctgtcttcgctattttcttcccggcagcgacaggaatcctggcaggtgctaatattagcggggacctggctgatcctcagtccgccatccctaaaggcacattgttggcaattctgatcacaaccctggtctatgtcggaatcgccgtgtcagttggctcctgcgtggtacgggacgctacaggcaatgtcaatgacacaatcgttactgagctgaccaactgtacgagtgccgcttgcaagttgaactttgatttcagctcatgtgagagtagtccttgctcctacggactgatgaataacttccaggtgatgagtatggtaagcggtttcaccccgcttatctcggctggaatcttcagtgccacacttagttccgccttagcaagtcttgtatctgcacctaagattttccaggcactctgcaaagataatatttatcccgctttccagatgttcgctaaaggctatggaaaaaataacgaacctctcagagggtacattctgacgtttctgatcgccctaggctttattctgatcgccgaactgaacgtgattgcccctatcatttccaatttcttcctcgccagctacgcgctaatcaacttctcagtctttcacgcatccctggctaaatccccggggtggcggcctgcgtttaaatattacaatatgtggattagtctgttgggcgcgattctgtgttgcatagttatgtttgtgattaattggtgggcggccttgctgacttacgttattgtcctcgggctgtacatctacgtgacttacaaaaaaccagatgtaaattggggaagctctacacaggcgctgacctatttaaacgccctgcaacatagcattagactgtccggcgtagaggaccatgttaaaaacttcaggcctcagtgtttagtaatgaccggcgctcctaattcccggcccgccctccttcacctcgtgcacgacttcactaagaatgtagggctgatgatctgtggtcacgtgcatatgggacccagaaggcaggcaatgaaagaaatgtcaattgatcaggctaagtatcaaagatggcttattaaaaataagatgaaagcattctatgctcccgtgcacgcagatgacctccgggaaggagcccagtacctgatgcaggccgcaggcctgggccggatgaagcctaatacactggtgcttgggttcaagaaggattggttacaagccgatatgagggatgtggatatgtacattaacctgttccacgacgctttcgatatccagtacggagttgtcgtaatacggcttaaggagggactggatatctcccacctgcagggccaagaagaattactgtcctcacaggaaaaatcgcctgggacgaaggacgtggtggtcagtgtagagtactccaagaaaagcgacctggatacaagcaaaccactgtctgaaaaacctatcacacacaaagagtcaaagggccccattgtgccgctgaacgtcgctgatcagaagttactggaagccagtactcagttccagaagaaacagggcaaaaacacaatagacgtgtggtggttgttcgatgatggtggactgacgctgctgataccttacttgctgaccacaaaaaagaagtggaaggattgtaagatacgggtcttcatcgggggaaaaattaatagaatcgatcacgatcgaagagccatggctactttgctgtccaaatttcgcatcgattttagcgatatcatggttttaggggacatcaatactaaaccaaagaaggagaacattatagcctttgaagagataatcgagccctacaggttacatgaggatgataaggaacaggacatcgcagacaagatgaaggaggacgaaccctggagaatcacggataatgaactggagctgtacaaaacaaagacatataggcagattcgcttaaacgagctcctgaaagaacatagctctacagccaacataattgtgatgtctctcccggttgcaaggaaaggtgcggtctcctcagcactgtatatggcatggctcgaagctctctctaaggacttaccacctatcctgttggtacgcgggaatcatcagtccgtcctcacattctatagctag

SEQ ID NO: 90661 - DNA, 3591 bp, Artificial Sequence
  derived and/or modified sequence
atggaacctagacccacagcgccatccagcggtgcccctggcttagcgggtgtcggggagactccaagtgctgcggcactggctgcagctagggtggagttgcctggaactgctgtgcctagcgtgccagaggacgcagctcccgcatccagagatggtggcggtgttagagatgaagggcctgccgcagccggtgacgggttggggcgtcctctgggcccaacaccaagccagagcagatttcaagtcgatctggtgtccgaaaatgccggacgcgctgccgctgctgccgctgctgcagccgctgctgcagcggcagcaggtgcgggagcaggtgccaagcaaacgcccgcagacggggaagcgtccggtgagtccgagccagcgaagggctctgaggaagcaaaaggcagattcagggttaatttcgttgaccctgctgcgagttcctctgctgaggactccttgtctgacgcagctggagtcggggtcgatggtcccaatgttagcttccagaacggaggtgataccgtcctgagcgaggggtcctcactccacagtgggggagggggtggaagtggacatcaccaacactactactatgacactcacacaaatacatactacctgcggactttcggacacaataccatggacgctgtccctaggatcgatcattatagacatacggctgcccaattgggtgagaagctacttcggccatctctggctgaactacacgatgaactggaaaaagagccattcgaagacggcttcgcaaatggagaggaatctacgccaacccgcgacgccgtggtgacgtataccgccgaaagcaagggtgttgtgaagtttggatggattaaaggggtattggtcaggtgtatgttgaacatttggggggtaatgcttttcatccgcctttcatggatagtggggcaggcaggaataggcttatccgtgctcgtgataatgatggccactgtggtaactaccattaccggattatctacctccgcaatcgctaccaatggctttgttcggggtggaggggcatattaccttatctctcgctcgctaggccctgagtttggcggagccatcggcctaatcttcgctttcgctaacgccgtcgccgtagcaatgtacgtcgtcgggtttgctgagacggtggtagagctgctaaaggagcacagtatcttaatgattgacgaaattaacgatatacgcataatcggtgcaatcaccgtcgtcattttgttgggcatctccgtggctggaatggagtgggaggcaaaagcgcagatcgtgcttctcgtgatacttctgctggcgattggcgactttgtcattggaacgttcatccccctggaaagtaagaaacctaagggatttttcggctacaagtcagagatatttaatgaaaacttcggcccagatttcagagaggaagaaacatttttcagcgtgtttgctatattctttcctgccgctaccgggattctggccggtgccaacatcagcggcgatctggcggatccgcagtcagcaatccctaaaggcactcttctcgctattctgattactaccctggtgtatgtggggattgcagtgtctgtgggttcatgtgtagtgcgtgatgcaaccggaaacgtcaacgacacaatcgtgaccgaacttaccaactgcacctccgccgcatgtaagctgaactttgatttctcctcctgtgagtcctcaccctgctcctatggcctgatgaataactttcaggtgatgagcatggtcagcgggttcaccccgctcatcagcgcaggtatcttctctgccacgctgagctctgccctggcctctttagtgagcgcgcctaagatattccaagctctttgcaaggataatatttatcccgctttccaaatgttcgctaaggggtatgggaaaaataatgagcccctccgaggctacatcctgaccttcctgatagccttaggattcatcttgatcgcggagttaaatgtcatcgccccaataatcagcaactttttcctcgcgtcttacgccctgatcaacttttccgtgtttcatgcctccctcgccaaatctcctggatggcggcctgcctttaaatactacaatatgtggatttccttgttgggtgccatcctttgttgtattgtcatgtttgttattaattggtgggcagctcttctgacctacgtgattgttttagggctgtatatctatgtgacttacaagaagcctgatgtgaactgggggagtagcacccaggccctcacatacctgaatgctctccagcattccattcgactgtcgggagtcgaggatcatgttaaaaactttaggcctcagtgtttggtgatgactggcgcacccaattcaagacctgcgctgctgcatctcgtgcatgacttcacaaaaaacgtggggctcatgatatgcggacatgtccatatggggccaagaagacaagctatgaaggagatgtccatcgatcaggccaagtaccaacgctggcttatcaaaaataaaatgaaggctttctacgctcctgtccacgccgacgatctgagagaaggtgcacaatatctgatgcaagcggcaggattgggccgaatgaagccgaatacactcgtgcttggttttaaaaaggattggctgcaggccgacatgagggacgttgatatgtacatcaatctgttccatgatgcattcgacatccagtacggcgttgtggtaatcaggcttaaagagggcctggatatttctcatctgcaaggccaggaagagctactgtcctctcaggaaaagtctcctgggacgaaggatgtcgtggtaagcgtagagtatagcaagaagtccgatttggatacatctaaacctttatctgaaaagcctatcacccacaaggagagtaaaggacccatcgtgcctctgaacgtcgcagatcagaaattgctcgaagcctccacacaatttcagaagaaacaaggcaaaaacacaatcgatgtgtggtggctgttcgatgacggaggtctcacactcctgattccatatctcctcacgaccaaaaaaaaatggaaagactgcaaaatacgggtcttcatcggaggcaaaatcaacaggattgaccacgaccgtagagcgatggcaaccttgctctccaaattccgcatagacttttctgatataatggtgttgggtgacataaacactaaaccgaaaaaagagaacatcatcgctttcgaggagataattgaaccatatcggctgcatgaggatgataaggagcaagatattgcagacaagatgaaggaagacgaaccatggagaatcaccgacaacgaactggagctgtacaaaacaaagacctaccggcagatccggctgaacgagctgctgaaagaacattcctctaccgcaaacatcatcgtaatgtctttgccagtggctcgcaagggggctgtgtcctctgcgctgtatatggcctggctggaggccctgtctaaagatctgccacccatccttctcgttcgtggcaatcatcaatctgtgctaacattctattcatag

SEQ ID NO: 90662 - DNA, 5509 bp, Artificial Sequence
  derived and/or modified sequence
tctctcacctggtcttgcggctgtggccaccgccggccaggggtgtggagggcgtgctgccggagacgtccgccgggctctgcagttccgccgggggtcgggcagctatggagccgcggcccacggcgccctcctccggcgccccgggactggccggggtcggggagacgccgtcagccgctgcgctggccgcagccagggtggaactgcccggcacggctgtgccctcggtgccggaggatgctgcgcccgcgagccgggacggcggcggggtccgcgatgagggccccgcggcggccggggacgggctgggcagacccttggggcccaccccgagccagagccgtttccaggtggacctggtttccgagaacgccgggcgggccgctgctgcggcggcggcggcggcggcggcagcggcggcggctggtgctggggcgggggccaagcagacccccgcggacggggaagccagcggcgagagcgagccggctaaaggcagcgaggaagccaagggccgcttccgcgtgaacttcgtggacccagctgcctcctcgtcggctgaagacagcctgtcagatgctgccggggtcggagtcgacgggcccaacgtgagcttccagaacggcggggacacggtgctgagcgagggcagcagcctgcactccggcggcggcggcggcagtgggcaccaccagcactactattatgatacccacaccaacacctactacctgcgcaccttcggccacaacaccatggacgctgtgcccaggatcgatcactaccggcacacagccgcgcagctgggcgagaagctgctccggcctagcctggcggagctccacgacgagctggaaaaggaaccttttgaggatggctttgcaaatggggaagaaagtactccaaccagagatgctgtggtcacgtatactgcagaaagtaaaggagtcgtgaagtttggctggatcaagggtgtattagtacgttgtatgttaaacatttggggtgtgatgcttttcattagattgtcatggattgtgggtcaagctggaataggtctatcagtccttgtaataatgatggccactgttgtgacaactatcacaggattgtctacttcagcaatagcaactaatggatttgtaagaggaggaggagcatattatttaatatctagaagtctagggccagaatttggtggtgcaattggtctaatcttcgcctttgccaacgctgttgcagttgctatgtatgtggttggatttgcagaaaccgtggtggagttgcttaaggaacattccatacttatgatagatgaaatcaatgatatccgaattattggagccattacagtcgtgattcttttaggtatctcagtagctggaatggagtgggaagcaaaagctcagattgttcttttggtgatcctacttcttgctattggtgatttcgtcataggaacatttatcccactggagagcaagaagccaaaagggttttttggttataaatctgaaatatttaatgagaactttgggcccgattttcgagaggaagagactttcttttctgtatttgccatcttttttcctgctgcaactggtattctggctggagcaaatatctcaggtgatcttgcagatcctcagtcagccatacccaaaggaacactcctagccattttaattactacattggtttacgtaggaattgcagtatctgtaggttcttgtgttgttcgagatgccactggaaacgttaatgacactatcgtaacagagctaacaaactgtacttctgcagcctgcaaattaaactttgatttttcatcttgtgaaagcagtccttgttcctatggcctaatgaacaacttccaggtaatgagtatggtgtcaggatttacaccactaatttctgcaggtatattttcagccactctttcttcagcattagcatccctagtgagtgctcccaaaatatttcaggctctatgtaaggacaacatctacccagctttccagatgtttgctaaaggttatgggaaaaataatgaacctcttcgtggctacatcttaacattcttaattgcacttggattcatcttaattgctgaactgaatgttattgcaccaattatctcaaacttcttccttgcatcatatgcattgatcaatttttcagtattccatgcatcacttgcaaaatctccaggatggcgtcctgcattcaaatactacaacatgtggatatcacttcttggagcaattctttgttgcatagtaatgttcgtcattaactggtgggctgcattgctaacatatgtgatagtccttgggctgtatatttatgttacctacaaaaaaccagatgtgaattggggatcctctacacaagccctgacttacctgaatgcactgcagcattcaattcgtctttctggagtggaagaccacgtgaaaaactttaggccacagtgtcttgttatgacaggtgctccaaactcacgtccagctttacttcatcttgttcatgatttcacaaaaaatgttggtttgatgatctgtggccatgtacatatgggtcctcgaagacaagccatgaaagagatgtccatcgatcaagccaaatatcagcgatggcttattaagaacaaaatgaaggcattttatgctccagtacatgcagatgacttgagagaaggtgcacagtatttgatgcaggctgctggtcttggtcgtatgaagccaaacacacttgtccttggatttaagaaagattggttgcaagcagatatgagggatgtggatatgtatataaacttatttcatgatgcttttgacatacaatatggagtagtggttattcgcctaaaagaaggtctggatatatctcatcttcaaggacaagaagaattattgtcatcacaagagaaatctcctggcaccaaggatgtggtagtaagtgtggaatatagtaaaaagtccgatttagatacttccaaaccactcagtgaaaaaccaattacacacaaagaatccaaaggccctattgtgcctttaaatgtagctgaccaaaagcttcttgaagctagtacacagtttcagaaaaaacaaggaaagaatactattgatgtctggtggctttttgatgatggaggtttgaccttattgataccttaccttctgacgaccaagaaaaaatggaaagactgtaagatcagagtattcattggtggaaagataaacagaatagaccatgaccggagagcgatggctactttgcttagcaagttccggatagacttttctgatatcatggttctaggagatatcaataccaaaccaaagaaagaaaatattatagcttttgaggaaatcattgagccatacagacttcatgaagatgataaagagcaagatattgcagataaaatgaaagaagatgaaccatggcgaataacagataatgagcttgaactttataagaccaagacataccggcagatcaggttaaatgagttattaaaggaacattcaagcacagctaatattattgtcatgagtctcccagttgcacgaaaaggtgctgtgtctagtgctctctacatggcatggttagaagctctatctaaggacctaccaccaatcctcctagttcgtgggaatcatcagagtgtccttaccttctattcataaatgttctatacagtggacagccctccagaatggtacttcagtgcctagtgtagtaactgaaatcttcaatgacacattaacatcacaatggcgaatggtgacttttctttcacgatttcattaatttgaaagcacacaggaaagttgctccattgataacgtgtatggagacttcggttttagtcaattccatatctcaatcttaatggtgattcttctctgttgaactgaagtttgtgagagtagttttcctttgctacttgaatagcaataaaagcgtgttaactttttgattgatgaaagaagtacaaaaagcctttagccttgaggtgccttctgaaattaaccaaatttcatccatatatcctcttttataaacttatagaatgtcaaactttgccttcaactgtttttatttctagtctcttccactttaaaacaaaatgaacactgcttgtcttcttccattgaccatttagtgttgagtactgtatgtgttttgttaattctataaaggtatctgttagatattaaaggtgagaattagggcaggttaatcaaaaatggggaaggggaaatggtaaccaaaaagtaaccccatggtaaggtttatatgagtatatgtgaatatagagctaggaaaaaaagcccccccaaatacctttttaacccctctgattggctattattactatatttattattatttattgaaaccttagggaagattgaagattcatcccatacttctatataccatgcttaaaaatcacgtcattctttaaacaaaaatactcaagatcatttatatttatttggagagaaaactgtcctaatttagaatttccctcaaatctgagggacttttaagaaatgctaacagatttttctggaggaaatttagacaaaacaatgtcatttagtagaatatttcagtatttaagtggaatttcagtatactgtactatcctttataagtcattaaaataatgtttcatcaaatggttaaatggaccactggtttcttagagaaatgtttttaggcttaattcattcaattgtcaagtacacttagtcttaatacactcaggtttgaacagattattctgaatattaaaatttaatccattcttaatattttaaaacttttgttaagaaaaactgccagtttgtgcttttgaaatgtctgttttgacatcatagtctagtaaaattttgacagtgcatatgtactgttactaaaagctttatatgaaattattaatgtgaagtttttcatttataattcaaggaaggatttcctgaaaacatttcaagggatttatgtctacatatttgtgtgtgtgtgtgtatatatatgtaatatgcatacacagatgcatatgtgtatatataatgaaatttatgttgctggtattttgcattttaaagtgatcaagattcattaggcaaactttggtttaagtaaacatatgttcaaaatcagattaacagatacaggtttcatagagaacaaaggtgatcatttgaagggcatgctgtaatttcacacaattttccagttcaaaaatggagaatacttcgcctaaaatactgttaagtgggttaattgatacaagtttctgtggtggaaaatttatgcaggttttcacgaatccttttttttttttttttttttttttgagacggagtcttgctctgttgccacgctggaatgcagtaacgtgatcttggctcactgcgacctccacctccccagttcaagcgattctcctgcctcagcctccctagtagctgggactacgggtgca

SEQ ID NO: 90663 - DNA, 3591 bp, Artificial Sequence
  derived and/or modified sequence
atggagcccagacccaccgcccccagcagcggcgcccccggcctggccggcgtgggcgagacccccagcgccgccgccctggccgccgccagagtggagctgcccggcaccgccgtgcccagcgtgcccgaggacgccgcccccgccagcagagacggcggcggcgtgagagacgagggccccgccgccgccggcgacggcctgggcagacccctgggccccacccccagccagagcagattccaggtggacctggtgagcgagaacgccggcagagccgccgccgccgccgccgccgccgccgccgccgccgccgccgccggcgccggcgccggcgccaagcagacccccgccgacggcgaggccagcggcgagagcgagcccgccaagggcagcgaggaggccaagggcagattcagagtgaacttcgtggaccccgccgccagcagcagcgccgaggacagcctgagcgacgccgccggcgtgggcgtggacggccccaacgtgagcttccagaacggcggcgacaccgtgctgagcgagggcagcagcctgcacagcggcggcggcggcggcagcggccaccaccagcactactactacgacacccacaccaacacctactacctgagaaccttcggccacaacaccatggacgccgtgcccagaatcgaccactacagacacaccgccgcccagctgggcgagaagctgctgagacccagcctggccgagctgcacgacgagctggagaaggagcccttcgaggacggcttcgccaacggcgaggagagcacccccaccagagacgccgtggtgacctacaccgccgagagcaagggcgtggtgaagttcggctggatcaagggcgtgctggtgagatgcatgctgaacatctggggcgtgatgctgttcatcagactgagctggatcgtgggccaggccggcatcggcctgagcgtgctggtgatcatgatggccaccgtggtgaccaccatcaccggcctgagcaccagcgccatcgccaccaacggcttcgtgagaggcggcggcgcctactacctgatcagcagaagcctgggccccgagttcggcggcgccatcggcctgatcttcgccttcgccaacgccgtggccgtggccatgtacgtggtgggcttcgccgagaccgtggtggagctgctgaaggagcacagcatcctgatgatcgacgagatcaacgacatcagaatcatcggcgccatcaccgtggtgatcctgctgggcatcagcgtggccggcatggagtgggaggccaaggcccagatcgtgctgctggtgatcctgctgctggccatcggcgacttcgtgatcggcaccttcatccccctggagagcaagaagcccaagggcttcttcggctacaagagcgagatcttcaacgagaacttcggccccgacttcagagaggaggagaccttcttcagcgtgttcgccatcttcttccccgccgccaccggcatcctggccggcgccaacatcagcggcgacctggccgacccccagagcgccatccccaagggcaccctgctggccatcctgatcaccaccctggtgtacgtgggcatcgccgtgagcgtgggcagctgcgtggtgagagacgccaccggcaacgtgaacgacaccatcgtgaccgagctgaccaactgcaccagcgccgcctgcaagctgaacttcgacttcagcagctgcgagagcagcccctgcagctacggcctgatgaacaacttccaggtgatgagcatggtgagcggcttcacccccctgatcagcgccggcatcttcagcgccaccctgagcagcgccctggccagcctggtgagcgcccccaagatcttccaggccctgtgcaaggacaacatctaccccgccttccagatgttcgccaagggctacggcaagaacaacgagcccctgagaggctacatcctgaccttcctgatcgccctgggcttcatcctgatcgccgagctgaacgtgatcgcccccatcatcagcaacttcttcctggccagctacgccctgatcaacttcagcgtgttccacgccagcctggccaagagccccggctggagacccgccttcaagtactacaacatgtggatcagcctgctgggcgccatcctgtgctgcatcgtgatgttcgtgatcaactggtgggccgccctgctgacctacgtgatcgtgctgggcctgtacatctacgtgacctacaagaagcccgacgtgaactggggcagcagcacccaggccctgacctacctgaacgccctgcagcacagcatcagactgagcggcgtggaggaccacgtgaagaacttcagaccccagtgcctggtgatgaccggcgcccccaacagcagacccgccctgctgcacctggtgcacgacttcaccaagaacgtgggcctgatgatctgcggccacgtgcacatgggccccagaagacaggccatgaaggagatgagcatcgaccaggccaagtaccagagatggctgatcaagaacaagatgaaggccttctacgcccccgtgcacgccgacgacctgagagagggcgcccagtacctgatgcaggccgccggcctgggcagaatgaagcccaacaccctggtgctgggcttcaagaaggactggctgcaggccgacatgagagacgtggacatgtacatcaacctgttccacgacgccttcgacatccagtacggcgtggtggtgatcagactgaaggagggcctggacatcagccacctgcagggccaggaggagctgctgagcagccaggagaagagccccggcaccaaggacgtggtggtgagcgtggagtacagcaagaagagcgacctggacaccagcaagcccctgagcgagaagcccatcacccacaaggagagcaagggccccatcgtgcccctgaacgtggccgaccagaagctgctggaggccagcacccagttccagaagaagcagggcaagaacaccatcgacgtgtggtggctgttcgacgacggcggcctgaccctgctgatcccctacctgctgaccaccaagaagaagtggaaggactgcaagatcagagtgttcatcggcggcaagatcaacagaatcgaccacgacagaagagccatggccaccctgctgagcaagttcagaatcgacttcagcgacatcatggtgctgggcgacatcaacaccaagcccaagaaggagaacatcatcgccttcgaggagatcatcgagccctacagactgcacgaggacgacaaggagcaggacatcgccgacaagatgaaggaggacgagccctggagaatcaccgacaacgagctggagctgtacaagaccaagacctacagacagatcagactgaacgagctgctgaaggagcacagcagcaccgccaacatcatcgtgatgagcctgcccgtggccagaaagggcgccgtgagcagcgccctgtacatggcctggctggaggccctgagcaaggacctgccccccatcctgctggtgagaggcaaccaccagagcgtgctgaccttctacagctag

SEQ ID NO: 90664 - protein, 1890 aa, Artificial Sequence
  derived and/or modified sequence
MVKLANPLYTEWILEAIQKIKKQKQRPSEERICHAVSTSHGLDKKTVSEQLELSVQDGSVLKVTNKGLASYKDPDNPGRFSSVKPGTFPKSAKGSRGSCNDLRNVDWNKLLRRAIEGLEEPNGSSLKNIEKYLRSQSDLTSTTNNPAFQQRLRLGAKRAVNNGRLLKDGPQYRVNYGSLDGKGAPQYPSAFPSSLPPVSLLPHEKDQPRADPIPICSFCLGTKESNREKKPEELLSCADCGSSGHPSCLKFCPELTTNVKALRWQCIECKTCSACRVQGRNADNMLFCDSCDRGFHMECCDPPLSRMPKGMWICQVCRPKKKGRKLLHEKAAQIKRRYAKPIGRPKNKLKQRLLSVTSDEGSMNAFTGRGSPGRGQKTKVCTTPSSGHAASGKDSSSRLAVTDPTRPGATTKITTTSTYISASTLKVNKKTKGLIDGLTKFFTPSPDGRRSRGEIIDFSKHYRPRKKVSQKQSCTSHVLATDTEIKINIKQESADVNVIGNKDVVTEEDLDVFKQAQELSWEKIECESGVEDCGRYPSVIEFGKYEIQTWYSSPYPQEYARLPKLYLCEFCLKYMKSKNILLRHSKKCGWFHPPANEIYRRKDLSVFEVDGNMSKIYCQNLCLLAKLFLDHKTLYYDVEPFLFYVLTKNDEKGCHLVGYFSKEKLCQQKYNVSCIMIMPQHQRQGFGRFLIDFSYLLSRREGQAGSPEKPLSDLGRLSYLAYWKSVILEYLYHHHERHISIKAISRATGMCPHDIATTLQHLHMIDKRDGRFVIIRREKLILSHMEKLKTCSRANELDPDSLRWTPILISNAAVSEEEREAEKEAERLMEQASCWEKEEQEILSTRANSRQSPAKVQSKNKYLHSPESRPVTGERGQLLELSKESSEEEEEEEDEEEEEEEEEEEEDEEEEEEEEEEEEEENIQSSPPRLTKPQSVAIKRKRPFVLKKKRGRKRRRINSSVTTETISETTEVLNEPFDNSDEERPMPQLEPTCEIEVEEDGRKPVLRKAFQHQPGKKRQTEEEEGKDNHCFKNADPCRNNMNDDSSNLKEGSKDNPEPLKCKQVWPKGTKRGLSKWRQNKERKTGFKLNLYTPPETPMEPDEQVTVEEQKETSEGKTSPSPIRIEEEVKETGEALLPQEENRREETCAPVSPNTSPGEKPEDDLIKPEEEEEEEEEEEEEEEEEEGEEEEGGGNVEKDPDGAKSQEKEEPEISTEKEDSARLDDHEEEEEEDEEPSHNEDHDADDEDDSHMESAEVEKEELPRESFKEVLENQETFLDLNVQPGHSNPEVLMDCGVDLTASCNSEPKELAGDPEAVPESDEEPPPGEQAQKQDQKNSKEVDTEFKEGNPATMEIDSETVQAVQSLTQESSEQDDTFQDCAETQEACRSLQNYTRADQSPQIATTLDDCQQSDHSSPVSSVHSHPGQSVRSVNSPSVPALENSYAQISPDQSAISVPSLQNMETSPMMDVPSVSDHSQQVVDSGFSDLGSIESTTENYENPSSYDSTMGGSICGNGSSQNSCSYSNLTSSSLTQSSCAVTQQMSNISGSCSMLQQTSISSPPTCSVKSPQGCVVERPPSSSQQLAQCSMAANFTPPMQLAEIPETSNANIGLYERMGQSDFGAGHYPQPSATFSLAKLQQLTNTLIDHSLPYSHSAAVTSYANSASLSTPLSNTGLVQLSQSPHSVPGGPQAQATMTPPPNLTPPPMNLPPPLLQRNMAASNIGISHSQRLQTQIASKGHISMRTKSASLSPAAATHQSQIYGRSQTVAMQGPARTLTMQRGMNMSVNLMPAPAYNVNSVNMNMNTLNAMNGYSMSQPMMNSGYHSNHGYMNQTPQYPMQMQMGMMGTQPYAQQPMQTPPHGNMMYTAPGHHGYMNTGMSKQSLNGSYMRR

SEQ ID NO: 90665 - DNA, 5673 bp, Artificial Sequence
  derived and/or modified sequence
atggtgaagctggctaaccctctatatacagagtggattctggaggctattcaaaaaatcaagaagcagaaacagcgaccttccgaagagcgaatttgccatgcagtatctacctcccacggattagataagaagacggttagtgaacagttggagttgtctgtgcaggatggaagtgtactgaaagttacgaacaaaggacttgcctcctacaaggaccccgacaatccagggaggttttcatcagtgaaacccggcaccttccctaagtccgctaagggttcccgtgggagctgtaatgaccttcgcaatgttgactggaacaaattgctacgcagggccatcgagggtctggaagagccaaatggttcctctctgaagaatattgagaaataccttcgatcacagtctgacctgacaagcacaaccaataatcctgcattccagcaaagactacggctgggagcaaagagggcagtcaataacggccgcttactcaaggacgggcctcagtatagggtgaactacgggtccctggacggaaagggggccccccagtacccctctgcctttccttctagcctgccacctgtttctctgttgccccatgagaaggaccagccgcgcgcggacccaattccaatttgctccttctgtttgggaaccaaggagagtaatagggaaaaaaagcctgaggagttattgtcttgtgccgactgtggatccagtggccacccatcctgtctgaaattttgtccggagctgacaaccaacgtcaaagccctgagatggcagtgcatcgaatgtaaaacatgttcagcctgcagggttcagggcagaaacgctgataatatgctgttctgtgactcgtgcgatcgcggatttcatatggaatgctgtgaccctcccttgtcccgcatgccaaagggtatgtggatttgccaggtatgtaggcccaaaaaaaaaggcagaaagctcctgcatgagaaagccgcacagatcaagcggaggtacgccaagccaataggtaggcccaaaaacaaactgaaacagaggcttctatcagtgacatccgatgaggggtcaatgaatgcgttcacgggcagaggaagccccggccggggccagaagaccaaggtttgcacaactccctcttcaggacacgcagcttcaggaaaagattcttcctctcgtttagctgtgacggaccctacccgccctggcgccactactaaaatcacaaccacctcaacctacatctcagcgtccacgttgaaggttaataagaagactaaaggcctgattgatggtttaaccaagttctttacaccatcccctgacgggcgcaggtctcggggcgagattatcgacttttcaaagcactacaggcctcggaagaaagtgtcacagaagcagtcttgcactagccatgtgttggccaccgatacggaaatcaagattaacattaaacaggagagcgctgatgtgaatgtcattggcaataaggatgtcgtcaccgaggaggatctcgacgttttcaagcaggcccaagaactcagctgggagaagatcgagtgtgaatcgggagtcgaagactgtggcaggtacccatccgtgatcgagtttggaaaatacgagattcaaacttggtattccagtccataccctcaggagtacgcaaggctgccgaaactatacctctgtgaattctgcctcaaatatatgaagtctaagaatatactgctgcgccattcaaaaaaatgtggctggttccatccacccgctaatgaaatataccgccggaaggacctctcagtgttcgaagtcgatggcaacatgtccaaaatatactgccaaaatctttgcctgctcgccaaattatttcttgatcacaagaccctctactatgacgtcgagccattcctgttttacgttctaaccaaaaacgacgagaagggctgtcacctcgtggggtatttctctaaagagaaactctgtcagcagaaatataatgtctcatgcattatgattatgccccaacaccagaggcagggttttggaaggtttctcattgatttcagttacctcttatccagacgggagggacaggccggaagtcctgagaaaccactctcagacctcggtcgcctgtcgtatttagcttactggaagtctgtaatcctggagtatctgtatcatcaccacgagaggcatatttccatcaaagcgataagtcgagccactggtatgtgtcctcacgacatcgcaactacattacaacatctgcacatgattgataagcgagacgggagattcgtgattattcgccgcgagaagctgatcctgtcccatatggagaaattaaagacgtgttctagagctaatgagttagacccggatagtcttcgctggaccccaatccttattagtaacgcagctgtttctgaagaagaaagagaagcagaaaaagaagccgagcggctgatggaacaggcttcctgttgggagaaagaagagcaggagatccttagcactcgagcaaactcccggcagtctcctgccaaagttcagtccaagaacaagtatctccatagcccagaaagccgacccgtaactggggagagaggtcaattgctcgagttaagcaaggagtcttcagaggaggaagaagaggaagaggatgaggaagaggaagaggaggaagaagaagaggaggaggatgaggaggaagaagaagaagaagaagaagaagaagaagaggaaaacattcagagctcccccccccgactaacgaagcctcaatctgtcgcaatcaagcgcaagcgcccgtttgtgctgaagaaaaagaggggccggaaacggcgccgcatcaacagctcggttacaaccgagacaatatctgagaccactgaagtgctgaatgagccttttgacaacagcgatgaagagaggcctatgccccagcttgaacccacctgcgagatcgaggtcgaggaagatggacgaaagccggtcttaagaaaggcatttcagcaccaaccaggcaagaaaaggcagacagaggaggaggaggggaaggataaccactgctttaagaacgcagatccctgccggaataatatgaatgatgactcaagcaacctcaaagaagggtcgaaggacaacccagagcccctgaaatgcaagcaggtgtggccgaagggaactaagagaggtctgtcaaagtggcgccagaacaaagagcgaaaaacaggattcaagctcaacctctacaccccacctgaaactcccatggaacctgacgagcaagtgactgtggaggagcagaaggagaccagcgaaggcaaaacctccccctcacccattagaatagaggaagaggtaaaagaaaccggggaggcattacttccacaggaggagaacaggcgcgaagagacatgcgccccagtcagtcccaacacaagccccggagaaaagcccgaggatgacctgatcaagcctgaggaggaggaagaagaagaggaagaggaggaggaggaagaggaggaggaggagggggaggaagaggagggaggaggcaacgttgaaaaagatcctgacggcgccaagagtcaggaaaaagaagagccagaaatctctaccgaaaaagaggattcagcgcggttagacgaccacgaggaagaggaggaagaggacgaagagccttcccataatgaggaccatgacgcggacgacgaggacgactcacatatggagtccgctgaggtagaaaaggaggagcttccgagggaatcctttaaggaggtccttgaaaaccaggaaacgttcctcgacttgaacgtgcagccaggacacagcaacccagaggtactaatggactgtggcgttgacctgacggcttcttgtaatagcgaaccaaaggagctcgctggcgaccccgaggctgtccccgagagcgacgaagaaccgcctccgggggagcaggcacaaaagcaagaccaaaagaacagcaaagaagttgataccgagttcaaggagggcaacccagccactatggaaatagattccgaaaccgttcaggcagttcagagccttacacaagagtctagcgagcaggacgatacattccaggactgcgccgagacccaggaagcttgtaggtctcttcagaattacactagggccgaccagtcaccccagattgcaactaccctggacgactgtcaacagtccgaccacagctcccctgtgagtagtgtccattcccaccccggccagtccgtacgctctgtgaatagcccttctgtgccagcactggagaacagctacgcccagattagtcccgatcagtccgcgatctcggttccatccctgcagaacatggaaacaagtcctatgatggacgtgccaagcgttagcgaccacagccaacaagtcgtggattctggtttcagcgatctgggatcaatcgagtctaccactgagaattatgagaacccaagttcatatgattcaactatgggagggagtatttgcggtaacggtagtagtcagaattcttgttcctatagtaatctgacatcctcatctctcacacagagctcctgcgccgtgactcagcagatgtctaacatctcaggttcttgctccatgcttcaacaaacctccataagctccccccctacctgtagcgtgaaatctccccagggctgcgtggtcgagagaccacctagcagcagccagcagctcgcccaatgctctatggccgccaattttactccacccatgcagctcgcggagattccggagacaagtaatgcaaatattggcctgtatgagcgaatggggcaatctgatttcggcgctggccattacccccagcctagtgctaccttctctttagccaagctgcagcagttgaccaacacattgatcgatcatagcctcccttattcccactcagccgcagtgacttcttatgccaactctgcctccctgtctacgcccctttctaacacaggactagtgcaactgtcccaatctcctcacagtgtgcctggcggacctcaggcccaagccactatgacccccccccctaatttaacccccccaccaatgaaccttccgcctcccctgctccaaagaaatatggcggccagtaatataggcatatcgcacagtcagagattacagacacagatcgcctctaagggacacatctccatgaggactaaaagcgcctctctgtctccagcagccgcaactcatcagagccaaatctatggaaggtcccagacagtggccatgcaggggccagcacgcacattaacaatgcagcggggtatgaacatgagcgttaaccttatgcccgcacctgcttataacgtgaacagcgtgaatatgaacatgaataccctgaatgccatgaatgggtattctatgagtcagcctatgatgaattccgggtaccattccaaccacggttatatgaaccagacacctcaataccccatgcagatgcagatgggaatgatggggacacagccatatgcccagcagcccatgcaaacaccccctcacggcaacatgatgtacacggccccgggccatcacggctacatgaatactggtatgtctaaacagtctctgaacgggagctacatgcggcgctag

SEQ ID NO: 90666 - DNA, 7560 bp, Artificial Sequence
  derived and/or modified sequence
gataatctccatttttgtcatggactgttaaaacgtttgaagttccaattctggtcttgatttcccagttaaagatgttcttcacccgaatgcagtctttcctgttggtaaaataagacaaccatcaacattgcctgtttgtctgcttttgaatctcttaaggatggatgtttgtaagatgttgcttaatacagtctggaatactctgtccatttgttgaattgtaaatgactttcaaatgtgcaagttctgttaaatacaaagagaacctctatgggtaacttttgtgttgaagaagtcatttgtcaaccatggtaaaacttgcaaacccactttatacagagtggattcttgaagctatacagaaaataaaaaagcaaaagcaaaggccctctgaagagagaatctgccatgcggtcagtacttcccatgggttggataagaagacagtctctgaacagctggaactcagtgttcaggatggctcagttctcaaagtcaccaacaaaggccttgcctcctataaggacccagacaaccctgggcgcttttcatcagttaaaccaggcacttttcctaagtcagccaaggggtctagaggatcatgtaatgatctccgcaatgtggattggaataaacttttaaggagagcaattgaaggacttgaggagccgaatggctcctccctgaagaacatagagaagtatctcagaagtcaaagtgatctcacaagcaccaccaacaacccagcctttcagcagcggctgcgactgggggccaaacgcgctgtgaataatgggaggttactgaaagacggaccgcagtacagggtcaattatgggagcttagatggcaaaggggcacctcagtatcccagtgcattcccatcctcgctcccacctgtcagccttctaccccatgagaaagaccagccccgtgctgatcccattccaatatgtagcttctgtttggggactaaagaatcaaatcgtgaaaagaaaccagaagaactcctctcttgtgcagattgtggcagtagtggacacccatcctgtttgaaattttgtcctgaattaacaacaaatgtaaaggccttaaggtggcagtgcatcgaatgcaagacatgcagtgcctgtagagtccaaggcagaaatgctgataatatgcttttttgtgattcctgtgatagaggatttcatatggaatgctgtgacccaccactttccagaatgccaaaagggatgtggatttgccaagtctgcagaccaaagaaaaagggaagaaaactacttcatgagaaagctgcacaaataaaacgacgatatgcaaaacccattggacgaccgaaaaataaattaaagcaacgattgttgtctgtaaccagtgatgaaggatccatgaatgcattcacaggaagggggtcacctggtaggggtcaaaagactaaagtctgtaccacaccttcatctggtcatgctgcatctgggaaggactcaagcagcagattggctgttacagaccccactcggcctggtgccaccaccaaaatcaccaccacctccacctacatttctgcctctacacttaaagttaacaagaaaaccaaagggctcattgatggccttactaagttttttacaccatcacctgatggtcgcagatcacgaggtgaaattatagacttttcaaagcactatcgtccaaggaaaaaggtctctcagaaacagtcatgcacttctcatgtgttggctacagatactgaaataaaaataaacatcaaacaagaaagtgcagatgtaaatgtgattggaaacaaggatgtcgttactgaagaggatttggatgtttttaagcaggcccaggaactttcttgggagaaaatagagtgtgagagtggggtggaagactgtggccggtacccttctgtgattgaatttggtaaatatgaaatccaaacctggtactcctcgccttacccacaggaatatgcaagattaccaaagctttacctgtgtgaattctgtcttaaatatatgaaaagtaaaaatattttgctaagacactccaagaagtgtggatggtttcatcctccagcaaatgaaatttaccgaaggaaagacctttcagtatttgaggttgatgggaatatgagcaaaatttattgccaaaacctttgcttgttagccaagctcttcctggaccacaaaacgttgtattatgatgtcgagccattccttttttatgtccttacaaaaaatgatgaaaagggctgtcatctggttggatacttctctaaggaaaagctttgccagcagaagtataatgtctcctgcataatgatcatgccccagcaccaaaggcaaggatttggacggtttctcattgatttcagctatttgctttctagaagagaaggccaagcagggtctcctgaaaagcctctctccgatctgggccgtctctcctacctggcatattggaagagcgtcatcttggagtatctctaccaccaccatgagaggcacatcagcatcaaggcaattagcagagcgacgggcatgtgcccacatgacattgccaccactctgcagcacctccacatgatcgacaagagagatggcagatttgtcatcattagacgggaaaagttgatattgagccacatggaaaagctgaaaacctgttccagagccaatgaacttgatccagacagtctgaggtggaccccaattttaatttctaatgctgcagtgtctgaagaagagcgagaagctgagaaagaggctgagcggctaatggaacaagctagctgctgggagaaggaggaacaagaaatcctgtcaactagagctaacagtaggcaatcacctgcaaaagtacaatcgaaaaataaatatttgcattccccggagagccggccagtcacaggggagcgagggcagctgctggagctgtctaaagagagcagtgaagaagaagaggaggaggaggacgaggaggaggaagaagaggaggaagaagaggaagaggatgaagaggaggaagaagaggaagaagaagaagaagaagaagaaaatattcaaagctctcccccaagattgacgaaaccacagtcagttgccataaagagaaagaggccttttgtactaaagaagaaaaggggtcgtaaacgcaggaggatcaacagcagtgtaacaacagagaccatttcagagacgacagaagtactgaatgagccctttgacaactcagatgaagagaggccaatgccacagctggagcctacctgtgagattgaagtggaggaagatggcaggaagccagtcctgagaaaagcattccagcatcagcctgggaagaaaagacaaacagaggaagaggaaggaaaagacaatcattgcttcaagaatgctgacccttgtagaaacaatatgaatgatgattcaagtaacttgaaagaaggcagtaaagacaatcccgaacctctaaagtgcaaacaagtgtggccaaaaggaacaaagcgcggtctatctaagtggaggcaaaacaaagagaggaagaccggatttaaactgaatttgtacaccccgccagaaacacccatggagcctgacgagcaggtaacagtggaagaacagaaggagacttcagaaggaaaaaccagccccagtcccatcaggattgaggaggaggtcaaggaaactggggaagccctgttgcctcaagaggaaaacagaagggaagaaacatgtgcccctgtaagtccaaacacatcaccaggtgaaaaaccagaagatgatctcatcaaacctgaggaagaggaagaggaggaggaggaggaagaggaagaagaggaagaagaggaaggggaagaagaagaaggaggaggaaatgtagaaaaagatccagatggtgctaaaagccaagaaaaagaggaaccagaaatctccacggaaaaagaagactctgcacgtttggatgatcacgaagaggaggaggaagaggatgaagagccatcccacaacgaggaccatgatgccgatgacgaggatgacagccacatggagtctgccgaagtggagaaggaagagctgcccagagaaagcttcaaagaagtactggaaaaccaggagacttttttagaccttaatgtgcagcctggtcactcgaacccagaggtcttaatggactgtggcgtcgacctgacagcttcttgtaacagtgagcccaaggagcttgctggggaccctgaagctgtacccgaatctgacgaggagccacccccaggagaacaggcacagaagcaggaccaaaagaacagcaaggaagtcgatacagagttcaaagagggaaacccagcaaccatggaaatcgactctgagactgtccaggccgttcagtctttgacccaggagagcagcgaacaggacgacacctttcaggattgtgccgagactcaagaggcctgtagaagcctacagaactacacccgtgcagaccaaagtccacagattgccaccacgctcgacgattgccaacagtcggaccacagtagcccagtttcatccgtccactcccatcctggccagtccgtacgttctgtcaacagcccaagtgtccctgctctggaaaacagctacgcccaaatcagcccagatcaaagtgccatctcagtgccatctctgcagaacatggaaaccagtcccatgatggatgtcccatcagtttcagatcattcacagcaagtcgtagacagtggatttagtgacctgggcagtatcgagagcacaactgagaactacgaaaacccaagcagctacgattctactatgggaggcagcatctgtggaaacggctcttcacagaacagctgctcctatagcaacctcacctccagcagtctgacacagagcagctgtgctgtcacccagcagatgtccaacatcagcgggagctgcagcatgctgcagcaaaccagcatcagctcccctccgacctgcagcgtcaagtctcctcaaggctgtgtggtggagaggcctccgagcagcagccagcagctggctcagtgcagcatggctgctaacttcaccccacccatgcagctggctgaaatccccgagacgagcaacgccaacattggcttatacgagcgaatgggtcagagtgattttggggctgggcattacccgcagccgtcagccaccttcagccttgccaaactgcagcagttaactaatacacttattgatcattcattgccttacagccattccgctgctgtgacttcctatgcaaacagtgcctctttgtccacaccattaagtaacacagggcttgttcaactttctcagtctccacactccgtccctgggggaccccaagcacaagctaccatgaccccaccccccaacctgactcctcctccaatgaatctgccgccgcctcttttgcaacggaacatggctgcatcaaatattggcatctctcacagccaaagactgcaaacccagattgccagcaagggccacatctccatgagaaccaagtcagcgtctctgtcaccagccgctgccacccatcagtcacaaatctatgggcgctcccagactgtagccatgcagggtcctgcacggactttaacgatgcaaagaggcatgaacatgagtgtgaacctgatgccagcgccagcctacaatgtcaactctgtgaacatgaacatgaacactctcaacgccatgaatgggtacagcatgtcccagccaatgatgaacagtggctaccacagcaatcatggctatatgaatcaaacgccccaataccctatgcagatgcagatgggcatgatgggcacccagccatatgcccagcagccaatgcagaccccaccccacggtaacatgatgtacacggcccccggacatcacggctacatgaacacaggcatgtccaaacagtctctcaatggctcctacatgagaaggtagacaacgtgggcagtccacaaaacctacggggcatcactattggattgatctgcacaaatacctttgaagagtacgatttcaaaaccagcaattggtgtgaatgcaaaaacatttgttggcaccatttatttaaaaaaaaaaaaagctgtatgcagcagaaagccttatacaagttgtttttctttttttcctttttcttttttttggtaccttcatttctgttacttttatataaaattctctgcaaaggaaggcctctctttggactacaatttggaggcagccacttgttgtgcctgcttctgttaaacaatgtggatatcaagcccccccaaattatctgttttaatattgaacctagagctttttttttcccttccctgtccactccatgtaaatgcctttagcatttcagttattgtatattttgtttaaggtgacacttcagcatgccgctaatgtctttgttagtgacagtgcattttgtagtactgtacaagtgttgtgctaacagtaagccatttcttaagttttttgccttgattagggtgccctaatttgagggttttaaaaaaaactatatttttgttaattataaaactgtaaagagctataaaagctattcccatttggttagtcaaaagggttttattgctaaatgtttggtgtaaagttgagacccttttccattttggtgacagatttctttggggaaaaaaggcagctttctgttttataaatgcagacttctgtttattgaatgaagcatatctcagtgtttatctgtcaggttttgaaacatttcatatatgtccaaatacttggcaggatttaaaaaaaaatagtgaatttggtgtaaagttgctattttatggaaatgcctctaactttacattttcattccatctgtagatttttctatctttataaaatattggagttattttttaaggaaaaatagaaaagtagcttgtgaatagctcaaactaagcttacaaatcgcatgtaaaaaagcaaaaaagttatttgtgtctgtttatattgcttccttttttgtagcctttgtacctgtacagggtgacagtaagggccaagcaggagaggcgtaatccttgtataaaataggatccagcgacactcttgtatttatctgttctctttttagtcagtcacttcaaaaaaacaaaaaacaaacaaaaaaaagctgtacattttaacataaaataaattatgatgagccatttttagcctcttgtgtcctgtcatattatgattgatagagaatgaccaatggaactgtatcatgtgtcacgcctcagaacacatacacattttgggaaaataaattatttagtgtaaattggagttatgggattttctgatttgttttgactttgggggaggggttggcaataaataagagtaatatctaataaaaccatcacatataccaaatacctatttaataaattaatttataatggattttaatgcttttcatgaaagtttattttatgcgagtgcataccttctgtatgccaatcattgtctttaaaataaagtgaaattgtttttt

SEQ ID NO: 90667 - DNA, 5673 bp, Artificial Sequence
  derived and/or modified sequence
atggtgaagctggccaaccccctgtacacagagtggatcctggaggccatccagaagatcaagaagcagaagcagaggcccagcgaggagcgcatctgccacgctgtgtccaccagccacggcctggacaagaagacagtgtctgagcagctggagctgtctgtgcaggacggctctgtgctgaaggtgaccaacaagggcctggccagctacaaggaccctgacaaccctggccgcttcagctctgtgaagccaggcaccttccccaagagcgccaagggcagccggggcagctgcaatgacctgagaaatgtggactggaacaagctgctgcggcgggccatcgagggcctggaggagcccaacggcagcagcctgaagaacatcgagaagtacctgcggagccagagcgacctgaccagcaccaccaacaacccagccttccagcagaggctgcggctgggcgccaagagagctgtgaacaacggccgcctgctgaaggatggcccccagtacagagtgaactacggcagcctggatggcaagggggccccccagtaccccagcgccttccccagcagcctgccccctgtgtccctgctgccccatgagaaggaccagcccagggctgaccccatccccatctgcagcttctgcctgggcaccaaggagagcaaccgggagaagaagccagaggagctgctgagctgtgccgactgtggcagcagcggccaccccagctgcctgaagttctgcccagagctgaccaccaacgtgaaggccctgcgctggcagtgcatcgagtgcaagacctgcagcgcctgccgggtgcagggcagaaatgctgacaacatgctgttctgtgacagctgtgaccggggcttccacatggagtgctgtgacccccccctgagcaggatgcccaagggcatgtggatctgccaggtgtgccggcccaagaagaagggcaggaagctgctgcacgagaaggccgcccagatcaagagaagatatgccaagcccatcggccggcccaagaacaagctgaagcagaggctgctgtctgtgaccagtgatgagggctccatgaatgccttcaccggccggggcagccctggccggggccagaagaccaaggtgtgcaccacccccagcagcggccatgctgccagcggcaaggacagcagcagccggctggccgtgacagaccccaccaggcctggggccaccaccaagatcaccaccaccagcacctacatcagcgccagcaccctgaaggtgaacaagaagaccaagggcctgattgatggcctgaccaagttcttcacccccagcccagatggaagaagaagcagaggagagatcatcgacttcagcaagcactaccggcccaggaagaaggtgtcccagaagcagagctgcaccagccacgtgctggccacagacacagagatcaagatcaacatcaagcaggagagcgcagatgtgaatgtgattggcaacaaggatgtggtgacagaggaggacctggatgtgttcaagcaggcccaggagctgtcctgggagaagattgaatgtgagagcggcgtggaggactgtggccgctaccccagcgtcatcgagtttgggaagtatgagatccagacctggtacagcagcccctacccccaggagtatgcccggctgcccaagctgtacctgtgtgagttctgcctgaagtacatgaagagcaagaacatcctgctgcggcacagcaagaagtgtggctggttccaccccccagccaatgagatctacagaaggaaggacctgtctgtgtttgaggtggatggcaacatgagcaagatctactgccagaacctgtgcctgctggccaagctgttcctggaccacaagaccctgtactatgatgtggagcccttcctgttctacgtgctgaccaagaatgatgagaagggctgccacctggtgggctacttcagcaaggagaagctgtgccagcagaagtacaacgtgtcctgcatcatgatcatgccccagcaccagaggcagggcttcggccgcttcctgattgacttctcctacctgctgagcagaagagagggccaggccggcagccctgagaagcccctgagtgacctgggccgcctgagctacctggcctactggaagagcgtcatcctggagtacctgtaccaccaccacgagcggcacatcagcatcaaggccatcagccgggccaccggcatgtgcccccatgacatcgccaccaccctgcagcacctgcacatgattgacaagagagatggccgcttcgtcatcatccggcgggagaagctgatcctgagccacatggagaagctgaagacctgcagccgggccaatgagctggaccctgacagcctgcgctggacccccatcctgatcagcaatgctgctgtgtctgaggaggagcgggaggccgagaaggaggccgagcggctgatggagcaggccagctgctgggagaaggaggagcaggagatcctgagcacccgggccaacagccggcagagccctgccaaggtgcagagcaagaacaagtacctgcacagccctgagagcaggcctgtgactggagagcggggccagctgctggagctgagcaaggagagcagcgaggaggaggaggaggaggaggatgaggaggaggaggaggaggaggaggaggaggaggaggatgaggaggaggaggaggaggaggaggaggaggaggaggaggagaacatccagagcagccccccccggctgaccaagccccagagcgtggccatcaagaggaagaggccctttgtgctgaagaagaagaggggcaggaagagaagacgcatcaacagctctgtgaccacagagaccatcagcgagaccacagaggtgctgaatgagccctttgacaacagtgatgaggagcggcccatgccccagctggagcccacctgtgaaattgaggtggaggaggatggcaggaagcctgtgctgaggaaggccttccagcaccagcccgggaagaagaggcagacagaggaggaggagggcaaggacaaccactgcttcaagaatgctgacccctgcaggaacaacatgaatgatgacagcagcaacctgaaggagggcagcaaggacaaccctgagcccctgaagtgcaagcaggtgtggcccaagggcaccaagaggggcctgagcaagtggaggcagaacaaggagaggaagacaggcttcaagctgaacctgtacaccccacctgagacccccatggagccagatgagcaggtgacagtggaggagcagaaggagaccagcgagggcaagaccagccccagccccatccgcatcgaggaggaggtgaaggagactggagaggccctgctgccccaggaggagaacagaagagaggagacctgtgcccctgtgagccccaacaccagccctggagagaagccagaagatgacctgatcaagccagaggaggaggaggaggaggaggaggaggaggaggaggaggaggaggaggaggagggggaggaggaggagggcggcggcaatgtggagaaggaccctgatggagccaagagccaggagaaggaggagcctgagatcagcacagagaaggaggacagcgcccggctggatgaccacgaggaggaggaggaggaggatgaggagcccagccacaatgaagatcatgatgctgatgatgaagatgacagccacatggagagcgctgaggtggagaaggaggagctgccccgggagagcttcaaggaggtgctggagaaccaggagaccttcctggacctgaatgtgcagcccggccacagcaaccctgaggtgctgatggactgtggggtggacctgacagccagctgcaacagcgagcccaaggagctggccggggaccctgaggccgtgcctgagagtgatgaggagcccccacctggagagcaggcccagaagcaggaccagaagaacagcaaggaggtggacacagagttcaaggagggcaacccagccaccatggagattgacagcgagaccgtgcaggccgtgcagagcctgacccaggagagcagcgagcaggatgacaccttccaggactgtgccgagacccaggaggcctgccgcagcctgcagaactacaccagggctgaccagagcccccagatcgccaccaccctggatgactgccagcagagcgaccacagcagccctgtgtcctctgtgcacagccaccctggccagagcgtgcgctctgtgaacagccccagcgtgcctgccctggagaacagctatgcccagatcagcccagaccagagcgccatctctgtgcccagcctgcagaacatggagaccagccccatgatggatgtgcccagcgtgtctgaccacagccagcaggtggtggacagcggcttcagtgacctgggcagcattgagagcaccacagaaaattatgagaaccccagcagctatgacagcaccatgggcggcagcatctgtggaaatggcagcagccagaacagctgcagctacagcaacctgaccagcagcagcctgacccagagcagctgtgctgtgacccagcagatgagcaacatcagcggcagctgcagcatgctgcagcagaccagcatcagcagcccccccacctgcagcgtgaagagcccccagggctgtgtggtggagcggccccccagcagcagccagcagctggcccagtgcagcatggccgccaacttcaccccacccatgcagctggccgagatccctgagaccagcaatgccaacatcggcctgtatgaaagaatgggccagagcgactttggagctggccactacccccagcccagcgccaccttcagcctggccaagctgcagcagctgaccaacaccctgattgaccacagcctgccctacagccacagcgctgctgtgaccagctatgccaacagcgccagcctgagcacccccctgagcaacacaggcctggtgcagctgagccagagcccccacagcgtgcctgggggcccccaggcccaggccaccatgaccccaccacccaacctgaccccaccacccatgaacctgcccccacccctgctgcagaggaacatggccgccagcaacatcggcatcagccacagccagaggctgcagacccagatcgccagcaagggccacatctccatgaggaccaagagcgccagcctgagccctgctgctgccacccaccagagccagatctacggccgcagccagacagtggccatgcagggccctgcccggaccctgaccatgcagaggggcatgaacatgtctgtgaacctgatgcctgccccagcctacaacgtgaacagcgtgaacatgaacatgaacaccctgaatgccatgaatggctacagcatgagccagcccatgatgaacagcggctaccacagcaaccacggctacatgaaccagaccccccagtaccccatgcagatgcagatgggcatgatgggcacccagccctatgcccagcagcccatgcagaccccaccccacggcaacatgatgtacacagcccctggccaccacggctacatgaacacaggcatgagcaagcagagcctgaatggcagctacatgagaagatag

SEQ ID NO: 90668 - DNA, 5673 bp, Artificial Sequence
  derived and/or modified sequence
atggtgaagctggccaaccccctgtacaccgagtggatcctggaggcaattcagaagattaaaaagcagaagcaaaggccgagcgaggagcgtatctgccacgcggtgtctactagccacggactggataagaaaacagtatcagagcaactggagctgagtgtgcaggatggaagcgtgttaaaggtgactaataaaggattagcttcctacaaagatcccgacaaccccggaaggttttcctctgtgaagcccggcacattcccaaagtctgccaaaggctcccgcggctcttgtaatgacctaagaaacgtggactggaacaagctgctccggcgtgcgatagagggcttagaagaacctaatggaagtagcctgaaaaacattgagaaatatctccgctcccagtccgatttgacctccaccacgaataaccccgcctttcagcagagactcaggcttggagcaaagcgagccgtgaacaatggtcgattgcttaaggacggcccacagtatcgggtaaattatgggtcattagacggcaaaggggcgccccagtatccatccgcgttcccgtcctcattgcccccagtctccttgctgcctcacgagaaggatcaaccccgggccgatccgatacccatctgttctttctgcctaggtaccaaggagagcaaccgtgaaaaaaaacctgaggagctcctctcttgcgccgactgcggatcatcaggacatccatcttgtctgaagttctgccctgagctaaccacaaatgtaaaggctctcagatggcagtgtatagagtgtaaaacctgctctgcctgccgggttcagggtcgaaatgctgacaatatgctcttctgtgatagctgtgaccgtgggttccacatggagtgttgtgaccccccactgtctaggatgcctaaagggatgtggatatgtcaggtgtgtcggcctaagaagaagggacgaaaacttttgcacgagaaagccgcacagattaagaggaggtacgctaagcccatcggtagacccaagaacaagctgaaacagcgccttctgtccgtgacatcagatgaaggctctatgaatgctttcacaggcagaggatcgccaggcagaggacaaaaaacaaaggtctgcactacccccagctccggacacgctgcctccggaaaggactcctcatcacggcttgctgttacagatccaacacggcccggggccaccaccaaaatcactaccacatcgacatatatcagcgcctctacactcaaagtgaacaaaaagacaaaaggcctaatagatggtcttaccaaatttttcactccatctcccgacggacgccgcagtaggggcgagatcattgactttagcaaacattatcggccgaggaaaaaagtatcccagaagcaatcttgcacctcccacgtcctggccaccgataccgagattaaaatcaatatcaagcaggagagtgctgatgttaatgttattggcaacaaagacgtcgtgacagaggaagacctggatgtgtttaagcaggcccaggaattatcctgggaaaagatagagtgtgaaagcggagtagaagattgcggccgatacccatcggtgatcgagttcgggaaatatgagatccagacatggtacagttcgccatatcctcaagagtatgccagactgcctaaactgtacctctgtgaattctgcttgaaatatatgaagagcaagaatatcctcttaaggcatagcaagaagtgcggctggttccatccccccgccaacgagatttataggcgcaaggatctgagtgtgtttgaggtggatggcaacatgtctaagatttactgtcagaatttgtgcttgctggctaaactctttctcgatcataaaacattgtactatgatgtcgaacccttcctgttctatgtcctcacaaagaacgatgagaaaggttgtcacctggtgggttatttctcgaaggagaaactgtgtcaacagaagtacaatgtgtcatgcataatgataatgcctcagcaccaacgtcaagggttcggccgatttttaatcgatttttcctacctcctgtcccgccgagagggtcaggccggcagccctgaaaagcccctatcggacctcggtagactgtcatatctcgcatattggaaatctgtgatcttagagtacctgtatcatcaccacgagcgccacatctcaatcaaggctattagccgcgccacaggtatgtgtcctcacgacattgccacaactctccagcatttgcatatgattgataagcgcgatggtcggtttgtgattattcgtagggagaagttgatcctgtcccatatggaaaaactgaagacatgttctcgtgccaacgagctcgaccccgattcgcttagatggacacctatactgatttcgaatgcagctgtgtccgaggaggaacgagaagcagaaaaagaggcagagaggctgatggagcaggcctcgtgttgggagaaggaggaacaggaaatcctgagcaccagagccaatagcagacaaagtcctgctaaggttcaaagtaaaaacaaatacctgcactccccagagagccggcccgttacaggcgaacgtggccagctcctggaactgagtaaggagtcctccgaagaggaagaagaagaagaggatgaggaagaagaggaggaagaagaggaggaggaggaggatgaagaggaagaagaagaggaggaggaggaagaagaggaggaaaacattcagtcctccccgccccggctcacaaaaccccagagcgttgctatcaagcggaaaagacccttcgtgctaaagaaaaaacgggggagaaaacggagacgaatcaactcatctgtcaccactgaaacaattagtgagaccactgaggtcctcaacgagccatttgacaatagcgacgaagaaaggcctatgccgcagttggagccgacttgcgagatcgaggtcgaggaggacggccgaaagcccgtcctgagaaaagcgttccagcaccagcccggcaagaaacgccaaacagaagaggaagaggggaaggacaaccactgttttaaaaatgctgacccatgcagaaacaacatgaacgacgacagtagtaatctgaaagagggatcaaaggataaccccgaacccctgaagtgcaaacaggtttggccaaaagggacgaaaaggggcctgtctaaatggcggcagaataaagagagaaagactggcttcaagctgaacctgtacacgccaccagaaactccaatggaacccgacgagcaggtcaccgtggaggagcagaaggaaacaagcgagggtaaaactagtccatcacccatcagaattgaggaagaggtcaaggagacaggtgaggccttattaccccaggaggaaaatagacgagaggaaacctgtgcgccagttagccctaacaccagtccaggcgagaaacctgaagatgatctgattaagccggaggaggaagaggaggaggaggaagaggaggaggaggaggaagaggaggaagaaggtgaggaggaagagggcgggggcaatgtggaaaaggatccagatggtgccaaatcacaggagaaggaagagcccgagatctcaacagagaaagaggattcagcgcgtctcgacgaccacgaggaagaagaggaagaagacgaggaacctagccacaatgaagatcatgatgctgatgatgaagacgattcacacatggagagtgccgaagtggaaaaggaagaactgccaagggagtcttttaaggaagtgttggagaaccaggaaacgtttcttgaccttaacgtgcaaccaggacacagcaatcctgaggtgctcatggattgcggcgtcgatttaacagctagctgcaactccgaacctaaagagcttgctggtgaccccgaggcggtcccagagtccgacgaagagcccccacctggggagcaagcccagaaacaagaccaaaaaaactcaaaggaggttgatacagaatttaaggaagggaaccccgctacaatggaaattgattccgagactgtgcaagccgtccagtccctcacccaggaaagtagcgagcaggatgatacatttcaggattgcgccgagacacaggaagcctgtcggtctctgcagaattacacgcgggcagaccaaagtccgcagatcgctacgacactggatgattgtcagcaatcggaccactctagtccagtatcttcagtacacagccacccgggacagtccgtgaggtcagtaaatagtcccagcgtgcccgcactggaaaattcctacgcccagatctcacctgaccagtcagcaatctcggtgccctctctgcagaatatggagacttcacctatgatggatgttccaagcgtaagcgatcactcacagcaggtcgtggatagcggcttttccgacctaggttctatcgagagtaccactgagaactatgaaaatccctccagttacgatagcacaatgggtggctcgatttgcgggaacgggtcaagtcagaactcatgttcctactcgaacctcaccagcagctccctcactcagagctcttgcgcggttactcagcagatgtctaatattagcggaagctgctcaatgctccagcagacaagtatatcatcaccacccacatgttcagtgaagtcccctcagggatgcgttgttgaacggcccccgtcctcaagccaacagctggctcagtgttctatggctgccaatttcaccccccctatgcagctcgctgagatcccagaaaccagtaatgctaacatcgggctgtatgagcgcatgggacagagtgattttggcgccggacactatcctcaacctagtgcaacattctcccttgctaagctgcagcagctcaccaataccctgatagaccactctcttccatactcccactcggcagccgtcacatcatatgcgaactccgcatctctatccacaccacttagcaataccggcctggttcagttgtcacagtccccccattctgtccccggtggaccgcaggcccaggccaccatgactccaccccccaatcttacacccccgccgatgaatcttcctccacccctgctccagagaaatatggcagcttccaacattggaatttcccacagtcagcggttacaaacccagatcgccagtaagggccacattagcatgcgcaccaaatctgcctcactcagccccgcagctgctacccaccagtcacagatttacgggcggtcacagactgtggctatgcaggggccagctagaacattgacaatgcagcggggcatgaatatgtcagtcaacctgatgcctgcgcccgcgtacaacgtaaacagcgttaacatgaacatgaatacactgaatgcaatgaatggttattccatgtctcaaccaatgatgaacagcggatatcacagcaaccacgggtatatgaaccagaccccccagtatccaatgcagatgcaaatgggtatgatgggtactcagccttatgcacagcagcccatgcagacacctccacacggcaatatgatgtacacagcacctggacaccacggatacatgaataccggcatgtccaagcagtccttgaatggcagctacatgcggcgatag

SEQ ID NO: 90669 - DNA, 5672 bp, Artificial Sequence
  derived and/or modified sequence
atggtgaagctagctaaccccctttatactgaatggatcttagaggctatacagaagattaaaaagcaaaaacagcgccctagtgaagagagaatttgtcacgcggtgtccacaagccacggcctcgataagaagaccgtatccgaacagctggagctgtcagtccaggacggctcagttctgaaagtgacaaataaagggctagcctcgtataaggatccagacaatcctggcagattctcctccgtgaaacctggcaccttcccaaaaagcgctaagggatcaaggggatcctgcaatgatttacgcaacgtggactggaataaacttttgagacgcgcaatagaagggttagaagagccaaatggctcaagtctgaagaacatagagaaatacctgagaagccaaagtgatttgaccagcaccacgaacaatcccgcatttcaacagaggttgcgcttgggtgccaagcgagccgttaataacggtagactccttaaagacggaccgcaataccgtgtgaattacgggagcctggacgggaagggcgcaccacagtatccatccgcgttccccagctctctgcccccagtgtccctcctcccccacgaaaaggatcaacctagagcggatcccatcccaatctgttctttttgcctaggcacaaaagaaagcaacagagagaagaagcctgaagaattgctgtcttgcgccgactgtggaagttcaggccatcccagctgtctgaaattttgccctgagcttacgactaacgttaaggccctgcggtggcagtgcatcgaatgtaaaacttgcagtgcctgtcgtgtccagggacgaaatgccgacaacatgcttttttgcgactcttgtgaccggggattccacatggagtgctgcgatccccctttgtcacgcatgcccaaaggcatgtggatctgccaagtttgtcggcctaagaaaaaaggtagaaagctcctgcacgagaaagccgctcagatcaagcgcagatacgcaaagccaatcggcaggcctaagaataagcttaaacagcgccttttgtccgtcacctctgatgagggctcaatgaatgcattcactggaagaggtagcccgggaaggggacaaaagaccaaagtctgtactaccccatccagcgggcacgccgcaagcgggaaagactcctcctctcggcttgccgtaaccgatccaacgcgaccgggagctacgaccaaaataactactaccagcacatatatatctgcatcaacgctgaaggtgaataaaaaaactaagggcctgatcgacggtctgacaaaatttttcactccgagcccagacggaagacgctcccggggtgagatcatcgattttagcaagcattaccggccaaggaagaaggtgagtcagaagcagagttgtaccagtcatgttcttgccaccgataccgagattaagatcaatatcaagcaggagtctgccgacgtcaatgtcattggtaacaaagacgtggtgaccgaggaagatctggacgtctttaagcaggctcaggagctgagctgggagaaaatagaatgcgagtcaggcgttgaggactgcggcaggtatccttccgtaattgagtttgggaagtacgagatacagacttggtattccagcccatacccacaggaatacgccaggctgcctaaactctatctctgtgagttctgcctgaagtatatgaaatcaaaaaatattctgctccggcattccaagaaatgtggctggttccacccacccgctaatgagatctaccgcaggaaagaccttagcgtgtttgaagtcgatggcaacatgtctaagatatattgtcagaacctgtgtttgctggccaaacttttcttagatcacaaaacactgtattatgacgtggagccttttctgttctatgtccttactaagaatgatgagaaagggtgccatctagtcgggtactttagcaaagaaaagctgtgccagcagaaatataatgtgtcttgcattatgatcatgccccaacaccaacgccaaggtttcggtcgtttcctaatcgattttagttatctgctgagtcggagagaaggacaagcagggtcaccagagaaacctctctcagacttgggacgtctgagctacctggcgtactggaagtcagtgatcctcgagtatttatatcaccaccacgaacggcatataagtattaaggcaatcagtagggccacgggcatgtgtccacatgacatcgctacgaccctgcaacatcttcacatgatcgacaagcgggacggtagatttgttataataagacgggaaaaattgatcctgagccacatggaaaaactgaaaacttgttcccgggcaaacgagctcgaccccgactccttaaggtggactcctatacttatcagtaacgctgcagttagcgaagaggagagagaggctgagaaagaggccgagcgattaatggagcaggcatcgtgctgggaaaaagaggagcaggagattctgtctaccagagccaattcacgtcaaagccccgctaaggtccagagcaaaaacaagtacctccactccccagaatcacggcctgtgaccggggagaggggccagcttctggaattaagcaaggaatcgtcagaggaggaggaagaagaggaggacgaggaagaagaggaggaagaggaggaggaagaggaggatgaagaagaggaagaagaggaggaagaggaggaggaggaggagaacattcagagctctcctccccgactgactaagcctcaatcagtggccataaagaggaagaggccatttgtcctgaaaaagaagcgcggtcggaagcggagacggatcaactccagtgtgactactgaaacaatctctgagactacagaagtcttgaatgagccttttgacaattccgatgaagagagaccgatgccacagttagagccgacttgtgagatcgaggtagaagaagacggtcgaaagccggtcctgagaaaggcgtttcagcaccagcccggtaagaaacggcagaccgaggaagaggagggaaaagacaatcactgttttaagaacgccgatccctgtagaaacaatatgaatgatgactccagtaacctgaaggagggcagcaaagacaatcctgagcctctgaaatgcaagcaggtttggccaaaggggaccaagaggggactgagcaagtggcggcagaataaggagcggaagaccggtttcaagctgaatctctacaccccccctgagacacctatggagcccgatgaacaggttacagttgaggaacagaaagagaccagcgaaggcaaaacatcgccgtcacccattcgcatcgaggaggaggttaaggagaccggggaagccttgctgccccaggaggagaacaggcgcgaagagacatgcgcccctgtgtccccgaatacatctccaggagaaaagcccgaggacgacctgatcaagcctgaggaagaagaggaagaggaagaggaagaggaggaggaggaagaggaggaggaaggcgaagaagaggaaggcggtggcaacgtcgagaaggacccagacggagccaagagtcaggagaaggaagagcccgagatctccacagagaaggaggacagcgctcgcctggacgatcatgaggaggaggaagaggaagacgaggagccctcacataacgaggaccacgatgctgacgacgaggacgatagccatatggaatctgcggaggtcgagaaagaggagctgcctagggaatcctttaaagaggtcctggaaaatcaagagaccttcctggacctcaacgtccagcccggacattcgaaccctgaagtcttgatggattgtggcgtggatttaactgcttcctgtaactccgagccaaaggagttggcaggagacccagaagccgtgcccgagagtgacgaagagccacccccaggagagcaggcacagaagcaagaccagaagaattcgaaagaagtggacacagaatttaaagagggaaatcctgccacaatggagatcgatagcgagaccgttcaagctgtccagtccctgacacaagaatcttcagagcaggatgataccttccaggattgcgctgagactcaagaggcttgtcgtagcctgcagaattatacccgcgcagatcagagccctcagatcgcgacgactctggacgattgccaacagtcagatcattctagtcctgtgagctccgtacatagccatccgggacagagtgttcgcagtgttaatagcccgagcgtgccagctctggagaactcgtatgcccagatctcccctgatcaaagtgcaatctctgtacccagcctgcaaaacatggagacttcccctatgatggatgtcccaagcgtgagcgatcacagtcagcaggtcgtagactccggattctccgatcttggcagtatcgagtcaactactgagaactatgaaaacccctcaagctatgattctactatgggcggaagcatttgcgggaacggatcatctcaaaactcttgtagttacagcaaccttacctcttcttctctgacgcagtcttcatgtgcagttacccagcagatgagcaatatttctggatcgtgcagcatgcttcagcagacgagtatttcctctccccctacttgcagcgtgaagagtcctcagggctgtgtagtggagagaccaccttcaagctcccagcaactggcacaatgcagtatggcagccaacttcacccctcctatgcagctggctgagattcctgaaacttcaaacgccaacattggcctgtacgagagaatggggcaaagtgatttcggagccggtcactacccacagccttcagctactttttcactggctaagcttcagcaactgactaatactctcattgaccactctctgccttatagccactcagccgctgtaacttcctatgccaactccgcctcactgagcacacccctgtcaaataccggcctggtgcaactatcccagagcccccacagcgtgcccggaggccctcaggcccaggctacaatgacacctcccccaaacctgacaccacccccaatgaatctgccaccaccgctcttgcagaggaacatggccgcttcaaatattggcataagtcactcccagcgcctgcagacgcagatcgcatccaaaggacatatctccatgcggacaaagtccgcatcactgtcccccgctgctgccacccatcagtctcagatttacggaagatcacagacagtcgccatgcaaggtcccgctagaacgctgaccatgcaaagggggatgaacatgtcagtcaatcttatgccggcaccagcctataatgtcaacagtgtgaacatgaatatgaacactctcaatgccatgaacggctattcaatgagtcagccaatgatgaattctggataccattcaaatcatggctatatgaaccaaacgccacagtaccctatgcagatgcagatgggaatgatgggtacacagccatatgcacagcagcccatgcaaaccccgcctcatggaaacatgatgtatacagctcccggacatcatgggtatatgaacacaggcatgtccaagcagtctctgaatggatcttatatgaggcggta

SEQ ID NO: 90670 - DNA, 5673 bp, Artificial Sequence
  derived and/or modified sequence
atggtgaagctggccaaccccctgtacaccgagtggatcctggaggccatccagaagatcaagaagcagaagcagagacccagcgaggagagaatctgccacgccgtgagcaccagccacggcctggacaagaagaccgtgagcgagcagctggagctgagcgtgcaggacggcagcgtgctgaaggtgaccaacaagggcctggccagctacaaggaccccgacaaccccggcagattcagcagcgtgaagcccggcaccttccccaagagcgccaagggcagcagaggcagctgcaacgacctgagaaacgtggactggaacaagctgctgagaagagccatcgagggcctggaggagcccaacggcagcagcctgaagaacatcgagaagtacctgagaagccagagcgacctgaccagcaccaccaacaaccccgccttccagcagagactgagactgggcgccaagagagccgtgaacaacggcagactgctgaaggacggcccccagtacagagtgaactacggcagcctggacggcaagggcgccccccagtaccccagcgccttccccagcagcctgccccccgtgagcctgctgccccacgagaaggaccagcccagagccgaccccatccccatctgcagcttctgcctgggcaccaaggagagcaacagagagaagaagcccgaggagctgctgagctgcgccgactgcggcagcagcggccaccccagctgcctgaagttctgccccgagctgaccaccaacgtgaaggccctgagatggcagtgcatcgagtgcaagacctgcagcgcctgcagagtgcagggcagaaacgccgacaacatgctgttctgcgacagctgcgacagaggcttccacatggagtgctgcgacccccccctgagcagaatgcccaagggcatgtggatctgccaggtgtgcagacccaagaagaagggcagaaagctgctgcacgagaaggccgcccagatcaagagaagatacgccaagcccatcggcagacccaagaacaagctgaagcagagactgctgagcgtgaccagcgacgagggcagcatgaacgccttcaccggcagaggcagccccggcagaggccagaagaccaaggtgtgcaccacccccagcagcggccacgccgccagcggcaaggacagcagcagcagactggccgtgaccgaccccaccagacccggcgccaccaccaagatcaccaccaccagcacctacatcagcgccagcaccctgaaggtgaacaagaagaccaagggcctgatcgacggcctgaccaagttcttcacccccagccccgacggcagaagaagcagaggcgagatcatcgacttcagcaagcactacagacccagaaagaaggtgagccagaagcagagctgcaccagccacgtgctggccaccgacaccgagatcaagatcaacatcaagcaggagagcgccgacgtgaacgtgatcggcaacaaggacgtggtgaccgaggaggacctggacgtgttcaagcaggcccaggagctgagctgggagaagatcgagtgcgagagcggcgtggaggactgcggcagataccccagcgtgatcgagttcggcaagtacgagatccagacctggtacagcagcccctacccccaggagtacgccagactgcccaagctgtacctgtgcgagttctgcctgaagtacatgaagagcaagaacatcctgctgagacacagcaagaagtgcggctggttccacccccccgccaacgagatctacagaagaaaggacctgagcgtgttcgaggtggacggcaacatgagcaagatctactgccagaacctgtgcctgctggccaagctgttcctggaccacaagaccctgtactacgacgtggagcccttcctgttctacgtgctgaccaagaacgacgagaagggctgccacctggtgggctacttcagcaaggagaagctgtgccagcagaagtacaacgtgagctgcatcatgatcatgccccagcaccagagacagggcttcggcagattcctgatcgacttcagctacctgctgagcagaagagagggccaggccggcagccccgagaagcccctgagcgacctgggcagactgagctacctggcctactggaagagcgtgatcctggagtacctgtaccaccaccacgagagacacatcagcatcaaggccatcagcagagccaccggcatgtgcccccacgacatcgccaccaccctgcagcacctgcacatgatcgacaagagagacggcagattcgtgatcatcagaagagagaagctgatcctgagccacatggagaagctgaagacctgcagcagagccaacgagctggaccccgacagcctgagatggacccccatcctgatcagcaacgccgccgtgagcgaggaggagagagaggccgagaaggaggccgagagactgatggagcaggccagctgctgggagaaggaggagcaggagatcctgagcaccagagccaacagcagacagagccccgccaaggtgcagagcaagaacaagtacctgcacagccccgagagcagacccgtgaccggcgagagaggccagctgctggagctgagcaaggagagcagcgaggaggaggaggaggaggaggacgaggaggaggaggaggaggaggaggaggaggaggaggacgaggaggaggaggaggaggaggaggaggaggaggaggaggagaacatccagagcagcccccccagactgaccaagccccagagcgtggccatcaagagaaagagacccttcgtgctgaagaagaagagaggcagaaagagaagaagaatcaacagcagcgtgaccaccgagaccatcagcgagaccaccgaggtgctgaacgagcccttcgacaacagcgacgaggagagacccatgccccagctggagcccacctgcgagatcgaggtggaggaggacggcagaaagcccgtgctgagaaaggccttccagcaccagcccggcaagaagagacagaccgaggaggaggagggcaaggacaaccactgcttcaagaacgccgacccctgcagaaacaacatgaacgacgacagcagcaacctgaaggagggcagcaaggacaaccccgagcccctgaagtgcaagcaggtgtggcccaagggcaccaagagaggcctgagcaagtggagacagaacaaggagagaaagaccggcttcaagctgaacctgtacaccccccccgagacccccatggagcccgacgagcaggtgaccgtggaggagcagaaggagaccagcgagggcaagaccagccccagccccatcagaatcgaggaggaggtgaaggagaccggcgaggccctgctgccccaggaggagaacagaagagaggagacctgcgcccccgtgagccccaacaccagccccggcgagaagcccgaggacgacctgatcaagcccgaggaggaggaggaggaggaggaggaggaggaggaggaggaggaggaggaggagggcgaggaggaggagggcggcggcaacgtggagaaggaccccgacggcgccaagagccaggagaaggaggagcccgagatcagcaccgagaaggaggacagcgccagactggacgaccacgaggaggaggaggaggaggacgaggagcccagccacaacgaggaccacgacgccgacgacgaggacgacagccacatggagagcgccgaggtggagaaggaggagctgcccagagagagcttcaaggaggtgctggagaaccaggagaccttcctggacctgaacgtgcagcccggccacagcaaccccgaggtgctgatggactgcggcgtggacctgaccgccagctgcaacagcgagcccaaggagctggccggcgaccccgaggccgtgcccgagagcgacgaggagcccccccccggcgagcaggcccagaagcaggaccagaagaacagcaaggaggtggacaccgagttcaaggagggcaaccccgccaccatggagatcgacagcgagaccgtgcaggccgtgcagagcctgacccaggagagcagcgagcaggacgacaccttccaggactgcgccgagacccaggaggcctgcagaagcctgcagaactacaccagagccgaccagagcccccagatcgccaccaccctggacgactgccagcagagcgaccacagcagccccgtgagcagcgtgcacagccaccccggccagagcgtgagaagcgtgaacagccccagcgtgcccgccctggagaacagctacgcccagatcagccccgaccagagcgccatcagcgtgcccagcctgcagaacatggagaccagccccatgatggacgtgcccagcgtgagcgaccacagccagcaggtggtggacagcggcttcagcgacctgggcagcatcgagagcaccaccgagaactacgagaaccccagcagctacgacagcaccatgggcggcagcatctgcggcaacggcagcagccagaacagctgcagctacagcaacctgaccagcagcagcctgacccagagcagctgcgccgtgacccagcagatgagcaacatcagcggcagctgcagcatgctgcagcagaccagcatcagcagcccccccacctgcagcgtgaagagcccccagggctgcgtggtggagagaccccccagcagcagccagcagctggcccagtgcagcatggccgccaacttcaccccccccatgcagctggccgagatccccgagaccagcaacgccaacatcggcctgtacgagagaatgggccagagcgacttcggcgccggccactacccccagcccagcgccaccttcagcctggccaagctgcagcagctgaccaacaccctgatcgaccacagcctgccctacagccacagcgccgccgtgaccagctacgccaacagcgccagcctgagcacccccctgagcaacaccggcctggtgcagctgagccagagcccccacagcgtgcccggcggcccccaggcccaggccaccatgacccccccccccaacctgacccccccccccatgaacctgcccccccccctgctgcagagaaacatggccgccagcaacatcggcatcagccacagccagagactgcagacccagatcgccagcaagggccacatcagcatgagaaccaagagcgccagcctgagccccgccgccgccacccaccagagccagatctacggcagaagccagaccgtggccatgcagggccccgccagaaccctgaccatgcagagaggcatgaacatgagcgtgaacctgatgcccgcccccgcctacaacgtgaacagcgtgaacatgaacatgaacaccctgaacgccatgaacggctacagcatgagccagcccatgatgaacagcggctaccacagcaaccacggctacatgaaccagaccccccagtaccccatgcagatgcagatgggcatgatgggcacccagccctacgcccagcagcccatgcagacccccccccacggcaacatgatgtacaccgcccccggccaccacggctacatgaacaccggcatgagcaagcagagcctgaacggcagctacatgagaagatag

SEQ ID NO: 90671 - protein, 1781 aa, Artificial Sequence
  derived and/or modified sequence
MVKLANPLYTEWILEAIQKIKKQKQRPSEERICHAVSTSHGLDKKTVSEQLELSVQDGSVLKVTNKGLASYKDPDNPGRFSSVKPGTFPKSAKGSRGSCNDLRNVDWNKLLRRAIEGLEEPNGSSLKNIEKYLRSQSDLTSTTNNPAFQQRLRLGAKRAVNNGRLLKDGPQYRVNYGSLDGKGAPQYPSAFPSSLPPVSLLPHEKDQPRADPIPICSFCLGTKESNREKKPEELLSCADCGSSGHPSCLKFCPELTTNVKALRWQCIECKTCSACRVQGRNADNMLFCDSCDRGFHMECCDPPLSRMPKGMWICQVCRPKKKGRKLLHEKAAQIKRRYAKPIGRPKNKLKQRLLSVTSDEGSMNAFTGRGSPDTEIKINIKQESADVNVIGNKDVVTEEDLDVFKQAQELSWEKIECESGVEDCGRYPSVIEFGKYEIQTWYSSPYPQEYARLPKLYLCEFCLKYMKSKNILLRHSKKCGWFHPPANEIYRRKDLSVFEVDGNMSKIYCQNLCLLAKLFLDHKTLYYDVEPFLFYVLTKNDEKGCHLVGYFSKEKLCQQKYNVSCIMIMPQHQRQGFGRFLIDFSYLLSRREGQAGSPEKPLSDLGRLSYLAYWKSVILEYLYHHHERHISIKAISRATGMCPHDIATTLQHLHMIDKRDGRFVIIRREKLILSHMEKLKTCSRANELDPDSLRWTPILISNAAVSEEEREAEKEAERLMEQASCWEKEEQEILSTRANSRQSPAKVQSKNKYLHSPESRPVTGERGQLLELSKESSEEEEEEEDEEEEEEEEEEEEDEEEEEEEEEEEEEENIQSSPPRLTKPQSVAIKRKRPFVLKKKRGRKRRRINSSVTTETISETTEVLNEPFDNSDEERPMPQLEPTCEIEVEEDGRKPVLRKAFQHQPGKKRQTEEEEGKDNHCFKNADPCRNNMNDDSSNLKEGSKDNPEPLKCKQVWPKGTKRGLSKWRQNKERKTGFKLNLYTPPETPMEPDEQVTVEEQKETSEGKTSPSPIRIEEEVKETGEALLPQEENRREETCAPVSPNTSPGEKPEDDLIKPEEEEEEEEEEEEEEEEEEGEEEEGGGNVEKDPDGAKSQEKEEPEISTEKEDSARLDDHEEEEEEDEEPSHNEDHDADDEDDSHMESAEVEKEELPRESFKEVLENQETFLDLNVQPGHSNPEVLMDCGVDLTASCNSEPKELAGDPEAVPESDEEPPPGEQAQKQDQKNSKEVDTEFKEGNPATMEIDSETVQAVQSLTQESSEQDDTFQDCAETQEACRSLQNYTRADQSPQIATTLDDCQQSDHSSPVSSVHSHPGQSVRSVNSPSVPALENSYAQISPDQSAISVPSLQNMETSPMMDVPSVSDHSQQVVDSGFSDLGSIESTTENYENPSSYDSTMGGSICGNGSSQNSCSYSNLTSSSLTQSSCAVTQQMSNISGSCSMLQQTSISSPPTCSVKSPQGCVVERPPSSSQQLAQCSMAANFTPPMQLAEIPETSNANIGLYERMGQSDFGAGHYPQPSATFSLAKLQQLTNTLIDHSLPYSHSAAVTSYANSASLSTPLSNTGLVQLSQSPHSVPGGPQAQATMTPPPNLTPPPMNLPPPLLQRNMAASNIGISHSQRLQTQIASKGHISMRTKSASLSPAAATHQSQIYGRSQTVAMQGPARTLTMQRGMNMSVNLMPAPAYNVNSVNMNMNTLNAMNGYSMSQPMMNSGYHSNHGYMNQTPQYPMQMQMGMMGTQPYAQQPMQTPPHGNMMYTAPGHHGYMNTGMSKQSLNGSYMRR

SEQ ID NO: 90672 - DNA, 5346 bp, Artificial Sequence
  derived and/or modified sequence
atggtgaaactcgcgaaccccttgtacaccgagtggatccttgaagcaattcagaaaattaagaaacagaagcagcgacctagcgaggaaaggatctgtcacgcggtgtccaccagccatggcttggataagaaaaccgtttcagaacaactagaactgagcgtgcaggatggatcagttctcaaggtgactaacaaaggattagctagttacaaagatccagacaaccccggtagattcagttcagtgaagcccggaacattccccaaatctgccaaggggagccgggggagctgtaacgatttgaggaatgtagactggaacaagctgttaaggagagctattgagggactggaagagcccaatggaagctccctcaagaacatcgagaaatacctgcgaagtcagagcgacttaactagtacaactaataatcccgctttccagcagcgtttaagactcggagccaaaagggctgtgaacaacggccgtcttctcaaagacggaccgcagtatagagttaactatggatccctcgacggcaagggagccccccagtacccctccgcctttccttcgtctttacctcccgtcagcctactgccacacgagaaggaccagccccgagcggatcccattcctatttgctccttttgcctagggacgaaggagtcaaatcgggagaagaagccagaagagctgttaagctgtgccgactgcggcagttcggggcacccctcgtgtttaaagttttgccctgaactgaccacgaacgttaaagcattaaggtggcagtgtatagagtgtaaaacctgttctgcgtgtcgagttcaaggtagaaacgccgacaacatgcttttctgcgatagctgcgaccggggcttccacatggagtgctgcgacccacctctttctaggatgccaaaaggcatgtggatctgtcaggtgtgccgacctaaaaagaagggcagaaaactgctgcacgagaaggctgcgcagattaaacggcgttatgccaaacccatcgggcggccaaagaacaagctcaaacagcggttactctccgtgacctctgatgaggggtctatgaacgcctttacaggtaggggtagccccgacacagaaatcaagatcaacataaagcaggagtcagcagatgtcaacgtgatcggaaataaagacgtagttacggaagaagacctagacgtgttcaagcaggcacaagagctcagctgggagaaaattgagtgtgagtccggggtcgaagactgcgggcgatacccctccgtgattgagtttggcaagtacgaaattcaaacatggtattccagtccgtatcctcaagaatacgccagactgcctaagctgtatctctgtgagttttgtcttaagtacatgaagtctaaaaacatactgctccgacactctaaaaagtgcggatggtttcaccctcccgccaatgagatctaccggaggaaagacctgtcagtatttgaggtcgatggcaatatgtccaaaatctattgccagaatctgtgtcttctcgctaaactttttcttgaccacaagacactgtattatgacgtggagccgttcctattctatgttctcaccaagaatgacgagaaggggtgccacctcgtaggctacttcagcaaggaaaaactatgtcaacagaaatacaacgtgtcttgcatcatgatcatgccccagcaccagagacaaggcttcggtaggtttctgattgatttttcgtacctcttgagtcgcagggaggggcaggccggatctccagagaaaccactctcagacttaggcaggttatcctacctggcatactggaaatcagtcatcctcgagtacctctatcaccatcatgagcgacacatctccatcaaggctatctcccgcgccactggtatgtgtcctcacgacatagcgactacgctccagcacctgcacatgatcgataagagagatgggcgttttgttataatcagaagggaaaagctgattctttctcacatggaaaagctgaagacctgctcgagagctaatgagctggaccccgatagcctgcgctggacccccatcctgatatccaacgcagccgtctcagaggaggaaagggaggctgagaaggaggctgaacgcttgatggaacaggccagctgctgggagaaggaagaacaagaaatcttgagcacacgggccaattcgaggcaatcacccgcaaaagttcagtctaagaataaatacctccactcgcccgaaagccgaccagtcaccggagaacgcggccagctgttagagctgtcgaaggagtcctcggaggaggaggaggaggaagaggatgaagaggaggaggaggaggaggaggaggaagaggaggacgaggaggaggaggaggaagaagaagaggaggaagaggaggaaaacatacagtcatccccaccaagactcactaaacctcaatcagtggccatcaaacggaagcggccatttgtgttgaaaaaaaagaggggccgcaaaaggcgtaggatcaatagctctgtaactactgagacaatctcggagactaccgaggtgctgaacgaacccttcgataacagtgatgaagaacggccgatgccacagctagagccaacttgcgaaatagaggtggaggaagatggccgcaagccagtgctccggaaagcattccaacaccaacccggcaaaaagcggcagacagaggaagaagaagggaaggataatcactgcttcaagaacgctgatccgtgtcgcaataatatgaatgatgacagttccaatctaaaagagggtagtaaggataatcccgagcctctcaaatgtaaacaggtttggcccaagggtacgaaacggggcctgtctaaatggaggcaaaacaaggaacgcaaaacagggtttaaactgaacttgtacacgccacctgaaacacctatggagcctgacgaacaagtgaccgtggaagagcaaaaggagacatcagagggaaaaaccagtccttcccccattaggatcgaagaggaagttaaggagactggagaagccctgttgccccaagaggaaaatcgcagggaagagacttgtgctccagtgagtccaaatacatcccccggagagaaaccagaagatgaccttatcaagcccgaagaagaggaagaggaggaagaggaagaggaggaggaggaagaagaggaagagggcgaggaggaggaggggggcggcaatgtcgaaaaggatcccgacggcgcaaaaagccaagagaaggaagaacctgaaatttccacggaaaaggaagattctgctcgcctcgacgatcatgaggaggaggaggaagaagacgaggagccctctcacaacgaagaccatgacgcagacgatgaagacgactcacatatggaaagcgccgaagtcgaaaaggaagagcttccgagagaaagctttaaggaggtgttggagaaccaggagactttcctcgatctcaatgtgcagcctggacattcaaacccagaagtgttaatggactgtggggtggaccttactgcaagctgcaacagtgaaccaaaggagcttgccggtgatcccgaggcagtcccagagagcgacgaggaaccacccccgggggaacaagcccagaagcaggaccagaaaaactccaaagaagtggacaccgagtttaaagaggggaatccggcaacgatggaaatcgatagcgaaaccgtccaggccgtgcaatcgctgacccaggagtcatccgaacaggacgacacattccaggactgcgcagaaactcaggaggcctgtagatctcttcagaattacactcgagcagatcagagtccacagattgctaccacactcgatgattgccagcagagtgatcactcttctccggtgtcatccgtacattcccacccaggccagtccgttcgcagcgtgaatagtcccagcgtgccggctctcgaaaacagctacgcccagatctctcctgaccaaagcgctattagcgttcctagcctgcagaatatggaaacatcccccatgatggatgttcctagtgtgtctgatcattcccagcaggtcgtggatagtgggttctccgatctcggatccattgaatccaccactgagaactatgagaaccccagctcctatgatagcaccatgggtggttccatctgcgggaacgggagcagtcagaactcttgttcgtacagtaacctgactagctcctcccttacacagtcttcctgcgcggtcacccagcagatgtctaacataagcggttcttgctccatgttgcagcagacaagtatctcatctcctccaacatgttcagtgaagtctccacaaggttgcgtagtggagcgtccacccagctctagccagcagctggcgcaatgctctatggctgccaactttacgcctcccatgcagctggctgagatccccgaaacttctaatgctaatatcgggctgtacgagaggatgggccaatccgattttggcgcgggtcattacccacagccctcggcaacgttttcactcgctaaactgcaacagttgaccaacacactaatagatcattccctcccatattcccacagcgccgccgtcacctcctacgcaaattcggccagcttgtccactccattgagtaacaccggcctcgtccagctgtctcagtctccacactccgtacccggtggaccacaggcccaagcaactatgacacctcctcccaatctcacaccacctcccatgaacttacccccccctctgctgcaaaggaacatggccgcctctaatatcggcatatcacacagccagagactgcaaactcagattgcttcgaaaggacatatatctatgaggacaaagtccgcctcgctgtctcctgcagccgctacacatcaatctcaaatctacgggagatcccagacagtggctatgcaaggtcccgcccgtactctcaccatgcaaagaggcatgaatatgtccgtgaatcttatgccggcaccggcatacaacgtcaactccgtgaatatgaatatgaatacacttaacgctatgaacgggtacagcatgtctcagccgatgatgaattctggctaccatagcaaccacgggtatatgaaccaaacacctcaataccccatgcagatgcagatgggcatgatgggcacccagccttatgcccagcagccaatgcagacaccaccccatggaaatatgatgtataccgccccaggccaccacggatatatgaacaccggcatgagtaagcagtcactgaacggttcatacatgcgacggtag

SEQ ID NO: 90673 - DNA, 5346 bp, Artificial Sequence
  derived and/or modified sequence
atggttaaactggctaacccactatataccgagtggattctggaagcaatccagaagattaaaaagcagaagcagaggccctccgaagagcgtatctgccatgccgtgagtacctctcacggcctcgataagaagacagtgagtgaacaattggagctgagcgtccaggacggaagcgtacttaaagtgactaacaagggcctcgctagctataaagaccccgacaacccgggtagattctctagtgtgaagccgggcacgttccccaaatccgccaaagggagccgcggaagttgcaacgatctgagaaatgtggattggaacaaattgctgaggcgggcgatcgaaggactagaggaacctaatgggtctagtctgaagaatattgagaaatatctgcggagtcagagcgacctcaccagcacaacgaacaaccctgcgttccagcaacggttgcgtttgggggctaaacgggctgtaaataatggcagattgctgaaagacggtccacagtaccgcgtgaattacggctcattagatggaaagggggcacctcaatatccgtccgccttcccttccagtctgccacctgtttccctgctcccccacgaaaaggatcagccacgggcggaccccattcctatttgttcattttgcctgggaaccaaagagtctaatagagagaagaaacccgaggagctgctctcatgcgccgattgtggttcaagcgggcatccttcttgtctcaaattttgtcccgagctcacaaccaacgtgaaggcgctgcgttggcagtgcatcgagtgcaagacttgctcagcttgcagagtgcaggggaggaatgcggacaacatgttattctgtgactcctgcgacagaggctttcatatggagtgctgcgatccccctcttagccgcatgcctaagggtatgtggatctgtcaggtgtgtaggcctaaaaaaaaggggcggaagctcctacacgagaaggcagcccaaatcaagcggcggtatgccaagccgattggtagaccgaaaaataagctgaaacagcgactgctgtccgtgacttcagatgaaggcagcatgaatgcttttaccggccgcggtagcccagataccgaaatcaagatcaacataaaacaggaatctgcagatgtgaacgtcataggtaataaagacgttgtgactgaggaagacctggacgtgttcaagcaggctcaggagctatcgtgggaaaagatagagtgtgagagtggcgtcgaggactgcggccgctacccttccgtgatcgaatttggcaagtatgagattcagacttggtattcctcaccctatccacaggagtacgccaggttgcccaaattgtatctctgtgaattctgcctgaagtacatgaagtccaagaacatcctgctgcggcattccaagaagtgtggatggttccatcccccggccaatgagatctaccgtaggaaggatttgtcggtctttgaggtagacggcaatatgtcaaaaatttactgccagaacctgtgcctgctcgctaaactatttctggatcataaaacactttattatgacgtcgaacctttcctgttctacgtgctgaccaaaaatgacgagaaaggctgccacttagtgggctacttcagcaaagaaaaactgtgccagcagaagtataacgtatcctgtatcatgattatgccacagcaccagcgccaggggttcgggcggttcctcatcgacttctcctaccttctctccagacgggagggtcaggcgggatctcccgagaagcccctgtcggatcttggacgcttatcctatctcgcctattggaaaagtgtgattctggaatacctgtaccatcaccatgagagacacatcagtataaaagccataagtagagccactggaatgtgtcctcacgatattgctactacattacagcacttgcatatgatcgacaagcgggacggcaggtttgtcattattaggagggagaaactaattctgagtcatatggaaaaattgaagacctgcagtcgtgctaatgagctggaccctgattcactccggtggacaccaattcttatctcaaacgccgccgtcagcgaagaggaacgcgaggctgaaaaagaagcagaacgccttatggaacaggcgtcatgttgggagaaagaagaacaggagattttaagtacacgtgcgaactcaagacaatctccagcaaaggtgcaaagtaagaacaagtacctccattccccggagtcccgcccagtcacaggagagaggggacagctcctggaactgtccaaggaaagttctgaagaggaagaggaggaggaggacgaggaggaggaagaggaggaggaggaagaagaagaggacgaggaagaggaggaggaagaggaggaagaggaggaggaggagaacattcagtcatctccgcctagacttactaagccccagagtgtcgcgattaagaggaagcgacctttcgtcttgaagaaaaagagaggacgcaaacggagaaggattaattcatctgttactactgagaccatctcagaaaccactgaggtgcttaacgaaccatttgataatagcgatgaggaaagaccaatgccccaattagagccgacttgtgagatcgaagtggaagaggatggaaggaagccggtgcttcgtaaggcctttcaacaccagcccgggaaaaaaaggcagacggaggaggaagaaggtaaagacaaccattgtttcaagaatgctgatccatgtcgcaacaacatgaacgacgactccagtaaccttaaagaaggttcaaaggataatccagagcctctgaagtgtaaacaagtttggcctaaagggacaaagcggggcctttccaagtggcgccagaacaaggagcgcaagaccggctttaaattgaatctctacacaccgccagagacacctatggaacccgatgaacaggttaccgtcgaagaacagaaggagaccagtgagggcaagacttcacctagtcctattagaattgaggaggaggtgaaagaaacgggggaggcgctattgcctcaagaggagaaccgccgtgaagaaacctgtgcaccagtttcgcctaacacctccccaggcgagaaacccgaggatgacctcatcaaacctgaggaagaagaggaggaggaagaggaggaggaagaggaggaagaggaggaagaaggtgaagaagaggaaggcggaggtaacgtggaaaaagaccctgacggtgccaaatcgcaggagaaggaggagccagagatctccacagaaaaagaggactcagctcggctggacgaccatgaggaagaggaagaggaggacgaagaaccctcccacaacgaggatcacgatgcagacgacgaggatgacagccatatggagtcagccgaggttgaaaaggaagagttaccgcgcgagtctttcaaggaggtactggaaaaccaagagaccttcctagacctgaacgtgcaacccggtcactccaacccagaggtgctgatggactgcggggtcgatctgacagcctcctgcaactccgagcccaaggagctggccggagatcccgaagccgtgcccgaatcagatgaggagccccccccaggagagcaggctcaaaagcaagatcagaagaacagtaaggaggtggacactgaattcaaggaaggaaatcctgcgacaatggagatcgacagcgaaacagtgcaggccgtgcaatctctcactcaggagagtagcgagcaggacgatacattccaagattgtgcggagacccaggaagcctgcaggtccctccaaaactatacccgtgccgaccaaagtccgcaaatcgccactaccctcgacgattgccagcagagtgatcactcttccccagtgtcctcagtccatagtcatcccggacagtctgttaggagcgttaactctccctcagtgcccgctctggaaaatagctatgcacagatttcaccagaccaaagcgcaatatcagtgccgtccctgcagaatatggagacgtctcccatgatggacgtgccctccgtctcagatcattctcagcaggttgtcgactctggcttctcagatctcggatctattgaatcaacaaccgaaaattacgaaaacccttcctcgtatgactcaactatgggaggttcaatctgtggaaacgggagctctcaaaactcatgcagttattccaatctaacatcatcatcgttgactcagtcatcttgcgctgttacccagcaaatgtcgaatatcagcggctcctgcagcatgttgcagcagacctcaatatcttcccctcccacatgttccgttaagagcccgcagggttgtgtagtggaaagacctcccagctcttcgcagcagctcgcccaatgtagcatggccgcaaattttaccccccccatgcaactggccgagatccccgagacatctaacgcaaacatcggcctgtatgagcgcatgggccagtccgacttcggggctggtcactatccgcagcctagcgcaacattttctctcgctaaattgcagcagcttacaaacaccttgattgaccactccctgccttactcgcattccgccgcagttacttcatacgctaatagcgcctctcttagtactcccttgagtaatacaggcttagttcagctgagccagtcaccacactccgtgccaggtggaccccaggcacaggcgaccatgacaccgccacctaacttgactcctccacccatgaacttaccaccaccattgctacaaaggaacatggccgcttctaacatcggaatctcccattcacagagattgcagacacagatcgccagcaagggccacataagcatgcgcacaaaatctgcatcattatcccccgccgctgccacccaccaaagccaaatttacgggcggtcccagacagttgctatgcaaggaccagctagaaccttgaccatgcaacgcgggatgaatatgagcgtaaacttgatgccagcaccggcctataacgtaaacagtgtgaatatgaatatgaatacgctcaacgctatgaacgggtacagcatgagccagcctatgatgaactccggttatcacagcaatcacggctacatgaaccaaactccgcagtaccctatgcagatgcagatggggatgatggggacccaaccatacgcacaacaaccaatgcagacaccaccccacgggaacatgatgtacactgcacccggacaccacggctacatgaacactggcatgagtaagcagtcactcaacggctcatacatgaggaggtag

SEQ ID NO: 90674 - DNA, 5346 bp, Artificial Sequence
  derived and/or modified sequence
atggtcaaactcgctaatcctctatacactgagtggatacttgaagccattcagaaaatcaaaaaacaaaaacaacggccttccgaggaacgcatttgccatgcagtttccaccagccacggcctggataagaaaacagtgagcgagcagctcgagctgtcggtccaagacgggagcgtgctgaaagtgaccaataaggggttggcgagctacaaggatcccgacaaccccggtagatttagcagcgtgaagccggggacatttcctaaaagcgcgaagggaagccgtggttcttgcaacgatctccggaacgtagactggaacaaactcctgcgccgagcaattgagggacttgaagagcccaatggatcctctttaaagaatattgagaagtatttgagaagtcaaagcgatctgactagcactacaaacaacccagcgtttcagcagaggctgcggctcggcgctaagcgagccgttaataatggtcggttgctaaaggatggaccgcaataccgcgtgaattatggctctctagacggaaaaggcgccccacagtaccccagtgcctttccttcctccttgcctcctgtgtccctattaccacacgaaaaagaccagcccagggcggaccccatcccaatttgttccttttgcttggggactaaggagtctaaccgtgagaaaaagccagaagaactgctatcatgcgccgactgcggatcctctggacacccttcatgtcttaagttttgcccagaacttaccacgaacgtgaaggcactcagatggcagtgtatcgagtgcaaaacctgctctgcctgtcgagtgcaggggcgaaatgccgacaatatgctcttctgcgacagttgtgatagaggattccatatggagtgttgtgacccaccccttagtcgcatgccaaaaggaatgtggatctgtcaggtgtgcagacccaagaagaagggcaggaaactgctacatgagaaagctgcccaaataaagagaagatacgccaagccaattggcaggcccaagaacaagctgaagcagcgcttgttgtcagtaaccagcgacgaaggcagcatgaacgcatttactggacgaggcagtccagacactgaaattaagatcaacatcaagcaggaaagcgccgacgtgaatgtgatagggaacaaagatgtagttaccgaggaggacctggacgtttttaaacaagcccaggaattgtcttgggaaaaaattgaatgtgagtccggggtcgaggattgtggacgatacccatctgttatagagtttggtaaatatgaaattcaaacttggtactcgtctccttacccacaagaatacgcccggctgcccaagctgtatctttgtgaattttgcctgaaatacatgaaatccaagaacattttattaaggcactcgaaaaaatgcggctggttccatccccctgcaaatgaaatatacaggcgaaaggacctgtctgtcttcgaagttgatggtaacatgtctaaaatatattgtcaaaacctgtgcctgttagccaaactcttcctggaccataagaccctatattacgatgtcgagcccttcctgttttacgtgctgacaaagaacgacgagaaagggtgtcatctggtaggctatttctcaaaggaaaagttgtgccagcagaaatacaatgtatcctgtatcatgataatgccccagcaccagagacaggggttcggacgattcctcatcgacttttcttacctcttgtcccgccgggagggtcaggccggaagtcccgaaaagcccctgtctgacttaggccggttatcatatctagcctactggaaatctgtgattctagagtacttataccatcatcacgagcgccacatctccatcaaggcgattagcagggccactgggatgtgccctcacgatatagctacgacactgcagcatctgcatatgatcgacaagcgtgatggaaggttcgtgatcattcggcgcgaaaagctgattctcagccatatggaaaagctgaaaacgtgttcacgcgcaaacgagctggatccagacagtctgcggtggacacccattctcatttcaaacgcagcggtaagtgaggaagaaagagaagctgaaaaagaggctgagcggttgatggagcaggcatcttgctgggagaaagaggaacaggaaatactgtccacccgcgccaattctcggcagagcccggcaaaggttcagagtaaaaacaaatacctccactccccagagagtaggccggtcacgggcgagcggggacagctgctcgagctgtccaaagagagtagtgaggaagaagaagaggaagaggacgaagaggaagaagaagaggaggaagaagaagaggaggacgaagaagaggaggaggaggaggaggaagaagaagaggaggagaacatccagagctctcctccccggcttacgaaacctcaatctgtggccatcaaaagaaaaaggccttttgttctcaaaaagaagaggggcaggaaaaggagacgcataaactcctctgtgacgaccgagaccatctcagagaccactgaagttttgaatgagccattcgacaactcagacgaagagagacctatgccacagcttgagccgacctgcgaaatagaagtcgaggaggatggacgcaaaccggtgctgagaaaggcgttccaacatcagccaggcaaaaaacggcaaacggaagaagaggagggaaaggacaaccattgtttcaagaatgcagacccctgccggaataatatgaacgacgatagctcaaatctcaaagagggaagcaaagacaacccagaaccactgaaatgtaagcaggtgtggcctaagggcaccaagcgtggcttgtctaaatggagacagaataaagagcggaagacaggatttaagcttaatctctacaccccacccgagacccccatggaaccggacgaacaggtgactgtggaggagcagaaagagacttctgaaggaaagacttccccgtcccctatccgaatcgaggaagaggtcaaagagacaggagaggcacttctccctcaagaggagaatcgacgggaggaaacctgcgccccggtttctccaaatactagtcccggggagaagcccgaagatgatctgattaagcccgaagaggaggaagaggaggaggaggaagaggaggaggaggaggaggaggaggaaggtgaagaagaggagggaggaggcaatgtggagaaggatcccgacggagcgaagtcccaggagaaagaagagcccgagatctctacagaaaaggaagacagcgcgagactcgacgaccacgaggaggaagaggaggaggacgaggaacccagtcacaatgaggatcatgatgcagacgacgaggatgattctcatatggagtccgctgaagtcgaaaaggaagaactgccacgggaatctttcaaggaagtgctcgaaaatcaagagacgttcttggatctgaacgtacagccagggcactcaaaccccgaagtactgatggattgtggggtcgacttgaccgcctcttgcaactccgagcctaaggaactggcaggcgatccagaagcagtccccgagtctgacgaagaaccccctcccggggagcaggcccagaagcaggatcagaaaaattccaaagaggtggacacagaatttaaggaaggaaatcctgctaccatggaaattgacagcgagaccgtccaagctgtccagagtctcactcaggagtcgtcagaacaggacgacacattccaggactgtgcggagactcaggaggcctgtagatctttgcaaaactatacccgggccgatcagagtccccagatcgcaaccacactggacgactgccagcagtccgatcactcgagcccagtgtccagtgtccattctcaccccggacaaagtgtcagaagcgtgaactccccctctgtgcctgccctcgagaatagttacgcccagatctctccggaccagtcagctatctccgtgccttctctgcagaatatggagacatctccgatgatggatgtcccctccgtgtcagatcactcccagcaagtagtggacagtggcttctcagacctgggatctatcgagagcacaaccgaaaactatgagaatcccagtagttacgatagtaccatgggcggcagcatttgcggtaacgggtcaagtcagaatagctgttcgtacagcaacctcacttcatcatccctgacccagagcagttgtgcagtgacacagcagatgagcaatatcagtggctcatgctctatgttacagcaaactagcataagtagccccccaacgtgttctgttaagagtccacagggttgcgtagtggaacgccctcctagttctagtcagcaattggcccagtgctctatggccgcgaacttcaccccccctatgcagcttgccgaaattcccgagacctcaaacgcaaacatcgggctctatgagaggatgggacaatcagactttggagctggacactacccacagcccagtgccaccttttcactggccaagctgcagcagctgacaaatacgctcattgaccatagcctgccctatagccatagtgcagcagtgacttcttatgctaactcagcatccctgagcacacccctaagcaacaccggattagtgcagctcagtcagtctccacactcagttcctgggggtcctcaggcacaggcaactatgaccccgcctccaaatctgaccccgccccccatgaatcttccccctccgctgttgcaacgaaatatggctgcctcaaatattgggatctcccacagccagcggctccaaacacaaatcgctagtaagggccacatcagtatgagaacaaagtctgcctcactcagtccggcagcagctacacaccagtcgcagatttacggtcgatcgcagactgtggcaatgcaaggaccagccaggacacttacgatgcagcgcggaatgaacatgtccgtgaatttgatgcccgccccagcgtacaacgtcaactcagtgaacatgaatatgaacactctgaatgccatgaatggatatagcatgtctcagccaatgatgaatagtggctaccattccaaccacggctacatgaaccaaacgccacagtaccctatgcagatgcagatggggatgatgggtactcagccatatgctcaacaaccaatgcagactcccccacacggcaatatgatgtatacggcgcccggacaccacggctacatgaacactgggatgtccaagcagagtctcaacgggagctatatgcgccgttag

SEQ ID NO: 90675 - DNA, 5892 bp, Artificial Sequence
  derived and/or modified sequence
acaaaatggcggcggcttagctcctacccctggcggcggcggcagcggtggcggaggcgacggcacctcctccaggcggcagccgcagtttctcaggcagcggcagcgcccccggcaggcgcggtggcggtggcgcgcagccaggtcttgatttcccagttaaagatgttcttcacccgaatgcagtctttcctgttggtaaaataagacaaccatcaacattgcctgtttgtctgcttttgaatctcttaaggatggatgtttgtaagatgttgcttaatacagtctggaatactctgtccatttgttgaattgtaaatgactttcaaatgtgcaagttctgttaaatacaaagagaacctctatgggtaacttttgtgttgaagaagtcatttgtcaaccatggtaaaacttgcaaacccactttatacagagtggattcttgaagctatacagaaaataaaaaagcaaaagcaaaggccctctgaagagagaatctgccatgcggtcagtacttcccatgggttggataagaagacagtctctgaacagctggaactcagtgttcaggatggctcagttctcaaagtcaccaacaaaggccttgcctcctataaggacccagacaaccctgggcgcttttcatcagttaaaccaggcacttttcctaagtcagccaaggggtctagaggatcatgtaatgatctccgcaatgtggattggaataaacttttaaggagagcaattgaaggacttgaggagccgaatggctcctccctgaagaacatagagaagtatctcagaagtcaaagtgatctcacaagcaccaccaacaacccagcctttcagcagcggctgcgactgggggccaaacgcgctgtgaataatgggaggttactgaaagacggaccgcagtacagggtcaattatgggagcttagatggcaaaggggcacctcagtatcccagtgcattcccatcctcgctcccacctgtcagccttctaccccatgagaaagaccagccccgtgctgatcccattccaatatgtagcttctgtttggggactaaagaatcaaatcgtgaaaagaaaccagaagaactcctctcttgtgcagattgtggcagtagtggacacccatcctgtttgaaattttgtcctgaattaacaacaaatgtaaaggccttaaggtggcagtgcatcgaatgcaagacatgcagtgcctgtagagtccaaggcagaaatgctgataatatgcttttttgtgattcctgtgatagaggatttcatatggaatgctgtgacccaccactttccagaatgccaaaagggatgtggatttgccaagtctgcagaccaaagaaaaagggaagaaaactacttcatgagaaagctgcacaaataaaacgacgatatgcaaaacccattggacgaccgaaaaataaattaaagcaacgattgttgtctgtaaccagtgatgaaggatccatgaatgcattcacaggaagggggtcacctgatactgaaataaaaataaacatcaaacaagaaagtgcagatgtaaatgtgattggaaacaaggatgtcgttactgaagaggatttggatgtttttaagcaggcccaggaactttcttgggagaaaatagagtgtgagagtggggtggaagactgtggccggtacccttctgtgattgaatttggtaaatatgaaatccaaacctggtactcctcgccttacccacaggaatatgcaagattaccaaagctttacctgtgtgaattctgtcttaaatatatgaaaagtaaaaatattttgctaagacactccaagaagtgtggatggtttcatcctccagcaaatgaaatttaccgaaggaaagacctttcagtatttgaggttgatgggaatatgagcaaaatttattgccaaaacctttgcttgttagccaagctcttcctggaccacaaaacgttgtattatgatgtcgagccattccttttttatgtccttacaaaaaatgatgaaaagggctgtcatctggttggatacttctctaaggaaaagctttgccagcagaagtataatgtctcctgcataatgatcatgccccagcaccaaaggcaaggatttggacggtttctcattgatttcagctatttgctttctagaagagaaggccaagcagggtctcctgaaaagcctctctccgatctgggccgtctctcctacctggcatattggaagagcgtcatcttggagtatctctaccaccaccatgagaggcacatcagcatcaaggcaattagcagagcgacgggcatgtgcccacatgacattgccaccactctgcagcacctccacatgatcgacaagagagatggcagatttgtcatcattagacgggaaaagttgatattgagccacatggaaaagctgaaaacctgttccagagccaatgaacttgatccagacagtctgaggtggaccccaattttaatttctaatgctgcagtgtctgaagaagagcgagaagctgagaaagaggctgagcggctaatggaacaagctagctgctgggagaaggaggaacaagaaatcctgtcaactagagctaacagtaggcaatcacctgcaaaagtacaatcgaaaaataaatatttgcattccccggagagccggccagtcacaggggagcgagggcagctgctggagctgtctaaagagagcagtgaagaagaagaggaggaggaggacgaggaggaggaagaagaggaggaagaagaggaagaggatgaagaggaggaagaagaggaagaagaagaagaagaagaagaaaatattcaaagctctcccccaagattgacgaaaccacagtcagttgccataaagagaaagaggccttttgtactaaagaagaaaaggggtcgtaaacgcaggaggatcaacagcagtgtaacaacagagaccatttcagagacgacagaagtactgaatgagccctttgacaactcagatgaagagaggccaatgccacagctggagcctacctgtgagattgaagtggaggaagatggcaggaagccagtcctgagaaaagcattccagcatcagcctgggaagaaaagacaaacagaggaagaggaaggaaaagacaatcattgcttcaagaatgctgacccttgtagaaacaatatgaatgatgattcaagtaacttgaaagaaggcagtaaagacaatcccgaacctctaaagtgcaaacaagtgtggccaaaaggaacaaagcgcggtctatctaagtggaggcaaaacaaagagaggaagaccggatttaaactgaatttgtacaccccgccagaaacacccatggagcctgacgagcaggtaacagtggaagaacagaaggagacttcagaaggaaaaaccagccccagtcccatcaggattgaggaggaggtcaaggaaactggggaagccctgttgcctcaagaggaaaacagaagggaagaaacatgtgcccctgtaagtccaaacacatcaccaggtgaaaaaccagaagatgatctcatcaaacctgaggaagaggaagaggaggaggaggaggaagaggaagaagaggaagaagaggaaggggaagaagaagaaggaggaggaaatgtagaaaaagatccagatggtgctaaaagccaagaaaaagaggaaccagaaatctccacggaaaaagaagactctgcacgtttggatgatcacgaagaggaggaggaagaggatgaagagccatcccacaacgaggaccatgatgccgatgacgaggatgacagccacatggagtctgccgaagtggagaaggaagagctgcccagagaaagcttcaaagaagtactggaaaaccaggagacttttttagaccttaatgtgcagcctggtcactcgaacccagaggtcttaatggactgtggcgtcgacctgacagcttcttgtaacagtgagcccaaggagcttgctggggaccctgaagctgtacccgaatctgacgaggagccacccccaggagaacaggcacagaagcaggaccaaaagaacagcaaggaagtcgatacagagttcaaagagggaaacccagcaaccatggaaatcgactctgagactgtccaggccgttcagtctttgacccaggagagcagcgaacaggacgacacctttcaggattgtgccgagactcaagaggcctgtagaagcctacagaactacacccgtgcagaccaaagtccacagattgccaccacgctcgacgattgccaacagtcggaccacagtagcccagtttcatccgtccactcccatcctggccagtccgtacgttctgtcaacagcccaagtgtccctgctctggaaaacagctacgcccaaatcagcccagatcaaagtgccatctcagtgccatctctgcagaacatggaaaccagtcccatgatggatgtcccatcagtttcagatcattcacagcaagtcgtagacagtggatttagtgacctgggcagtatcgagagcacaactgagaactacgaaaacccaagcagctacgattctactatgggaggcagcatctgtggaaacggctcttcacagaacagctgctcctatagcaacctcacctccagcagtctgacacagagcagctgtgctgtcacccagcagatgtccaacatcagcgggagctgcagcatgctgcagcaaaccagcatcagctcccctccgacctgcagcgtcaagtctcctcaaggctgtgtggtggagaggcctccgagcagcagccagcagctggctcagtgcagcatggctgctaacttcaccccacccatgcagctggctgaaatccccgagacgagcaacgccaacattggcttatacgagcgaatgggtcagagtgattttggggctgggcattacccgcagccgtcagccaccttcagccttgccaaactgcagcagttaactaatacacttattgatcattcattgccttacagccattccgctgctgtgacttcctatgcaaacagtgcctctttgtccacaccattaagtaacacagggcttgttcaactttctcagtctccacactccgtccctgggggaccccaagcacaagctaccatgaccccaccccccaacctgactcctcctccaatgaatctgccgccgcctcttttgcaacggaacatggctgcatcaaatattggcatctctcacagccaaagactgcaaacccagattgccagcaagggccacatctccatgagaaccaagtcagcgtctctgtcaccagccgctgccacccatcagtcacaaatctatgggcgctcccagactgtagccatgcagggtcctgcacggactttaacgatgcaaagaggcatgaacatgagtgtgaacctgatgccagcgccagcctacaatgtcaactctgtgaacatgaacatgaacactctcaacgccatgaatgggtacagcatgtcccagccaatgatgaacagtggctaccacagcaatcatggctatatgaatcaaacgccccaataccctatgcagatgcagatgggcatgatgggcacccagccatatgcccagcagccaatgcagaccccaccccacggtaacatgatgtacacggcccccggacatcacggctacatgaacacaggcatgtccaaacagtctctcaatggctcctacatgagaaggtagacaacgtgggcagtccacaaaacctacggggcatcactattggattgatctgcacaaatacctttgaagagtacgatttcaaaaccagcaattggtgtgaatgcaaaaacatttgttggcaccatttatttaaaaaaaaaaaaa

SEQ ID NO: 90676 - DNA, 7106 bp, Artificial Sequence
  derived and/or modified sequence
agtgtcatgtcggattcatgtcaacgacaacaacagggggacacaaaatggcggcggcttagctcctacccctggcggcggcggcagcggtggcggaggcgacggcacctcctccaggcggcagccgcagtttctcaggcagcggcagcgcccccggcaggcgcggtggcggtggcgcgcagccagatttgcctgaagacctggataatctccatttttgtcatggactgttaaaacgtttgaagttccaattctggtcttgatttcccagttaaagatgttcttcacccgaatgcagtctttcctgttggtaaaataagacaaccatcaacattgcctgtttgtctgcttttgaatctcttaaggatggatgtttgtaagatgttgcttaatacagtctggaatactctgtccatttgttgaattgtaaatgactttcaaatgtgcaagttctgttaaatacaaagagaacctctatgggtaacttttgtgttgaagaagtcatttgtcaaccatggtaaaacttgcaaacccactttatacagagtggattcttgaagctatacagaaaataaaaaagcaaaagcaaaggccctctgaagagagaatctgccatgcggtcagtacttcccatgggttggataagaagacagtctctgaacagctggaactcagtgttcaggatggctcagttctcaaagtcaccaacaaaggccttgcctcctataaggacccagacaaccctgggcgcttttcatcagttaaaccaggcacttttcctaagtcagccaaggggtctagaggatcatgtaatgatctccgcaatgtggattggaataaacttttaaggagagcaattgaaggacttgaggagccgaatggctcctccctgaagaacatagagaagtatctcagaagtcaaagtgatctcacaagcaccaccaacaacccagcctttcagcagcggctgcgactgggggccaaacgcgctgtgaataatgggaggttactgaaagacggaccgcagtacagggtcaattatgggagcttagatggcaaaggggcacctcagtatcccagtgcattcccatcctcgctcccacctgtcagccttctaccccatgagaaagaccagccccgtgctgatcccattccaatatgtagcttctgtttggggactaaagaatcaaatcgtgaaaagaaaccagaagaactcctctcttgtgcagattgtggcagtagtggacacccatcctgtttgaaattttgtcctgaattaacaacaaatgtaaaggccttaaggtggcagtgcatcgaatgcaagacatgcagtgcctgtagagtccaaggcagaaatgctgataatatgcttttttgtgattcctgtgatagaggatttcatatggaatgctgtgacccaccactttccagaatgccaaaagggatgtggatttgccaagtctgcagaccaaagaaaaagggaagaaaactacttcatgagaaagctgcacaaataaaacgacgatatgcaaaacccattggacgaccgaaaaataaattaaagcaacgattgttgtctgtaaccagtgatgaaggatccatgaatgcattcacaggaagggggtcacctgatactgaaataaaaataaacatcaaacaagaaagtgcagatgtaaatgtgattggaaacaaggatgtcgttactgaagaggatttggatgtttttaagcaggcccaggaactttcttgggagaaaatagagtgtgagagtggggtggaagactgtggccggtacccttctgtgattgaatttggtaaatatgaaatccaaacctggtactcctcgccttacccacaggaatatgcaagattaccaaagctttacctgtgtgaattctgtcttaaatatatgaaaagtaaaaatattttgctaagacactccaagaagtgtggatggtttcatcctccagcaaatgaaatttaccgaaggaaagacctttcagtatttgaggttgatgggaatatgagcaaaatttattgccaaaacctttgcttgttagccaagctcttcctggaccacaaaacgttgtattatgatgtcgagccattccttttttatgtccttacaaaaaatgatgaaaagggctgtcatctggttggatacttctctaaggaaaagctttgccagcagaagtataatgtctcctgcataatgatcatgccccagcaccaaaggcaaggatttggacggtttctcattgatttcagctatttgctttctagaagagaaggccaagcagggtctcctgaaaagcctctctccgatctgggccgtctctcctacctggcatattggaagagcgtcatcttggagtatctctaccaccaccatgagaggcacatcagcatcaaggcaattagcagagcgacgggcatgtgcccacatgacattgccaccactctgcagcacctccacatgatcgacaagagagatggcagatttgtcatcattagacgggaaaagttgatattgagccacatggaaaagctgaaaacctgttccagagccaatgaacttgatccagacagtctgaggtggaccccaattttaatttctaatgctgcagtgtctgaagaagagcgagaagctgagaaagaggctgagcggctaatggaacaagctagctgctgggagaaggaggaacaagaaatcctgtcaactagagctaacagtaggcaatcacctgcaaaagtacaatcgaaaaataaatatttgcattccccggagagccggccagtcacaggggagcgagggcagctgctggagctgtctaaagagagcagtgaagaagaagaggaggaggaggacgaggaggaggaagaagaggaggaagaagaggaagaggatgaagaggaggaagaagaggaagaagaagaagaagaagaagaaaatattcaaagctctcccccaagattgacgaaaccacagtcagttgccataaagagaaagaggccttttgtactaaagaagaaaaggggtcgtaaacgcaggaggatcaacagcagtgtaacaacagagaccatttcagagacgacagaagtactgaatgagccctttgacaactcagatgaagagaggccaatgccacagctggagcctacctgtgagattgaagtggaggaagatggcaggaagccagtcctgagaaaagcattccagcatcagcctgggaagaaaagacaaacagaggaagaggaaggaaaagacaatcattgcttcaagaatgctgacccttgtagaaacaatatgaatgatgattcaagtaacttgaaagaaggcagtaaagacaatcccgaacctctaaagtgcaaacaagtgtggccaaaaggaacaaagcgcggtctatctaagtggaggcaaaacaaagagaggaagaccggatttaaactgaatttgtacaccccgccagaaacacccatggagcctgacgagcaggtaacagtggaagaacagaaggagacttcagaaggaaaaaccagccccagtcccatcaggattgaggaggaggtcaaggaaactggggaagccctgttgcctcaagaggaaaacagaagggaagaaacatgtgcccctgtaagtccaaacacatcaccaggtgaaaaaccagaagatgatctcatcaaacctgaggaagaggaagaggaggaggaggaggaagaggaagaagaggaagaagaggaaggggaagaagaagaaggaggaggaaatgtagaaaaagatccagatggtgctaaaagccaagaaaaagaggaaccagaaatctccacggaaaaagaagactctgcacgtttggatgatcacgaagaggaggaggaagaggatgaagagccatcccacaacgaggaccatgatgccgatgacgaggatgacagccacatggagtctgccgaagtggagaaggaagagctgcccagagaaagcttcaaagaagtactggaaaaccaggagacttttttagaccttaatgtgcagcctggtcactcgaacccagaggtcttaatggactgtggcgtcgacctgacagcttcttgtaacagtgagcccaaggagcttgctggggaccctgaagctgtacccgaatctgacgaggagccacccccaggagaacaggcacagaagcaggaccaaaagaacagcaaggaagtcgatacagagttcaaagagggaaacccagcaaccatggaaatcgactctgagactgtccaggccgttcagtctttgacccaggagagcagcgaacaggacgacacctttcaggattgtgccgagactcaagaggcctgtagaagcctacagaactacacccgtgcagaccaaagtccacagattgccaccacgctcgacgattgccaacagtcggaccacagtagcccagtttcatccgtccactcccatcctggccagtccgtacgttctgtcaacagcccaagtgtccctgctctggaaaacagctacgcccaaatcagcccagatcaaagtgccatctcagtgccatctctgcagaacatggaaaccagtcccatgatggatgtcccatcagtttcagatcattcacagcaagtcgtagacagtggatttagtgacctgggcagtatcgagagcacaactgagaactacgaaaacccaagcagctacgattctactatgggaggcagcatctgtggaaacggctcttcacagaacagctgctcctatagcaacctcacctccagcagtctgacacagagcagctgtgctgtcacccagcagatgtccaacatcagcgggagctgcagcatgctgcagcaaaccagcatcagctcccctccgacctgcagcgtcaagtctcctcaaggctgtgtggtggagaggcctccgagcagcagccagcagctggctcagtgcagcatggctgctaacttcaccccacccatgcagctggctgaaatccccgagacgagcaacgccaacattggcttatacgagcgaatgggtcagagtgattttggggctgggcattacccgcagccgtcagccaccttcagccttgccaaactgcagcagttaactaatacacttattgatcattcattgccttacagccattccgctgctgtgacttcctatgcaaacagtgcctctttgtccacaccattaagtaacacagggcttgttcaactttctcagtctccacactccgtccctgggggaccccaagcacaagctaccatgaccccaccccccaacctgactcctcctccaatgaatctgccgccgcctcttttgcaacggaacatggctgcatcaaatattggcatctctcacagccaaagactgcaaacccagattgccagcaagggccacatctccatgagaaccaagtcagcgtctctgtcaccagccgctgccacccatcagtcacaaatctatgggcgctcccagactgtagccatgcagggtcctgcacggactttaacgatgcaaagaggcatgaacatgagtgtgaacctgatgccagcgccagcctacaatgtcaactctgtgaacatgaacatgaacactctcaacgccatgaatgggtacagcatgtcccagccaatgatgaacagtggctaccacagcaatcatggctatatgaatcaaacgccccaataccctatgcagatgcagatgggcatgatgggcacccagccatatgcccagcagccaatgcagaccccaccccacggtaacatgatgtacacggcccccggacatcacggctacatgaacacaggcatgtccaaacagtctctcaatggctcctacatgagaaggtagacaacgtgggcagtccacaaaacctacggggcatcactattggattgatctgcacaaatacctttgaagagtacgatttcaaaaccagcaattggtgtgaatgcaaaaacatttgttggcaccatttatttaaaaaaaaaaaaagctgtatgcagcagaaagccttatacaagttgtttttctttttttcctttttcttttttttggtaccttcatttctgttacttttatataaaattctctgcaaaggaaggcctctctttggactacaatttggaggcagccacttgttgtgcctgcttctgttaaacaatgtggatatcaagcccccccaaattatctgttttaatattgaacctagagctttttttttcccttccctgtccactccatgtaaatgcctttagcatttcagttattgtatattttgtttaaggtgacacttcagcatgccgctaatgtctttgttagtgacagtgcattttgtagtactgtacaagtgttgtgctaacagtaagccatttcttaagttttttgccttgattagggtgccctaatttgagggttttaaaaaaaactatatttttgttaattataaaactgtaaagagctataaaagctattcccatttggttagtcaaaagggttttattgctaaatgtttggtgtaaagttgagacccttttccattttggtgacagatttctttggggaaaaaaggcagctttctgttttataaatgcagacttctgtttattgaatgaagcatatctcagtgtttatctgtcaggttttgaaacatttcatatatgtccaaatacttggcaggatttaaaaaaaaatagtgaatttggtgtaaagttgctattttatggaaatgcctctaactttacattttcattccatctgtagatttttctatctttataaaatattggagttattttttaaggaaaaatagaaaagtagcttgtgaatagctcaaactaagcttacaaatcgcatgtaaaaaagcaaaaaagttatttgtgtctgtttatattgcttccttttttgtagcctttgtacctgtacagggtgacagtaagggccaagcaggagaggcgtaatccttgtataaaataggatccagcgacactcttgtatttatctgttctctttttagtcagtcacttcaaaaaaacaaaaaacaaacaaaaaaaagctgtacattttaacataaaataaattatgatgagccattttt

SEQ ID NO: 90677 - DNA, 6944 bp, Artificial Sequence
  derived and/or modified sequence
ggcaaaggacgaggcggaggctgaggaaggcagcggggagacccaggctgcagcaacaaagggcagcgagcgattggccgggctgcaggcgaggtcttgatttcccagttaaagatgttcttcacccgaatgcagtctttcctgttggtaaaataagacaaccatcaacattgcctgtttgtctgcttttgaatctcttaaggatggatgtttgtaagatgttgcttaatacagtctggaatactctgtccatttgttgaattgtaaatgactttcaaatgtgcaagttctgttaaatacaaagagaacctctatgggtaacttttgtgttgaagaagtcatttgtcaaccatggtaaaacttgcaaacccactttatacagagtggattcttgaagctatacagaaaataaaaaagcaaaagcaaaggccctctgaagagagaatctgccatgcggtcagtacttcccatgggttggataagaagacagtctctgaacagctggaactcagtgttcaggatggctcagttctcaaagtcaccaacaaaggccttgcctcctataaggacccagacaaccctgggcgcttttcatcagttaaaccaggcacttttcctaagtcagccaaggggtctagaggatcatgtaatgatctccgcaatgtggattggaataaacttttaaggagagcaattgaaggacttgaggagccgaatggctcctccctgaagaacatagagaagtatctcagaagtcaaagtgatctcacaagcaccaccaacaacccagcctttcagcagcggctgcgactgggggccaaacgcgctgtgaataatgggaggttactgaaagacggaccgcagtacagggtcaattatgggagcttagatggcaaaggggcacctcagtatcccagtgcattcccatcctcgctcccacctgtcagccttctaccccatgagaaagaccagccccgtgctgatcccattccaatatgtagcttctgtttggggactaaagaatcaaatcgtgaaaagaaaccagaagaactcctctcttgtgcagattgtggcagtagtggacacccatcctgtttgaaattttgtcctgaattaacaacaaatgtaaaggccttaaggtggcagtgcatcgaatgcaagacatgcagtgcctgtagagtccaaggcagaaatgctgataatatgcttttttgtgattcctgtgatagaggatttcatatggaatgctgtgacccaccactttccagaatgccaaaagggatgtggatttgccaagtctgcagaccaaagaaaaagggaagaaaactacttcatgagaaagctgcacaaataaaacgacgatatgcaaaacccattggacgaccgaaaaataaattaaagcaacgattgttgtctgtaaccagtgatgaaggatccatgaatgcattcacaggaagggggtcacctgatactgaaataaaaataaacatcaaacaagaaagtgcagatgtaaatgtgattggaaacaaggatgtcgttactgaagaggatttggatgtttttaagcaggcccaggaactttcttgggagaaaatagagtgtgagagtggggtggaagactgtggccggtacccttctgtgattgaatttggtaaatatgaaatccaaacctggtactcctcgccttacccacaggaatatgcaagattaccaaagctttacctgtgtgaattctgtcttaaatatatgaaaagtaaaaatattttgctaagacactccaagaagtgtggatggtttcatcctccagcaaatgaaatttaccgaaggaaagacctttcagtatttgaggttgatgggaatatgagcaaaatttattgccaaaacctttgcttgttagccaagctcttcctggaccacaaaacgttgtattatgatgtcgagccattccttttttatgtccttacaaaaaatgatgaaaagggctgtcatctggttggatacttctctaaggaaaagctttgccagcagaagtataatgtctcctgcataatgatcatgccccagcaccaaaggcaaggatttggacggtttctcattgatttcagctatttgctttctagaagagaaggccaagcagggtctcctgaaaagcctctctccgatctgggccgtctctcctacctggcatattggaagagcgtcatcttggagtatctctaccaccaccatgagaggcacatcagcatcaaggcaattagcagagcgacgggcatgtgcccacatgacattgccaccactctgcagcacctccacatgatcgacaagagagatggcagatttgtcatcattagacgggaaaagttgatattgagccacatggaaaagctgaaaacctgttccagagccaatgaacttgatccagacagtctgaggtggaccccaattttaatttctaatgctgcagtgtctgaagaagagcgagaagctgagaaagaggctgagcggctaatggaacaagctagctgctgggagaaggaggaacaagaaatcctgtcaactagagctaacagtaggcaatcacctgcaaaagtacaatcgaaaaataaatatttgcattccccggagagccggccagtcacaggggagcgagggcagctgctggagctgtctaaagagagcagtgaagaagaagaggaggaggaggacgaggaggaggaagaagaggaggaagaagaggaagaggatgaagaggaggaagaagaggaagaagaagaagaagaagaagaaaatattcaaagctctcccccaagattgacgaaaccacagtcagttgccataaagagaaagaggccttttgtactaaagaagaaaaggggtcgtaaacgcaggaggatcaacagcagtgtaacaacagagaccatttcagagacgacagaagtactgaatgagccctttgacaactcagatgaagagaggccaatgccacagctggagcctacctgtgagattgaagtggaggaagatggcaggaagccagtcctgagaaaagcattccagcatcagcctgggaagaaaagacaaacagaggaagaggaaggaaaagacaatcattgcttcaagaatgctgacccttgtagaaacaatatgaatgatgattcaagtaacttgaaagaaggcagtaaagacaatcccgaacctctaaagtgcaaacaagtgtggccaaaaggaacaaagcgcggtctatctaagtggaggcaaaacaaagagaggaagaccggatttaaactgaatttgtacaccccgccagaaacacccatggagcctgacgagcaggtaacagtggaagaacagaaggagacttcagaaggaaaaaccagccccagtcccatcaggattgaggaggaggtcaaggaaactggggaagccctgttgcctcaagaggaaaacagaagggaagaaacatgtgcccctgtaagtccaaacacatcaccaggtgaaaaaccagaagatgatctcatcaaacctgaggaagaggaagaggaggaggaggaggaagaggaagaagaggaagaagaggaaggggaagaagaagaaggaggaggaaatgtagaaaaagatccagatggtgctaaaagccaagaaaaagaggaaccagaaatctccacggaaaaagaagactctgcacgtttggatgatcacgaagaggaggaggaagaggatgaagagccatcccacaacgaggaccatgatgccgatgacgaggatgacagccacatggagtctgccgaagtggagaaggaagagctgcccagagaaagcttcaaagaagtactggaaaaccaggagacttttttagaccttaatgtgcagcctggtcactcgaacccagaggtcttaatggactgtggcgtcgacctgacagcttcttgtaacagtgagcccaaggagcttgctggggaccctgaagctgtacccgaatctgacgaggagccacccccaggagaacaggcacagaagcaggaccaaaagaacagcaaggaagtcgatacagagttcaaagagggaaacccagcaaccatggaaatcgactctgagactgtccaggccgttcagtctttgacccaggagagcagcgaacaggacgacacctttcaggattgtgccgagactcaagaggcctgtagaagcctacagaactacacccgtgcagaccaaagtccacagattgccaccacgctcgacgattgccaacagtcggaccacagtagcccagtttcatccgtccactcccatcctggccagtccgtacgttctgtcaacagcccaagtgtccctgctctggaaaacagctacgcccaaatcagcccagatcaaagtgccatctcagtgccatctctgcagaacatggaaaccagtcccatgatggatgtcccatcagtttcagatcattcacagcaagtcgtagacagtggatttagtgacctgggcagtatcgagagcacaactgagaactacgaaaacccaagcagctacgattctactatgggaggcagcatctgtggaaacggctcttcacagaacagctgctcctatagcaacctcacctccagcagtctgacacagagcagctgtgctgtcacccagcagatgtccaacatcagcgggagctgcagcatgctgcagcaaaccagcatcagctcccctccgacctgcagcgtcaagtctcctcaaggctgtgtggtggagaggcctccgagcagcagccagcagctggctcagtgcagcatggctgctaacttcaccccacccatgcagctggctgaaatccccgagacgagcaacgccaacattggcttatacgagcgaatgggtcagagtgattttggggctgggcattacccgcagccgtcagccaccttcagccttgccaaactgcagcagttaactaatacacttattgatcattcattgccttacagccattccgctgctgtgacttcctatgcaaacagtgcctctttgtccacaccattaagtaacacagggcttgttcaactttctcagtctccacactccgtccctgggggaccccaagcacaagctaccatgaccccaccccccaacctgactcctcctccaatgaatctgccgccgcctcttttgcaacggaacatggctgcatcaaatattggcatctctcacagccaaagactgcaaacccagattgccagcaagggccacatctccatgagaaccaagtcagcgtctctgtcaccagccgctgccacccatcagtcacaaatctatgggcgctcccagactgtagccatgcagggtcctgcacggactttaacgatgcaaagaggcatgaacatgagtgtgaacctgatgccagcgccagcctacaatgtcaactctgtgaacatgaacatgaacactctcaacgccatgaatgggtacagcatgtcccagccaatgatgaacagtggctaccacagcaatcatggctatatgaatcaaacgccccaataccctatgcagatgcagatgggcatgatgggcacccagccatatgcccagcagccaatgcagaccccaccccacggtaacatgatgtacacggcccccggacatcacggctacatgaacacaggcatgtccaaacagtctctcaatggctcctacatgagaaggtagacaacgtgggcagtccacaaaacctacggggcatcactattggattgatctgcacaaatacctttgaagagtacgatttcaaaaccagcaattggtgtgaatgcaaaaacatttgttggcaccatttatttaaaaaaaaaaaaagctgtatgcagcagaaagccttatacaagttgtttttctttttttcctttttcttttttttggtaccttcatttctgttacttttatataaaattctctgcaaaggaaggcctctctttggactacaatttggaggcagccacttgttgtgcctgcttctgttaaacaatgtggatatcaagcccccccaaattatctgttttaatattgaacctagagctttttttttcccttccctgtccactccatgtaaatgcctttagcatttcagttattgtatattttgtttaaggtgacacttcagcatgccgctaatgtctttgttagtgacagtgcattttgtagtactgtacaagtgttgtgctaacagtaagccatttcttaagttttttgccttgattagggtgccctaatttgagggttttaaaaaaaactatatttttgttaattataaaactgtaaagagctataaaagctattcccatttggttagtcaaaagggttttattgctaaatgtttggtgtaaagttgagacccttttccattttggtgacagatttctttggggaaaaaaggcagctttctgttttataaatgcagacttctgtttattgaatgaagcatatctcagtgtttatctgtcaggttttgaaacatttcatatatgtccaaatacttggcaggatttaaaaaaaaatagtgaatttggtgtaaagttgctattttatggaaatgcctctaactttacattttcattccatctgtagatttttctatctttataaaatattggagttattttttaaggaaaaatagaaaagtagcttgtgaatagctcaaactaagcttacaaatcgcatgtaaaaaagcaaaaaagttatttgtgtctgtttatattgcttccttttttgtagcctttgtacctgtacagggtgacagtaagggccaagcaggagaggcgtaatccttgtataaaataggatccagcgacactcttgtatttatctgttctctttttagtcagtcacttcaaaaaaacaaaaaacaaacaaaaaaaagctgtacattttaacataaaataaattatgatgagccattttta

SEQ ID NO: 90678 - DNA, 5346 bp, Artificial Sequence
  derived and/or modified sequence
atggtgaagctggccaaccccctgtacacagagtggatcctggaggccatccagaagatcaagaagcagaagcagaggcccagcgaggagcgcatctgccacgctgtgtccaccagccacggcctggacaagaagacagtgtctgagcagctggagctgtctgtgcaggacggctctgtgctgaaggtgaccaacaagggcctggccagctacaaggaccctgacaaccctggccgcttcagctctgtgaagccaggcaccttccccaagagcgccaagggcagccggggcagctgcaatgacctgagaaatgtggactggaacaagctgctgcggcgggccatcgagggcctggaggagcccaacggcagcagcctgaagaacatcgagaagtacctgcggagccagagcgacctgaccagcaccaccaacaacccagccttccagcagaggctgcggctgggcgccaagagagctgtgaacaacggccgcctgctgaaggatggcccccagtacagagtgaactacggcagcctggatggcaagggggccccccagtaccccagcgccttccccagcagcctgccccctgtgtccctgctgccccatgagaaggaccagcccagggctgaccccatccccatctgcagcttctgcctgggcaccaaggagagcaaccgggagaagaagccagaggagctgctgagctgtgccgactgtggcagcagcggccaccccagctgcctgaagttctgcccagagctgaccaccaacgtgaaggccctgcgctggcagtgcatcgagtgcaagacctgcagcgcctgccgggtgcagggcagaaatgctgacaacatgctgttctgtgacagctgtgaccggggcttccacatggagtgctgtgacccccccctgagcaggatgcccaagggcatgtggatctgccaggtgtgccggcccaagaagaagggcaggaagctgctgcacgagaaggccgcccagatcaagagaagatatgccaagcccatcggccggcccaagaacaagctgaagcagaggctgctgtctgtgaccagtgatgagggctccatgaatgccttcaccggccggggcagcccagacacagagatcaagatcaacatcaagcaggagagcgcagatgtgaatgtcatcggcaacaaggatgtggtgacagaggaggacctggatgtgttcaagcaggcccaggagctgtcctgggagaagattgaatgtgagagcggcgtggaggactgtggccgctaccccagcgtgattgaatttgggaagtatgagatccagacctggtacagcagcccctacccccaggagtatgcccggctgcccaagctgtacctgtgtgagttctgcctgaagtacatgaagagcaagaacatcctgctgcggcacagcaagaagtgtggctggttccaccccccagccaatgagatctacagaaggaaggacctgtctgtgtttgaggtggatggcaacatgagcaagatctactgccagaacctgtgcctgctggccaagctgttcctggaccacaagaccctgtactatgatgtggagcccttcctgttctacgtgctgaccaagaatgatgagaagggctgccacctggtgggctacttcagcaaggagaagctgtgccagcagaagtacaacgtgtcctgcatcatgatcatgccccagcaccagaggcagggcttcggccgcttcctgattgacttctcctacctgctgagccggcgggagggccaggccggcagccctgagaagcccctgagtgacctgggccgcctgagctacctggcctactggaagagcgtcatcctggagtacctgtaccaccaccacgagcggcacatcagcatcaaggccatcagccgggccaccggcatgtgcccccatgacatcgccaccaccctgcagcacctgcacatgattgacaagagagatggccgctttgtgatcatcagaagagagaagctgatcctgagccacatggagaagctgaagacctgcagccgggccaatgagctggaccctgacagcctgcgctggacccccatcctgatcagcaatgctgctgtgtctgaggaggagcgggaggccgagaaggaggccgagcggctgatggagcaggccagctgctgggagaaggaggagcaggagatcctgagcacccgggccaacagccggcagagccctgccaaggtgcagagcaagaacaagtacctgcacagccctgagagcaggcctgtgactggagagcggggccagctgctggagctgagcaaggagagcagcgaggaggaggaggaggaggaggatgaggaggaggaggaggaggaggaggaggaggaggaggatgaggaggaggaggaggaggaggaggaggaggaggaggaggagaacatccagagcagccccccccggctgaccaagccccagagcgtggccatcaagaggaagaggccctttgtgctgaagaagaagaggggcaggaagagaagacgcatcaacagctctgtgaccacagagaccatcagcgagaccacagaggtgctgaatgagccctttgacaacagtgatgaggagcggcccatgccccagctggagcccacctgtgaaattgaggtggaggaggatggcaggaagcctgtgctgaggaaggccttccagcaccagcccgggaagaagaggcagacagaggaggaggagggcaaggacaaccactgcttcaagaatgctgacccctgcaggaacaacatgaatgatgacagcagcaacctgaaggagggcagcaaggacaaccctgagcccctgaagtgcaagcaggtgtggcccaagggcaccaagaggggcctgagcaagtggaggcagaacaaggagaggaagacaggcttcaagctgaacctgtacaccccacctgagacccccatggagccagatgagcaggtgacagtggaggagcagaaggagaccagcgagggcaagaccagccccagccccatcagaattgaggaggaggtgaaggagaccggggaggccctgctgccccaggaggagaacagaagagaggagacctgtgcccctgtgagccccaacaccagccctggagagaagccagaagatgacctgatcaagccagaggaggaggaggaggaggaggaggaggaggaggaggaggaggaggaggaggagggggaggaggaggagggcggcggcaatgtggagaaggaccctgatggagccaagagccaggagaaggaggagcctgagatcagcacagagaaggaggacagcgcccggctggatgaccacgaggaggaggaggaggaggatgaggagcccagccacaatgaagatcatgatgctgatgatgaagatgacagccacatggagagcgctgaggtggagaaggaggagctgccccgggagagcttcaaggaggtgctggagaaccaggagaccttcctggacctgaatgtgcagcccggccacagcaaccctgaggtgctgatggactgtggggtggacctgacagccagctgcaacagcgagcccaaggagctggccggggaccctgaggccgtgcctgagagtgatgaggagcccccacctggagagcaggcccagaagcaggaccagaagaacagcaaggaggtggacacagagttcaaggagggcaacccagccaccatggagattgattctgaaacagtgcaggccgtgcagagcctgacccaggagagcagcgagcaggatgacaccttccaggactgtgccgagacccaggaggcctgccgcagcctgcagaactacaccagggctgaccagagcccccagatcgccaccaccctggatgactgccagcagagcgaccacagcagccctgtgtcctctgtgcacagccaccctggccagagcgtgcgctctgtgaacagccccagcgtgcctgccctggagaacagctatgcccagatcagcccagaccagagcgccatctctgtgcccagcctgcagaacatggagaccagccccatgatggatgtgcccagcgtgtctgaccacagccagcaggtggtggacagcggcttcagtgacctgggcagcattgagagcaccacagagaactatgagaaccccagcagctatgacagcaccatgggcggcagcatctgtggaaatggcagcagccagaacagctgcagctacagcaacctgaccagcagcagcctgacccagagcagctgtgctgtgacccagcagatgagcaacatcagcggcagctgcagcatgctgcagcagaccagcatcagcagcccccccacctgcagcgtgaagagcccccagggctgtgtggtggagaggcctcccagcagcagccagcagctggcccagtgcagcatggccgccaacttcaccccacccatgcagctggccgagatccctgagaccagcaatgccaacatcggcctgtatgaaagaatgggccagagcgactttggagctggccactacccccagcccagcgccaccttcagcctggccaagctgcagcagctgaccaacaccctgattgaccacagcctgccctacagccacagcgctgctgtgaccagctatgccaacagcgccagcctgagcacccccctgagcaacacaggcctggtgcagctgagccagagcccccacagcgtgcctgggggcccccaggcccaggccaccatgaccccaccacccaacctgaccccaccacccatgaacctgcccccacccctgctgcagaggaacatggccgccagcaacatcggcatcagccacagccagaggctgcagacccagatcgccagcaagggccacatctccatgaggaccaagagcgccagcctgagccctgctgctgccacccaccagagccagatctacggccgcagccagacagtggccatgcagggccctgcccggaccctgaccatgcagaggggcatgaacatgtctgtgaacctgatgcctgccccagcctacaacgtgaacagcgtgaacatgaacatgaacaccctgaatgccatgaatggctacagcatgagccagcccatgatgaacagcggctaccacagcaaccacggctacatgaaccagaccccccagtaccccatgcagatgcagatgggcatgatgggcacccagccctatgcccagcagcccatgcagaccccacctcatggcaacatgatgtacacagcccctggccaccacggctacatgaacacaggcatgagcaagcagagcctgaatggcagctacatgagaagatag

SEQ ID NO: 90679 - DNA, 5346 bp, Artificial Sequence
  derived and/or modified sequence
atggtgaagctggccaaccccctgtacaccgagtggatcctggaggctattcagaaaataaaaaagcagaagcagagaccctctgaggagcggatctgccacgctgtctctacttcacacggactcgacaagaaaactgtgagcgagcagttggagctgagtgttcaagacggaagcgtacttaaggtgaccaacaagggtctggcgagctataaggatcctgacaatcctggtagattctcaagcgtcaaaccagggacattcccaaaaagtgccaaaggcagccggggctcatgcaacgacctgcgtaatgtagactggaataagcttttgcggcgggcaatcgagggcttggaagaacctaatggctcctccctgaagaacattgaaaaatatctcaggtcacagtcggacctaactagtactactaataaccctgctttccagcaaaggctgaggctgggggctaaacgggcagtgaataatggccggctgctgaaagacggcccccaataccgcgttaattacggctccttggatgggaagggtgcaccccaatatccttccgcctttcctagctcactgcccccagtatccctgctgccccatgagaaggatcagccacgagctgacccaatccctatctgctctttttgcctggggacaaaggagtccaatagagaaaaaaagcctgaggaattgctaagttgcgccgattgtggatcctccggtcatccttcgtgtctgaagttctgcccagaacttacaacaaatgtcaaagccctccggtggcagtgtatcgagtgtaaaacatgctcagcatgtcgggtgcagggcagaaatgcggataatatgctcttttgcgattcttgcgataggggtttccacatggagtgctgcgacccacccctctctcgcatgcccaaggggatgtggatctgccaggtgtgcagacctaaaaagaaaggccgcaagctgctgcacgaaaaagcagcccagatcaagagacgatacgctaagccaatagggaggccaaaaaacaagttaaagcagaggctgttatctgtcacatcggacgaggggtcaatgaacgctttcaccggacgaggtagccccgatactgaaattaagattaatattaagcaggaatcagccgacgtgaacgtgattggcaacaaagatgtcgttaccgaagaagacctagatgttttcaaacaggcgcaggagctgtcctgggagaagattgagtgcgaatctggggtcgaggattgtggccgatacccgagcgtcatcgagtttggcaagtatgagattcagacttggtatagctcaccgtatccacaagagtatgctcgactcccaaagctgtatctgtgtgaattctgcctcaagtacatgaagagcaagaatattctgttaaggcactcaaagaagtgtggatggttccatccgcctgccaatgagatttaccggcgcaaggacctctcagtcttcgaagtggatggaaacatgtcgaaaatttactgccagaacttgtgtctcttggccaagctgtttctggatcataagaccctatactacgacgtggagccttttcttttctatgttcttacaaaaaacgacgagaaaggatgtcacctcgtgggatacttttctaaggaaaagttgtgtcagcagaagtacaatgtaagctgtatcatgatcatgccacagcaccagagacaggggtttgggcgctttcttattgatttttcttatctgctgtctcgtcgggagggccaggcaggctcaccagagaagcccctgtccgacctgggccgcttatcatatctggcctattggaaatcagtgatcctagagtatctttaccatcaccacgagcgccatattagcatcaaggctatttctagagctaccgggatgtgccctcatgacattgctaccaccctgcagcatttacacatgattgacaagagggatgggcggttcgtgataattcggcgggagaagttgatcctcagtcacatggaaaagctaaaaacgtgcagtagggcaaatgagctggatcctgacagtctgagatggaccccaattctcatctccaatgcagccgtttcagaggaagaacgggaagccgagaaagaagcggaaagactgatggagcaggccagctgttgggagaaggaggaacaggagatcctgtcgacaagggcaaattctcgccaatcgcctgctaaggttcagtctaaaaataagtatctccattcccccgaatccagaccagtaactggcgaaagggggcaactgcttgaattgtctaaagaatcctcggaggaggaagaagaggaagaggacgaagaggaagaggaggaagaggaagaggaggaggaagatgaggaggaggaggaagaagaggaggaggaggaagaggaggagaacatccagtctagcccccctagacttaccaagccgcagtctgtggccattaagaggaagcgcccattcgttctgaagaaaaaaagaggacggaaacgccgccgtataaatagctccgtaacaacagaaacgataagcgagacaaccgaagtcttgaatgagccgtttgataactcagacgaggaaaggcccatgccccagctggagcccacatgtgaaatcgaggttgaagaagatggccgaaagccagttctgaggaaagcttttcagcaccagccaggtaagaaaaggcagacagaggaagaagagggaaaagataaccactgttttaagaatgccgacccctgccgcaataacatgaatgacgattccagcaatctcaaagaggggagtaaggataatccagagcccctgaaatgtaaacaggtatggcctaagggaacaaaacggggcttgtcaaaatggaggcagaacaaagaacgcaagactggtttcaagctgaacctctacacgccacccgagacacctatggagccggatgagcaagtgactgttgaagagcagaaggaaaccagcgaaggtaagacctcaccatctccaatccgaattgaggaggaagtgaaggaaaccggcgaagcccttctgccgcaggaggaaaataggcgggaggaaacctgcgcgccagtaagtcctaatacctcccctggggagaagcccgaggacgacctgatcaaacccgaggaggaagaagaggaggaagaggaggaagaagaagaggaagaagaagaggagggagaagaagaggaaggcggcgggaacgtggagaaagatccagacggcgccaaaagccaggagaaagaagagcccgagataagtacagaaaaagaggattcagcgagactggatgatcacgaagaagaagaagaggaggacgaggagccatctcacaacgaggatcacgatgccgacgacgaggatgatagccacatggagagcgccgaggtggaaaaggaagagttaccaagggagtccttcaaagaggtgctggagaatcaagaaacgttcttggacttgaatgttcaacctggacactcgaatcctgaggtactcatggattgcggagtggaccttaccgcaagttgtaattctgaacccaaagaattggctggagaccccgaagccgtaccagaatctgacgaggagccgcctccaggagagcaggcacagaagcaagatcagaaaaattcaaaggaggtggacaccgagttcaaggagggaaatcctgccaccatggagattgattccgaaacagtgcaggccgttcagtctcttacacaggagagctctgaacaagacgacacatttcaggattgtgccgagacgcaagaagcctgcaggagcctccaaaattatacaagggcggatcagtctcctcaaattgccactacgcttgatgactgccagcagagcgaccatagctcacccgtcagcagtgtccattctcatcccggacagtctgtgcgatccgtgaacagccctagcgttcccgcacttgagaacagctacgctcagatttcacccgaccagagtgcaatctctgtgccatccctacagaacatggagacaagccccatgatggacgtcccctcagtatcggaccactcccaacaggtggtcgattcgggcttcagtgacctaggcagtatcgagtctaccaccgagaattatgagaacccgagctcgtacgacagcacgatgggaggaagcatttgcggaaacggcagtagccaaaattcgtgctcatacagcaatctgacatcctcttctttgacacaatcaagctgtgctgttacacagcagatgtcaaacatctccggatcatgtagtatgctgcagcagacatctatcagtagccctcctacatgttccgtcaaatcaccacagggttgcgtggtggagaggccaccaagctcttctcagcagctcgctcaatgcagcatggcagccaatttcacgccaccaatgcagctggcagagatccccgaaacatctaatgcaaacatcggcctttatgagcgaatgggtcagtctgacttcggggcaggacactaccctcagccctcggccaccttctcattggctaagttgcagcagcttactaataccctgatcgaccattccttaccctattcacactctgccgcagtgactagttacgccaatagtgctagcctgtccacccccctaagcaatacaggactggtgcagctaagtcaatctccccactctgttcctgggggtccacaagcccaggccacaatgactcccccccccaacctgaccccgcccccgatgaacttgcctcctccgctcctgcagcggaatatggcagcctctaatataggaatctctcacagtcaacgcctgcagacacagatcgcgtcaaagggtcacatttcaatgcgaactaaaagtgcgtcattgtctcccgctgccgccacccatcagtctcaaatttacggaaggtcacagacagtggcgatgcaggggcccgcccgcacgcttactatgcaacgcggaatgaatatgagtgtgaacctcatgcctgcccctgcatacaatgtcaactctgtaaacatgaatatgaacacactcaatgccatgaacgggtattcgatgagtcaacccatgatgaatagtgggtatcactcaaaccatggatacatgaaccagacaccccagtacccgatgcagatgcagatggggatgatgggcacccagccttatgcccagcaacccatgcaaactcccccacatggtaacatgatgtatactgctccaggccatcatggctatatgaatactggaatgagcaagcaatccttaaacggcagttacatgaggaggtag

SEQ ID NO: 90680 - DNA, 5346 bp, Artificial Sequence
  derived and/or modified sequence
atggtgaagctggccaaccccctgtacaccgagtggatcctggaggctatacaaaaaatcaagaaacagaaacagagaccctcggaagaaagaatttgtcatgccgtgagtaccagccacggcttagacaaaaagactgtgtccgaacaactggaacttagtgtgcaggatgggagtgtcctgaaggtgaccaataaagggctagcatcgtataaggatccagacaatcctgggcgctttagctcagtaaagcccggcacattccccaagtcagccaagggctctcgaggatcatgcaacgacctgcggaacgtggattggaacaagctcctccgacgtgccatcgaaggcctggaggagccgaatgggtcgagcctcaagaatatcgaaaagtaccttaggagtcaaagcgatttgacttccacgactaataaccctgctttccagcagaggctgcggctcggcgccaagcgcgctgtcaataacggtcgactgctgaaggatggccctcagtacagggtgaactatggatctttggacggaaaaggggcccctcagtacccctccgcattcccgtcttcgttacctcccgtgtctcttctcccccacgaaaaagatcagcctcgggccgaccctatacctatctgcagcttttgcctgggaaccaaagagtcaaatagggagaagaagcccgaggagcttctgagttgcgccgactgcggatcctctggccatccatcttgtctaaagttctgtcccgagctaacaacgaatgtgaaggctctgaggtggcaatgcatagagtgtaaaacttgctcagcttgcagagtccaagggcgcaacgccgacaacatgctgttctgcgacagttgtgatcggggatttcacatggaatgttgcgacccaccactgtccaggatgcctaaaggcatgtggatctgccaggtgtgtcggcctaagaaaaagggccggaaacttttgcatgagaaggctgcgcagattaaacgtaggtacgctaagccaatcggcaggccaaagaacaagttgaaacagcgtctcctgtccgtgacttcagacgaaggtagcatgaatgcctttacaggacggggcagccccgacactgaaattaaaatcaatatcaaacaggagtccgcagatgtgaatgtaatcggcaacaaagacgttgtgactgaggaggatctggatgtgtttaagcaagctcaggaactcagttgggagaagatagagtgtgagtccggtgtggaagattgtggacgctaccctagcgtgatcgaatttgggaaatatgaaattcagacatggtattcctctccctatccccaggaatacgcaagattgcccaagctgtatctatgcgagttttgtttgaaatatatgaaatctaaaaacatcctactgcggcacagcaagaaatgtggctggttccatccacccgctaacgagatttatagacgaaaggacctgtccgttttcgaggtcgacgggaatatgagcaaaatctattgccagaacctgtgtttgctggctaagttgtttctggatcataagaccctttactatgatgtagaaccgtttttgttctacgtgctgaccaaaaacgatgagaagggatgtcatctggtgggctacttctccaaggagaagctatgccagcagaaatacaacgtgtcttgcatcatgatcatgccacaacatcagcggcaggggttcgggaggttcctgatcgattttagctacctgctgtctcgccgtgagggccaggccggtagccccgaaaagcctttgtcagatcttgggcgacttagttacctggcctattggaaaagcgtgattctggagtatctgtaccatcaccatgagagacacatttccatcaaggctataagtcgcgcgaccggcatgtgcccccacgatatcgctactacactccagcatctgcatatgatcgataagagagatggtcgattcgtaattatccgcagggaaaaattgatcctctctcacatggagaagctaaaaacttgcagcagggcgaatgagctggatcctgactcgttacgctggacgccgattttaatttcaaatgccgcagtatccgaggaagagcgcgaagccgaaaaagaggccgagcgactgatggaacaggcttcctgttgggaaaaggaggagcaggagattctgagcacacgggctaactcccgccagagccctgccaaagttcagagcaagaacaaatatctgcactccccggaaagtagaccagtcacaggcgagaggggtcaattgttggagctgtcaaaggagtcttccgaagaggaagaagaggaagaggatgaagaagaggaggaggaagaggaagaagaagaggaagacgaagaggaggaagaagaagaggaggaggaagaggaagaggagaacatccagagctcacctccccgccttacaaagccgcagtccgttgccataaagaggaagaggccgttcgtattgaaaaagaagaggggcagaaaaagacgccggataaacagtagcgtgaccacggagacaatcagcgaaacaacagaggtgttgaatgagccctttgataactccgacgaggagcggcctatgcctcagctggagccaacgtgtgagatcgaggtggaagaagacggaaggaaaccggtcctgagaaaggcttttcagcaccagcccgggaaaaagcgacaaaccgaggaggaagagggaaaggataaccactgctttaagaacgccgacccttgccggaacaacatgaatgatgacagctcaaacttgaaggaaggatcaaaagacaaccccgaaccccttaagtgcaagcaggtgtggcccaaaggcactaagagaggacttagcaagtggagacagaacaaggagagaaagacagggttcaaactgaacctgtatacccctcccgagacccctatggaaccggatgaacaagttacagtcgaagagcagaaggaaacaagtgaaggcaaaacatctccctctccaatccgcattgaggaggaggtcaaggagacaggcgaggcattactcccacaggaggaaaaccgccgagaggagacatgcgcccccgtgtcgcctaacactagccccggagagaaaccagaggacgacctcattaaaccagaggaagaggaagaggaggaggaagaggaggaagaagaggaagaagaagaggaaggcgaggaagaggagggcgggggaaacgtcgaaaaggacccggatggcgccaaatcgcaggagaaggaggagcccgagatttctacagagaaggaagatagtgccaggctggatgatcacgaggaggaagaagaggaggatgaggagccgagccacaacgaggaccatgacgccgacgatgaggacgacagccacatggaatcagcggaggtcgagaaggaggagctcccacgggagtcatttaaggaggttctagagaatcaggaaacttttctggacctgaatgtccaacccggtcattccaaccccgaagtcctgatggactgtggcgtggatctcactgccagttgcaatagcgaacctaaggagctagccggggatcccgaagccgtgccagaatccgatgaggagcctccacctggcgaacaggctcagaagcaggaccagaagaacagcaaagaggtggacaccgagtttaaagagggtaaccccgccactatggaaattgactcagaaacggtgcaggcagtacagagcctgactcaagaaagcagtgagcaagatgacacatttcaagattgtgccgaaacgcaggaagcatgccgcagtctgcaaaattatactcgcgccgaccagagtcctcagatcgctacaaccttggatgactgccaacaaagtgaccactcatcccccgtatcctctgttcattcccaccccggtcagagcgttagatcagtaaattccccaagtgttcctgcactggagaattcctatgcccagatttcgccagatcagagcgccatatccgtgccctcattgcagaatatggagacatcacccatgatggacgttcctagcgttagtgaccattcccagcaggtagtcgattcggggttttctgatctgggaagcatcgagtctaccacagaaaactatgaaaacccaagttcctacgacagtacaatgggcggtagcatctgtggaaatgggagtagccagaattcttgcagttacagcaacctcaccagctcctctctaacccaaagctcttgcgctgtcacccagcaaatgtcgaacatctctgggtcatgctcaatgttacagcagacctcaattagctcacctcccacttgcagtgtaaagtccccccagggttgcgtggtggaaagaccaccgagctcaagtcagcagctagctcagtgtagcatggccgcaaatttcactccccctatgcaactggcggaaataccagagaccagcaacgccaatataggactgtatgagagaatgggccagtccgatttcggggccggccactaccctcagccttccgcaacgttttctctcgcgaagcttcaacagttgaccaacactctgatcgatcactccctgccatacagccactccgccgccgtaaccagttacgcaaactcagcgtcgttgagtacaccactcagcaacaccggcctagtgcagctgtctcagagcccacactcggtgcctggcgggccacaggcccaagcaactatgacccccccgcctaacttgacccctcccccgatgaatcttcctccgccccttttgcaaaggaatatggccgcctcaaatatcgggatcagccattcgcagcggctccagacccagattgcttcgaagggccacatttctatgcggaccaaatccgccagcttaagtcccgctgcagccactcaccagtcacagatctatgggcggtctcagaccgtagcaatgcaaggccccgcccgaacccttaccatgcagaggggtatgaacatgtcggtgaacttgatgccagcaccagcgtacaatgtcaatagcgttaacatgaatatgaataccctgaacgccatgaacggctacagtatgagtcagcctatgatgaactctgggtatcacagcaaccatggctacatgaaccagaccccacaatacccgatgcagatgcagatgggaatgatgggcacccagccttatgcgcaacagcccatgcagacgccaccacacgggaacatgatgtataccgctcctggacaccatggctacatgaataccgggatgtctaagcagtccctgaacgggtcttatatgagacgatag

SEQ ID NO: 90681 - DNA, 5346 bp, Artificial Sequence
  derived and/or modified sequence
atggtgaagctggccaaccccctgtacaccgagtggatcctggaggccattcagaagatcaaaaagcagaaacagaggccctcggaagaacggatctgtcatgctgtgtcgacctcccacgggttggacaaaaaaaccgtctctgagcagctcgagctgagcgtgcaggatggaagtgtcctgaaggtgaccaataaggggcttgcttcatacaaggatccagataaccccgggcgcttttccagtgtcaagcccgggacttttccgaagtcggcaaagggctctcggggctcatgcaatgaccttcgtaacgtggactggaataaacttctccggcgcgccattgagggtctcgaagaacccaacggctcaagtctcaagaacatagagaaataccttcgatctcagtccgacttaaccagcacaacgaacaaccccgcctttcagcagaggttgaggctcggagccaaaagggccgttaacaacgggagattgcttaaagacgggcctcagtaccgcgtgaactatggcagcttagatgggaaaggcgccccccaataccccagtgcctttcctagctccttaccacccgttagccttctgccccatgaaaaagaccagccgcgcgccgatcctattccaatctgcagcttctgcttgggcacaaaggagtcaaaccgcgagaagaagcccgaagagctactgtcatgcgccgactgtggctcgtcaggtcaccccagttgccttaagttctgtcctgagcttaccactaacgtgaaagctctccggtggcagtgcatcgagtgtaaaacctgttccgcctgcagagtgcagggcagaaatgcggataacatgctattttgcgactcttgcgatcgcgggtttcatatggaatgttgtgaccctccactatctagaatgccaaaaggaatgtggatctgtcaggtttgtcgccctaagaaaaagggccgaaagctgctgcacgagaaggctgcacaaatcaaacgccggtatgccaagcctatcgggaggccgaaaaacaagctgaaacagagacttttgtctgtaactagcgacgagggctctatgaacgcctttaccggacgaggcagccctgataccgagattaagatcaacatcaaacaggaatcagccgacgtcaatgtgataggtaataaagacgtggtgactgaagaggatctagacgtgtttaagcaggcccaggagctaagctgggagaaaatcgagtgcgaatcaggggtcgaggactgtggcaggtaccccagcgtgatcgaatttggaaaatacgagatccaaacttggtactcatccccctatccccaagaatatgctagactgcccaagctgtacttatgtgagttttgcctaaagtatatgaagtcaaaaaatatcctcctaagacactccaagaaatgcggatggtttcacccccccgccaatgagatttatagaaggaaagacttgtctgtctttgaagtcgacggtaacatgtcaaaaatctactgtcagaacctgtgtctcctagccaagctgttcctcgatcacaaaacgctctactatgatgtcgaacctttcctgttttacgttcttacaaaaaacgacgaaaaggggtgtcacctcgtcggctatttttcaaaagagaagctctgtcaacagaagtataacgtttcatgcataatgataatgccccaacaccaaaggcagggcttcggacgtttcttgattgattttagttacctgttgtcccggcgggagggccaagccggtagtccagagaaacccctaagcgacctcggcaggctctcttacttggcttattggaaaagtgttatcttagaatacctgtatcaccaccacgaaagacacatctccataaaagctatatccagagccacaggaatgtgccctcatgatatcgctaccactttacagcatttgcatatgatagataagagagacgggcgattcgtaatcatccggagagagaagctcattctaagccatatggaaaagctgaagacatgtagcagggccaacgagctcgaccccgattctttacgttggacacctattctaatatctaatgctgccgtgtccgaagaggaacgggaagcagaaaaggaggcagagagacttatggagcaagcgagttgctgggagaaggaggaacaggagattctctcaactcgtgcaaatagtaggcagagccccgccaaagtacaaagtaaaaataagtacctgcatagtcccgaaagccgtcctgtgactggtgagagggggcagcttctagaactatccaaagagtccagtgaggaggaggaggaagaggaagacgaggaggaagaggaagaggaagaggaggaggaagaggatgaggaagaagaggaggaggaagaggaagaagaagaagaagagaatatccagtcatctcccccgcgattaacgaagccccagagcgttgcaatcaagaggaagcggccctttgtcctaaaaaagaagcgcggaaggaagcgaagacgcataaatagcagcgttaccactgaaactatttccgaaaccacggaggtcctgaacgagccatttgataacagcgatgaggagcgccctatgccacaacttgagcccacatgcgaaattgaagtcgaagaagatggtaggaaaccagtcctcaggaaagcctttcaacaccaacctggaaagaagagacagacagaggaggaagagggaaaggataatcactgttttaaaaacgccgatccctgccggaataacatgaatgacgatagctccaacctgaaagaaggtagcaaagacaatcccgaacctctcaagtgtaaacaagtctggccaaaggggaccaaaagaggattgagcaagtggagacagaacaaagaaaggaaaaccggattcaagcttaacctatacacacccccagaaacgcccatggaacccgatgaacaggtgacagtcgaggagcagaaggagacatccgaaggcaagacctctccatcacccattaggatcgaggaggaagtgaaagaaacgggtgaagccctgcttccccaggaagagaatcgtagggaagagacttgcgcgcctgtttcccccaatacgtctccaggcgaaaaacccgaggacgatttgattaagccagaggaagaggaagaggaggaggaggaggaggaggaagaggaggaggaggaggaaggcgaagaggaggaggggggcggtaatgtggaaaaagatcccgacggtgcaaaaagtcaggagaaagaggagcctgagatctctacagaaaaggaagatagtgctcggctcgacgatcacgaagaagaagaggaggaagacgaggaaccttcacataatgaggatcacgatgccgacgacgaagatgactcccacatggaaagcgctgaagtcgagaaagaggaattgccccgggaaagtttcaaggaagtccttgaaaaccaggagaccttcctggacttaaatgtgcagccaggccactcaaaccctgaagtgctgatggactgcggtgtagatctgactgcgtcttgtaatagcgagccgaaagagctggccggagaccctgaggctgtgccggaatcagacgaagagcctcccccaggtgaacaggcgcagaagcaggatcagaagaattccaaagaagtcgacacggagttcaaagaaggcaacccggctaccatggagattgactccgagactgtgcaggcggtgcagtcccttacccaggaaagctctgaacaggacgatacttttcaggattgcgcagagactcaggaggcgtgtcggtcccttcagaactacacacgggccgaccagagccctcagatcgctaccacgctggatgattgccagcagtccgatcactctagcccagtcagttctgttcacagtcaccctggtcaaagcgtcagatccgtaaacagccctagtgttcctgcgcttgaaaactcctatgctcagatctctccagaccaaagcgcgatttccgttccatctctgcagaacatggaaaccagtcccatgatggatgtacccagcgtatctgaccacagtcagcaagttgtggatagcgggtttagcgacctgggctccatcgagtctactacagaaaactatgagaacccctcttcttatgactccacaatgggaggctccatctgcggtaacggaagctcacagaacagctgttcttactcgaacctgacgtcatcctcgttaacccagtccagttgcgctgtgacacagcagatgagcaacatctccggatcctgctctatgcttcagcagacgagtatttcatcgccaccaacctgtagcgtcaagagtcctcaggggtgtgtcgtggagagaccaccgtcttccagtcagcagctggctcagtgctccatggcagcgaacttcacgccccccatgcaactcgctgaaatacctgagacctccaacgcaaatattggcctgtacgagaggatgggacagagcgatttcggcgcaggtcattatccgcagcccagcgcaaccttcagcctggctaagctgcagcagcttacaaacacacttatcgaccattcgctcccctattcccactctgcagcggttacctcatatgctaactccgcctctcttagcactcctttgagtaatacaggtctggtccagctttcccaatcgccccatagtgtcccgggaggcccacaagcgcaggccacaatgacaccaccccctaacttgacacctcctcccatgaatctcccacccccacttctgcagaggaatatggcagccagcaacataggcatttcccactctcaacggctgcagacccagatcgcttcaaaaggccatatcagcatgcgcaccaaaagcgcgagcctgtcccctgctgccgccacacatcagagccaaatttacggtcggtcccagacagtcgcaatgcaaggtccagcgaggacactaactatgcagagaggaatgaatatgtctgtgaatctgatgccagcacccgcttacaacgtaaatagcgtaaatatgaacatgaatactctcaacgcaatgaacgggtactctatgagtcagcccatgatgaatagcgggtatcactctaaccatgggtacatgaaccagacccctcagtatcctatgcagatgcagatggggatgatgggcacacagccctacgctcagcagcccatgcaaacacccccccatggcaacatgatgtatactgcacctggccaccacgggtacatgaatacgggcatgtcaaagcagagcctaaatggatcctacatgaggcggtag

SEQ ID NO: 90682 - DNA, 5346 bp, Artificial Sequence
  derived and/or modified sequence
atggtaaaactcgcgaatcctctctacacagaatggattttggaggccatacaaaaaatcaaaaagcaaaagcagaggcctagtgaagagaggatttgtcacgcagtttccacctcacatgggctggacaagaagactgttagcgaacagctcgaactgagcgtccaggatggcagcgtccttaaggtcaccaataaaggactagcgtcttacaaagaccccgacaacccgggacgcttttcttcggtcaaaccaggcaccttcccaaagtccgccaagggctcccgtggaagttgtaacgatctgagaaatgtcgattggaacaaactcctgaggagagcgatagaagggctcgaggaacccaatggctcgtcactcaagaacattgaaaagtaccttaggtctcagtcagatctcactagcacgactaacaatcctgccttccaacagcgcctcaggcttggtgccaagagagctgttaacaatggtaggctgttaaaggatggaccccaatacagagttaactatgggtcactggacgggaaaggtgccccacagtatcccagcgccttcccctcatccctaccacccgtttccttgttgcctcatgagaaggatcagcctcgcgctgatcccataccgatatgctcgttctgtctcgggaccaaagagtctaatagagagaaaaaacccgaggagctactttcctgcgctgactgtgggagcagtgggcacccaagctgcctcaagttttgtccagagctgacaaccaacgtgaaggctctccgctggcagtgcatcgagtgtaagacctgtagtgcgtgccgagtgcagggacgtaatgcagacaatatgctcttctgcgatagttgcgacagaggcttccacatggagtgttgtgatccccctctgtctcgcatgccaaagggcatgtggatttgccaggtctgtagacccaagaaaaagggacgaaagctcctacatgagaaggctgcccagataaagagacggtacgcaaagccaatcggacgccctaagaacaaattgaagcagcggctactgagcgtgacatcggatgagggcagtatgaatgctttcaccggtagaggatcgccggatactgagataaaaatcaatattaagcaggaatccgccgatgtcaacgtgatcgggaacaaggacgttgttaccgaagaggacttggacgtgttcaagcaagcgcaggaactgagttgggagaaaattgaatgcgaatcaggagtggaagattgcggaaggtatccaagcgtgattgaattcggaaaatacgagatccagacctggtactctagtccttatccccaggagtatgcgagattgcccaaactgtatctgtgcgagttttgcttaaaatacatgaagagcaaaaatattctcctccggcactctaaaaaatgcgggtggtttcatcctcccgcaaacgaaatctatcggcgtaaagacctttcagtcttcgaagttgatggcaatatgtctaagatctattgccagaatttgtgtctcctggccaaactgttcctcgatcataagactctgtactatgacgtggagccttttctgttctacgtgctcacgaaaaatgatgaaaagggctgtcacttggtggggtattttagtaaagaaaaactttgtcagcagaaatacaatgtgagttgtatcatgattatgccacagcaccaaaggcaggggtttgggcgtttcctcattgacttctcctatctcttaagccgacgtgaggggcaggccggatcaccagaaaagcctctgtccgacctgggacggttgtcctatctggcctattggaaatctgtaatactcgaatacctgtatcaccaccacgaacggcacattagcatcaaggcaattagccgagccaccggtatgtgtccacacgatatcgccactacattacagcacctgcacatgatcgacaagcgggacgggaggtttgtgattatccggcgagaaaagctcatcctgtctcatatggagaaactgaagacatgttctagggctaacgaattggatcctgacagtctcaggtggacccctatcctgatcagtaatgcagcggtcagcgaggaagagagagaagcggagaaagaggccgaacgacttatggagcaggcttcctgctgggaaaaagaagagcaggaaatattgagtacgagagccaattcgcgtcagagcccggctaaagtccagtccaaaaataaatatctgcacagccctgagtcccggcctgtgactggcgaacgcggacagctcttagagctaagcaaagaatcaagcgaagaggaggaggaggaggaggatgaagaagaggaagaagaggaggaggaggaagaggaagacgaggaggaggaggaggaggaagaggaagaggaggaggaggaaaacattcagtcttccccgcctcggctcacaaagcctcagtccgttgccattaagagaaaacggccttttgtgctgaaaaaaaaaagagggaggaaacgcaggcggattaattcaagtgtaacgactgaaactatatctgaaacaaccgaagtgctaaacgaaccctttgacaacagcgacgaagaacgtcctatgccccagttggaacccacatgcgagattgaagtggaggaagatggcaggaaacctgttctccgcaaagcctttcagcatcaacctggaaaaaagaggcagacagaggaggaggaagggaaggataaccactgtttcaaaaacgctgatccttgtcgtaataacatgaacgatgatagttcaaatttaaaggaaggatccaaggacaaccccgaacccctcaaatgtaagcaagtttggccgaagggaacgaagcgaggcctgtctaaatggagacagaataaagaacggaaaactggatttaagcttaacctgtacaccccacccgagacgccaatggaacccgacgagcaagtgaccgtcgaggaacagaaagaaacctccgaggggaagacgtccccgagtccgatacgcatagaagaagaagtgaaagagactggcgaagcactgctgcctcaggaggagaatagacgggaagaaacttgcgcaccagtaagcccgaatacctcacctggagagaaaccagaagacgacctgatcaagccagaggaggaggaagaagaggaggaagaggaagaggaagaggaagaggaagaggagggggaagaggaggaaggaggaggcaatgtcgaaaaggatccggacggcgcaaaatcccaggaaaaggaagagcctgagatcagcactgaaaaagaggattccgctaggttggacgatcacgaggaagaggaggaagaggacgaggaaccaagccacaatgaagatcacgacgcggacgatgaggatgattcccacatggaatccgctgaggttgaaaaggaggaactccctagggaaagtttcaaagaggttttggaaaatcaggagacctttctggacctgaacgtgcagcccggacacagtaaccccgaagtgctgatggattgtggagtcgacctcaccgcttcgtgcaactctgagcccaaggaactggcaggagatcctgaggcagtgcccgaatccgacgaagagcctcctcctggcgaacaggcccaaaagcaggaccagaagaattcaaaagaggtggatacagagtttaaagagggtaatcctgcaaccatggaaatagacagcgagacagtgcaagctgtccagagcctcactcaggaaagctcagagcaggatgacacatttcaagactgcgctgaaacacaagaagcttgcagatctctgcagaactatactagggccgaccagtcaccacaaatagccacaaccctggatgattgtcaacaatcggaccacagctcgccggtgagttcagtgcactctcatcccggacaaagtgttagatccgtgaattctccttctgtaccggcacttgaaaattcatatgctcagatctcccccgaccaatctgcaattagcgtgcctagcctacaaaacatggaaaccagtccaatgatggatgtcccctcagtgtccgaccacagccaacaggttgtcgactctggattcagcgacctaggctcaattgagagcaccacagaaaactatgagaatcccagttcctatgactccaccatgggaggctctatttgcggtaatggaagtagccaaaacagttgtagctatagcaacctgacctctagttccctgacccaatcatcatgcgccgtgacacaacagatgagcaatattagtggctcatgctccatgcttcaacagactagcataagctctccgcctacgtgtagcgtcaaatcaccccaggggtgtgttgttgagcggcctccttcctcatcacagcagctggctcagtgcagcatggccgcaaattttaccccccctatgcagctggcggagatacccgaaacctcgaatgctaatatcggcctctacgaacgaatgggtcagtccgatttcggcgctggccactacccccaacctagcgccaccttttccttagccaagttgcaacaactgactaacactttgatagaccattctttgccctattcccattcagcagccgtgacctcctatgccaatagtgcatctctgtcaacacctctgagcaatacagggctcgttcagctctctcagagtcctcactcagtgcccggaggccctcaggcccaggctacaatgacccctccccctaacctcaccccacccccaatgaacctaccgcctcctctgctgcaaagaaacatggctgcctctaatatcggcataagtcattctcagaggctccagacacagatcgcctccaaaggccacatcagcatgcgcactaagtccgcttctctttctcccgcagctgcaacacaccaaagccaaatatacggccgatcacagacagtggctatgcaggggcctgcacgcacactgactatgcagaggggaatgaacatgtcagtcaatctgatgcccgctcctgcatacaacgtcaacagtgtgaacatgaacatgaacacactgaatgccatgaatggttatagtatgagccagccgatgatgaatagcggataccactccaaccacggctacatgaaccaaacgccacagtatcccatgcagatgcaaatgggaatgatgggtactcagccctacgcccagcagccaatgcagacgccaccccatggaaacatgatgtatactgcgcctgggcatcatgggtacatgaacacaggtatgtcgaagcagagccttaacggctcgtacatgaggcggtaa

SEQ ID NO: 90683 - DNA, 5345 bp, Artificial Sequence
  derived and/or modified sequence
atggttaaacttgctaatccactctatacagagtggatactggaagctatccaaaagattaagaaacagaagcaaaggcccagtgaagagaggatttgccacgctgtgagcaccagccatggtttggataagaaaacagtgagcgagcagctcgagttgagtgtgcaggacgggagtgtgctgaaagtcacaaataaaggacttgcttcgtataaggaccctgataaccctggcaggttttctagcgtcaaacctgggactttccccaagagcgccaagggatcacgagggtcctgtaatgaccttcggaatgtcgattggaacaagttactcaggagggccattgaaggtctggaagagcctaatggctcctctttgaaaaatatagaaaagtacctgcgttcacagtctgacctgacaagcaccaccaacaaccctgcattccaacagcggctgcgtctgggcgctaaaagagctgtgaacaatggcaggctgctcaaggacggcccacagtaccgcgttaattatggttccctggacggtaagggtgcgccacagtatccgtccgcctttcccagcagtctgccccctgtgtctctactcccccacgaaaaagaccaacccagggcggaccctatacccatttgctcattctgccttggtacaaaagagtccaaccgcgagaaaaagcctgaagaactcctttcatgtgctgactgtgggagtagcggccatccatcttgtttgaaattctgtcccgagttgacgaccaatgtgaaagcactgcgctggcaatgcattgagtgcaagacctgttcagcctgcagagtgcagggtagaaacgccgacaacatgctgttttgtgatagttgcgatagaggtttccatatggaatgttgcgatcccccattgtcaaggatgccaaagggcatgtggatatgtcaggtgtgccggccaaagaagaagggacggaaacttctgcacgaaaaagccgcacagattaaaaggagatatgccaagcccatcggtcgtccgaaaaataaactcaagcagcgtctgctatctgtgacatctgacgagggctcgatgaatgcatttaccggaaggggctcaccagataccgagattaagatcaacatcaagcaggagagcgcggacgtaaacgtgatcgggaataaagacgtggtcacagaggaggacctggatgtgtttaagcaagctcaagagttatcttgggagaagattgaatgcgaatcaggggtggaagactgtgggcgatacccaagtgttatagagttcggtaaatacgagatccaaacatggtacagttctccttacccgcaggagtacgctcgtctccccaaactttatttgtgtgaattctgtctaaagtatatgaagtctaagaatattttgctgaggcacagcaaaaagtgcggctggtttcaccctcccgcaaatgaaatctaccgaaggaaagacctgagcgtcttcgaagttgatgggaatatgagcaaaatttactgccagaatctttgtctgttggccaaactgttccttgaccataagacattatattacgacgttgaacccttcctcttctacgtgttgacaaagaacgacgagaaagggtgtcaccttgtgggctatttctctaaggagaagctctgtcagcagaagtacaatgtgagctgcattatgataatgcctcagcaccagagacaggggtttgggcgttttctgatagatttttcctacctcctgtcacgccgtgaggggcaggctggatcacccgagaagcccctgtccgacctcgggaggctgtcctaccttgcttactggaaatctgtgatcctggagtacctttatcaccaccacgaaagacacatcagcattaaagcaatctccagggcaaccggcatgtgccctcatgatattgccaccaccctccagcacctccatatgattgacaaaagggatggacgatttgtcattatccgcagggaaaagcttatcctgtcacacatggaaaagctgaagacatgttcgcgcgctaatgagctagacccagacagcctccgctggacacccattcttatctcaaacgctgccgtctctgaagaggagcgggaggccgagaaagaggccgaaaggctcatggaacaggcctcctgttgggagaaggaggaacaggagatactgagcacacgggctaattctcgacagtcacccgctaaggtgcagagtaagaataagtatctgcattcacctgaatcacgccctgtcaccggcgagagaggtcaactccttgagctgtccaaagagtctagcgaagaggaggaagaggaggaggacgaagaggaagaggaagaggaggaagaggaagaagaagatgaagaagaggaagaagaagaagaagaggaagaagaagaggagaacattcagagcagtccccctcgcttgaccaaaccccagtctgtcgccattaaacgcaaacgtccttttgtgcttaagaaaaagagaggcagaaagagacggcgtatcaattcaagcgtgacaaccgaaactataagcgaaacgaccgaagttctgaatgaaccttttgataatagcgatgaggaaagaccaatgccccaactcgagccaacctgcgagattgaagttgaagaggatggtcgtaagcccgtgcttcgcaaggcttttcagcatcagcccggaaaaaagcggcaaaccgaagaggaggaagggaaggataatcactgctttaaaaatgctgatccctgcagaaacaatatgaatgacgactcttcaaatctaaaagaaggcagcaaggataaccctgaacctctcaaatgtaagcaggtgtggcccaaagggaccaaacgcggtcttagtaagtggagacagaataaagaacgcaagactggtttcaagctgaatctgtataccccccctgaaacacctatggaaccagatgaacaagtgacggtcgaggaacagaaagagacttcagaggggaagactagcccttcgcctattagaattgaggaagaagtgaaagagactggtgaagccctgttaccccaggaggagaacaggcgggaagagacttgcgctcccgtgtctcccaatacttctcctggagaaaaacctgaggacgacctcataaaaccggaggaggaggaggaagaggaggaagaagaagaagaggaggaagaggaagaagaaggtgaagaggaagaagggggaggcaatgtggaaaaggatcctgacggtgctaaaagccaggaaaaggaggagcctgagattagcacagaaaaagaagactccgcacggctggacgaccacgaagaggaggaggaggaggatgaggagccaagccacaacgaggatcatgatgcggatgacgaagacgattcacacatggaatctgctgaggtagaaaaggaggaactgcctcgcgagtcgtttaaggaagtgcttgaaaatcaggagacttttctggatctgaatgtccaaccagggcattctaaccccgaagtgttgatggattgtggggtggacctaacagcaagttgcaacagtgagcccaaggagttggcaggagatcctgaggccgtccctgagtccgacgaggaacccccacccggtgaacaggcccagaagcaggatcaaaagaacagtaaagaagttgataccgagtttaaggaaggcaatccagccaccatggaaatagactctgaaacagtgcaggctgtccagtcattgacccaagagagctccgagcaggatgatacgttccaagactgtgccgagacccaggaagcatgccggtccctgcagaattatacaagggccgaccaaagtccacagatcgccaccacactagacgattgccagcagagcgaccactcctcaccggtctcatctgtgcacagccaccctgggcaaagtgtgcgctcagtcaattccccaagtgtccctgctttggagaatagttacgcccagatcagccctgaccaatctgccatctccgtgccaagcttgcagaatatggaaacgtctcctatgatggacgtgccttcggttagtgatcactctcagcaggtcgtggatagcggtttcagcgacctaggctccattgagtccacaacagagaattatgagaacccatcctcctatgatagcactatgggtgggtccatctgcggaaacggatcctcacaaaattcttgttcctattctaatctgacatctagctccttgacacagtcttcctgtgcagttacgcagcagatgtcaaatatatccggttcttgtagcatgcttcagcagacctccataagctcgccccctacctgctccgtgaagtccccccaggggtgcgttgtggagcgtccacccagttcatctcagcagctggcacaatgcagcatggccgctaacttcacacccccaatgcagctggccgaaattcctgaaactagcaatgccaacatcgggctgtatgagcgaatgggtcaatccgactttggagccggacactacccccagccatccgctaccttctccctggcaaaactccagcagctcacaaatactctcatagatcattctttaccttattctcatagcgcagctgtgactagttacgctaattctgctagtctctccacgccactcagcaatacagggctggtccagctctctcagagcccacacagcgtgcctggtgggcctcaagcccaggccactatgacaccgccacccaacctcacacctcctcctatgaacctccctccccctctgctacaaagaaatatggctgcaagtaacattgggataagccattcacagcgactgcagacgcagatagcaagtaaaggccatataagtatgagaactaagagcgctagtctgtcccccgcagcagctacacaccagagtcagatttacggaagatctcagacggtcgccatgcaaggccctgcaagaaccctcaccatgcagcggggaatgaacatgtctgtgaatctcatgcccgcacccgcatacaacgttaattcagtgaacatgaatatgaatacactgaatgctatgaatggctattcaatgtcccagcccatgatgaacagcgggtatcactccaatcatggctatatgaatcagacaccccagtacccgatgcagatgcaaatgggaatgatgggaacccagccttatgcacagcagccaatgcagaccccacctcatggcaatatgatgtatacagccccaggccaccatggctacatgaacaccggcatgtccaagcagagtttgaacggctcatatatgcggaggta

SEQ ID NO: 90684 - DNA, 5345 bp, Artificial Sequence
  derived and/or modified sequence
atggtgaagctcgccaaccccttgtatacagaatggatcctcgaagcaatccagaagatcaagaagcagaaacagcgaccttctgaagagagaatctgtcatgctgttagcaccagtcatgggctagacaagaagaccgtcagtgaacagctggagctgtctgtccaagacggttcagtactcaaagtcactaacaaggggctggcgagttataaggatcccgacaaccctggtcggttttccagtgtgaaacctggcacgttcccaaagtcagccaaggggtctaggggctcctgcaacgatctgaggaatgtcgactggaataaactgctcagaagagccattgaaggcttggaggaaccgaacggatccagtctcaagaatattgagaaatatctcagatcccagagcgatctgacgtctactactaacaatccggcatttcagcagagactgcggctcggagctaaacgcgcagtgaacaatggccgactactgaaggatgggccacaataccgcgttaattacgggtcactggacggaaaaggggctccccagtatccatccgccttcccctcatcgttgcctccagtcagtctgctaccccacgagaaggatcagcccagggcagatcctatccccatttgcagtttttgccttgggactaaagagtcgaatcgggagaagaaacctgaggagctgctgtcatgcgccgactgcgggagttctggacacccctcttgcctgaagttttgcccagaactgactactaatgtcaaggcccttaggtggcagtgcattgagtgtaaaacctgtagtgcctgcagggtgcaagggagaaacgctgacaatatgttattctgtgattcgtgtgatcgaggttttcacatggagtgctgtgatccgcctttgtccagaatgccaaagggcatgtggatctgccaggtctgccgtcccaagaaaaaaggcaggaaactgctccacgagaaggccgctcagataaaacggagatatgccaagcccatcggtcggccaaaaaacaagctgaaacagaggctgctgagtgtgactagcgatgaaggttccatgaacgcatttacaggaagggggtcccccgataccgagataaagattaatattaagcaggagtcggctgatgtgaatgtgataggcaataaggacgtcgtgacggaagaagatctggatgtgttcaaacaggctcaagaactatcatgggagaaaattgagtgcgagagcggggtggaggactgtgggagatacccaagtgttatcgagtttggtaagtatgagattcagacctggtactctagtccctaccctcaggagtacgcccgtttaccgaagctttacctgtgcgaattctgtctgaaatatatgaagtctaaaaacattctgctccgccacagcaaaaagtgtggctggtttcatccacccgctaatgagatctatcgtagaaaggacctgtccgtgtttgaggttgacggcaacatgtcaaagatctattgccagaatctttgtttgttggcaaagctgttccttgatcacaaaaccttgtactacgacgtggaaccttttcttttctacgtcttgacgaaaaacgacgagaaggggtgtcatctggttggatatttctccaaggaaaagctctgccagcagaaatacaacgtgtcatgtattatgattatgcctcagcaccagaggcaggggtttgggagatttctgatcgatttttcctacctactcagcagacgcgagggccaggccggatccccagagaaaccgctgagtgacttaggccgactgtcatacttagcgtactggaagagcgtgatacttgagtatttgtaccaccaccatgaacgacacatctcgattaaagcaatttctcgagcaacgggcatgtgtccacatgacatcgccaccacattacagcacctccatatgatcgataagagagacggcaggtttgtcataatccgccgtgagaagctcattctcagccacatggagaagttgaagacttgcagtagagcgaatgagctcgatccagactcgctcagatggacccctattcttatttccaacgctgcagttagcgaggaggaaagggaagctgagaaggaggcggaaaggctgatggaacaggcttcatgctgggaaaaagaggagcaggaaatcttaagtactcgagctaatagtcgtcagagtcctgctaaggtccaatccaagaacaagtacctccactcacccgaaagcagacccgttacaggggagagggggcagctgctcgagctatccaaggagagtagcgaagaggaagaagaggaggaggatgaagaggaggaagaggaagaggaggaagaggaggaagatgaagaagaagaagaggaggaagaagaagaggaggaagaggagaacattcagagctcgccaccaaggctaacgaaaccccagagtgtcgccattaaacgcaagcgtcctttcgtgctgaagaagaagcgaggacggaagcgaaggcggataaattcatcggtgaccaccgaaaccatcagcgagacaacagaggtgttgaatgagccatttgataatagcgatgaagagaggccaatgccccagcttgaacctacgtgcgaaatcgaggtggaggaggacggtagaaagcccgtgctccgcaaggcgtttcagcaccagcccggtaaaaaacgccagacagaggaagaagaagggaaagacaaccactgtttcaaaaacgccgatccttgccggaataatatgaatgatgacagcagcaacctgaaagaggggagcaaagacaaccctgagcctctcaagtgtaagcaggtgtggccaaaaggcacaaaacgcggactctccaagtggcgccagaataaagaaaggaagacaggattcaagctgaatctgtacaccccacccgagaccccgatggagcctgacgaacaagtcacagtggaagagcaaaaagaaacatccgaaggtaagacatcaccttccccgattcggatcgaggaggaggtcaaggagaccggggaggcccttctgccccaggaagaaaataggagagaagaaacctgcgcacccgtctcgcctaatactagtcctggcgaaaagcctgaagatgacctgataaaaccagaggaggaggaagaagaagaggaggaggaggaagaagaagaggaggaagaggaaggagaggaggaagagggcggtggcaatgtcgaaaaagaccctgacggagctaagtctcaggagaaggaggaaccggagattagtaccgagaaggaggatagtgcgcgtcttgatgatcacgaggaggaggaggaggaggacgaagagccatcacacaatgaggaccatgacgccgatgacgaagacgatagtcatatggagtctgcggaggtcgaaaaggaggagctgcccagggagtctttcaaggaagttctggagaaccaagagacgttcttggatttgaatgttcagcccggtcattccaatccggaggtgctgatggactgcggggtcgatctgactgcttcctgtaatagcgagcccaaagagctcgctggtgatccggaggcagtcccagagtctgacgaggagccgcctcctggggaacaggcccagaagcaggaccagaaaaactccaaggaagtggatactgaatttaaagaagggaacccagctaccatggaaattgactctgagacagtgcaagccgtgcaaagcctgacgcaggaaagcagcgaacaggatgacacttttcaggattgcgccgagactcaggaggcttgcagatctttgcagaactataccagggcggatcaatctccgcagatcgccacaaccctggacgactgccagcagagcgaccatagctcacctgtgtcctcggtccactcccaccccggacagtctgtaaggtctgtgaacagtccttcagtcccagccctggagaactcttacgcccaaatcagccccgaccaaagcgctatttccgtgccatccctacaaaatatggaaacatctccaatgatggacgtgccgtccgtgtccgaccattctcagcaggttgtggattcaggcttttctgatctgggctccatagaatcaacgaccgagaactatgaaaacccttccagttacgactccactatgggcggtagcatctgcggcaacggtagctcccagaatagctgctcttatagcaacctgactagcagctcactgacccagtctagttgcgctgtgactcagcagatgtcaaatatctcaggctcatgtagcatgctgcaacaaaccagcatatcttcccctcctacatgcagcgtaaagtcgccacagggttgtgttgtggagcgacccccatcttccagccagcagctcgcacagtgcagcatggccgctaactttaccccacccatgcagctcgcagagatacctgagacttccaacgcgaatataggactatacgagcgaatggggcagagtgacttcggggctgggcactatccccagccttctgctaccttttccctggctaaattgcagcagttgacgaacaccttaatagaccacagtctcccttactcccacagcgctgccgtgacaagctatgctaattccgcttcacttagcactccattatctaacactggactagtgcagctcagtcagtctccacattcggtgcccggagggcctcaggcccaggcaaccatgactcctcctcccaatttgactccccctcccatgaacctgcctccacccttgctacaaagaaatatggcggcaagcaatatcggcatctcccacagccagagactgcagacccagattgcctctaaggggcatattagtatgcggactaagtccgcctcactctcaccagcggctgccacacatcagtcacaaatctacggacggtcccagacagtggccatgcagggcccagccagaactctgaccatgcagcgagggatgaatatgagcgtgaacctaatgcccgctccggcatacaatgtgaacagtgttaatatgaacatgaacacgctgaatgcgatgaacggatactctatgtcacagccgatgatgaatagcggttatcacagtaaccatggctatatgaaccagacccctcagtatccaatgcagatgcaaatggggatgatgggcacccagccctacgcccagcagccaatgcagacaccccctcacggcaacatgatgtatacagccccaggacaccatgggtacatgaatacgggcatgtctaaacagtccctgaatgggtcatacatgcggaggta

SEQ ID NO: 90685 - DNA, 5346 bp, Artificial Sequence
  derived and/or modified sequence
atggtgaagctggccaaccccctgtacaccgagtggatcctggaggccatccagaagatcaagaagcagaagcagagacccagcgaggagagaatctgccacgccgtgagcaccagccacggcctggacaagaagaccgtgagcgagcagctggagctgagcgtgcaggacggcagcgtgctgaaggtgaccaacaagggcctggccagctacaaggaccccgacaaccccggcagattcagcagcgtgaagcccggcaccttccccaagagcgccaagggcagcagaggcagctgcaacgacctgagaaacgtggactggaacaagctgctgagaagagccatcgagggcctggaggagcccaacggcagcagcctgaagaacatcgagaagtacctgagaagccagagcgacctgaccagcaccaccaacaaccccgccttccagcagagactgagactgggcgccaagagagccgtgaacaacggcagactgctgaaggacggcccccagtacagagtgaactacggcagcctggacggcaagggcgccccccagtaccccagcgccttccccagcagcctgccccccgtgagcctgctgccccacgagaaggaccagcccagagccgaccccatccccatctgcagcttctgcctgggcaccaaggagagcaacagagagaagaagcccgaggagctgctgagctgcgccgactgcggcagcagcggccaccccagctgcctgaagttctgccccgagctgaccaccaacgtgaaggccctgagatggcagtgcatcgagtgcaagacctgcagcgcctgcagagtgcagggcagaaacgccgacaacatgctgttctgcgacagctgcgacagaggcttccacatggagtgctgcgacccccccctgagcagaatgcccaagggcatgtggatctgccaggtgtgcagacccaagaagaagggcagaaagctgctgcacgagaaggccgcccagatcaagagaagatacgccaagcccatcggcagacccaagaacaagctgaagcagagactgctgagcgtgaccagcgacgagggcagcatgaacgccttcaccggcagaggcagccccgacaccgagatcaagatcaacatcaagcaggagagcgccgacgtgaacgtgatcggcaacaaggacgtggtgaccgaggaggacctggacgtgttcaagcaggcccaggagctgagctgggagaagatcgagtgcgagagcggcgtggaggactgcggcagataccccagcgtgatcgagttcggcaagtacgagatccagacctggtacagcagcccctacccccaggagtacgccagactgcccaagctgtacctgtgcgagttctgcctgaagtacatgaagagcaagaacatcctgctgagacacagcaagaagtgcggctggttccacccccccgccaacgagatctacagaagaaaggacctgagcgtgttcgaggtggacggcaacatgagcaagatctactgccagaacctgtgcctgctggccaagctgttcctggaccacaagaccctgtactacgacgtggagcccttcctgttctacgtgctgaccaagaacgacgagaagggctgccacctggtgggctacttcagcaaggagaagctgtgccagcagaagtacaacgtgagctgcatcatgatcatgccccagcaccagagacagggcttcggcagattcctgatcgacttcagctacctgctgagcagaagagagggccaggccggcagccccgagaagcccctgagcgacctgggcagactgagctacctggcctactggaagagcgtgatcctggagtacctgtaccaccaccacgagagacacatcagcatcaaggccatcagcagagccaccggcatgtgcccccacgacatcgccaccaccctgcagcacctgcacatgatcgacaagagagacggcagattcgtgatcatcagaagagagaagctgatcctgagccacatggagaagctgaagacctgcagcagagccaacgagctggaccccgacagcctgagatggacccccatcctgatcagcaacgccgccgtgagcgaggaggagagagaggccgagaaggaggccgagagactgatggagcaggccagctgctgggagaaggaggagcaggagatcctgagcaccagagccaacagcagacagagccccgccaaggtgcagagcaagaacaagtacctgcacagccccgagagcagacccgtgaccggcgagagaggccagctgctggagctgagcaaggagagcagcgaggaggaggaggaggaggaggacgaggaggaggaggaggaggaggaggaggaggaggaggacgaggaggaggaggaggaggaggaggaggaggaggaggaggagaacatccagagcagcccccccagactgaccaagccccagagcgtggccatcaagagaaagagacccttcgtgctgaagaagaagagaggcagaaagagaagaagaatcaacagcagcgtgaccaccgagaccatcagcgagaccaccgaggtgctgaacgagcccttcgacaacagcgacgaggagagacccatgccccagctggagcccacctgcgagatcgaggtggaggaggacggcagaaagcccgtgctgagaaaggccttccagcaccagcccggcaagaagagacagaccgaggaggaggagggcaaggacaaccactgcttcaagaacgccgacccctgcagaaacaacatgaacgacgacagcagcaacctgaaggagggcagcaaggacaaccccgagcccctgaagtgcaagcaggtgtggcccaagggcaccaagagaggcctgagcaagtggagacagaacaaggagagaaagaccggcttcaagctgaacctgtacaccccccccgagacccccatggagcccgacgagcaggtgaccgtggaggagcagaaggagaccagcgagggcaagaccagccccagccccatcagaatcgaggaggaggtgaaggagaccggcgaggccctgctgccccaggaggagaacagaagagaggagacctgcgcccccgtgagccccaacaccagccccggcgagaagcccgaggacgacctgatcaagcccgaggaggaggaggaggaggaggaggaggaggaggaggaggaggaggaggaggagggcgaggaggaggagggcggcggcaacgtggagaaggaccccgacggcgccaagagccaggagaaggaggagcccgagatcagcaccgagaaggaggacagcgccagactggacgaccacgaggaggaggaggaggaggacgaggagcccagccacaacgaggaccacgacgccgacgacgaggacgacagccacatggagagcgccgaggtggagaaggaggagctgcccagagagagcttcaaggaggtgctggagaaccaggagaccttcctggacctgaacgtgcagcccggccacagcaaccccgaggtgctgatggactgcggcgtggacctgaccgccagctgcaacagcgagcccaaggagctggccggcgaccccgaggccgtgcccgagagcgacgaggagcccccccccggcgagcaggcccagaagcaggaccagaagaacagcaaggaggtggacaccgagttcaaggagggcaaccccgccaccatggagatcgacagcgagaccgtgcaggccgtgcagagcctgacccaggagagcagcgagcaggacgacaccttccaggactgcgccgagacccaggaggcctgcagaagcctgcagaactacaccagagccgaccagagcccccagatcgccaccaccctggacgactgccagcagagcgaccacagcagccccgtgagcagcgtgcacagccaccccggccagagcgtgagaagcgtgaacagccccagcgtgcccgccctggagaacagctacgcccagatcagccccgaccagagcgccatcagcgtgcccagcctgcagaacatggagaccagccccatgatggacgtgcccagcgtgagcgaccacagccagcaggtggtggacagcggcttcagcgacctgggcagcatcgagagcaccaccgagaactacgagaaccccagcagctacgacagcaccatgggcggcagcatctgcggcaacggcagcagccagaacagctgcagctacagcaacctgaccagcagcagcctgacccagagcagctgcgccgtgacccagcagatgagcaacatcagcggcagctgcagcatgctgcagcagaccagcatcagcagcccccccacctgcagcgtgaagagcccccagggctgcgtggtggagagaccccccagcagcagccagcagctggcccagtgcagcatggccgccaacttcaccccccccatgcagctggccgagatccccgagaccagcaacgccaacatcggcctgtacgagagaatgggccagagcgacttcggcgccggccactacccccagcccagcgccaccttcagcctggccaagctgcagcagctgaccaacaccctgatcgaccacagcctgccctacagccacagcgccgccgtgaccagctacgccaacagcgccagcctgagcacccccctgagcaacaccggcctggtgcagctgagccagagcccccacagcgtgcccggcggcccccaggcccaggccaccatgacccccccccccaacctgacccccccccccatgaacctgcccccccccctgctgcagagaaacatggccgccagcaacatcggcatcagccacagccagagactgcagacccagatcgccagcaagggccacatcagcatgagaaccaagagcgccagcctgagccccgccgccgccacccaccagagccagatctacggcagaagccagaccgtggccatgcagggccccgccagaaccctgaccatgcagagaggcatgaacatgagcgtgaacctgatgcccgcccccgcctacaacgtgaacagcgtgaacatgaacatgaacaccctgaacgccatgaacggctacagcatgagccagcccatgatgaacagcggctaccacagcaaccacggctacatgaaccagaccccccagtaccccatgcagatgcagatgggcatgatgggcacccagccctacgcccagcagcccatgcagacccccccccacggcaacatgatgtacaccgcccccggccaccacggctacatgaacaccggcatgagcaagcagagcctgaacggcagctacatgagaagatag

SEQ ID NO: 90686 - protein, 1282 aa, Artificial Sequence
  derived and/or modified sequence
MAADLNLEWISLPRSWTYGITRGGRVFFINEEAKSTTWLHPVTGEAVVTGHRRQSTDLPTGWEEAYTFEGARYYINHNERKVTCKHPVTGQPSQDNCIFVVNEQTVATMTSEEKKERPISMINEASNYNVTSDYAVHPMSPVGRTSRASKKVHNFGKRSNSIKRNPNAPVVRRGWLYKQDSTGMKLWKKRWFVLSDLCLFYYRDEKEEGILGSILLPSFQIALLTSEDHINRKYAFKAAHPNMRTYYFCTDTGKEMELWMKAMLDAALVQTEPVKRITFNFRVDKITSENAPTKETNNIPNHRVLIKPEIQNNQKNKEMSKIEEKKALEAEKYGFQKDGQDRPLTKINSVKLNSLPSEYESGSACPAQTVHYRPINLSSSENKIVNVSLADLRGGNRPNTGPLYTEADRVIQRTNSMQQLEQWIKIQKGRGHEEETRGVISYQTLPRNMPSHRAQIMARYPEGYRTLPRNSKTRPESICSVTPSTHDKTLGPGAEEKRRSMRDDTMWQLYEWQQRQFYNKQSTLPRHSTLSSPKTMVNISDQTMHSIPTSPSHGSIAAYQGYSPQRTYRSEVSSPIQRGDVTIDRRHRAHHPKHVYVPDRRSVPAGLTLQSVSPQSLQGKTPEELTLLLIKLRRQQAELSSIREHTLAQLMQLKLEAHSPKNEILSHHLQRNTIYLDHQMKENEPIITMVHTMIENSALRPQLYQQFLRQKSKISLYCLSQDEGRGTLYKYRPEEVDIDAKLSRLCEQDKVVHALEEKLQQLHKEKYTLEQALLSASQEIEMHADNPAAIQTVVLQRDDLQNGLLSTCRELSRATAELERAWREYDKLEYDVTVTRNQMQEQLDHLGEVQTESAGIQRAQIQKELWRIQDVMEGLSKHKQQRGTTEIGMIGSKPFSTVKYKNEEEEVVPPRPPLPRSYDFTEQPPIIPPLPSDSSSLLCYSRGPVHLPEEKKMYQVQGYPRNGSHCGPDYRLYKSEPELTTVAEVDESNGEEKSEPVSEIETSVVKGSHFPVGVVPPRAKSPTPESSTIASYVTLRKTKKMMDLRTERPRSAVEQLCLAESTRPRMTVEEQMERIRRHQQACLREKKKGLNVIGASDQSPLQSPSNLRDNPFRTTQTRRRDDKELDTAIRENDVKPDHETPATEIVQLKETEPQNVDFSKELKKTENISYEMLFEPEPNGVNSVEMMDKERNKDKMPEDVTFSPQDETQTANHKPEEHPEENTKNSVDEQEETVISYESTPEVSRGNQTMAVKSLSPSPESSASPVPSTQPQLTEGSHFMCV

SEQ ID NO: 90687 - protein, 1184 aa, Artificial Sequence
  derived and/or modified sequence
MAADLNLEWISLPRSWTYGITRGGRVFFINEEAKSTTWLHPVTGEAVVTGHRRQSTDLPTGWEEAYTFEGARYYINHNERKVTCKHPVTGQPSQDNCIFVVNEQTVATMTSEEKKERPISMINEASNYNVTSDYAVHPMSPVGRTSRASKKVHNFGKRSNSIKRNPNAPVVRRGWLYKQDSTGMKLWKKRWFVLSDLCLFYYRDEKEEGILGSILLPSFQIALLTSEDHINRKYAFKAAHPNMRTYYFCTDTGKEMELWMKAMLDAALVQTEPVKRIFFSDFRVDKITSENAPTKETNNIPNHRVLIKPEIQNNQKNKEMSKIEEKKALEAEKYGFQKDGQDRPLTKINSVKLNSLPSEYESGSACPAQTVHYRPINLSSSENKIVNVSLADLRGGNRPNTGPLYTEADRVIQRTNSMQQLEQWIKIQKGRGHEEETRGVISYQTLPRNMPSHRAQIMARYPEGYRTLPRNSKTRPESICSVTPSTHDKTLGPGAEEKRRSMRDDTMWQLYEWQQRQFYNKQSTLPRHSTLSSPKTMVNISDQTMHSIPTSPSHGSIAAYQGYSPQRTYRSEVSSPIQRGDVTIDRRHRAHHPKHVYVPDRRSVPAGLTLQSVSPQSLQGKTPEELTLLLIKLRRQQAELSSIREHTLAQLMQLKLEAHSPKNEILSHHLQRNTIYLDHQMKENEPIITMVHTMIENSALRPQLYQQFLRQKSKISLYCLSQDEGRGTLYKYRPEEVDIDAKLSRLCEQDKVVHALEEKLQQLHKEKYTLEQALLSASQEIEMHADNPAAIQTVVLQRDDLQNGLLSTCRELSRATAELERAWREYDKLEYDVTVTRNQMQEQLDHLGEVQTESAGIQRAQIQKELWRIQDVMEGLSKHKQQRGMIGSKPFSTVKYKNEEEEVVPPRPPLPRSYDFTEQPPIIPPLPSDSSSLLCYSRGPVHLPEEKKMYQVQGYPRNGSHCGPDYRLYKSEPELTTVAEVDESNGEEKSEPVSEIETSVVKGSHFPVGVVPPRAKSPTPESSTIASYVTLRKTKKMMDLRTERPRSAVEQLCLAESTRPRMTVEEQMERIRRHQQACLREKKKGLNVIGASDQSPLQSPSNLRDNPFRTTQTRRRDDKELDTAIRENDVKPDHETPATEIVQLKETEPQNVDFSKELKKTENISYEMLFEPEPNGVNSVEMMD

SEQ ID NO: 90688 - DNA, 3849 bp, Artificial Sequence
  derived and/or modified sequence
atggccgccgacctgaacctggagtggatcagcctgcccagaagctggacctacggcatcaccagaggcggcagagtgttcttcatcaacgaggaggccaagagcaccacctggctgcaccccgtgaccggcgaggccgtggtgaccggccacagaagacagagcaccgacctgcccaccggctgggaggaggcctacaccttcgagggcgccagatactacatcaaccacaacgagagaaaggtgacctgcaagcaccccgtgaccggccagcccagccaggacaactgcatcttcgtggtgaacgagcagaccgtggccaccatgaccagcgaggagaagaaggagagacccatcagcatgatcaacgaggccagcaactacaacgtgaccagcgactacgccgtgcaccccatgagccccgtgggcagaaccagcagagccagcaagaaggtgcacaacttcggcaagagaagcaacagcatcaagagaaaccccaacgcccccgtggtgagaagaggctggctgtacaagcaggacagcaccggcatgaagctgtggaagaagagatggttcgtgctgagcgacctgtgcctgttctactacagagacgagaaggaggagggcatcctgggcagcatcctgctgcccagcttccagatcgccctgctgaccagcgaggaccacatcaacagaaagtacgccttcaaggccgcccaccccaacatgagaacctactacttctgcaccgacaccggcaaggagatggagctgtggatgaaggccatgctggacgccgccctggtgcagaccgagcccgtgaagagaatcaccttcaacttcagagtggacaagatcaccagcgagaacgcccccaccaaggagaccaacaacatccccaaccacagagtgctgatcaagcccgagatccagaacaaccagaagaacaaggagatgagcaagatcgaggagaagaaggccctggaggccgagaagtacggcttccagaaggacggccaggacagacccctgaccaagatcaacagcgtgaagctgaacagcctgcccagcgagtacgagagcggcagcgcctgccccgcccagaccgtgcactacagacccatcaacctgagcagcagcgagaacaagatcgtgaacgtgagcctggccgacctgagaggcggcaacagacccaacaccggccccctgtacaccgaggccgacagagtgatccagagaaccaacagcatgcagcagctggagcagtggatcaagatccagaagggcagaggccacgaggaggagaccagaggcgtgatcagctaccagaccctgcccagaaacatgcccagccacagagcccagatcatggccagataccccgagggctacagaaccctgcccagaaacagcaagaccagacccgagagcatctgcagcgtgacccccagcacccacgacaagaccctgggccccggcgccgaggagaagagaagaagcatgagagacgacaccatgtggcagctgtacgagtggcagcagagacagttctacaacaagcagagcaccctgcccagacacagcaccctgagcagccccaagaccatggtgaacatcagcgaccagaccatgcacagcatccccaccagccccagccacggcagcatcgccgcctaccagggctacagcccccagagaacctacagaagcgaggtgagcagccccatccagagaggcgacgtgaccatcgacagaagacacagagcccaccaccccaagcacgtgtacgtgcccgacagaagaagcgtgcccgccggcctgaccctgcagagcgtgagcccccagagcctgcagggcaagacccccgaggagctgaccctgctgctgatcaagctgagaagacagcaggccgagctgagcagcatcagagagcacaccctggcccagctgatgcagctgaagctggaggcccacagccccaagaacgagatcctgagccaccacctgcagagaaacaccatctacctggaccaccagatgaaggagaacgagcccatcatcaccatggtgcacaccatgatcgagaacagcgccctgagaccccagctgtaccagcagttcctgagacagaagagcaagatcagcctgtactgcctgagccaggacgagggcagaggcaccctgtacaagtacagacccgaggaggtggacatcgacgccaagctgagcagactgtgcgagcaggacaaggtggtgcacgccctggaggagaagctgcagcagctgcacaaggagaagtacaccctggagcaggccctgctgagcgccagccaggagatcgagatgcacgccgacaaccccgccgccatccagaccgtggtgctgcagagagacgacctgcagaacggcctgctgagcacctgcagagagctgagcagagccaccgccgagctggagagagcctggagagagtacgacaagctggagtacgacgtgaccgtgaccagaaaccagatgcaggagcagctggaccacctgggcgaggtgcagaccgagagcgccggcatccagagagcccagatccagaaggagctgtggagaatccaggacgtgatggagggcctgagcaagcacaagcagcagagaggcaccaccgagatcggcatgatcggcagcaagcccttcagcaccgtgaagtacaagaacgaggaggaggaggtggtgccccccagaccccccctgcccagaagctacgacttcaccgagcagccccccatcatcccccccctgcccagcgacagcagcagcctgctgtgctacagcagaggccccgtgcacctgcccgaggagaagaagatgtaccaggtgcagggctaccccagaaacggcagccactgcggccccgactacagactgtacaagagcgagcccgagctgaccaccgtggccgaggtggacgagagcaacggcgaggagaagagcgagcccgtgagcgagatcgagaccagcgtggtgaagggcagccacttccccgtgggcgtggtgccccccagagccaagagccccacccccgagagcagcaccatcgccagctacgtgaccctgagaaagaccaagaagatgatggacctgagaaccgagagacccagaagcgccgtggagcagctgtgcctggccgagagcaccagacccagaatgaccgtggaggagcagatggagagaatcagaagacaccagcaggcctgcctgagagagaagaagaagggcctgaacgtgatcggcgccagcgaccagagccccctgcagagccccagcaacctgagagacaaccccttcagaaccacccagaccagaagaagagacgacaaggagctggacaccgccatcagagagaacgacgtgaagcccgaccacgagacccccgccaccgagatcgtgcagctgaaggagaccgagccccagaacgtggacttcagcaaggagctgaagaagaccgagaacatcagctacgagatgctgttcgagcccgagcccaacggcgtgaacagcgtggagatgatggacaaggagagaaacaaggacaagatgcccgaggacgtgaccttcagcccccaggacgagacccagaccgccaaccacaagcccgaggagcaccccgaggagaacaccaagaacagcgtggacgagcaggaggagaccgtgatcagctacgagagcacccccgaggtgagcagaggcaaccagaccatggccgtgaagagcctgagccccagccccgagagcagcgccagccccgtgcccagcacccagccccagctgaccgagggcagccacttcatgtgcgtgtag

SEQ ID NO: 90689 - DNA, 3555 bp, Artificial Sequence
  derived and/or modified sequence
atggccgccgacctgaacctggagtggatcagcctgcccagaagctggacctacggcatcaccagaggcggcagagtgttcttcatcaacgaggaggccaagagcaccacctggctgcaccccgtgaccggcgaggccgtggtgaccggccacagaagacagagcaccgacctgcccaccggctgggaggaggcctacaccttcgagggcgccagatactacatcaaccacaacgagagaaaggtgacctgcaagcaccccgtgaccggccagcccagccaggacaactgcatcttcgtggtgaacgagcagaccgtggccaccatgaccagcgaggagaagaaggagagacccatcagcatgatcaacgaggccagcaactacaacgtgaccagcgactacgccgtgcaccccatgagccccgtgggcagaaccagcagagccagcaagaaggtgcacaacttcggcaagagaagcaacagcatcaagagaaaccccaacgcccccgtggtgagaagaggctggctgtacaagcaggacagcaccggcatgaagctgtggaagaagagatggttcgtgctgagcgacctgtgcctgttctactacagagacgagaaggaggagggcatcctgggcagcatcctgctgcccagcttccagatcgccctgctgaccagcgaggaccacatcaacagaaagtacgccttcaaggccgcccaccccaacatgagaacctactacttctgcaccgacaccggcaaggagatggagctgtggatgaaggccatgctggacgccgccctggtgcagaccgagcccgtgaagagaatcttcttcagcgacttcagagtggacaagatcaccagcgagaacgcccccaccaaggagaccaacaacatccccaaccacagagtgctgatcaagcccgagatccagaacaaccagaagaacaaggagatgagcaagatcgaggagaagaaggccctggaggccgagaagtacggcttccagaaggacggccaggacagacccctgaccaagatcaacagcgtgaagctgaacagcctgcccagcgagtacgagagcggcagcgcctgccccgcccagaccgtgcactacagacccatcaacctgagcagcagcgagaacaagatcgtgaacgtgagcctggccgacctgagaggcggcaacagacccaacaccggccccctgtacaccgaggccgacagagtgatccagagaaccaacagcatgcagcagctggagcagtggatcaagatccagaagggcagaggccacgaggaggagaccagaggcgtgatcagctaccagaccctgcccagaaacatgcccagccacagagcccagatcatggccagataccccgagggctacagaaccctgcccagaaacagcaagaccagacccgagagcatctgcagcgtgacccccagcacccacgacaagaccctgggccccggcgccgaggagaagagaagaagcatgagagacgacaccatgtggcagctgtacgagtggcagcagagacagttctacaacaagcagagcaccctgcccagacacagcaccctgagcagccccaagaccatggtgaacatcagcgaccagaccatgcacagcatccccaccagccccagccacggcagcatcgccgcctaccagggctacagcccccagagaacctacagaagcgaggtgagcagccccatccagagaggcgacgtgaccatcgacagaagacacagagcccaccaccccaagcacgtgtacgtgcccgacagaagaagcgtgcccgccggcctgaccctgcagagcgtgagcccccagagcctgcagggcaagacccccgaggagctgaccctgctgctgatcaagctgagaagacagcaggccgagctgagcagcatcagagagcacaccctggcccagctgatgcagctgaagctggaggcccacagccccaagaacgagatcctgagccaccacctgcagagaaacaccatctacctggaccaccagatgaaggagaacgagcccatcatcaccatggtgcacaccatgatcgagaacagcgccctgagaccccagctgtaccagcagttcctgagacagaagagcaagatcagcctgtactgcctgagccaggacgagggcagaggcaccctgtacaagtacagacccgaggaggtggacatcgacgccaagctgagcagactgtgcgagcaggacaaggtggtgcacgccctggaggagaagctgcagcagctgcacaaggagaagtacaccctggagcaggccctgctgagcgccagccaggagatcgagatgcacgccgacaaccccgccgccatccagaccgtggtgctgcagagagacgacctgcagaacggcctgctgagcacctgcagagagctgagcagagccaccgccgagctggagagagcctggagagagtacgacaagctggagtacgacgtgaccgtgaccagaaaccagatgcaggagcagctggaccacctgggcgaggtgcagaccgagagcgccggcatccagagagcccagatccagaaggagctgtggagaatccaggacgtgatggagggcctgagcaagcacaagcagcagagaggcatgatcggcagcaagcccttcagcaccgtgaagtacaagaacgaggaggaggaggtggtgccccccagaccccccctgcccagaagctacgacttcaccgagcagccccccatcatcccccccctgcccagcgacagcagcagcctgctgtgctacagcagaggccccgtgcacctgcccgaggagaagaagatgtaccaggtgcagggctaccccagaaacggcagccactgcggccccgactacagactgtacaagagcgagcccgagctgaccaccgtggccgaggtggacgagagcaacggcgaggagaagagcgagcccgtgagcgagatcgagaccagcgtggtgaagggcagccacttccccgtgggcgtggtgccccccagagccaagagccccacccccgagagcagcaccatcgccagctacgtgaccctgagaaagaccaagaagatgatggacctgagaaccgagagacccagaagcgccgtggagcagctgtgcctggccgagagcaccagacccagaatgaccgtggaggagcagatggagagaatcagaagacaccagcaggcctgcctgagagagaagaagaagggcctgaacgtgatcggcgccagcgaccagagccccctgcagagccccagcaacctgagagacaaccccttcagaaccacccagaccagaagaagagacgacaaggagctggacaccgccatcagagagaacgacgtgaagcccgaccacgagacccccgccaccgagatcgtgcagctgaaggagaccgagccccagaacgtggacttcagcaaggagctgaagaagaccgagaacatcagctacgagatgctgttcgagcccgagcccaacggcgtgaacagcgtggagatgatggactag

SEQ ID NO: 90690 - DNA, 3849 bp, Artificial Sequence
  derived and/or modified sequence
atggcagccgacctgaatctggagtggattagcctgccccgcagctggacatacggcattacgagaggtggcagggtgttcttcataaacgaagaggccaaaagcacaacatggctgcatccagtcaccggggaagccgtggtcacgggacaccgaagacagagtacagatctccccaccgggtgggaagaggcatacacctttgaaggggctcggtattatatcaatcacaacgagcgtaaggtgacctgtaaacacccagtcacaggacagccgagtcaggacaattgcatctttgtggttaacgagcagaccgttgcgacaatgacttcagaagagaaaaaagagcgcccaatttccatgattaacgaagcatctaactacaatgtgacctccgattacgcggttcacccaatgtctcccgttgggaggacgagccgtgctagcaagaaagttcataattttggaaagcgctctaatagcatcaagcgcaaccccaatgcaccagtggtccggcggggctggctctacaagcaggactccacaggaatgaagctctggaaaaagcggtggttcgttctgagcgatctttgtctgttctattatcgggatgagaaggaagaaggtattctgggatccatcctgcttcccagtttccagatagcactgcttacttcagaagaccacatcaaccgcaaatacgcatttaaagctgcccacccgaatatgaggacctattatttttgtactgatacaggcaaggaaatggagctctggatgaaggccatgctggacgcagctctggtgcagacagaaccggtgaaacgcatcaccttcaactttagggtggacaagatcaccagcgagaatgctcccactaaagagacgaacaacatccctaatcaccgggtgctgatcaaaccggagatccaaaataaccagaaaaataaggagatgtccaaaatcgaggagaagaaagcccttgaggcagagaagtacggattccagaaggacggccaagacaggcctctcactaaaattaacagcgtgaagctgaacagtctgccttctgagtacgagtctggttccgcatgccctgcccagactgtgcactatagaccaatcaaccttagcagcagcgaaaacaagatcgtgaatgtgagcttggccgacctgcgtggcggaaacagacctaataccggcccactctacacagaggctgatcgtgtgatccaacggacaaacagtatgcaacagctggaacaatggatcaaaatccagaagggacggggccacgaagaggaaacaaggggggtgatctcctatcaaacattgcctcgcaacatgccatctcaccgcgctcaaatcatggcacggtatcccgaggggtacagaacattgcctcgcaacagcaaaacaagacctgagtctatctgttccgtgacacccagtacacacgataaaacactggggcctggcgccgaagaaaaacggcgcagcatgcgggatgacacgatgtggcagctgtatgagtggcagcaacgtcagttctataacaagcaatctaccttgccccgccacagtacgctcagtagcccgaaaaccatggtgaatataagcgatcaaacaatgcactcgatccccaccagccccagccacggatcaattgccgcataccaagggtacagcccccagcgcacctacaggtccgaggtgagcagtcctattcagaggggcgacgtcacaatagacagacgtcatcgcgctcatcaccctaaacacgtctacgtacctgacaggagaagtgtcccagccggtcttacactccagagcgtgtcacctcagagcctgcagggaaaaacccctgaggaactgaccctcctgctgattaagctgcggcgtcagcaagcagaactttcaagtatcagggagcataccctggcacaattaatgcagcttaaacttgaagcccacagccctaagaatgaaattctttcacatcatttgcagaggaatacaatttatctcgatcaccagatgaaggagaacgagccaataatcaccatggtgcacaccatgatagaaaatagcgctcttcgtcctcaactttatcagcagttcttgagacagaagagtaagataagcctctactgcctgagccaggatgaagggaggggaactctgtacaaatatcggccagaggaagtcgacatcgatgccaaattgtcacgtttgtgcgagcaggataaagtggtgcacgcgcttgaggaaaagctgcagcaactgcacaaagagaagtacacactggagcaggctcttcttagtgcgtcccaggagattgaaatgcacgccgataacccagccgcgattcagaccgtggtgctccagcgagatgatctgcagaacggcctgctcagtacttgtcgcgaactctcccgggccaccgctgaacttgagagagcatggagggaatacgacaagctggagtacgacgtgactgtcactcgcaaccagatgcaagagcagctagaccaccttggagaggtgcagactgaatccgctggcatccagagggcgcagatccagaaagaactgtggaggatacaggacgtgatggaggggctcagcaagcacaagcaacaacgcgggacaacagaaatcggcatgattgggtcaaagccattttctactgtcaaatataagaacgaagaggaggaggttgtccctcccagacctcctctgccccgatcatacgactttaccgagcaaccaccaataatcccacctctgccatctgacagcagtagtttgctttgctatagtaggggcccggtacacttgccagaagagaaaaagatgtatcaggtccagggttacccaaggaacggttctcactgcggacccgattaccgactctacaagagtgaaccggaactgacaacagtagcagaggtggacgagtctaatggggaggagaaatccgaacccgtttcagagatcgagaccagcgttgttaaagggtcacactttccggtgggagtggtccctcccagggccaagagtcctacacctgaatcatccaccatcgcttcctatgttacacttcgcaagaccaagaaaatgatggatcttcggacagagagaccgcgttcggcggtggagcagctttgcctggctgagtctaccaggccacggatgacagtcgaagagcagatggagcgtatccgtcgccaccagcaggcgtgcctgcgggagaagaaaaagggtctgaacgtgatcggcgcgtccgaccaaagtcctctgcagtccccttcgaatctgcgggataacccttttcggaccacccagacacgccgccgcgatgataaagagctagacaccgcaatacgtgaaaacgacgtcaagcccgaccacgagacgccggctacagagatagttcaattgaaggagacagaaccgcagaacgttgatttctctaaggaattaaaaaagacggagaatatcagctatgaaatgttgttcgagcccgagccaaacggggttaattctgtggagatgatggataaggagcggaacaaggacaaaatgccagaggatgtgacattctccccacaggatgagacacagactgccaaccacaagccggaggagcatcctgaggagaacaccaaaaactcagttgacgaacaagaggaaaccgtgattagctacgaatcgaccccagaggtcagtcgtgggaatcagactatggctgtgaaatctttgtccccctcccccgagagtagtgcctcccctgtaccatctacacaaccacagctgaccgaaggctctcattttatgtgcgtgtag

SEQ ID NO: 90691 - DNA, 3555 bp, Artificial Sequence
  derived and/or modified sequence
atggctgcagacctgaacttggagtggatctctctcccgagaagctggacctatgggatcacacgaggcgggcgggtgttttttatcaatgaggaagcaaagagcacaacgtggttgcaccctgttaccggggaggccgtcgtcaccgggcacaggcggcagagtaccgacctgccaacaggatgggaagaagcctacacctttgaaggtgcaaggtattacattaatcataacgagcgtaaggtaacttgcaaacatcctgtgactggccaaccctcccaggataactgcatcttcgtggttaacgagcaaaccgtggctacaatgacttctgaagagaagaaagagcgccccataagtatgataaacgaagcctctaactataatgtgaccagcgactacgcagtccacccaatgtctccagtcgggcggacgagcagagcatcaaagaaagtgcacaactttggtaaaaggtccaactccatcaaaaggaatcctaatgcaccagtcgttaggagaggctggctgtacaagcaagactccaccggcatgaagctctggaaaaagcgatggttcgtgctcagtgatctttgcctgttctactaccgtgatgaaaaggaggagggcatcctgggctctatcttgctgcccagcttccagatcgcccttctgacgagtgaggatcacattaaccgcaaatacgcatttaaggcagcacatcccaatatgcggacctattacttctgcaccgacaccggtaaagaaatggaactgtggatgaaagcgatgctcgacgcggccctggtccaaacagaacctgtgaagagaatattcttctccgactttcgggtcgataaaatcaccagcgagaatgcccctacaaaagagaccaacaacatccccaatcatcgtgtgctgatcaagcccgaaatccagaacaatcagaagaataaggagatgtctaaaattgaagagaagaaggctttggaggctgaaaagtacggattccagaaggatggacaggaccggcctctgacaaaaataaatagcgtgaagctgaacagtctgcccagtgaatatgaatctggctctgcttgccccgcacaaacagtgcactaccggccgatcaatctgtctagctcagagaataagatagtgaacgtgtcactggccgatctgcgcggtggtaatcgtccaaacaccgggcccctgtacactgaggccgaccgggtgattcagcggactaattccatgcagcaactggaacaatggatcaaaatacagaagggccggggacatgaggaagagacccggggcgttattagttatcaaacattgccccgcaacatgccaagccaccgggcccaaattatggctaggtaccccgagggctacagaaccctacctcggaactccaaaactcgccccgagagcatctgtagcgtcaccccatcaacccatgacaaaacactcgggcctggcgctgaagaaaaacggaggagtatgcgtgacgatactatgtggcagctatatgagtggcaacaacggcagttctacaataagcagagcaccctgccacggcactctacactctctagccccaagacgatggttaacatcagtgaccagaccatgcattccatcccaaccagcccgagtcacggatcaattgccgcctaccagggttactctccccagcggacttacaggagcgaggtttccagccccatccaacgcggtgatgtgacaatcgacagaagacatcgagctcatcaccccaagcacgtctatgtcccggatcgcaggtccgtgcccgctggacttacacttcagtcggtcagtccgcagtcgctgcaggggaagacccccgaagagcttacattactgctaatcaagttgaggcggcagcaagccgaattgtcgagcatccgcgagcacaccctcgcgcaactcatgcaactgaagctggaggcacactccccgaagaacgaaatcctgtcacatcacctgcagaggaacacaatttacctcgaccatcagatgaaagagaacgagcctattatcaccatggtgcacacaatgattgagaacagcgccctccggccccagttgtatcagcagttcttgcggcaaaaatccaagatctcgctgtactgcctgagccaggacgagggtcgcgggaccctttacaagtatcgaccggaggaagtggacattgacgcaaagcttagtagattgtgcgaacaagataaggttgtgcacgcactggaagaaaagctgcaacagttgcacaaggaaaagtacactctcgagcaagctctcctatcagcctcacaggagatcgaaatgcacgctgacaatcccgccgctatccagactgtcgtgctccaacgagacgatcttcaaaatggcctacttagcacctgcagagaactatctagggccactgctgaactggaacgggcctggcgagaatatgataagctggaatacgacgttacagtcacccggaaccaaatgcaggaacagctggaccacctcggcgaagtccagactgagagcgccggaatccagagagcacagatacagaaggagctctggaggatccaggatgtgatggagggactgtccaagcacaaacagcagaggggaatgatcggatccaagcctttcagcactgtgaaatacaagaacgaggaagaagaggtcgtcccaccgaggccccctctccccaggtcttatgacttcactgagcaaccgcccataattcctcctcttccgagtgattcctctagtctgctgtgttacagtagagggcctgtgcatctgcctgaagagaagaagatgtatcaagtccaagggtatccgcgcaatgggtcgcattgcgggccagattataggctgtataagagtgaacccgagctgacaactgttgcagaggtcgatgagtctaacggtgaggaaaagtcagaacccgtttccgaaatcgaaaccagcgttgtgaagggctcacattttcccgtcggggttgtgccacccagggcaaaaagtcctacacctgagtccagtactattgcatcctatgttacactgaggaagactaagaagatgatggatcttcggaccgaacggccccgatccgccgtggaacagctgtgcctcgccgagagcacgcgtccccgaatgaccgtggaggaacagatggaacggatcaggaggcaccagcaggcatgcctccgcgagaaaaaaaaggggttgaacgtaattggtgcctccgatcagtccccgctgcaatcaccttctaatttgcgggacaatcccttcagaaccacccagacccgtcgccgcgacgacaaagagctggatactgcaatcagagaaaatgacgtcaaaccagatcacgaaactcctgcaaccgagatagtgcaactaaaagaaacagagcctcagaacgtcgatttcagtaaagagctcaagaagactgagaacatttcctatgagatgctctttgagccggaaccaaacggcgtgaattcggtagagatgatggattag

SEQ ID NO: 90692 - DNA, 3849 bp, Artificial Sequence
  derived and/or modified sequence
atggctgctgacctgaacctggagtggatcagcctgcccaggtcctggacctacggcatcacccggggcggccgggtcttcttcatcaatgaggaggccaagagcaccacctggctgcaccctgtgactggagaggccgtggtgacaggccaccggcggcagagcacagacctgcccaccggctgggaggaggcctacacctttgagggcgcccgctactacatcaaccacaatgaaaggaaggtgacctgcaagcaccctgtgacaggccagcccagccaggacaactgcatctttgtggtgaatgagcagacagtggccaccatgaccagcgaggagaagaaggagcggcccatctccatgatcaatgaggccagcaactacaacgtgaccagtgactatgctgtgcaccccatgagccctgtgggccgcaccagccgggccagcaagaaggtgcacaactttgggaagaggagcaacagcatcaagaggaaccccaatgcccctgtggtgcggcggggctggctgtacaagcaggacagcacaggcatgaagctgtggaagaagcgctggtttgtgctgagtgacctgtgcctcttctactacagagatgagaaggaggagggcatcctgggcagcatcctgctgcccagcttccagatcgccctgctgaccagcgaggaccacatcaacagaaaatatgccttcaaggccgcccaccccaacatgaggacctactacttctgcacagacaccgggaaggagatggagctgtggatgaaggccatgctggatgctgccctggtgcagacagagcctgtgaagaggatcaccttcaacttccgggtggacaagatcaccagtgaaaatgcccccaccaaggagaccaacaacatccccaaccaccgggtgctgatcaagccagagatccagaacaaccagaagaacaaggagatgagcaagattgaggagaagaaggccctggaggccgagaagtatggcttccagaaggatggccaggaccggcccctgaccaagatcaacagcgtgaagctgaacagcctgcccagtgaatatgaaagtggcagcgcctgcccagcccagacagtgcactaccggcccatcaacctgagcagcagcgagaacaagatcgtgaatgtgtccctggccgacctgcggggcggcaaccggcccaacacaggccccctgtacacagaagctgacagagtcatccagaggaccaacagcatgcagcagctggagcagtggatcaagatccagaagggccggggccacgaggaggagacccggggcgtcatctcctaccagaccctgcccaggaacatgcccagccaccgggcccagatcatggcccgctacccagagggctaccgcaccctgcccaggaacagcaagaccaggcctgagagcatctgcagcgtgacccccagcacccatgacaagaccctgggccctggagctgaggagaagaggaggtccatgagagatgacaccatgtggcagctgtatgagtggcagcagaggcagttctacaacaagcagagcaccctgcccaggcacagcaccctgagcagccccaagaccatggtgaacatcagtgaccagaccatgcacagcatccccaccagccccagccacggcagcattgctgcctaccagggctacagcccccagaggacctacagaagtgaggtgagcagccccatccagagaggagatgtgaccatcgacagaagacaccgggcccaccaccccaagcacgtgtatgtgcctgaccggcgctctgtgcctgctggcctgaccctgcagagcgtgagcccccagagcctgcagggcaagaccccagaggagctgaccctgctgctgatcaagctgcggcggcagcaggccgagctgagcagcatccgggagcacaccctggcccagctgatgcagctgaagctggaggcccacagccccaagaatgagatcctgagccaccacctgcagaggaacaccatctacctggaccaccagatgaaggaaaatgagcccatcatcaccatggtgcacaccatgattgaaaattctgccctgcggccccagctgtaccagcagttcctgcggcagaagagcaagatcagcctgtactgcctgagccaggatgagggccggggcaccctgtacaagtacagacctgaggaggtggacattgatgccaagctgagccggctgtgtgagcaggacaaggtggtgcacgccctggaggagaagctgcagcagctgcacaaggagaagtacaccctggagcaggccctgctgagcgccagccaggagattgagatgcacgccgacaacccagctgccatccagacagtggtgctgcagagagatgacctgcagaatggcctgctgagcacctgccgggagctgagccgggccacagctgagctggagcgggcctggagagaatatgacaagctggagtatgatgtgacagtgaccaggaaccagatgcaggagcagctggaccacctgggggaggtgcagacagaatctgctggcatccagagggcccagatccagaaggagctgtggaggatccaggatgtgatggagggcctgagcaagcacaagcagcagaggggcaccacagaaattggcatgattggcagcaagcccttcagcacagtgaagtacaagaatgaggaggaggaggtggtgcccccccggccccccctgcccaggagctatgacttcacagagcagccccccatcatcccccccctgcccagcgacagcagcagcctgctgtgctacagccggggccctgtgcacctgcctgaggagaagaagatgtaccaggtgcagggctaccccagaaatggcagccactgcggccctgactaccgcctgtacaagtctgagcctgagctgaccaccgtggccgaggtggatgagagcaatggagaggagaagtctgagcctgtgtctgaaattgagacctctgtggtgaagggcagccacttccctgtgggcgtggtgcccccccgggccaagagccccaccccagagagcagcaccatcgccagctatgtgaccctgaggaagaccaagaagatgatggacctgaggacagagcggcccaggtctgctgtggagcagctgtgcctggccgagagcacccggcccaggatgacagtggaggagcagatggagcgcatccgccgccaccagcaggcctgcctgcgggagaagaagaagggcctgaatgtgattggagccagtgaccagagccccctgcagagccccagcaacctgcgggacaaccccttccgcaccacccagaccaggagaagagatgacaaggagctggacacagccatcagagaaaatgatgtgaagccagaccacgagaccccagccacagaaattgtgcagctgaaggagacagagccccagaatgtggacttcagcaaggagctgaagaagacagagaacatctcctatgagatgctgtttgagcctgagcccaatggagtgaacagcgtggagatgatggacaaggagaggaacaaggacaagatgccagaagatgtgaccttcagcccccaggatgagacccagacagccaaccacaagccagaggagcaccctgaggagaacaccaagaacagcgtggatgagcaggaggagaccgtcatctcctatgagagcaccccagaggtgtcccggggcaaccagaccatggctgtgaagagcctgagccccagccctgagagcagcgccagccctgtgcccagcacccagccccagctgacagagggcagccacttcatgtgtgtgtag

SEQ ID NO: 90693 - DNA, 3555 bp, Artificial Sequence
  derived and/or modified sequence
atggctgctgacctgaacctggagtggatcagcctgcccaggtcctggacctacggcatcacccggggcggccgggtcttcttcatcaatgaggaggccaagagcaccacctggctgcaccctgtgactggagaggccgtggtgacaggccaccggcggcagagcacagacctgcccaccggctgggaggaggcctacacctttgagggcgcccgctactacatcaaccacaatgaaaggaaggtgacctgcaagcaccctgtgacaggccagcccagccaggacaactgcatctttgtggtgaatgagcagacagtggccaccatgaccagcgaggagaagaaggagcggcccatctccatgatcaatgaggccagcaactacaacgtgaccagtgactatgctgtgcaccccatgagccctgtgggccgcaccagccgggccagcaagaaggtgcacaactttgggaagaggagcaacagcatcaagaggaaccccaatgcccctgtggtgcggcggggctggctgtacaagcaggacagcacaggcatgaagctgtggaagaagcgctggtttgtgctgagtgacctgtgcctcttctactacagagatgagaaggaggagggcatcctgggcagcatcctgctgcccagcttccagatcgccctgctgaccagcgaggaccacatcaacagaaaatatgccttcaaggccgcccaccccaacatgaggacctactacttctgcacagacaccgggaaggagatggagctgtggatgaaggccatgctggatgctgccctggtgcagacagagcctgtgaagaggatcttcttcagtgacttccgggtggacaagatcaccagtgaaaatgcccccaccaaggagaccaacaacatccccaaccaccgggtgctgatcaagccagagatccagaacaaccagaagaacaaggagatgagcaagattgaggagaagaaggccctggaggccgagaagtatggcttccagaaggatggccaggaccggcccctgaccaagatcaacagcgtgaagctgaacagcctgcccagtgaatatgagagcggcagcgcctgcccagcccagacagtgcactaccggcccatcaacctgagcagcagcgagaacaagatcgtgaatgtgtccctggccgacctgcggggcggcaaccggcccaacacaggccccctgtacacagaggccgacagagtcatccagaggaccaacagcatgcagcagctggagcagtggatcaagatccagaagggccggggccacgaggaggagacccggggcgtcatctcctaccagaccctgcccaggaacatgcccagccaccgggcccagatcatggcccgctacccagagggctaccgcaccctgcccaggaacagcaagaccaggcctgagagcatctgcagcgtgacccccagcacccatgacaagaccctgggccctggagctgaggagaagagaagatccatgagagatgacaccatgtggcagctgtatgagtggcagcagaggcagttctacaacaagcagagcaccctgcccaggcacagcaccctgagcagccccaagaccatggtgaacatcagtgaccagaccatgcacagcatccccaccagccccagccacggcagcattgctgcctaccagggctacagcccccagaggacctacagaagtgaggtgagcagccccatccagagaggagatgtgaccatcgaccggcggcaccgggcccaccaccccaagcacgtgtatgtgcctgacagaagatctgtgcctgctggcctgaccctgcagagcgtgagcccccagagcctgcagggcaagaccccagaggagctgaccctgctgctgatcaagctgcggcggcagcaggccgagctgagcagcatccgggagcacaccctggcccagctgatgcagctgaagctggaggcccacagccccaagaatgagatcctgagccaccacctgcagaggaacaccatctacctggaccaccagatgaaggaaaatgagcccatcatcaccatggtgcacaccatgattgagaacagcgccctgcggccccagctgtaccagcagttcctgcggcagaagagcaagatcagcctgtactgcctgagccaggatgagggccggggcaccctgtacaagtacagacctgaggaggtggacattgatgccaagctgagccggctgtgtgagcaggacaaggtggtgcacgccctggaggagaagctgcagcagctgcacaaggagaagtacaccctggagcaggccctgctgagcgccagccaggagattgagatgcatgctgacaacccagctgccatccagacagtggtgctgcagagagatgacctgcagaatggcctgctgagcacctgccgggagctgagccgggccacagctgagctggagcgggcctggagagaatatgacaagctggagtatgatgtgacagtgaccaggaaccagatgcaggagcagctggaccacctgggggaggtgcagacagagagcgctggcatccagagggcccagatccagaaggagctgtggaggatccaggatgtgatggagggcctgagcaagcacaagcagcagaggggcatgattggcagcaagcccttcagcacagtgaagtacaagaatgaggaggaggaggtggtgcccccccggccccccctgcccaggagctatgacttcacagagcagccccccatcatcccccccctgcccagcgacagcagcagcctgctgtgctacagccggggccctgtgcacctgcctgaggagaagaagatgtaccaggtgcagggctaccccagaaatggcagccactgcggccctgactaccgcctgtacaagtctgagcctgagctgaccaccgtggccgaggtggatgagagcaatggagaggagaagtctgagcctgtgtctgaaattgagacctctgtggtgaagggcagccacttccctgtgggcgtggtgcccccccgggccaagagccccaccccagagagcagcaccatcgccagctatgtgaccctgaggaagaccaagaagatgatggacctgaggacagagcggcccaggtctgctgtggagcagctgtgcctggccgagagcacccggcccaggatgacagtggaggagcagatggagcgcatccgccgccaccagcaggcctgcctgcgggagaagaagaagggcctgaatgtgattggagccagtgaccagagccccctgcagagccccagcaacctgcgggacaaccccttccgcaccacccagaccaggagaagagatgacaaggagctggacacagccatcagagaaaatgatgtgaagccagaccacgagaccccagccacagaaattgtgcagctgaaggagacagagccccagaatgtggacttcagcaaggagctgaagaagacagagaacatctcctatgagatgctgtttgagcctgagcccaatggagtgaacagcgtggagatgatggactag

SEQ ID NO: 90694 - DNA, 3849 bp, Artificial Sequence
  derived and/or modified sequence
atggccgccgacctgaacctggagtggatcagcctgccccggagctggacctatgggataaccagggggggccgggttttttttataaacgaggaggcaaagtctacaacatggttgcacccggtgacaggagaggccgtggttacggggcatcggcgacagtccaccgatttacccactggctgggaggaggcttacaccttcgaaggcgcccgatattacataaaccacaatgagagaaaggtgacatgtaagcaccccgtcaccggccaaccttcccaggacaattgcatctttgttgtgaacgaacagacagtggccacaatgacctcagaggagaaaaaagaacgccccatttcaatgataaatgaagcatctaattacaacgtgaccagcgattacgcagttcatcccatgagtccagtaggtcggacttcccgcgcctcaaaaaaggttcacaattttgggaagagaagcaattcaatcaaacgcaaccctaacgcaccagtggtgcggagagggtggctctacaagcaggatagcaccggaatgaaactctggaagaaaaggtggttcgtactgtcggacctctgcttattttactaccgggacgaaaaggaagaagggatcctgggatctatccttctgccttccttccagattgctctgctcacctccgaggaccatatcaatcgcaagtatgcgttcaaagccgctcatcctaacatgcggacttactatttttgcacagacactgggaaagagatggagctctggatgaaggctatgcttgacgccgcattagtgcagaccgagcccgtcaagcggatcacatttaattttcgagtcgataaaatcacatccgagaacgcacccaccaaagagaccaacaatatccccaaccaccgcgtactcattaagcccgaaattcagaacaaccagaagaacaaggaaatgtccaagattgaagagaagaaggcactggaagctgagaagtacggcttccagaaggatggccaggataggcccctgactaagattaacagcgtcaaattaaactcactgccttcagagtacgaaagcggctcagcctgtcccgcccagactgtgcactataggcccattaatctaagcagctcagagaacaaaatcgtgaacgttagtctggccgacctgaggggggggaaccgccctaatacggggccactctatactgaagcggaccgagtcattcagcgtaccaattctatgcaacagctggaacagtggattaagattcaaaagggtcgagggcacgaggaagagacaagaggcgtgatcagctaccagaccctgccgcgcaatatgccgagtcaccgggcccagataatggcacgctatccagaggggtatcgcacgctccctaggaacagcaaaacccgaccagagagtatttgtagtgtgacaccatcaactcatgacaagaccctgggtcctggcgccgaggagaaacgacgatccatgcgtgacgatacaatgtggcagctctatgaatggcaacagcggcagttctataataaacagagcacactcccaaggcattccaccctcagctcccccaagacaatggttaatatctctgaccaaaccatgcattctattcccacatctccaagtcacggatccatcgccgcgtaccagggttattcgcctcagagaacctatagaagtgaggtctcttccccaatccagcgcggcgacgttacaatcgaccgcagacatcgcgcgcaccatccgaaacacgtctatgtacctgaccgcagaagtgtgcctgctgggctcacccttcaaagtgtatcccctcagtcactgcagggcaaaacaccagaggagttgactctgctcctgattaagttgcggaggcagcaagctgaactgtcctcgattagagaacatactctagcccaattgatgcagctgaagttggaagcacactccccaaagaatgagatcctgtctcatcacctccagagaaatactatctatttggatcaccagatgaaggaaaatgagccaataattacaatggtgcatactatgattgagaacagcgcgcttaggccccagctgtatcagcagttcctacggcagaaaagcaaaatatctctgtactgcctgagtcaagatgagggacgggggactctttataagtataggcccgaagaggtcgatattgacgccaaactgtcccgactgtgcgagcaggacaaggtcgttcacgccctggaagagaagctgcagcaattgcacaaggaaaagtatactctagaacaggccttactctctgcaagccaggagattgagatgcatgccgataatcccgccgctatacagactgtcgtgctgcagagagacgaccttcagaatggcctgctttccacctgtcgggagctttctagagccaccgccgaactcgagcgagcgtggagagaatatgacaaattggagtatgacgtgactgtgaccagaaatcagatgcaggaacagctagatcacctcggagaggtccagaccgagtcagccggcatccagcgggctcagatacagaaagagctgtggagaattcaggacgtgatggaggggctgtctaagcataaacaacagagaggaaccaccgagattggcatgattggttccaaacccttcagcaccgtgaaatataagaacgaggaggaggaggttgtccccccccgacccccgctgccgagatcttatgattttacagagcaacctcccatcattcctcccttgccatccgactcttcctctttactgtgctattcccgcggccctgtccatctccccgaagagaaaaaaatgtatcaggtccagggttaccctaggaatggaagccactgtggtccagattacaggctttacaaatctgaacccgagctgacaaccgttgccgaagtggatgaatcaaacggagaagaaaaatccgagcctgtgtcagaaattgagacaagtgtcgtgaagggcagccatttcccagtgggcgtggtgccccctcgcgccaagtcccctacacctgagtcttcaactatcgcaagttatgttaccctgcgaaagaccaagaaaatgatggaccttcgcactgaacggcctcgctcagccgtcgagcaactgtgtctggctgaatctacacgtccccggatgactgtggaggagcaaatggaacggatacggcgccaccaacaggcatgtctgcgggaaaagaaaaagggccttaatgtgattggagcctcagatcaaagtccactccaatcaccaagtaatctaagggataatccctttaggacaactcagactaggcggcgcgacgacaaggagctagacaccgccatcagggagaatgacgtgaagccagaccatgagaccccagctaccgagatcgtgcaactgaaggagacagagccacagaatgtggattttagcaaagagttgaagaagactgaaaacatcagttatgagatgctgttcgagccagagccgaacggagttaatagtgtggagatgatggataaagagagaaataaggataagatgcccgaggacgtgactttctcccctcaggatgagacacagactgccaatcacaaacctgaggaacatcctgaagagaatacaaagaattcagtggacgagcaagaggaaacagtgatcagttacgaatcaacaccagaggttagccgcggtaatcagactatggccgttaaaagtctgtccccctcacctgagtcatcagcatcacctgttccaagtacccagccacagctgaccgaggggagccattttatgtgtgtatag

SEQ ID NO: 90695 - DNA, 3555 bp, Artificial Sequence
  derived and/or modified sequence
atggccgccgacctgaacctggagtggatcagcctgccccggagctggacttacggcatcacacgaggagggcgagtgttctttataaacgaagaggctaagtctaccacatggctgcatcctgtgactggagaggctgtagtgaccggacataggcgtcagtctacagacctgcctaccgggtgggaggaggcctatacgttcgagggcgcccgatactacattaatcacaacgaaagaaaagttacttgcaaacacccggtgacaggccagccttcccaggataattgcatttttgtggtgaacgaacaaacggtggccactatgaccagcgaggaaaaaaaagagcggccgatctctatgatcaacgaggcctctaactacaatgttacctcggactacgctgttcatcccatgagcccagtggggcgtacatcacgtgcatcgaaaaaggtgcataattttggaaagcgtagcaactctattaaaagaaacccaaacgcccccgtcgtgagacgcggatggctctataaacaggactccacaggaatgaagctgtggaagaagcgctggttcgtgctgagcgatttatgtctgttttattaccgggacgaaaaagaagaaggtatcctggggagcatcctgttacctagtttccaaattgccttactgacaagtgaggatcacattaacagaaaatacgcattcaaagctgctcatcctaatatgcgcacctactacttctgtaccgacacaggaaaggagatggaactttggatgaaagccatgctggatgcagccctggtgcagacagaacccgttaaacgtatcttcttttcagatttccgggtcgataaaataacatccgagaatgctccaaccaaagaaaccaacaatatcccgaaccatcgtgtcctgatcaaaccagaaatacaaaacaatcagaagaacaaagagatgagtaagattgaggagaagaaagccctggaggctgagaagtacgggttccagaaggacggccaagaccggccgctgaccaagatcaatagtgtgaagctcaacagcctcccatcagagtacgaatccggttccgcttgccctgcacagaccgtacattatcgccctataaacttatcaagctctgagaataagatcgtcaacgtttccctcgcagacctgcgcggcggtaaccgccccaacacaggaccgctctataccgaagcggacagggtcattcagcggactaattctatgcaacaactcgagcagtggattaaaatccagaaaggccgcggccatgaggaagagacacgcggtgtaatctcttatcagacccttccacggaatatgccttcccatagagcccagatcatggcacgctatccagaaggatacaggacattgccccggaattccaaaacaagacccgaatctatatgctccgtgacaccttccacacacgacaagacactgggtcctggtgccgaagaaaaacggcggtccatgagagatgatacaatgtggcagctctacgagtggcagcagaggcagttctataataaacagtctactctcccaagacattccacactgagcagtccaaagacaatggtgaacattagcgaccagaccatgcactctattccaacctcgccttcacatggtagcattgctgcctatcagggctatagtcctcagcgaacatatcgctccgaagtgtcttctccaattcagaggggcgatgtcaccatagacaggagacatcgggcccaccaccctaagcacgtttacgttccagatagacgctccgtccccgcaggactgaccctgcaatcagtgtcgccacagagtttgcagggcaaaacacctgaggagctcacccttctgctgatcaaactccgccgccagcaagccgagctgtcctctatacgcgagcacacattggctcagctgatgcagctgaaattagaggcccattctcccaaaaatgaaatcctctctcatcacttgcagagaaacactatctacttggaccaccaaatgaaagagaatgagccaatcatcaccatggtgcacaccatgatagagaacagcgccttgaggccccagctctaccaacagttcctgaggcaaaagtctaagatttctctgtactgcctctcacaggatgagggccgcggtaccctctataagtacagacctgaggaggtagatatagatgccaagctgtctcgtctgtgtgagcaagataaggtcgtacacgccctggaggagaaattgcaacaactgcataaagagaaatataccctggaacaagcactcctgagtgcgagccaggaaatcgagatgcatgcagataatcctgctgctatccagaccgtggtgctgcagagagatgacctccagaacggtttactttccacctgccgagagttgagtcgggctacagctgagctggagagggcttggagagagtacgacaaactggagtacgacgtcacagtcacccggaaccagatgcaggagcaactggaccatcttggtgaggttcagaccgaatctgctggtatccaacgcgcccagatacagaaagaattgtggagaattcaggatgtcatggagggactgagcaagcataaacagcagcggggcatgatcggaagcaaaccattctccaccgtgaaatacaaaaatgaggaagaggaggttgtgcccccgcgaccccccttgccgcgctcttacgactttactgagcaaccacccattatacctcccctgccttccgactctagctcactgctatgttacagtagagggcccgtacacctccccgaggagaaaaaaatgtatcaggtgcagggatatccccgaaacggatcgcattgcggacctgactaccgattatataaatcagagcccgagctgacgacggttgccgaggtggacgagtctaacggagaggaaaagtccgaacccgtttccgaaattgagacatcggtggtaaaagggtcccactttcctgttggagtggtgcctccacgagccaagtcacccaccccggagtcgtctaccattgcaagctatgtgacactgagaaagacaaaaaaaatgatggatctacggacagaaagacctcggagtgccgtggaacagctgtgcctggccgagtctacgaggcccaggatgacagtggaagagcagatggagcggatcagaagacaccaacaggcctgcctgcgggagaaaaaaaagggcttaaacgtcattggtgcaagcgatcagagccccctgcaaagtccgtcaaacctgcgggacaatccgtttagaacaacacagacccgacggagagacgacaaagagctcgatacagccattcgcgagaatgacgtgaagcctgatcacgaaactccagctaccgagatcgtacaattaaaggagacggaaccacaaaacgtggattttagtaaagagctcaagaaaacggagaacatcagctatgaaatgctgtttgagccagaaccaaatggggttaactccgtcgagatgatggattag

SEQ ID NO: 90696 - DNA, 4762 bp, Artificial Sequence
  derived and/or modified sequence
gagaaggcggcggcggcggctagggatcagacatggcggcggatctgaacctggagtggatctccctgccccggtcctggacttacgggatcaccaggggcggccgagtcttcttcatcaacgaggaggccaagagcaccacctggctgcaccccgtcaccggcgaggcggtggtcaccggacaccggcggcagagcacagatttgcctactggctgggaagaagcatatacttttgaaggtgcaagatactatataaaccataatgaaaggaaagtgacctgcaaacatccagtcacaggacaaccatcacaggacaattgtatttttgtagtgaatgaacagactgttgcaaccatgacatctgaagaaaagaaggaacggccaataagtatgataaatgaagcttctaactataacgtgacttcagattatgcagtgcatccaatgagccctgtaggcagaacttcacgagcttcaaaaaaagttcataattttggaaagaggtcaaattcaattaaaaggaatcctaatgcaccggttgtcagacgaggttggctttataaacaggacagtactggcatgaaattgtggaagaaacgctggtttgtgctttctgacctttgcctcttttattatagagatgagaaagaagagggtatcctgggaagcatactgttacctagttttcagatagctttgcttacctctgaagatcacattaatcgcaaatatgcttttaaggcagcccatccaaacatgcggacctattatttctgcactgatacaggaaaggaaatggagttgtggatgaaagccatgttagatgctgccctagtacagacagaacctgtgaaaagaattacctttaatttccgagtggacaagattacatctgaaaatgcaccaactaaagaaaccaataacattcccaaccatagagtgctaattaaaccagagatccaaaacaatcaaaaaaacaaggaaatgagcaaaattgaagaaaaaaaggcattagaagctgaaaaatatggatttcagaaggatggtcaagatagacccttaacaaaaattaatagtgtaaagctgaattctctgccatctgaatatgagagtgggtcagcatgccctgctcagactgtgcactacagaccaatcaacttgagcagttcagagaacaaaatagtcaatgttagcctggcagatcttagaggtggaaatcgccccaatacagggcccttatacacagaggccgatcgagtcatacagagaacaaattcaatgcagcagttggaacagtggattaaaatccagaaggggaggggtcatgaagaagaaaccaggggagtaatttcttaccaaacattaccaagaaatatgccaagtcacagagcccagattatggcccgctaccctgaaggttatagaacactcccaagaaacagcaagacaaggcctgaaagtatctgcagtgtaaccccttccactcatgacaagacattaggacccggagcggaggagaaacggaggtccatgagagatgacacaatgtggcagctctacgaatggcagcagcgtcagttttataacaaacagagcaccctccctcgacacagtactttgagtagtcccaaaaccatggtaaatatttctgaccagacaatgcactctattcccacatcaccttcccacgggtcaatagctgcttatcagggatactcccctcaacgaacttacagatcggaagtgtcttcaccaattcagagaggagatgtgacaatagaccgcagacacagggcccatcaccctaagcatgtctatgtgcctgacagaaggtcagtgccagctggcctgactttacagtctgttagtccccagagcctccaagggaaaacgccagaggagcttacgctgctgctaataaagctgagacggcagcaagccgaactgagtagtatccgggagcatacgttagcacagctcatgcagctaaagcttgaggcccacagcccaaagaatgaaattctttcacatcatctccaaaggaacaccatatatttggatcatcagatgaaagaaaatgaacctattatcaccatggttcacacaatgattgagaactcggcgctaagaccccaactgtaccagcaattcttaagacagaagagcaagataagtctatattgtctgtcacaagatgaaggtagaggcacattatacaaatacagacctgaagaagtagatattgatgccaagttaagccgattatgtgaacaagataaagtggtgcatgctctggaagagaaacttcagcaactccacaaggagaaatacacgcttgagcaagctttgctatcagccagccaagagatagaaatgcatgcagataacccagcagccattcagacagtggtgttacaaagggatgatttacaaaatggactgcttagtacgtgtcgagaactttctcgagccactgccgaattggaacgagcatggagagaatatgataagttagaatacgatgtaactgttaccaggaaccagatgcaagagcagctggatcaccttggtgaagttcagacggaatcagcaggaattcagcgtgcacagattcagaaagaactttggcgaattcaggatgtcatggaagggctgagtaaacataagcagcaaagaggtactacagaaataggtatgataggatcaaagcctttctcaacagttaagtacaaaaatgaggaagaggaagtagtcccacctcgtcctccacttcctcggtcctatgactttacagagcagcctcccataatcccccctctgcccagtgatagcagctccttgctctgttatagcaggggcccagttcatctgcctgaagaaaagaagatgtatcaagttcaaggatatccaagaaatggatctcactgtggtccagattatagactctacaagagtgaaccagagttaacaacagtggcagaagttgatgaatctaatggagaagaaaaatcagaacctgtttcagagatagaaacttcagttgttaaaggttcccactttcctgttggagtagtccctccaagagcaaaatcaccaacacccgaatcttcgacaatagcttcctatgtaaccttgaggaaaactaagaagatgatggatctaagaacggaaagaccaagaagtgcagtggaacagctctgtttggctgaaagtactcgaccaaggatgactgtggaagagcaaatggaaagaataagaagacatcaacaagcgtgcctgagggagaagaaaaaagggttaaatgttatcggtgcttcagaccagtcacccttacaaagcccttcaaatttaagggataatccatttaggactactcagactcgaaggagggatgataaggaactggacactgccattagagaaaatgatgtaaagccagaccatgaaactcctgcaacagaaattgttcaactaaaagaaaccgaaccccaaaatgtggacttcagcaaagagttaaaaaaaactgaaaacatttcatatgaaatgctttttgaacctgagccaaatggagtaaattctgtggaaatgatggataaagaaagaaacaaagacaaaatgcctgaggatgttacattcagccctcaagatgaaacacagaccgcaaatcataaaccagaagagcatcctgaagaaaatacaaagaacagtgttgacgaacaggaagaaactgttatttcttacgaatcaactcctgaggtttctagaggaaatcaaacaatggcagtgaaaagtctgtccccatctcctgagtcctcggcatcgccagttccatccactcagccgcagctcacagaaggatcacatttcatgtgtgtgtagtcttagaagaactatactgacttctgttgaaaccattcaaagctaaagacatggaccttcagcagtgtaagaagatattgtacagtatattttaaatctatgaaattcatagttctgatgcttttggtcacagagcatcattttatcacttctggaaaatgtttattccaaaacagctttaatggcccatatgtacacttcgtaatctcaaggttattattctgacaccagcttgctgctatgatttcagagcacataagtaaaggtgctttttaatgtgcagtctatttccagagcttacttagttgctgatttccagatttcgatgtttcttaagtctaggtgaatttatatatatatttttttgcttttcattttctaaagttagttattatttccattgaagcttgttttcttttttttcttcccattttagctactgcagtgcttttgtttcacacttgatttgtaaaaattttatatatatgtatttaaaatgtgccattttattgctaagtgaagtatgtcctgttttctgctataattctttctcggtcagattgcaatgtcagcagttactgccacactcctgtcagcttaaacacaaatgttactgcttatcttttcttaaaaaaaaaaaaaacaaagtgtaggtattttgaagtactgggcttatatttcattggaatacatgtgtacagcaataagcaggtttccaaatccggtacttagtttgtgtacaaatgtaattatgttcattgtgtatatattatacaatgagcacatgtaatgtattaaaggctacttactattgtttaaatgcaaatgttcatatctcatttctttttttatcatgttaaataaatgttgatgttcttaaa

SEQ ID NO: 90697 - DNA, 4801 bp, Artificial Sequence
  derived and/or modified sequence
gcgctcccttcgctcgctcgttccctcctccctcggcagccgcggcggcagcaggagaaggcggcggcggcggctagggatcagacatggcggcggatctgaacctggagtggatctccctgccccggtcctggacttacgggatcaccaggggcggccgagtcttcttcatcaacgaggaggccaagagcaccacctggctgcaccccgtcaccggcgaggcggtggtcaccggacaccggcggcagagcacagatttgcctactggctgggaagaagcatatacttttgaaggtgcaagatactatataaaccataatgaaaggaaagtgacctgcaaacatccagtcacaggacaaccatcacaggacaattgtatttttgtagtgaatgaacagactgttgcaaccatgacatctgaagaaaagaaggaacggccaataagtatgataaatgaagcttctaactataacgtgacttcagattatgcagtgcatccaatgagccctgtaggcagaacttcacgagcttcaaaaaaagttcataattttggaaagaggtcaaattcaattaaaaggaatcctaatgcaccggttgtcagacgaggttggctttataaacaggacagtactggcatgaaattgtggaagaaacgctggtttgtgctttctgacctttgcctcttttattatagagatgagaaagaagagggtatcctgggaagcatactgttacctagttttcagatagctttgcttacctctgaagatcacattaatcgcaaatatgcttttaaggcagcccatccaaacatgcggacctattatttctgcactgatacaggaaaggaaatggagttgtggatgaaagccatgttagatgctgccctagtacagacagaacctgtgaaaaggattttcttctctgatttcagagtggacaagattacatctgaaaatgcaccaactaaagaaaccaataacattcccaaccatagagtgctaattaaaccagagatccaaaacaatcaaaaaaacaaggaaatgagcaaaattgaagaaaaaaaggcattagaagctgaaaaatatggatttcagaaggatggtcaagatagacccttaacaaaaattaatagtgtaaagctgaattctctgccatctgaatatgagagtgggtcagcatgccctgctcagactgtgcactacagaccaatcaacttgagcagttcagagaacaaaatagtcaatgttagcctggcagatcttagaggtggaaatcgccccaatacagggcccttatacacagaggccgatcgagtcatacagagaacaaattcaatgcagcagttggaacagtggattaaaatccagaaggggaggggtcatgaagaagaaaccaggggagtaatttcttaccaaacattaccaagaaatatgccaagtcacagagcccagattatggcccgctaccctgaaggttatagaacactcccaagaaacagcaagacaaggcctgaaagtatctgcagtgtaaccccttccactcatgacaagacattaggacccggagcggaggagaaacggaggtccatgagagatgacacaatgtggcagctctacgaatggcagcagcgtcagttttataacaaacagagcaccctccctcgacacagtactttgagtagtcccaaaaccatggtaaatatttctgaccagacaatgcactctattcccacatcaccttcccacgggtcaatagctgcttatcagggatactcccctcaacgaacttacagatcggaagtgtcttcaccaattcagagaggagatgtgacaatagaccgcagacacagggcccatcaccctaagcatgtctatgtgcctgacagaaggtcagtgccagctggcctgactttacagtctgttagtccccagagcctccaagggaaaacgccagaggagcttacgctgctgctaataaagctgagacggcagcaagccgaactgagtagtatccgggagcatacgttagcacagctcatgcagctaaagcttgaggcccacagcccaaagaatgaaattctttcacatcatctccaaaggaacaccatatatttggatcatcagatgaaagaaaatgaacctattatcaccatggttcacacaatgattgagaactcggcgctaagaccccaactgtaccagcaattcttaagacagaagagcaagataagtctatattgtctgtcacaagatgaaggtagaggcacattatacaaatacagacctgaagaagtagatattgatgccaagttaagccgattatgtgaacaagataaagtggtgcatgctctggaagagaaacttcagcaactccacaaggagaaatacacgcttgagcaagctttgctatcagccagccaagagatagaaatgcatgcagataacccagcagccattcagacagtggtgttacaaagggatgatttacaaaatggactgcttagtacgtgtcgagaactttctcgagccactgccgaattggaacgagcatggagagaatatgataagttagaatacgatgtaactgttaccaggaaccagatgcaagagcagctggatcaccttggtgaagttcagacggaatcagcaggaattcagcgtgcacagattcagaaagaactttggcgaattcaggatgtcatggaagggctgagtaaacataagcagcaaagaggtatgataggatcaaagcctttctcaacagttaagtacaaaaatgaggaagaggaagtagtcccacctcgtcctccacttcctcggtcctatgactttacagagcagcctcccataatcccccctctgcccagtgatagcagctccttgctctgttatagcaggggcccagttcatctgcctgaagaaaagaagatgtatcaagttcaaggatatccaagaaatggatctcactgtggtccagattatagactctacaagagtgaaccagagttaacaacagtggcagaagttgatgaatctaatggagaagaaaaatcagaacctgtttcagagatagaaacttcagttgttaaaggttcccactttcctgttggagtagtccctccaagagcaaaatcaccaacacccgaatcttcgacaatagcttcctatgtaaccttgaggaaaactaagaagatgatggatctaagaacggaaagaccaagaagtgcagtggaacagctctgtttggctgaaagtactcgaccaaggatgactgtggaagagcaaatggaaagaataagaagacatcaacaagcgtgcctgagggagaagaaaaaagggttaaatgttatcggtgcttcagaccagtcacccttacaaagcccttcaaatttaagggataatccatttaggactactcagactcgaaggagggatgataaggaactggacactgccattagagaaaatgatgtaaagccagaccatgaaactcctgcaacagaaattgttcaactaaaagaaaccgaaccccaaaatgtggacttcagcaaagagttaaaaaaaactgaaaacatttcatatgaaatgctttttgaacctgagccaaatggagtaaattctgtggaaatgatggataaagaaagaaacaaagacaaaatgcctgaggatgttacattcagccctcaagatgaaacacagaccgcaaatcataaaccagaagagcatcctgaagaaaatacaaagaacagtgttgacgaacaggaagaaactgttatttcttacgaatcaactcctgaggtttctagaggaaatcaaacaatggcagtgaaaagtctgtccccatctcctgagtcctcggcatcgccagttccatccactcagccgcagctcacagaaggatcacatttcatgtgtgtgtagtcttagaagaactatactgacttctgttgaaaccattcaaagctaaagacatggaccttcagcagtgtaagaagatattgtacagtatattttaaatctatgaaattcatagttctgatgcttttggtcacagagcatcattttatcacttctggaaaatgtttattccaaaacagctttaatggcccatatgtacacttcgtaatctcaaggttattattctgacaccagcttgctgctatgatttcagagcacataagtaaaggtgctttttaatgtgcagtctatttccagagcttacttagttgctgatttccagatttcgatgtttcttaagtctaggtgaatttatatatatatttttttgcttttcattttctaaagttagttattatttccattgaagcttgttttcttttttttcttcccattttagctactgcagtgcttttgtttcacacttgatttgtaaaaattttatatatatgtatttaaaatgtgccattttattgctaagtgaagtatgtcctgttttctgctataattctttctcggtcagattgcaatgtcagcagttactgccacactcctgtcagcttaaacacaaatgttactgcttatcttttcttaaaaaaaaaaaaaacaaagtgtaggtattttgaagtactgggcttatatttcattggaatacatgtgtacagcaataagcaggtttccaaatccggtacttagtttgtgtacaaatgtaattatgttcattgtgtatatattatacaatgagcacatgtaatgtattaaaggctacttactattgtttaaatgcaaatgttcatatctcatttctttttttatcatgttaaataaatgttgatgttctt

SEQ ID NO: 90698 - DNA, 3849 bp, Artificial Sequence
  derived and/or modified sequence
atggctgccgatttaaatttggaatggatcagcttaccgagaagctggacctatggtatcacacgaggaggccgagtgtttttcatcaacgaggaagcgaagagcacgacatggctccatcccgtcactggggaagccgtggtaaccggccatcgcaggcagtctactgatctcccaacaggatgggaggaggcttacacattcgagggcgctcggtattatattaaccacaacgaacggaaggttacatgcaagcatcctgttacaggccaaccgtcgcaggacaattgtatattcgtcgtcaacgagcaaacagtggccactatgacctcagaggagaagaaagagcggccaatcagtatgatcaacgaggccagcaactataacgtgacctcagattacgccgtccaccccatgtcgcctgttgggcgaacctcacgagctagcaagaaagtccacaattttgggaaaagatccaactcgatcaaacgcaatccaaacgcacccgtggtcagaaggggctggctttacaaacaggacagcacgggcatgaaactatggaagaagagatggtttgtcttgtcggacctctgtctgttttattatagggacgagaaagaggagggcattctaggatcaatccttcttccgtcatttcagattgctcttctgacctccgaagatcatattaaccgtaaatatgccttcaaagccgcacaccctaacatgcgtacgtactacttctgtacagacacaggaaaggaaatggaactttggatgaaagccatgctggacgctgcactcgtccagactgagccggtgaaacgcatcacattcaatttccgagtcgacaagatcacctcggaaaatgctccgactaaagagacaaataatatccccaatcaccgggtgcttattaagccggagatccagaacaaccagaaaaataaggagatgtccaaaattgaagagaagaaggcgcttgaggccgagaagtatgggttccaaaaagacgggcaggatagacccctgacaaaaatcaatagcgtcaaacttaactcgttaccgtcggagtacgagagcggcagtgcctgtcccgctcagacagtgcattataggccgattaatctgagctcctcagaaaacaaaatcgtcaacgtgagcctggcagatctgcgtggaggcaatagacccaatactgggcctctctataccgaagctgaccgtgtcatccaaagaaccaactctatgcagcagctagagcagtggataaagatccagaaggggagagggcatgaggaagagacacgtggagtaatttcttaccaaaccctgccccgtaacatgcctagccaccgggctcaaatcatggctaggtacccagaggggtatcgcacgctccctcggaacagcaagaccaggccggaatcgatctgctccgtgaccccaagtacacacgataaaaccctggggccaggagcagaggaaaagcgtcggagcatgcgcgatgacaccatgtggcagttatacgaatggcagcaacggcagttctataataagcagtccaccctcccgcgtcactctacattgagtagtcccaaaacaatggtgaatattagcgatcagactatgcattctattccgacgtccccatctcatggcagcattgccgcttaccagggctactcaccccaacggacttataggtccgaggttagctctccaattcagagaggcgacgtgaccatcgaccgtagacatcgcgctcatcatcctaagcatgtgtacgttcctgatcggaggtctgttccagctggcctcactttgcagtccgtgagtcctcagtcactgcagggcaagacaccagaggaacttacgttgctgctgatcaaactccgtaggcagcaggccgaactctcctccatacgtgaacataccctggcccagttgatgcagctgaagctggaggcacattctcccaagaacgaaattctgagtcatcacctgcagagaaacacgatatacttagaccaccaaatgaaagagaacgaaccaataatcaccatggttcataccatgattgagaattccgcattgagaccccagctctaccagcagttcctccggcaaaagtctaaaattagcctctactgcctttcacaggacgaaggacggggaactttatataagtaccgccctgaagaagtggacatagacgctaaactttcacggctatgcgaacaagataaggtggtacacgccctcgaggagaagctgcagcagttgcacaaggaaaaatacactttggaacaagcgcttctctcggcatctcaagaaatcgaaatgcatgcagataatcccgctgcgatccagaccgtggtgctgcagagggacgatctgcagaacggcctcctgtccacatgtcgggagctctcccgagccaccgcagagctggagcgcgcatggagagaatacgataagctcgagtatgacgttactgtcaccagaaaccagatgcaggaacagcttgatcacctgggggaagtacaaaccgagagcgccggtattcagcgagctcagatacagaaggagctgtggagaatacaggatgtgatggagggtctgtccaagcataagcagcaacgcggaacgacggagattggtatgatcggctccaaacccttctcgactgtaaaatacaagaacgaagaggaggaagttgtgccccctcggcctccactaccgcgaagctatgatttcaccgaacagcccccaatcatcccacctctgcctagcgattcttcaagtttgctatgctatagccgaggtcccgtgcacctgcccgaggagaagaagatgtaccaggtgcaggggtaccctcgcaacggaagtcattgcggtccagactataggctgtacaaatccgagcctgaactaacaactgtggccgaagtagacgagagtaatggcgaggaaaagtccgagcccgtcagcgagatcgagaccagcgtggtcaagggtagccactttccagtgggggtcgtcccaccacgcgctaaatctcctacacccgaaagcagcaccattgcctcttacgtcaccttgaggaagactaaaaagatgatggatctgcggacagaacggcctcgttccgccgtggagcagctctgcttagctgagagcacacgccctagaatgaccgtcgaagaacagatggagagaatccgacggcatcagcaagcctgtctccgtgaaaaaaaaaaaggcttaaatgtgattggagcctccgatcagagcccactgcagagcccctccaacctgagagataacccatttcgcactacccagacccgtagaagggacgacaaggagctcgacaccgctattcgcgaaaatgatgtgaagcctgaccacgagaccccagccaccgagattgttcaattgaaggagactgaaccgcagaacgtggacttctcaaaagaactgaagaagaccgagaatatctcatacgagatgcttttcgagccagaacctaacggcgtcaacagcgtcgaaatgatggacaaggagcggaacaaggataagatgcccgaggatgtcactttttcccctcaggatgaaactcagaccgctaatcacaagcccgaggaacatccagaagagaacacaaagaactcggtcgacgaacaggaagaaaccgtgatctcctacgagtccaccccggaggtgagcagagggaaccagactatggccgtgaaatcgttgtctccctcccccgaaagtagtgcctccccagtgccttccacccagcctcaactaactgaaggctcccacttcatgtgcgtatag

SEQ ID NO: 90699 - DNA, 3555 bp, Artificial Sequence
  derived and/or modified sequence
atggcagccgatttgaacttagagtggatttcactaccgagatcttggacctatggcataacccggggagggagggtattttttatcaacgaggaggctaagtccaccacgtggttacaccccgttaccggggaggcagttgttaccggccacaggcgacagagcacggacctgcctaccggttgggaggaggcttacacgtttgagggcgcaaggtattatatcaatcacaacgagcgcaaagtcacatgtaagcacccagtaacgggccagccttctcaggataactgcatatttgttgtgaacgagcagaccgtcgccactatgacatccgaggaaaaaaaggagagaccaattagtatgattaacgaggcaagtaattataacgtgacaagtgactacgctgtgcacccaatgtccccagtcgggagaacatcacgggcaagcaaaaaggtccataatttcggaaaacgttctaacagcatcaagagaaaccctaacgccccagtagtcaggaggggctggctgtataaacaggatagtactggaatgaagctgtggaagaagagatggtttgtgcttagtgatctgtgtctcttctattatcgggatgagaaggaggaggggatccttggctcgatattactgccgtcattccagattgcgcttcttacaagtgaggaccacatcaatcggaaatatgcttttaaggccgcacatcccaacatgcgtacttactacttctgtacagacactggtaaggagatggagctgtggatgaaggcgatgttagatgcagctctggtgcagaccgagccggtcaagcggattttctttagtgatttcagggttgacaaaattacgagcgagaacgccccaacgaaggagaccaacaatattcctaatcaccgggtgctcatcaaaccagagattcagaacaaccagaaaaacaaggaaatgtcaaaaattgaggagaagaaggccttagaagcggagaagtatggatttcagaaagacggccaggacagacctttgaccaagatcaacagcgtcaagctaaactcactcccttctgaatatgagtcaggtagcgcatgcccagcacagacagttcactataggcctattaaccttagtagtagtgaaaataaaatagtgaacgtttcgttggctgacctcaggggaggaaatcgtccaaacaccggccctttatacaccgaggctgaccgggtgatccagcgtaccaacagtatgcagcagctggagcagtggattaaaatccagaaagggagaggacacgaagaggagactaggggcgttatcagctaccagacgctcccacgcaacatgccttctcaccgagctcagataatggcacgctatccagaaggttaccgcaccctacctcgcaattctaaaacgagacccgagtccatttgttctgtcacaccatccacacatgataaaaccctgggcccaggcgcagaagagaaaagacggtctatgagggatgatactatgtggcaactgtatgagtggcagcagaggcagttctataacaagcagtccaccctgccccgacattccacactctcgagccccaaaaccatggtaaatatatccgaccagactatgcatagcatccccacttctccatcccatgggagtatcgcagcctatcaaggttacagccctcagcgtacataccgttccgaggtctcttcccctatacagaggggggatgtaacaatcgataggcggcaccgcgcacaccacccgaaacatgtttacgttcctgaccgccgttctgtccctgcagggctgacacttcagagcgtgtctccgcagtcccttcaaggcaaaactcccgaagaattgaccctgcttctgataaagctcagaagacagcaggcggagctgtcgtccattcgagaacacaccctggctcagctaatgcaactcaagctggaagcccatagtcctaagaatgagattttgtcccatcaccttcagaggaacactatttacctggatcatcagatgaaggagaatgagccgattattacgatggtgcatacgatgatcgaaaacagtgctctccgccctcagctgtatcagcaatttctacgtcagaaaagtaagatttctttgtactgtctctctcaagacgaggggaggggaactctctacaagtaccgcccagaggaggtcgacatagacgcgaagttaagtaggctgtgcgaacaagataaggtcgtgcatgctcttgaggagaaactgcagcagctgcataaggagaagtatacactggagcaggccttgctctctgcaagccaagagatcgagatgcatgcagacaatcccgctgcaattcagaccgtggtgcttcaaagggacgatctgcaaaacggacttctgtccacctgtagggaactgtcccgggcaactgcagaactagagagggcatggagggagtacgataaactggaatacgatgtcacagtgacaagaaatcagatgcaggaacaactggatcacttaggagaagtgcagaccgaatcagccggtatccagcgtgcccaaatccagaaagaactttggaggatacaagacgtgatggaaggtctgtccaagcacaagcagcagcgcggtatgatcgggagcaaaccttttagcaccgtcaagtataaaaatgaagaggaggaggtggtaccgcctcgccctcccctcccgaggtcctatgactttaccgagcaaccaccaatcatccctccactgccttctgactcctcaagcttactgtgctacagtagagggcctgtgcatctgcccgaggagaaaaagatgtatcaggtgcaaggataccccagaaacggcagtcattgtggacctgattacagactgtacaaatctgagcccgagctgaccactgtcgcggaagttgatgaaagcaacggtgaggagaaatccgaacctgtctctgaaatcgagacatctgtagtcaaagggagccatttccccgtcggcgtcgttccacctcgggctaaatcgccaacccccgagagtagtactattgctagttatgtcacattgaggaaaactaagaagatgatggatctgcgcactgaaagacccaggtctgccgtggagcagctgtgcctggcagagtccaccaggccaaggatgacagtggaagagcaaatggaacggatacgtagacatcaacaagcctgtctccgtgaaaagaagaagggcctgaatgtcattggcgcatcggaccaatcccctctccagtcaccctccaacttgcgagataacccttttcgaaccactcagacccggagacgggacgataaggagctggacaccgctatccgggaaaacgatgtgaagccagaccatgaaacgccagcaacagaaatcgtccagttgaaagaaacggagcctcaaaacgtcgatttcagcaaagaactaaaaaaaacggaaaacattagctacgaaatgttgttcgagccagaaccaaatggcgtgaactccgtggaaatgatggattag

SEQ ID NO: 90700 - DNA, 1230 bp, Artificial Sequence
  derived and/or modified sequence
atggctttcgcacgccgtctcttaagaggaccacttagcggtcccctgttgggacggaggggtgtttgcgccggcgcaatggccccaccgaggcgttttgtgctcgaacttccagattgtacactcgcgcactttgctctcggggccgatgccccaggcgatgccgacgccccggatcctaggctagcggccttgctaggacccccagaaaggtcctacagcctctgcgtgccagtgactcccgatgcagggtgtggtgctcgcgtgcgtgccgcccgtctgcaccagaggctgttacatcagctacgccgggggccattccagagatgccagcttctccggctgctgtgctactgccctggtgggcaagctgggggcgctcagcaggggtttctgctgagggatcctttagacgaccctgacacgcgtcaggccctcctagagcttcttggtgcatgccaggaggcaccaagaccccatttaggcgagtttgaggcagaccctaggggccagttgtggcagcgtctgtgggaggtccaggacggaaggagactccaggtcggctgcgctcaagtggtccctgtgccagaaccccctctacatcctgtggtgccagatctaccatcgtccgtcgtgtttcctgatagggaggctgcgcgagccgtcctggaagaatgcacatcattcattcccgaggcccgagctgtcctggacctggtggatcaatgccctaagcagatccagaaagggaagtttcaggtggttgcaatcgagggacttgatgccaccggcaagaccaccgttacccagagcgtagccgatagcctgaaagcagtattactgaagtcccccccaagctgtatcggacagtggcgaaagattttcgatgatgagccgacgatcattagacgagccttctattccctgggcaattacatcgtggcaagtgaaatcgccaaagagtcagcaaagagtccggtcattgtggatcgttactggcacagtacagccacttacgcaattgcaacagaagtgtctggaggcctgcagcacctgccacccgctcaccaccccgtctatcagtggcccgaagacttgctcaagcccgaccttatcctgctgctgactgtctcgcctgaggaacgtctgcagagactgcaggggcgcgggatggaaaaaactagagaggaagcggagttggaagctaactcagtgttcaggcaaaagtag

SEQ ID NO: 90701 - DNA, 1230 bp, Artificial Sequence
  derived and/or modified sequence
atggcctttgcccggcggctgctgcggggccccctgagcggccccctgctgggcagaagaggagtgtgtgccggggccatggcccccccaagaagatttgtgctggagctgcctgactgcaccctggcccactttgccctgggcgcagatgcccctggagatgctgatgccccagacccccggctggccgccctgctgggccccccagagaggagctacagcctgtgtgtgcctgtgaccccagatgctggctgtggggcccgggtgcgggccgcccggctgcaccagaggctgctgcaccagctgcggcggggccccttccagcgctgccagctgctgcggctgctgtgctactgccctgggggccaggccggcggggcccagcagggcttcctgctgcgggaccccctggatgatcctgacacccggcaggccctgctggagctgctgggcgcctgccaggaggccccccggccccacctgggggagtttgaggccgacccccggggccagctgtggcagaggctgtgggaggtgcaggatggaagaaggctgcaggtgggctgtgcccaggtggtgcctgtgcctgagccccccctgcaccctgtggtgcctgacctgcccagctctgtggtgtttcctgaccgggaggccgcccgggctgtgctggaggagtgcaccagcttcatccctgaggcccgggctgtgctggacctggtggaccagtgccccaagcagatccagaagggcaagttccaggtggtggccatcgagggcctggatgccaccgggaagaccaccgtgacccagagcgtggccgacagcctgaaggctgtgctgctgaagagcccccccagctgcatcggccagtggaggaagatctttgatgatgagcccaccatcatcagaagagccttctacagcctgggcaactacatcgtggccagcgagatcgccaaggagagcgccaagagccctgtgattgtggaccgctactggcacagcacagccacctacgccatcgccacagaggtgtctgggggcctgcagcacctgcccccagcccaccaccctgtgtaccagtggccagaggacctgctgaagccagacctgatcctgctgctgactgtgtccccagaggagcggctgcagaggctgcagggccggggcatggagaagacccgggaggaggccgagctggaggccaacagcgtcttccggcagaagtag

SEQ ID NO: 90702 - DNA, 1230 bp, Artificial Sequence
  derived and/or modified sequence
atggccttcgcccggcggctgctgcggggccccctgagcggccccttactgggcagaagaggggtctgcgccggagctatggctccgccaaggcggtttgttttggaactaccggattgcaccttggcccacttcgcactgggtgccgacgctccaggagacgcagatgctcccgatccgcggttagcggctctgctcggaccacccgagcggagctactccctttgtgtgccggtcacccctgacgctggctgcggtgcacgcgttcgcgccgccaggctccaccaacggctactacatcagttgcgcagggggccattccagcggtgtcagctgttaagactactgtgttactgccccggaggccaagccggtggggcgcagcagggcttcctattgagggaccccctcgacgaccctgatacccgacaagccctactggaattgctcggagcctgccaggaggcacctcgccctcacctgggagagttcgaggctgacccaagaggtcaactgtggcaacggttatgggaggttcaggacgggcgtcgtctccaggtgggatgtgctcaagtagtcccagtccccgaacctcctttgcaccccgtggtccctgaccttccatcatccgttgtgtttcccgatcgagaagctgcccgggctgtgctcgaagaatgtacctctttcatccccgaggcccgtgccgttctggacctagtggatcaatgccccaaacagatccaaaaaggaaagttccaggtcgtggccatcgaaggactagatgcgacaggcaaaaccactgtgacccagtctgttgcagatagcctgaaagcggtgttgctgaaatcacccccatcgtgcatcggacagtggcgcaagatctttgacgatgagccaacaattatacggcgcgctttctactccttgggtaactacattgtcgcctccgagattgcaaaagaatccgctaaaagccctgtgatcgtcgatcgttactggcacagtaccgctacctacgctatcgccacggaagtctctgggggcctacaacacctgccacctgcgcaccatccagtgtaccagtggccagaggatttacttaaacctgatctgatattactgctaacagttagtcctgaggagagacttcagcggctgcagggtcggggaatggaaaaaacacgagaggaggcagagttggaggctaactcggttttccggcagaagtag

SEQ ID NO: 90703 - DNA, 1230 bp, Artificial Sequence
  derived and/or modified sequence
atggctttcgcccgtcgcctgctgagggggccactgtctggcccacttctggggagacggggtgtttgtgccggagctatggcacctcccaggcgtttcgtcctggaacttccggactgcaccctcgctcacttcgccctgggagcagatgcacccggagatgccgatgccccagatccccgactcgccgctctgctgggaccccctgagcgctcatacagcctctgcgtgcctgtgacccctgacgctgggtgcggggctagagtccgcgcagcacgacttcaccagcgactgcttcaccaactacgaagaggtccattccagagatgtcagttgctgaggctgttgtgctactgccctgggggtcaggcgggaggtgctcagcaggggtttctattgagggatcccctggacgatcccgacacacgccaagctctgctcgagctgctgggtgcttgccaagaggcacctagacctcatttgggggaatttgaagcagacccacggggacagttgtggcagaggctgtgggaggtgcaagacgggagacgcttgcaggtcggttgcgcacaggttgtgcccgtgcccgaaccaccgttgcatccagtcgtgcctgacttgccaagctctgtcgtgttccctgacagagaagctgccagggccgtactggaggagtgtaccagttttatccccgaagccagggccgtcctggacttagtggaccagtgtccaaagcagatccagaagggtaagtttcaagttgtggccatcgagggactggacgctacgggcaagactacagtgacacagagcgtggccgatagcttaaaggcagtcctcctcaaaagtcccccttcctgtattgggcagtggcgtaagattttcgacgatgagcccaccattattcgtagagccttttactcgctcggcaactacatagtagcaagcgagattgctaaagagtccgccaagagccctgtgattgtggatagatattggcatagtacagccacatacgccattgccaccgaggtgtccggagggctccagcacctgccccctgcccaccatcccgtgtatcagtggccagaagatctccttaaacccgatctaatcttattgctgacggtgtctcccgaggagcggctgcagcggttgcagggcagaggcatggaaaaaacaagagaagaggccgaattagaagccaattccgtgtttcgccaaaagtag

SEQ ID NO: 90704 - DNA, 2042 bp, Artificial Sequence
  derived and/or modified sequence
cgtcgctgaggcgcccatggccttcgcccgccggctcctgcgcgggccactgtcggggccgctgctcgggcggcgcggggtctgcgctggggccatggctccgccgcgccgcttcgtcctggagcttcccgactgcaccctggctcacttcgccctaggcgccgacgcccccggcgacgcagacgcccccgacccccgcctggcggcgctgctggggcccccggagcgcagctactcgctgtgcgtgcccgtgaccccggacgccggctgcggggcccgggtccgggcggcgcggctgcaccagcgcctgctgcaccagctgcgccgcggccccttccagcggtgccagctgctcaggctgctctgctactgcccgggcggccaggccggcggcgcacagcaaggcttcctgctgcgcgaccccctggatgaccctgacacccggcaagcgctgctcgagctgctgggcgcctgtcaggaggcaccacgcccgcacttgggcgagttcgaggccgacccgcgcggccagctgtggcagcgcctctgggaggtgcaagacggcaggcggctgcaggtgggctgcgcacaggtcgtgcccgtcccggagcccccgctgcacccggtggtgccagacttgcccagttccgtggtcttcccggaccgggaagccgcccgggccgttttggaggagtgtacctcctttattcctgaagcccgggcagtgcttgacctggtcgaccagtgcccaaaacagatccagaaaggaaagttccaggttgttgccatcgaaggactggatgccacgggtaaaaccacggtgacccagtcagtggcagattcacttaaggctgtcctcttaaagtcaccaccctcttgcattggccagtggaggaagatctttgatgatgaaccaactatcattagaagagctttttactctttgggcaattatattgtggcctccgaaatagctaaagaatctgccaaatctcctgtgattgtagacaggtactggcacagcacggccacctatgccatagccactgaggtgagtgggggtctccagcacctgcccccagcccatcaccctgtgtaccagtggccagaggacctgctcaaacctgaccttatcctgctgctcactgtgagtcctgaggagaggttgcagaggctgcagggccggggcatggagaagaccagggaagaagcagaacttgaggccaacagtgtgtttcgtcaaaagtaggtgtcccagtgcaatgcaatgtgagcggcaggcattcctgaagggagatgaaccactggcactggctttaggattgtgaggaagtgatattgtttccagttttcaaacacaagagacaacatcctctaagttacttcagccccttccaatgggcttgtcaccacagggctgcagcattgttatcttaaagcaaaggtcatcggactagggatcagaccctgccactgatcctggctgtgctaggagcagctgcacctgggtaagacagtaagtgtctctgtgcctcagtttccccagtcatagtataatcacacagagcactagataacgagctcatagtaacatctacctattagatgcttcccgtgtgtcaggcattttactgatgttatgtcatccttgtgaggaaaacattagccgtattttacagtttacaactttaaggctcaaaggattaagtgatttgtctaaatgtacataactattcactagtaaaaccgggattaaaatctttctgattttgcagccagtgtttttgttttaattagaaagttataaacacgactgcagaagagagtctggccaggcctcctgcctcatgactgagtatgaatcagttctacaccactgcctttaaaaactgaagcagaaatattttctctaactgaacaatgatagccctgttatcataacatagtaatgttataaataatggtagctgctgtgggtaaagatattatgttaagcaatttacttgtattaattccattaaacttcagtgaacatttgcaaggaa

SEQ ID NO: 90705 - DNA, 1230 bp, Artificial Sequence
  derived and/or modified sequence
atggccttcgccagaagactgctgagaggccccctgagcggccccctgctgggcagaagaggcgtgtgcgccggcgccatggccccccccagaagattcgtgctggagctgcccgactgcaccctggcccacttcgccctgggcgccgacgcccccggcgacgccgacgcccccgaccccagactggccgccctgctgggcccccccgagagaagctacagcctgtgcgtgcccgtgacccccgacgccggctgcggcgccagagtgagagccgccagactgcaccagagactgctgcaccagctgagaagaggccccttccagagatgccagctgctgagactgctgtgctactgccccggcggccaggccggcggcgcccagcagggcttcctgctgagagaccccctggacgaccccgacaccagacaggccctgctggagctgctgggcgcctgccaggaggcccccagaccccacctgggcgagttcgaggccgaccccagaggccagctgtggcagagactgtgggaggtgcaggacggcagaagactgcaggtgggctgcgcccaggtggtgcccgtgcccgagccccccctgcaccccgtggtgcccgacctgcccagcagcgtggtgttccccgacagagaggccgccagagccgtgctggaggagtgcaccagcttcatccccgaggccagagccgtgctggacctggtggaccagtgccccaagcagatccagaagggcaagttccaggtggtggccatcgagggcctggacgccaccggcaagaccaccgtgacccagagcgtggccgacagcctgaaggccgtgctgctgaagagcccccccagctgcatcggccagtggagaaagatcttcgacgacgagcccaccatcatcagaagagccttctacagcctgggcaactacatcgtggccagcgagatcgccaaggagagcgccaagagccccgtgatcgtggacagatactggcacagcaccgccacctacgccatcgccaccgaggtgagcggcggcctgcagcacctgccccccgcccaccaccccgtgtaccagtggcccgaggacctgctgaagcccgacctgatcctgctgctgaccgtgagccccgaggagagactgcagagactgcagggcagaggcatggagaagaccagagaggaggccgagctggaggccaacagcgtgttcagacagaagtag

SEQ ID NO: 90706 - protein, 366 aa, Artificial Sequence
  derived and/or modified sequence
MAFARRLLRGPLSGPLLGRRGVCAGAMAPPRRFVLELPDCTLAHFALGADAPGDADAPDPRLAALLGPPERSYSLCVPVTPDAGCGARVRAARLHQRLLHQLRRGPFQRCQLLRLLCYCPGGQAGGAQQGFLLRDPLDDPDTRQALLELLGACQEAPRPHLGEFEADPRGQLWQRLWEVQDGRRLQVGCAQVVPVPEPPLHPVVPDLPSSVVFPDREAARAVLEECTSFIPEARAVLDLVDQCPKQIQKGKFQVVAIEGLDATGKTTVTQSVADSLKAVLLKSPPSCIGQWRKIFDDEPTIIRRAFYSLGNYIVASEIAKESAKSPVIVDRSQLGGTLYHPSLHLLGSEVCGTGILDSSHSSQGLE

SEQ ID NO: 90707 - DNA, 1101 bp, Artificial Sequence
  derived and/or modified sequence
atggcctttgcaaggagactactgcggggccccctgtccggtcctctcctggggcggcggggggtgtgtgcaggcgctatggctcctccaagaaggttcgtactggagctccccgactgtactttagcccactttgctctgggtgcagatgctccaggcgacgctgacgcccccgatcctaggctggccgctctcctgggaccgccagaacgtagttatagtctatgtgtgccagtgactccagacgccggctgcggagctcgggtgagagccgcccggctgcaccagcgcctcctgcaccaactgaggcgcggccccttccaacgctgccagctgctgcggttattatgctactgcccaggcgggcaagccgggggggcccagcagggctttcttttgcgggacccactggatgaccctgatacaagacaggcactgctggagctgctgggggcctgtcaggaggcccctcgaccgcacctgggcgagtttgaagccgatcctcgaggtcagttgtggcagagactgtgggaggtccaggacggcaggagattgcaggttggctgcgctcaggtcgtacccgttccagagccccccctccaccccgtggtgccagacctaccctccagcgtagtttttccggatcgggaggcagcacgagcagtcttagaagagtgcacgagtttcatcccggaggcccgcgcagttctggatttggtggatcaatgccctaaacagatccagaaggggaagttccaggtggtggctattgaagggctggatgcaacaggtaaaacaaccgtaacccaatcagttgcagactccctgaaggccgtgctgttaaagtcccctccaagctgcattggacagtggcggaagatcttcgacgacgagcctacaattataagacgcgccttctactctcttggaaattacatcgtcgcaagtgaaatcgcaaaagagtctgctaagtctcctgttatagttgacaggtcccagctcggcggaactttatatcacccctctcttcacctgcttgggagtgaagtctgcgggaccggcattttagacagcagtcatagttcacagggcctagaatag

SEQ ID NO: 90708 - DNA, 1101 bp, Artificial Sequence
  derived and/or modified sequence
atggcctttgcccggcggctgctgcggggccccctgagcggccccctgctgggcagaagaggagtgtgtgccggggccatggcccccccaagaagatttgtgctggagctgcctgactgcaccctggcccactttgccctgggcgcagatgcccctggagatgctgatgccccagacccccggctggccgccctgctgggccccccagagaggagctacagcctgtgtgtgcctgtgaccccagatgctggctgtggggcccgggtgcgggccgcccggctgcaccagaggctgctgcaccagctgcggcggggccccttccagcgctgccagctgctgcggctgctgtgctactgccctgggggccaggccggcggggcccagcagggcttcctgctgcgggaccccctggatgatcctgacacccggcaggccctgctggagctgctgggcgcctgccaggaggccccccggccccacctgggggagtttgaggccgacccccggggccagctgtggcagaggctgtgggaggtgcaggatggaagaaggctgcaggtgggctgtgcccaggtggtgcctgtgcctgagccccccctgcaccctgtggtgcctgacctgcccagctctgtggtgtttcctgaccgggaggccgcccgggctgtgctggaggagtgcaccagcttcatccctgaggcccgggctgtgctggacctggtggaccagtgccccaagcagatccagaagggcaagttccaggtggtggccatcgagggcctggatgccaccgggaagaccaccgtgacccagagcgtggccgacagcctgaaggctgtgctgctgaagagcccccccagctgcatcggccagtggaggaagatctttgatgatgagcccaccatcatcagaagagccttctacagcctgggcaactacatcgtggccagcgagatcgccaaggagagcgccaagagccctgtgattgtggacaggagccagctgggcggcaccctgtaccaccccagcctgcacctgctgggcagcgaggtgtgtggcaccggcatcctggacagcagccacagcagccagggcctggagtag

SEQ ID NO: 90709 - DNA, 1101 bp, Artificial Sequence
  derived and/or modified sequence
atggccttcgcccggcggctgctgcggggccccctgagcggcccccttctagggaggcgaggcgtttgtgctggcgctatggcacctcccagaagattcgtactcgaactccccgattgcactctggcccattttgctcttggagctgacgctcctggggacgctgacgcccccgatccacgactcgccgccttgctgggacctccagaacgcagctacagcctttgcgtccccgttactccagacgctggttgcggcgcccgtgtgcgggctgcccgtttgcaccaaagactgctgcatcaactacgccgcgggccgtttcaaaggtgccagttgctccggctcctgtgctactgcccaggtggtcaggcaggcggggcacaacaaggattcttactccgcgacccccttgacgaccccgatactaggcaagcacttctggagttactgggagcctgccaggaagcaccacggcctcatcttggagaattcgaggcggacccccgcgggcagctctggcagcgattgtgggaggtccaagacggccgtagactccaggtcggctgtgcccaggttgtgcccgtgccagagccgccactccaccccgtggtacctgatctgccatctagcgtggtgtttccggatagggaagctgcgcgcgccgtgttagaagaatgcaccagcttcattcccgaggctcgagcggtcctggatctagtcgatcaatgccccaagcagatacagaagggaaaatttcaggtcgtggcaattgaggggctggacgccacaggcaagactactgttactcaatcagtggctgacagtctcaaagctgtactgctgaagagccccccctcgtgtattggacaatggcgcaagatctttgatgatgagcccactataatacggcgagcattttatagcttaggcaactacattgtggcctcagagatcgccaaggaatcagccaaatcacccgtgattgtagatcgctcacagctcggcggtacgctatatcaccccagcttacatctacttggctcagaggtctgtgggacaggtatactcgacagcagtcattcgtcccagggccttgagtag

SEQ ID NO: 90710 - DNA, 1101 bp, Artificial Sequence
  derived and/or modified sequence
atggccttcgctcgccgactgctgcgcggacctctttccgggccattgctgggcaggaggggagtgtgcgccggtgccatggcaccgccaagacggttcgtgctcgaactgcccgactgcacactggcccactttgccctgggcgcagacgcaccaggcgacgcagacgcccctgatccccgtcttgcagctctgttggggccacctgagcgtagctactcactgtgtgtgccagtaacaccagacgccggatgcggagcacgtgttagagcagcccgactgcatcagaggcttctgcaccagctgcggcgaggaccatttcagcgatgccagctgctacgtctcctttgttactgtccagggggtcaagcaggcggagcgcagcaggggtttttattacgggatccacttgatgatcccgacacaaggcaggcgttgctcgagctgttgggcgcatgtcaggaggcaccccgacctcacctgggggaatttgaagcagatcccagaggacagttgtggcagagattatgggaagtgcaagatgggcgtcgattacaagtcggatgtgctcaggtggttcctgtgccagagcctccactgcacccggtggtcccagatttgcctagttccgtcgtgtttccagatagagaggccgctcgtgcagtgctcgaggaatgcaccagctttatcccagaagcaagagctgtgctggacttggttgaccagtgcccaaaacagattcagaagggtaagtttcaggtcgtggcaattgagggcctggacgccaccggaaagacgacagtgacacaaagtgtggcagattctctgaaggccgtgctcctaaagtctcctccgagctgtattggtcagtggaggaagatttttgatgacgagcccacaatcatccggagagccttctacagcctgggtaactatatcgtggccagcgagattgccaaggagtcggcaaagagccccgttattgtggaccgaagtcagttgggaggtacactgtaccacccgagtttacacctacttggctctgaagtgtgtggcacaggaatactcgattcgagccattcctctcaggggctggaatag

SEQ ID NO: 90711 - DNA, 1210 bp, Artificial Sequence
  derived and/or modified sequence
gtttcccgctggcgcctggctccctccgggtttcgtttcccgccggcgcctggctcccgccaggtttcgtttccgaggcggggccgagggcggcgtcgctgaggcgcccatggccttcgcccgccggctcctgcgcgggccactgtcggggccgctgctcgggcggcgcggggtctgcgctggggccatggctccgccgcgccgcttcgtcctggagcttcccgactgcaccctggctcacttcgccctaggcgccgacgcccccggcgacgcagacgcccccgacccccgcctggcggcgctgctggggcccccggagcgcagctactcgctgtgcgtgcccgtgaccccggacgccggctgcggggcccgggtccgggcggcgcggctgcaccagcgcctgctgcaccagctgcgccgcggccccttccagcggtgccagctgctcaggctgctctgctactgcccgggcggccaggccggcggcgcacagcaaggcttcctgctgcgcgaccccctggatgaccctgacacccggcaagcgctgctcgagctgctgggcgcctgtcaggaggcaccacgcccgcacttgggcgagttcgaggccgacccgcgcggccagctgtggcagcgcctctgggaggtgcaagacggcaggcggctgcaggtgggctgcgcacaggtcgtgcccgtcccggagcccccgctgcacccggtggtgccagacttgcccagttccgtggtcttcccggaccgggaagccgcccgggccgttttggaggagtgtacctcctttattcctgaagcccgggcagtgcttgacctggtcgaccagtgcccaaaacagatccagaaaggaaagttccaggttgttgccatcgaaggactggatgccacgggtaaaaccacggtgacccagtcagtggcagattcacttaaggctgtcctcttaaagtcaccaccctcttgcattggccagtggaggaagatctttgatgatgaaccaactatcattagaagagctttttactctttgggcaattatattgtggcctccgaaatagctaaagaatctgccaaatctcctgtgattgtagacaggtcccagctgggaggaaccttataccatccttctctccacctgctcggcagtgaagtttgtgggactggaatcttggattcatcacactcgagtcaaggcctggaatga

SEQ ID NO: 90712 - DNA, 1101 bp, Artificial Sequence
  derived and/or modified sequence
atggccttcgccagaagactgctgagaggccccctgagcggccccctgctgggcagaagaggcgtgtgcgccggcgccatggccccccccagaagattcgtgctggagctgcccgactgcaccctggcccacttcgccctgggcgccgacgcccccggcgacgccgacgcccccgaccccagactggccgccctgctgggcccccccgagagaagctacagcctgtgcgtgcccgtgacccccgacgccggctgcggcgccagagtgagagccgccagactgcaccagagactgctgcaccagctgagaagaggccccttccagagatgccagctgctgagactgctgtgctactgccccggcggccaggccggcggcgcccagcagggcttcctgctgagagaccccctggacgaccccgacaccagacaggccctgctggagctgctgggcgcctgccaggaggcccccagaccccacctgggcgagttcgaggccgaccccagaggccagctgtggcagagactgtgggaggtgcaggacggcagaagactgcaggtgggctgcgcccaggtggtgcccgtgcccgagccccccctgcaccccgtggtgcccgacctgcccagcagcgtggtgttccccgacagagaggccgccagagccgtgctggaggagtgcaccagcttcatccccgaggccagagccgtgctggacctggtggaccagtgccccaagcagatccagaagggcaagttccaggtggtggccatcgagggcctggacgccaccggcaagaccaccgtgacccagagcgtggccgacagcctgaaggccgtgctgctgaagagcccccccagctgcatcggccagtggagaaagatcttcgacgacgagcccaccatcatcagaagagccttctacagcctgggcaactacatcgtggccagcgagatcgccaaggagagcgccaagagccccgtgatcgtggacagaagccagctgggcggcaccctgtaccaccccagcctgcacctgctgggcagcgaggtgtgcggcaccggcatcctggacagcagccacagcagccagggcctggagtag

SEQ ID NO: 90713 - DNA, 1509 bp, Artificial Sequence
  derived and/or modified sequence
atgaagggcgaaataaccctctcgcaatggatcccactgatggaggagaattgtcgcaagtgcagcgagacagctaaggtctgcttaccaaaaaatttctctatcaaagagatctttgacaaggcaatctctgcccgcaaaataaacagacctatgctgcaggcggctctgatgctgaggaagaaaggctttaccactgccatcctgacgaacacttggctggatgatcgcgctgagcgggatggactcgctcagctcatgtgcgagctgaaaatgcatttcgactttttgatcgaaagctgtcaggtgggaatggtgaaacccgaacctcagatctataaatttcttttagatactctgaaagcttctcctagcgaagtggtgttcctggatgacattggtgccaacctgaaaccggctcgtgacttgggcatggtcaccattctggttcaggacacagatacagccctcaaagaactggagaaggtaaccgggatccagctcctaaatacccctgcaccactccctaccagctgcaacccatccgacatgtcccacggctatgtcacagtcaagccgcgggtgcgcttgcattttgtggaactcggctccggtccggccgtctgcctatgccacggctttccagagtcctggtatagctggcggtatcagattccagccttagcccaggcaggttacagggttctggctatggacatgaaagggtatggtgaaagctcagctccaccagagatcgaagaatactgcatggaggttttatgcaaggagatggtcacgttcctggataagttaggactttcccaagctgttttcatcggccacgactggggcggaatgctcgtttggtatatggctttattttatccagaacgtgtgcgagcagttgctagtctcaacacacccttcatcccagccaaccccaatatgtccccactcgaaagcattaaggccaaccccgtttttgattatcagctgtattttcaggagcccggtgtcgccgaagccgagctggagcagaatctgtcacggaccttcaagtccctgtttcgggcctccgacgagtccgtattgagcatgcataaggtatgcgaggcagggggcctgttcgtcaactcaccagaggaaccaagtttgtcccgcatggtgactgaggaggaaattcagttctatgtgcagcagtttaagaagtcaggctttagaggtcccctgaattggtatcgtaacatggaacgtaactggaagtgggcctgcaagtctctaggccgaaaaattctcatcccggcactaatggtcactgccgagaaagacttcgtgctggtcccgcagatgagccagcatatggaggattggatcccccacctcaagcgcggccacattgaggactgcggacattggacgcagatggataaacctacagaggtgaaccaaatcctgattaaatggctcgatagcgatgcaaggaaccccccagttgtgtccaagatgtag

SEQ ID NO: 90714 - DNA, 1470 bp, Artificial Sequence
  derived and/or modified sequence
atggaggaaaattgcagaaagtgtagtgaaacagccaaggtctgtctgcccaagaatttctctattaaggagatcttcgacaaagccatcagcgcaaggaaaataaaccggccgatgctgcaagcagccctcatgctacggaaaaaaggctttacaacggctatcctaactaatacctggttggatgatagggcggagagagatggccttgctcaactcatgtgcgagcttaaaatgcactttgacttcctaatcgaaagctgtcaagtagggatggtcaaacctgaaccgcaaatttacaaatttttgctggatactctgaaggcttcaccttcagaggtggttttcttagacgacataggcgcaaatctcaaacctgccagggaccttgggatggtaaccatcctggtccaggacacagacaccgctctgaaggagctggaaaaagtcacaggtattcagctgctgaatacaccggcgcccctccctacaagttgcaatccctctgacatgtctcatgggtacgtaacggtgaaaccccgagtgagactgcactttgttgaactgggatccgggcccgccgtctgtctctgccacggatttcctgagagctggtacagctggagataccaaattccagcccttgcacaggcggggtaccgggtcctggctatggacatgaaggggtacggagaatcctcagccccacctgaaatcgaagagtactgcatggaagtgttgtgtaaggaaatggtgacatttcttgacaagctagggctgtctcaggctgtcttcatcgggcacgactggggaggaatgctggtatggtatatggccctgttttacccagagcgtgtgagggccgtggccagcctcaacaccccatttattccagccaatcctaacatgagccccttggaaagtattaaggctaatcctgtgttcgactaccaactgtacttccaggagccaggcgtagctgaggcagaactagaacagaacctttctagaacttttaagtctctgttcagagcctcagacgagtctgtcctgagtatgcataaggtgtgtgaggccggagggttgtttgtaaactctcccgaggagccgtctctgtccaggatggtgacagaggaagagattcagttctacgtccaacaattcaagaaatccgggttcaggggaccattaaactggtataggaatatggagaggaattggaaatgggcctgtaagagtttgggacgcaagattctaatacccgccctgatggttaccgctgagaaagatttcgttctggtgccccagatgtcccagcatatggaggactggataccccatctcaagcgggggcacatcgaggactgcggccattggacacagatggataagccaaccgaagtgaatcagattctgattaagtggttggactctgacgccagaaacccaccagtggtgtccaagatgtag

SEQ ID NO: 90715 - DNA, 1509 bp, Artificial Sequence
  derived and/or modified sequence
atgaagggggagatcaccctgagccagtggatccccctgatggaggagaactgcaggaagtgcagcgagacagccaaggtgtgcctgcccaagaacttcagcatcaaggagatctttgacaaggccatcagcgccaggaagatcaaccggcccatgctgcaggccgccctgatgctgaggaagaagggcttcaccacagccatcctgaccaacacctggctggatgacagagctgagagagatggcctggcccagctgatgtgtgagctgaagatgcactttgacttcctgattgagagctgccaggtgggcatggtgaagccagagccccagatctacaagttcctgctggacaccctgaaggccagccccagcgaggtggtgttcctggatgacattggagccaacctgaagccagcccgggacctgggcatggtgaccatcctggtgcaggacacagacacagccctgaaggagctggagaaggtgacaggcatccagctgctgaacaccccagcccccctgcccaccagctgcaaccccagcgacatgagccacggctacgtgacagtgaagccccgggtgcggctgcactttgtggagctgggcagcggccctgctgtgtgcctgtgccacggcttccctgagagctggtacagctggagataccagatcccagccctggcccaggccggctacagagtgctggccatggacatgaagggctatggagagagcagcgcccctcctgagattgaggagtactgcatggaggtgctgtgcaaggagatggtgaccttcctggacaagctgggcctgagccaggccgtgttcatcggccatgactggggcggcatgctggtgtggtacatggccctcttctacccagagcgggtgcgggctgtggccagcctgaacacccccttcatcccagccaaccccaacatgagccccctggagagcatcaaggccaaccctgtgtttgactaccagctgtacttccaggagcccggggtggccgaggccgagctggagcagaacctgagcaggaccttcaagagcctcttccgggccagtgatgagagcgtgctgtccatgcacaaggtgtgtgaggccggcggcctgtttgtgaacagccctgaggagcccagcctgagcaggatggtgacagaggaggagatccagttctacgtgcagcagttcaagaagagcggcttccggggccccctgaactggtacagaaacatggagaggaactggaagtgggcctgcaagagcctgggcaggaagatcctgatcccagccctgatggtgacagctgagaaggactttgtgctggtgccccagatgagccagcacatggaggactggatcccccacctgaagaggggccacatcgaggactgtggccactggacccagatggacaagcccacagaggtgaaccagatcctgatcaagtggctggacagtgatgccaggaacccccctgtggtgtccaagatgtag

SEQ ID NO: 90716 - DNA, 1470 bp, Artificial Sequence
  derived and/or modified sequence
atggaggagaactgcaggaaatgttctgaaacagccaaggtgtgcctgcccaagaacttcagcatcaaggagatctttgacaaggccatcagcgccaggaagatcaaccggcccatgctgcaggccgccctgatgctgaggaagaagggcttcaccacagccatcctgaccaacacctggctggatgacagagctgagagagatggcctggcccagctgatgtgtgagctgaagatgcactttgacttcctgattgagagctgccaggtgggcatggtgaagccagagccccagatctacaagttcctgctggacaccctgaaggccagccccagcgaggtggtgttcctggatgacatcggggccaacctgaagccagcccgggacctgggcatggtgaccatcctggtgcaggacacagacacagccctgaaggagctggagaaggtgacaggcatccagctgctgaacaccccagcccccctgcccaccagctgcaaccccagcgacatgagccacggctacgtgacagtgaagccccgggtgcggctgcactttgtggagctgggcagcggccctgctgtgtgcctgtgccacggcttccctgagagctggtacagctggagataccagatcccagccctggcccaggccggctacagagtgctggccatggacatgaagggctacggggagagcagcgcccctcctgagattgaggagtactgcatggaggtgctgtgcaaggagatggtgaccttcctggacaagctgggcctgagccaggccgtgttcatcggccatgactggggcggcatgctggtgtggtacatggccctcttctacccagagcgggtgcgggctgtggccagcctgaacacccccttcatcccagccaaccccaacatgagccccctggagagcatcaaggccaaccctgtgtttgactaccagctgtacttccaggagcccggggtggccgaggccgagctggagcagaacctgagcaggaccttcaagagcctcttccgggccagtgatgaatctgtgctgtccatgcacaaggtgtgtgaggccggcggcctgtttgtgaacagccctgaggagcccagcctgagcaggatggtgacagaggaggagatccagttctacgtgcagcagttcaagaagagcggcttccggggccccctgaactggtacagaaacatggagaggaactggaagtgggcctgcaagagcctgggcaggaagatcctgatcccagccctgatggtgacagctgagaaggactttgtgctggtgccccagatgagccagcacatggaggactggatcccccacctgaagaggggccacatcgaggactgtggccactggacccagatggacaagcccacagaggtgaaccagatcctgatcaagtggctggacagtgatgccagaaatcctcctgtggtgtccaagatgtag

SEQ ID NO: 90717 - DNA, 1509 bp, Artificial Sequence
  derived and/or modified sequence
atgaagggcgagatcaccctgagccagtggatccccctgatggaggaaaattgtcgcaaatgctctgaaactgcaaaagtctgcctgccgaagaacttcagcataaaggaaatctttgacaaagctatctctgctcgaaagattaaccgaccaatgttgcaggcagccctaatgctaaggaagaagggattcacgacagccattctgaccaacacctggctggacgaccgagctgaacgggacgggctcgctcaactgatgtgcgagctgaaaatgcatttcgatttcctgattgagagttgtcaagttggtatggtcaaaccagaaccacagatctacaagttcctcttggacaccttgaaagcctctcccagtgaggttgtcttcctggatgatataggtgccaatcttaaacccgctcgagaccttgggatggtcaccatattagtgcaggacacagacacggctttgaaagaactcgagaaggtcacaggaattcaactgctgaacaccccggcccctttacccacatcctgcaacccgtctgatatgtcccatggatacgtcaccgtcaaaccacgcgtgagactgcatttcgtcgaattaggaagtggacctgcggtgtgcctttgccatgggtttccagagtcttggtactcctggaggtatcagatccctgccttagcccaggcggggtatcgcgtgcttgcgatggacatgaaagggtatggcgagagcagcgcaccacctgaaatcgaggaatattgcatggaggtgttgtgtaaagagatggtgacattccttgacaagcttggattatcacaggctgtgttcattggccatgattggggtggcatgctggtgtggtacatggcgctgttctatcccgagcgggtaagggccgtcgcctcgctgaacacacccttcattccagctaacccaaatatgtcccctctggaatccattaaggcaaaccctgtatttgattatcaactgtactttcaggagccaggggtggctgaagccgagttggagcagaatctctctcgcacatttaagagcctcttccgcgcaagtgacgaaagcgtgttgagtatgcataaggtgtgtgaggctgggggcctttttgttaactctccggaggagccttcgctgagtaggatggtgaccgaggaggaaatccagttctatgtccagcaatttaagaagagtggatttaggggaccgctcaattggtatcgcaacatggagcgaaattggaagtgggcgtgtaaatcactcggtcggaaaattctcatccctgcactgatggtaacagccgagaaggacttcgtgcttgtcccccagatgtcccaacacatggaagactggatcccgcatttgaaaagagggcatatagaggattgtggacactggacacagatggataaaccaacggaagttaatcaaatcctgatcaagtggctggacagcgacgcgagaaatccccctgtcgtgtctaagatgtag

SEQ ID NO: 90718 - DNA, 1470 bp, Artificial Sequence
  derived and/or modified sequence
atggaggagaactgccggaagtgcagcgagaccgccaaggtgtgcctccctaagaacttctcaattaaagagattttcgacaaggcaatttccgcccgcaaaatcaaccggcccatgctccaagcagcactgatgttgcggaagaagggattcaccacggcaatccttaccaacacctggcttgatgaccgcgcagaacgcgacgggctggcccagcttatgtgtgagctcaaaatgcactttgacttcctgatagagtcttgccaggtgggaatggttaaaccagaaccacagatctataaattcctcctggacacactgaaggcgagcccatctgaggtggtgttcctagatgatattggcgctaaccttaaacctgcgcgggatctcggcatggtaactatccttgttcaagatacagatactgcactcaaagaattggagaaagtcacaggcatacagctcctgaacaccccagctcctttgcccacttcttgtaatccatccgatatgtctcatggctacgtgactgttaagccgcgtgtgaggttacatttcgtggaactgggaagcggcccagctgtgtgtttgtgccacggcttcccagaatcttggtatagctggcgttaccagatacctgcattagcacaggcaggctaccgggtgctggccatggatatgaaggggtacggcgagagcagtgcacctccagagattgaagaatactgtatggaggtgttgtgcaaagagatggtgactttcctcgacaaattgggcctgtcacaggcagttttcatagggcatgactggggaggcatgctggtgtggtatatggcactgttctacccggagagagtacgtgccgttgcatcgctgaataccccatttattcctgccaaccccaatatgtcacccctggaaagcattaaagcaaacccggttttcgactaccagttatactttcaggagccaggggttgccgaggccgagttagaacagaacctgagccgcacatttaagtctctctttcgtgcttctgacgagtccgtgttaagcatgcataaggtgtgtgaggccggaggcctctttgtcaatagtccagaggaaccatcgctcagccggatggtcacagaggaggaaattcaattttatgttcaacaatttaagaaatctggctttagaggaccactgaactggtaccggaacatggagcgaaactggaagtgggcatgtaagagcttggggaggaaaatcctgattcccgccctcatggttaccgccgagaaggacttcgtgctggttccacagatgtcccaacacatggaagactggattccacacctgaaacgcggacacatcgaggactgcggtcactggacccagatggacaaacctactgaggtaaaccagattcttatcaaatggttggattcagatgccagaaaccctcctgtcgtgtcaaagatgtag

SEQ ID NO: 90719 - DNA, 1509 bp, Artificial Sequence
  derived and/or modified sequence
atgaagggcgagataacgctgtcccaatggatccctctgatggaagagaattgccggaagtgcagtgagactgccaaagtgtgcctcccgaagaatttctcaatcaaggagatatttgacaaggcaattagcgcgaggaaaatcaaccggccaatgctgcaggctgccctaatgcttcgaaagaagggctttaccacagccattttgaccaacacatggttggatgacagggctgagcgtgacgggttagcccagcttatgtgcgagctcaaaatgcactttgattttctgattgagagctgccaggtgggaatggtgaagcctgagccacaaatctacaaattcctgttggacacccttaaggcttcaccctcagaagttgtttttctcgacgacattggcgctaatctcaaacctgcaagggacctcggaatggtgactattctcgtgcaggacaccgacacagcactcaaggagttggaaaaggtcacaggaatccagctcctgaatactcccgcaccactccccacatcgtgtaacccgtcagacatgtcccatggctacgtcacagttaagccaagagttagattgcacttcgtcgagctgggctctggcccagccgtgtgcttatgtcacggctttccagagtcatggtactcctggcggtatcagattccagccttagctcaagctggttacagagtgctcgctatggatatgaaagggtatggagagtcatcagctccacccgagattgaagagtattgtatggaagtgctatgtaaagagatggtgacattccttgacaagttgggattgtctcaggcagtgttcatcgggcatgattggggaggcatgttggtatggtatatggctcttttttacccagaaagggtgcgtgcagtggcttctttgaatacccctttcatcccagcgaaccccaatatgagtccgctggagtcaattaaggctaaccctgtgttcgattatcagctgtacttccaggaaccaggagtggccgaggccgagctagaacagaatctgtcgcgtacatttaagagcctttttcgggctagcgacgagtccgtactgagtatgcacaaggtgtgtgaggcgggaggtttattcgtcaactcaccggaggaaccgtctctgtcccgcatggtaaccgaggaagagattcaattttatgtccaacagtttaaaaagtcaggcttcagaggaccattgaactggtacagaaacatggagaggaattggaagtgggcctgtaaaagcctagggcgtaaaatcctgataccagctctgatggtcacagccgagaaagactttgtgctggtgcctcagatgagccaacatatggaagactggattccccacctgaagagaggccatatcgaagattgtggccattggacccagatggataaaccgacagaagtgaatcagattctcataaaatggctggacagcgacgccaggaacccccctgtggtgagcaaaatgtag

SEQ ID NO: 90720 - DNA, 1470 bp, Artificial Sequence
  derived and/or modified sequence
atggaagaaaattgccggaaatgcagtgaaaccgccaaggtgtgcctccctaaaaatttctccatcaaagagatctttgataaggcgatttctgcaagaaaaattaaccggcctatgctgcaggcggcactcatgctcaggaagaagggcttcactacggcaattctaacgaacacctggctggacgacagagctgagagggatggtctggcccagttgatgtgtgagctaaagatgcatttcgatttcctaatcgaaagctgccaagtgggcatggtgaaaccagaacctcagatctacaagttcctgctggatacgttaaaagcctcacccagcgaagtggtgttcctagatgacatcggggctaacctgaaaccagcccgagacctgggcatggtcaccatcctggtccaagacaccgataccgcattaaaggagctcgaaaaggtgaccggcatccagctactcaacacccccgctccactgccaacaagctgcaacccaagcgacatgtcccatggctatgtgacggtcaagccgagagttaggctgcacttcgtcgagctaggctccgggccagccgtttgcctgtgccacggatttccggagagctggtattcctggcgttaccagattcctgccctggctcaggctggctatcgcgtgctggcgatggatatgaagggatacggcgaatctagcgcacccccagaaatcgaggaatattgtatggaagtgctctgtaaagagatggtgactttcctcgataagctaggcctctctcaagccgtgtttattggacatgactggggaggaatgttggtgtggtacatggccctgttttatccagaaagggttcgagccgttgcatcattgaatacacccttcatccctgccaacccaaacatgagcccattggagtcaatcaaagccaacccagtgtttgattatcagttgtacttccaagagccaggtgtagcagaggctgagctagaacagaacttgagtagaaccttcaagtctcttttcagagccagcgatgaaagtgttctcagtatgcacaaagtctgcgaagccggtggtcttttcgtcaactcaccggaggagccctcactgtcccggatggtgacagaagaagagattcagttctatgttcaacagttcaaaaaatccggcttccgtggacccctcaattggtaccggaatatggaaagaaactggaagtgggcatgcaagtcattaggacgcaaaatcctcattcccgctctgatggtgacagctgaaaaagacttcgtcctggtgccacagatgtctcagcatatggaggattggatcccacacttgaagcgtggccatatcgaggactgcggacattggacacagatggataaacctactgaagtcaatcagattctgattaagtggctggattcagatgctcgaaatccccctgtggtttcgaagatgtag

SEQ ID NO: 90721 - DNA, 1509 bp, Artificial Sequence
  derived and/or modified sequence
atgaagggcgagatcaccctgagccagtggatccccctgatggaggagaactgcagaaagtgcagcgagaccgccaaggtgtgcctgcccaagaacttcagcatcaaggagatcttcgacaaggccatcagcgccagaaagatcaacagacccatgctgcaggccgccctgatgctgagaaagaagggcttcaccaccgccatcctgaccaacacctggctggacgacagagccgagagagacggcctggcccagctgatgtgcgagctgaagatgcacttcgacttcctgatcgagagctgccaggtgggcatggtgaagcccgagccccagatctacaagttcctgctggacaccctgaaggccagccccagcgaggtggtgttcctggacgacatcggcgccaacctgaagcccgccagagacctgggcatggtgaccatcctggtgcaggacaccgacaccgccctgaaggagctggagaaggtgaccggcatccagctgctgaacacccccgcccccctgcccaccagctgcaaccccagcgacatgagccacggctacgtgaccgtgaagcccagagtgagactgcacttcgtggagctgggcagcggccccgccgtgtgcctgtgccacggcttccccgagagctggtacagctggagataccagatccccgccctggcccaggccggctacagagtgctggccatggacatgaagggctacggcgagagcagcgccccccccgagatcgaggagtactgcatggaggtgctgtgcaaggagatggtgaccttcctggacaagctgggcctgagccaggccgtgttcatcggccacgactggggcggcatgctggtgtggtacatggccctgttctaccccgagagagtgagagccgtggccagcctgaacacccccttcatccccgccaaccccaacatgagccccctggagagcatcaaggccaaccccgtgttcgactaccagctgtacttccaggagcccggcgtggccgaggccgagctggagcagaacctgagcagaaccttcaagagcctgttcagagccagcgacgagagcgtgctgagcatgcacaaggtgtgcgaggccggcggcctgttcgtgaacagccccgaggagcccagcctgagcagaatggtgaccgaggaggagatccagttctacgtgcagcagttcaagaagagcggcttcagaggccccctgaactggtacagaaacatggagagaaactggaagtgggcctgcaagagcctgggcagaaagatcctgatccccgccctgatggtgaccgccgagaaggacttcgtgctggtgccccagatgagccagcacatggaggactggatcccccacctgaagagaggccacatcgaggactgcggccactggacccagatggacaagcccaccgaggtgaaccagatcctgatcaagtggctggacagcgacgccagaaacccccccgtggtgagcaagatgtag

SEQ ID NO: 90722 - DNA, 1470 bp, Artificial Sequence
  derived and/or modified sequence
atggaggagaactgcagaaagtgcagcgagaccgccaaggtgtgcctgcccaagaacttcagcatcaaggagatcttcgacaaggccatcagcgccagaaagatcaacagacccatgctgcaggccgccctgatgctgagaaagaagggcttcaccaccgccatcctgaccaacacctggctggacgacagagccgagagagacggcctggcccagctgatgtgcgagctgaagatgcacttcgacttcctgatcgagagctgccaggtgggcatggtgaagcccgagccccagatctacaagttcctgctggacaccctgaaggccagccccagcgaggtggtgttcctggacgacatcggcgccaacctgaagcccgccagagacctgggcatggtgaccatcctggtgcaggacaccgacaccgccctgaaggagctggagaaggtgaccggcatccagctgctgaacacccccgcccccctgcccaccagctgcaaccccagcgacatgagccacggctacgtgaccgtgaagcccagagtgagactgcacttcgtggagctgggcagcggccccgccgtgtgcctgtgccacggcttccccgagagctggtacagctggagataccagatccccgccctggcccaggccggctacagagtgctggccatggacatgaagggctacggcgagagcagcgccccccccgagatcgaggagtactgcatggaggtgctgtgcaaggagatggtgaccttcctggacaagctgggcctgagccaggccgtgttcatcggccacgactggggcggcatgctggtgtggtacatggccctgttctaccccgagagagtgagagccgtggccagcctgaacacccccttcatccccgccaaccccaacatgagccccctggagagcatcaaggccaaccccgtgttcgactaccagctgtacttccaggagcccggcgtggccgaggccgagctggagcagaacctgagcagaaccttcaagagcctgttcagagccagcgacgagagcgtgctgagcatgcacaaggtgtgcgaggccggcggcctgttcgtgaacagccccgaggagcccagcctgagcagaatggtgaccgaggaggagatccagttctacgtgcagcagttcaagaagagcggcttcagaggccccctgaactggtacagaaacatggagagaaactggaagtgggcctgcaagagcctgggcagaaagatcctgatccccgccctgatggtgaccgccgagaaggacttcgtgctggtgccccagatgagccagcacatggaggactggatcccccacctgaagagaggccacatcgaggactgcggccactggacccagatggacaagcccaccgaggtgaaccagatcctgatcaagtggctggacagcgacgccagaaacccccccgtggtgagcaagatgtag

SEQ ID NO: 90723 - DNA, 2038 bp, Artificial Sequence
  derived and/or modified sequence
cttcgcgcatctcccaggttagctgcgtgtccgggtgctaggctgcagacccgccgccatgacgctgcgcgcggccgtcttcgaccttgacggggtgctggcgctgccagcggtgttcggcgtcctcggccgcacggaggaggccctggcgctgcccagtggataccactcatggaagaaaactgcaggaagtgctccgagaccgctaaagtctgcctccccaagaatttctccataaaagaaatctttgacaaggcgatttcagccagaaagatcaaccgccccatgctccaggcagctctcatgctcaggaagaaaggattcactactgccatcctcaccaacacctggctggacgaccgtgctgagagagatggcctggcccagctgatgtgtgagctgaagatgcactttgacttcctgatagagtcgtgtcaggtgggaatggtcaaacctgaacctcagatctacaagtttctgctggacaccctgaaggccagccccagtgaggtcgtttttttggatgacatcggggctaatctgaagccagcccgtgacttgggaatggtcaccatcctggtccaggacactgacacggccctgaaagaactggagaaagtgaccggaatccagcttctcaataccccggcccctctgccgacctcttgcaatccaagtgacatgagccatgggtacgtgacagtaaagcccagggtccgtctgcattttgtggagctgggctccggccctgctgtgtgcctctgccatggatttcccgagagttggtattcttggaggtaccagatccctgctctggcccaggcaggttaccgggtcctagctatggacatgaaaggctatggagagtcatctgctcctcccgaaatagaagaatattgcatggaagtgttatgtaaggagatggtaaccttcctggataaactgggcctctctcaagcagtgttcattggccatgactggggtggcatgctggtgtggtacatggctctcttctaccccgagagagtgagggcggtggccagtttgaatactcccttcataccagcaaatcccaacatgtcccctttggagagtatcaaagccaacccagtatttgattaccagctctacttccaagaaccaggagtggctgaggctgaactggaacagaacctgagtcggactttcaaaagcctcttcagagcaagcgatgagagtgttttatccatgcataaagtctgtgaagcgggaggactttttgtaaatagcccagaagagcccagcctcagcaggatggtcactgaggaggaaatccagttctatgtgcagcagttcaagaagtctggtttcagaggtcctctaaactggtaccgaaacatggaaaggaactggaagtgggcttgcaaaagcttgggacggaagatcctgattccggccctgatggtcacggcggagaaggacttcgtgctcgttcctcagatgtcccagcacatggaggactggattccccacctgaaaaggggacacattgaggactgtgggcactggacacagatggacaagccaaccgaggtgaatcagatcctcattaagtggctggattctgatgcccggaacccaccggtggtctcaaagatgtagaacgcagcgtgtgcccacgctcagcaggtgtgccatccttccacctgctggggcaccattcttagtatacagaggtggccttacacacatcttgcatggatggcagcattgttctgaaggggtttgcagaaaaaaaagattttctttacataaagtgaatcaaatttgacattattttagatcccagagaaatcaggtgtgattagttctccaggcatgaatgcatcgtccctttatctgtaagaacccttagtgtcctgtagggggacagaatggggtggccaggtggtgatttctctttgaccaatgcatagtttggcagaaaaatcagccgttcatttagaagaatcttagcagagattgggatgccttactcaataaagctaagatgactatg

SEQ ID NO: 90724 - protein, 3269 aa, Artificial Sequence
  derived and/or modified sequence
MLSRLSGLANVVLHELSGDDDTDQNMRAPLDPELHQESDMEFNNTTQEDVQERLAYAEQLVVELKDIIRQKDVQLQQKDEALQEERKAADNKIKKLKLHAKAKLTSLNKYIEEMKAQGGTVLPTEPQSEEQLSKHDKSSTEEEMEIEKIKHKLQEKEELISTLQAQLTQAQAEQPAQSSTEMEEFVMMKQQLQEKEEFISTLQAQLSQTQAEQAAQLSSMQQVVREKDARFETQVRLHEDELLQLVTQADVETEMQQKLRVLQRKLEEHEESLVGRAQVVDLLQQELTAAEQRNQILSQQLQQMEAEHNTLRNTVETEREESKILLEKMELEVAERKLSFHNLQEEMHHLLEQFEQAGQAQAELESRYSALEQKHKAEMEEKTSHILSLQKTGQELQSACDALKDQNSKLLQDKNEQAVQSAQTIQQLEDQLQQKSKEISQFLNRLPLQQHETASQTSFPDVYNEGTQAVTEENIASLQKRVVELENEKGALLLSSIELEELKAENEKLSSQITLLEAQNRTGEADREVSEISIVDIANKRSSSAEESGQDVLENTFSQKHKELSVLLLEMKEAQEEIAFLKLQLQGKRAEEADHEVLDQKEMKQMEGEGIAPIKMKVFLEDTGQDFPLMPNEESSLPAVEKEQASTEHQSRTSEEISLNDAGVELKSTKQDGDKSLSAVPDIGQCHQDELERLKSQILELELNFHKAQEIYEKNLDEKAKEISNLNQLIEEFKKNADNNSSAFTALSEERDQLLSQVKELSMVTELRAQVKQLEMNLAEAERQRRLDYESQTAHDNLLTEQIHSLSIEAKSKDVKIEVLQNELDDVQLQFSEQSTLIRSLQSQLQNKESEVLEGAERVRHISSKVEELSQALSQKELEITKMDQLLLEKKRDVETLQQTIEEKDQQVTEISFSMTEKMVQLNEEKFSLGVEIKTLKEQLNLLSRAEEAKKEQVEEDNEVSSGLKQNYDEMSPAGQISKEELQHEFDLLKKENEQRKRKLQAALINRKELLQRVSRLEEELANLKDESKKEIPLSETERGEVEEDKENKEYSEKCVTSKCQEIEIYLKQTISEKEVELQHIRKDLEEKLAAEEQFQALVKQMNQTLQDKTNQIDLLQAEISENQAIIQKLITSNTDASDGDSVALVKETVVISPPCTGSSEHWKPELEEKILALEKEKEQLQKKLQEALTSRKAILKKAQEKERHLREELKQQKDDYNRLQEQFDEQSKENENIGDQLRQLQIQVRESIDGKLPSTDQQESCSSTPGLEEPLFKATEQHHTQPVLESNLCPDWPSHSEDASALQGGTSVAQIKAQLKEIEAEKVELELKVSSTTSELTKKSEEVFQLQEQINKQGLEIESLKTVSHEAEVHAESLQQKLESSQLQIAGLEHLRELQPKLDELQKLISKKEEDVSYLSGQLSEKEAALTKIQTEIIEQEDLIKALHTQLEMQAKEHDERIKQLQVELCEMKQKPEEIGEESRAKQQIQRKLQAALISRKEALKENKSLQEELSLARGTIERLTKSLADVESQVSAQNKEKDTVLGRLALLQEERDKLITEMDRSLLENQSLSSSCESLKLALEGLTEDKEKLVKEIESLKSSKIAESTEWQEKHKELQKEYEILLQSYENVSNEAERIQHVVEAVRQEKQELYGKLRSTEANKKETEKQLQEAEQEMEEMKEKMRKFAKSKQQKILELEEENDRLRAEVHPAGDTAKECMETLLSSNASMKEELERVKMEYETLSKKFQSLMSEKDSLSEEVQDLKHQIEGNVSKQANLEATEKHDNQTNVTEEGTQSIPGETEEQDSLSMSTRPTCSESVPSAKSANPAVSKDFSSHDEINNYLQQIDQLKERIAGLEEEKQKNKEFSQTLENEKNTLLSQISTKDGELKMLQEEVTKMNLLNQQIQEELSRVTKLKETAEEEKDDLEERLMNQLAELNGSIGNYCQDVTDAQIKNELLESEMKNLKKCVSELEEEKQQLVKEKTKVESEIRKEYLEKIQGAQKEPGNKSHAKELQELLKEKQQEVKQLQKDCIRYQEKISALERTVKALEFVQTESQKDLEITKENLAQAVEHRKKAQAELASFKVLLDDTQSEAARVLADNLKLKKELQSNKESVKSQMKQKDEDLERRLEQAEEKHLKEKKNMQEKLDALRREKVHLEETIGEIQVTLNKKDKEVQQLQENLDSTVTQLAAFTKSMSSLQDDRDRVIDEAKKWERKFSDAIQSKEEEIRLKEDNCSVLKDQLRQMSIHMEELKINISRLEHDKQIWESKAQTEVQLQQKVCDTLQGENKELLSQLEETRHLYHSSQNELAKLESELKSLKDQLTDLSNSLEKCKEQKGNLEGIIRQQEADIQNSKFSYEQLETDLQASRELTSRLHEEINMKEQKIISLLSGKEEAIQVAIAELRQQHDKEIKELENLLSQEEEENIVLEEENKKAVDKTNQLMETLKTIKKENIQQKAQLDSFVKSMSSLQNDRDRIVGDYQQLEERHLSIILEKDQLIQEAAAENNKLKEEIRGLRSHMDDLNSENAKLDAELIQYREDLNQVITIKDSQQKQLLEVQLQQNKELENKYAKLEEKLKESEEANEDLRRSFNALQEEKQDLSKEIESLKVSISQLTRQVTALQEEGTLGLYHAQLKVKEEEVHRLSALFSSSQKRIAELEEELVCVQKEAAKKVGEIEDKLKKELKHLHHDAGIMRNETETAEERVAELARDLVEMEQKLLMVTKENKGLTAQIQSFGRSMSSLQNSRDHANEELDELKRKYDASLKELAQLKEQGLLNRERDALLSETAFSMNSTEENSLSHLEKLNQQLLSKDEQLLHLSSQLEDSYNQVQSFSKAMASLQNERDHLWNELEKFRKSEEGKQRSAAQPSTSPAEVQSLKKAMSSLQNDRDRLLKELKNLQQQYLQINQEITELHPLKAQLQEYQDKTKAFQIMQEELRQENLSWQHELHQLRMEKSSWEIHERRMKEQYLMAISDKDQQLSHLQNLIRELRSSSSQTQPLKVQYQRQASPETSASPDGSQNLVYETELLRTQLNDSLKEIHQKELRIQQLNSNFSQLLEEKNTLSIQLCDTSQSLRENQQHYGDLLNHCAVLEKQVQELQAVSKEKGPLNIDVAPGAPQEKNGVHRKSDPEELREPQQSFSEAQQQLCNTRQEVNELRKLLEEERDQRVAAENALSVAEEQIRRLEHSEWDSSRTPIIGSCGTQEQALLIDLTSNSCRRTRSGVGWKRVLRSLCHSRTRVPLLAAIYFLMIHVLLILCFTGHL

SEQ ID NO: 90725 - DNA, 126 bp, Artificial Sequence
  derived and/or modified sequence
atgcttagtcgcctgagcggcctggcgaatgtagtcctgcatgaacttagcggggacgacgacacagatcagaacatgcgcgccccactcgatccggaactccatcaggagtcagatatggagtag

SEQ ID NO: 90726 - DNA, 9810 bp, Artificial Sequence
  derived and/or modified sequence
atgcttagtaggttgtccgggctcgccaacgtggtcttgcatgagctaagcggcgatgacgacaccgatcagaacatgagagccccactggatccggaactgcatcaggagagtgacatggaattcaataacacaacccaggaagacgtacaggaaaggctggcttatgcagagcagttggtggtggaactcaaggacatcattcgacagaaggacgtacagctgcaacaaaaggatgaagccttgcaagaggaacggaaagctgcggataataaaatcaagaaacttaagcttcacgctaaagccaagctgaccagtctgaataagtatatagaggaaatgaaggcacagggcggaaccgtgttgcccacagagccccaatccgaagagcaactctctaaacacgataaatcttctactgaagaagaaatggaaatagaaaaaattaagcataaacttcaagaaaaggaggaactgatctctacccttcaggcgcagctcactcaggctcaggcagagcagcctgctcagagtagtaccgagatggaagaatttgtgatgatgaagcagcagcttcaggagaaagaggaattcatcagcactctccaggcacagttgagccagacacaggcagaacaggctgcacagttgtcgtcaatgcagcaagtcgtcagggagaaggacgcacggtttgagactcaggtcaggctgcacgaagatgagcttcttcagctggtaacacaagccgacgtagaaaccgaaatgcagcagaagcttagagttctgcagcgcaaactggaagagcatgaagaaagtttagttggcagggctcaggtagtggatttgctccaacaggaactgactgctgccgagcagcggaaccagatccttagccagcagctgcagcagatggaagcagaacacaacaccctgcgcaataccgtggagaccgagcgggaggaatcaaaaatactcctggaaaagatggagcttgaagttgctgagcgtaaactcagcttccataatctgcaggaggagatgcaccacttgctggaacagtttgagcaagctggacaggcgcaggcggagctggaaagccggtattcggcactggagcagaagcacaaggctgaaatggaggagaaaacctcgcacatactgtccctgcagaagacaggccaggaattacagagcgcctgtgatgctctcaaagaccaaaactcaaagctgctgcaagacaagaatgagcaggccgtccagtctgcacagaccatccagcagctcgaggaccaactgcagcagaaatccaaggagatcagccagtttctaaatcgtttgcccctgcaacagcacgagaccgctagtcagacctcctttcccgacgtatacaacgagggcacccaagctgtgaccgaagagaatatcgcaagtttgcagaaacgggttgtggagttggagaacgaaaaaggcgcactgttgctttcctctatcgagctagaggagctcaaagcggagaacgaaaagctatccagccagataacccttctggaggcacagaatcgaaccggtgaggccgacagggaggtatccgagatctcaatcgtcgacattgctaacaaacggagtagttcagccgaagagtcaggtcaggacgttttagaaaacacattcagtcaaaagcacaaggaactgtctgtgctattgctggagatgaaagaggctcaggaagagatcgcctttctaaaactacagttgcagggaaagcgcgctgaagaagccgaccacgaagtgctggaccagaaggagatgaagcaaatggaaggggagggcatcgcgccaatcaagatgaaagtattcctggaggataccggtcaggatttccctctaatgccgaacgaggagagctccctgccagctgtagagaaagaacaggcatcaacggagcaccaatccaggactagcgaggaaatctcactcaacgatgcgggtgtggagctgaagtctaccaaacaagatggggacaaatccctcagtgctgtgcctgacatcgggcagtgccaccaggacgaactggaacggttgaagagtcagatactggagttggagctgaacttccataaggctcaagaaatctacgaaaaaaatttggacgagaaggctaaggaaatcagtaatcttaatcagctcattgaggagttcaagaagaacgccgacaacaattcaagcgcgttcaccgctctgagtgaagagcgcgaccagctcctctctcaagtcaaggagctgagtatggtgactgagcttcgtgctcaggtgaagcagctggagatgaacttagctgaagccgaacggcaaagacggttggactatgagtcacagactgcccacgacaacctgctcaccgagcagattcattccttgtccatagaggcaaagagcaaggacgtcaaaattgaagtgctccaaaacgaactagacgatgtacagttgcagtttagcgagcaatcaacattaattaggagcctgcagagtcagttacaaaataaagagagtgaggttttggaaggcgcagagcgagtcaggcacatctctagtaaggttgaggaactgagccaagcattgtcgcaaaaagaattggagatcacaaagatggaccagttgctcctcgaaaagaaaagagacgtagagacgctgcagcagaccatcgaagagaaagaccagcaagtgacagagattagttttagcatgactgagaaaatggtacaactcaacgaggagaaattttccctaggggtggagattaagactctgaaggagcagctgaacttactgtctcgcgccgaggaggccaaaaaggagcaagtggaggaggataatgaggtgagttcaggtttgaagcagaattacgacgagatgtcgcccgcgggccagatttcaaaagaggaactccagcacgaatttgatctgttgaaaaaagaaaatgaacaacggaagcgcaagttgcaggctgcccttataaaccgcaaggaactgcttcaacgcgtcagcagactagaagaagaattggcaaacctcaaagatgaatcaaagaaagagattcctttaagcgagaccgagaggggcgaggtcgaggaagataaggagaataaggagtactccgagaagtgcgtgacatccaaatgccaggaaatagaaatctatttgaaacagacaatctctgagaaggaagtggaattgcagcacatccggaaggacctggaggagaaacttgcagcagaggagcagtttcaggctctggtgaagcaaatgaatcaaaccctccaggataagaccaaccagatcgacctcctccaggctgaaattagcgagaaccaggcaatcattcagaagctgattacttccaatacagatgcctctgacggcgacagcgtggcccttgtcaaggaaaccgttgtgatttcacctccctgcacgggctcgagtgagcactggaagcctgaactcgaggagaaaattttagccctcgagaaggaaaaagagcaattgcagaaaaagctgcaggaagccctgacaagccggaaggccatcctcaaaaaggcacaggagaaggaacggcacttgagagaggaattgaaacagcagaaagacgactacaacagactacaggagcagttcgacgaacagagcaaggaaaatgagaatatcggcgaccagcttagacagttacagatccaggtcagagagtccatcgatggtaagctacctagcacggatcagcaggagagttgtagctctactccaggactcgaggaacctctattcaaagcaactgagcagcatcatacacaaccagtgctggagagtaacctgtgccccgattggcccagccatagcgaggacgccagtgccctgcaagggggcacctctgtcgcccagatcaaggcacaactaaaggagattgaggcagaaaaagttgaattggaacttaaagtcagttcaacgacctctgagctgaccaaaaaatcggaagaggtgttccagctccaggaacaaataaacaagcaaggtttagaaatcgagagtctgaaaactgtatctcacgaggcagaagtgcatgcagagagccttcagcagaaactcgagagctcccaactccagattgctggtctagaacacctgagagaactgcaacctaaactcgacgagctgcagaaactgatctccaagaaggaagaagacgtatcctacctgagcggccagcttagcgaaaaagaagctgcactgacaaagattcagacagaaataattgaacaggaggatctgatcaaggccctgcacacccagctggaaatgcaggcaaaagagcatgatgaaagaatcaaacagctccaggtggaactttgcgagatgaaacagaaacctgaagagatcggtgaggaatctagggcgaagcaacaaatccaacgcaagcttcaggccgcgctgataagccgaaaagaggccctgaaagagaataagagccttcaggaagaactgtctctcgcgcgaggaacgatcgaaagattgaccaaaagccttgctgacgtcgagtctcaggtctccgcacaaaacaaggagaaggatactgttttggggcgcctcgcgctcttacaggaggagcgtgataagctaattactgagatggacagaagccttttagagaaccagagcttgtcgtcgagctgcgagtccctgaagcttgcactagagggacttacagaggacaaagagaagctcgtgaaggagatcgagtccctgaagtctagcaaaatcgcggagtccacggaatggcaagagaagcataaagagttacaaaaggagtatgaaatcttactgcagtcatatgagaacgtttctaatgaagccgaacgtatacaacacgtggtggaagcagtgcggcaggaaaaacaagaactctatgggaagcttcggagcaccgaagctaataaaaaagagaccgagaaacaactgcaggaggccgaacaagagatggaggaaatgaaagaaaaaatgcgcaaattcgcaaaatcgaagcaacagaagatactagaacttgaagaggagaacgatagactccgcgccgaagttcaccctgccggtgatacagctaaagagtgcatggagacactgctctcaagcaacgccagcatgaaggaagagctggagcgggtcaaaatggaatacgaaaccctgtccaaaaagtttcagtctctcatgagcgagaaggattccctttctgaagaggtccaggatctaaagcatcagatagagggcaacgtcagcaagcaagctaatctcgaagctacagagaaacatgacaaccagactaatgtgaccgaggaggggacacagtcaatacccggcgagactgaggagcaagacagcctctccatgtctacgcggcccacctgctccgagtctgtgccctcggctaaaagcgcaaacccggcagtaagcaaggacttcagctctcacgacgagattaacaactatctccagcaaatcgatcagcttaaagaacgaatcgccgggctggaagaggaaaagcagaaaaacaaagagtttagccagactctggagaacgaaaagaacaccctgctcagtcagatctctacgaaagacggggagcttaagatgcttcaggaagaggtgactaagatgaacctactaaaccagcagatccaggaggaattaagtagagtgactaagctcaaggagaccgctgaagaggagaaggatgacctggaggaaagactgatgaatcagcttgccgagctgaatggttcaatcggcaactactgccaggacgtgactgacgctcagatcaaaaatgagctccttgagtcagaaatgaagaacctgaagaaatgcgtgtcggagctagaggaagagaaacagcagctggtaaaggagaagacgaaagtggagagtgagatccgaaaggaatacttggagaagattcagggcgcgcaaaaggagccgggcaataagtcccacgccaaggaactccaggaacttctcaaggaaaaacaacaggaggtgaaacaactgcagaaggattgtatccggtaccaggagaagatctctgccctcgagcggaccgtgaaagccttggagttcgtccaaactgaatctcaaaaggatctggagataactaaggaaaatctggctcaggcggtggaacaccgaaagaaagcacaggctgagctggcctctttcaaagtgttgctggacgatacccagagcgaagcagccagagtgctggcagacaacttaaaactgaagaaagagctgcagagcaataaggagagtgttaagtcccagatgaagcagaaggatgaggacctcgagcggcggctagagcaggctgaagagaagcatctcaaagagaagaaaaatatgcaggagaaattggatgccctcagacgtgagaaggtccatctagaggaaacaatcggtgagatccaggtcaccctgaataagaaagacaaagaagtccagcagctgcaggaaaatcttgattcaactgtgacccagctcgcagcatttacaaaaagtatgtcctcactgcaagacgatagggaccgggtaatagacgaggcgaagaagtgggaacgcaaatttagtgacgctatccaatcaaaggaggaggagatacgactaaaggaggacaattgctcagtactgaaagatcagctgaggcaaatgagcatccatatggaggagctgaagataaatatctcgcgactggagcatgacaagcagatttgggagagtaaagcgcaaaccgaagtacagctccagcagaaagtgtgtgatacactgcagggggagaataaagagctgctgtctcaacttgaggagaccagacatttgtatcactcctcccagaacgaactagctaaacttgaaagtgagctgaaatccctaaaggatcagctcacagaccttagtaactccctggaaaagtgcaaagaacagaaaggaaacctggaaggaatcattaggcaacaagaagcagatatacagaattcgaaattttcctacgagcagctggagactgacctccaagcaagccgcgagctgacaagccggctccacgaagaaatcaatatgaaggaacagaagatcatctctttacttagcggcaaggaggaggcaattcaggtcgcaatcgctgagctgcggcagcagcacgataaagagattaaggagctagagaacctgctgtcacaagaggaggaagaaaatatcgtacttgaggaagagaacaaaaaggccgtagataagacaaatcagctcatggagactctgaaaactatcaaaaaggaaaatatccagcagaaggcccaactggattctttcgtcaagtccatgagtagcctgcagaatgaccgagaccgaatcgtgggagactaccagcagctcgaggagagacacctctcaattatcctggagaaagaccagctcattcaagaggctgccgctgaaaataacaagctgaaggaagaaattagaggtctccggtcccacatggacgatctgaatagcgagaatgccaaactggatgccgaactgattcagtatcgcgaggatctgaatcaggtaattacaatcaaggattctcaacaaaagcagttactggaggttcagcttcagcagaacaaggagctggagaataagtatgccaagctcgaggagaagcttaaggaaagcgaggaggccaacgaggacctcaggaggtctttcaacgcacttcaagaagaaaaacaggatttgagtaaggagatcgagtccctcaaagtgagcatttcgcaactcacgagacaggtgacagcccttcaggaagaaggtactctgggcttgtatcatgcccaactgaaggtgaaggaggaggaggtgcaccggctctctgctctgttttcaagttcccagaagcggattgcggagctagaggaggaattggtatgtgtgcaaaaggaggcagctaagaaagtgggcgaaatcgaggataagctcaagaaagagcttaagcacctgcaccacgacgcagggatcatgcgtaacgaaaccgagactgcagaagagcgggtggccgaactggctagagacctggttgagatggagcagaagctattaatggttaccaaggaaaacaaaggattgactgcccagatccagagctttgggcgctccatgagcagtctgcagaattcacgtgatcacgccaatgaggagcttgatgaactcaagcgaaaatatgacgccagcctgaaggaactggctcagcttaaagaacaagggttgttaaaccgggagcgggacgccctactctctgagactgccttcagtatgaacagtactgaggagaatagcctcagccaccttgagaagctcaaccagcagcttttgagcaaggacgagcagctgctgcacctgtcctctcagttagaagacagttataaccaggtccagagtttttccaaagctatggccagccttcagaatgagagggaccatctctggaatgaactggagaagtttaggaagtcagaagaggggaagcagagaagcgctgcccaaccaagcaccagccctgccgaggtacaatccctgaagaaagccatgtcaagtctccaaaacgaccgagatcggctgttaaaagagttgaaaaacctccagcagcaatacctacagattaatcaggagatcacagaacttcatcctctgaaggctcagttacaggaatatcaggataagactaaggctttccagatcatgcaagaggagttaagacaggaaaatctctcttggcagcacgaactgcatcagctgcggatggaaaagtcaagttgggagatccatgaacggcggatgaaagagcaatatctaatggcgatttctgacaaggaccaacaactatcacacctccaaaatttaataagggagctccgatcctcgagtagtcagacccagccactgaaggtgcaataccagcgacaggctagtcctgagacttcagcttcccccgacggatcccagaatctcgtgtatgagacggaactcctccgcacccaactcaacgactccctaaaggagattcaccagaaagaattacggatccaacaacttaattccaacttcagtcagctgttagaggagaaaaacacgttgtctatacagctgtgtgacaccagccagtctcttcgagagaaccaacagcactacggggatctgctgaatcattgtgctgtgttggaaaagcaggtccaggagctacaagctgtttcaaaggagaagggtccgctgaatatagacgtcgcccccggggccccccaagagaagaacggcgttcacagaaagtctgaccccgaagaactgagagaaccccagcaatcttttagtgaggctcagcagcagctttgtaacacaaggcaagaggtgaatgaattaagaaagcttctagaggaggagagagatcagagagtggccgcagagaatgccctttccgtggccgaggaacagattagacgcctggagcactcagagtgggatagcagcaggactcctatcatcggctcatgcggaacacaggagcaggccttgctcattgacttgactagcaactcctgtcgaaggaccaggagcggggtcggatggaaaagagttctcaggtctctgtgtcatagccggacgcgtgtgcctttgcttgcggcgatatactttctcatgatccacgtcctcctgatcttatgctttacgggtcacctgtag

SEQ ID NO: 90727 - DNA, 11198 bp, Artificial Sequence
  derived and/or modified sequence
agtccctggcggggcgcggcggtggaaggtgtcgcgtacgggcttcccgagctgacgtggcttgaattgggaggggggcagctggagcctcaggcggcagcgcttctagaaatgctgagccgattatcaggattagcaaatgttgttttgcatgaattatcaggagatgatgacactgatcagaatatgagggctcccctagaccctgaattacaccaagaatctgacatggaatttaataatactacacaagaagatgttcaggagcgcctggcttatgcagagcaattggtggtggagctaaaagatattattagacagaaggatgttcaactgcagcagaaagatgaagctctacaggaagagagaaaagctgctgataacaaaattaaaaaactaaaacttcatgcgaaggccaaattaacttctttgaataaatacatagaagaaatgaaagcacaaggagggactgttctgcctacagaacctcagtcagaggagcaactttccaagcatgacaagagttctacagaggaagagatggaaatagaaaagataaaacataagctccaggagaaggaggaactaatcagcactttgcaagcccagcttactcaggcacaggcagaacaacctgcacagagttctacagagatggaagaatttgtaatgatgaagcaacagctccaggagaaggaagaattcattagcactttacaagcccagctcagccagacacaggcagagcaagctgcacagttgagttccatgcagcaggtggtccgagagaaagatgcccgctttgaaacacaagttcgtcttcatgaagatgagcttcttcagttagtaacccaggcagatgtggaaacagagatgcaacagaaattgagggtgctgcaaaggaagcttgaggaacacgaagaatccttggtgggccgtgctcaggtcgttgacttgctgcaacaggagctgactgctgctgagcagagaaaccagattctctctcagcagttacagcagatggaagctgagcataatactttgaggaacactgtggaaacagaaagagaggagtccaagattctactggaaaagatggaacttgaagtggcagagagaaaattatccttccataatctgcaggaagaaatgcatcatcttttagaacagtttgagcaagcaggccaagcccaggctgaactagagtctcggtatagtgctttggagcagaagcacaaagcagaaatggaagagaagacctctcatattttgagtcttcaaaagactggacaagagctgcagtctgcctgtgatgctctaaaggatcaaaattcaaagcttctccaagataagaatgagcaagcagttcagtcagcccagaccattcagcaactggaagatcagctccagcaaaaatccaaagaaattagccaatttctaaatagactgcccttgcaacaacatgaaacagcatctcagacttctttcccagatgtttataatgagggcacacaggcagtcactgaggagaatattgcttctttgcagaagagagtggtagaactagagaatgaaaagggagccttgctccttagttctatagagctggaggagctgaaagctgagaatgaaaaactgtcttctcagattactctcctagaggctcagaatagaactggggaggcagacagagaagtcagtgagatcagcattgttgatattgccaacaagaggagctcttctgctgaggaaagtggacaagatgttctagaaaacacattttctcagaaacataaagaattatcagttttattgttggaaatgaaagaagctcaagaggaaattgcatttcttaaattacagctccagggaaaaagggctgaggaagcagatcatgaggtccttgaccagaaagaaatgaaacagatggagggtgagggaatagctccaattaaaatgaaagtatttcttgaagatacagggcaagattttcccttaatgccaaatgaagagagcagtcttccagcagttgaaaaagaacaggcgagcactgaacatcaaagtagaacatctgaggaaatatctttaaatgatgctggagtagaattgaaatcaacaaagcaggatggtgataaatccctttctgctgtaccagatattggtcagtgtcatcaggatgagttggaaaggttaaaaagtcaaattttggagctcgagctaaactttcataaagcacaagaaatctatgagaaaaatttagatgagaaagctaaggaaattagcaacctaaaccagttgattgaggagtttaagaaaaatgctgacaacaacagcagtgcattcactgctttgtctgaagaaagagaccagcttctctctcaggtgaaggaacttagcatggtaacagaattgagggctcaggtaaagcaactggaaatgaaccttgcagaagcagaaaggcaaagaagacttgattatgaaagccaaactgcccatgacaacctgctcactgaacagatccatagtctcagcatagaagccaaatctaaagatgtgaaaattgaagttttacagaatgaactggatgatgtgcagcttcagttttctgagcagagtaccctgataagaagcctgcaaagccagctgcaaaataaggaaagtgaagtgcttgagggggcagaacgtgtaaggcatatctcaagtaaagtggaagaactgtcccaggctctttcacagaaggaacttgaaataacaaaaatggatcagctcttactagagaaaaagagagatgtggaaaccctccaacaaaccatcgaggagaaggatcaacaagtgacagaaatcagctttagtatgactgagaaaatggttcagcttaatgaagagaagttttctcttggggttgaaattaagactcttaaagaacagctaaatttattatccagagctgaggaagcaaaaaaagagcaggtggaagaagataatgaagtttcttctggccttaaacaaaattatgatgagatgagcccagcaggacaaataagtaaggaagaacttcagcatgaatttgaccttctgaagaaagaaaatgagcagagaaagagaaagctccaggcagctcttattaacagaaaggagcttctgcaaagagtcagtagattggaagaagaattagccaacttgaaagatgaatctaagaaagaaatcccactcagtgagactgagaggggagaagtggaagaagataaagaaaacaaagaatactcagaaaaatgtgtgacttctaagtgccaagaaatagaaatttatttaaaacagacaatatctgagaaagaagtggaactacagcatataaggaaggatttggaagaaaagctggcagctgaagagcaattccaggctctggtcaaacagatgaatcagaccttgcaagataaaacaaaccaaatagatttgctccaagcagaaatcagtgaaaaccaagcaattatccagaagttaatcacaagtaacacggatgcaagtgatggggactccgtagcacttgtaaaggaaacagtggtgataagtccaccttgtacaggtagtagtgaacactggaaaccagaactagaagaaaagatactggcccttgaaaaagaaaaggagcaacttcaaaagaagctacaggaagccttaacctcccgcaaggcaattcttaaaaaggcacaggagaaagaaagacatctcagggaggagctaaagcaacagaaagatgactataatcgcttgcaagaacagtttgatgagcaaagcaaggaaaatgagaatattggagaccagctaaggcaactccagattcaagtaagggaatccatagacggaaaactcccaagcacagaccagcaggaatcgtgttcttccactccaggtttagaagaacctttattcaaagccacagaacagcatcacactcaacctgttttagagtccaacttgtgcccagactggccttctcattctgaagatgcgagtgctctgcagggcggaacttctgttgcccagattaaggcccagctgaaggaaatagaggctgagaaagtagagttagaattgaaagttagttctacaacaagtgagcttactaaaaaatcagaagaggtatttcagttacaagagcagataaataaacagggtttagaaatcgagagtctaaagacagtatcccatgaagctgaagtccatgccgaaagcctgcagcagaaattggaaagcagccaactacaaattgctggcctagaacatctaagagaattgcaacctaaactggatgaactgcaaaaactcataagcaaaaaggaagaagacgttagctacctttctggacaacttagtgagaaagaagcagctctcactaaaatacagacagagataatagaacaagaagatttaattaaggctctgcatacacagctagaaatgcaagccaaagagcatgatgagaggataaagcagctacaggtggaactttgtgaaatgaagcaaaaaccagaagagattggagaagaaagtagagcaaagcaacaaatacaaaggaaactgcaagctgcccttatttcccgaaaagaagcactaaaagaaaacaaaagtctccaagaggaattgtctttggccagaggtaccattgaacgtctcaccaagtctctggcagatgtggaaagccaagtttctgctcaaaataaagaaaaagatacggtcttaggaaggttagctcttcttcaagaagaaagagacaaactcattacagaaatggacaggtctttattggaaaatcagagtctcagcagctcctgtgaaagtctaaaactagctctagagggtcttactgaagacaaggaaaagttagtgaaggaaattgaatctttgaaatcttctaagattgcagaaagtactgagtggcaagagaaacacaaggagctacaaaaagagtatgaaattcttctgcagtcctatgagaatgttagtaatgaagcagaaaggattcagcatgtggtggaagctgtgaggcaagagaaacaagaactgtatggcaagttaagaagcacagaggcaaacaagaaggagacagaaaagcagttgcaggaagctgagcaagaaatggaggaaatgaaagaaaagatgagaaagtttgctaaatctaaacagcagaaaatcctagagctggaagaagagaatgaccggcttagggcagaggtgcaccctgcaggagatacagctaaagagtgtatggaaacacttctttcttccaatgccagcatgaaggaagaacttgaaagggtcaaaatggagtatgaaaccctttctaagaagtttcagtctttaatgtctgagaaagactctctaagtgaagaggttcaagatttaaagcatcagatagaaggtaatgtatctaaacaagctaacctagaggccaccgagaaacatgataaccaaacgaatgtcactgaagagggaacacagtctataccaggtgagactgaagagcaagactctctgagtatgagcacaagacctacatgttcagaatcggttccatcagcgaagagtgccaaccctgctgtaagtaaggatttcagctcacatgatgaaattaataactacctacagcagattgatcagctcaaagaaagaattgctggattagaggaggagaagcagaaaaacaaggaatttagccagactttagaaaatgagaaaaataccttactgagtcagatatcaacaaaggatggtgaactaaaaatgcttcaggaggaagtaaccaaaatgaacctgttaaatcagcaaatccaagaagaactctccagagttaccaaactaaaggagacagcagaagaagagaaagatgatttggaagagaggcttatgaatcaattagcagaacttaatggaagcattgggaattactgtcaggatgttacagatgcccaaataaaaaatgagctattggaatctgaaatgaagaaccttaaaaagtgtgtgagtgaattggaagaagaaaagcagcagttagtcaaggaaaaaactaaggtggaatcagaaatacgaaaggaatatttggagaaaatacaaggtgctcagaaagaacccggaaataaaagccatgcaaaggaacttcaggaactgttaaaagaaaaacaacaagaagtaaagcagctacagaaggactgcatcaggtatcaagagaaaattagtgctctggagagaactgttaaagctctagaatttgttcaaactgaatctcaaaaagatttggaaataaccaaagaaaatctggctcaagcagttgaacaccgcaaaaaggcacaagcagaattagctagcttcaaagtcctgctagatgacactcaaagtgaagcagcaagggtcctagcagacaatctcaagttgaaaaaggaacttcagtcaaataaagaatcagttaaaagccagatgaaacaaaaggatgaagatcttgagcgaagactggaacaggcagaagagaagcacctgaaagagaagaagaatatgcaagagaaactggatgctttgcgcagagaaaaagtccacttggaagagacaattggagagattcaggttactttgaacaagaaagacaaggaagttcagcaacttcaggaaaacttggacagtactgtgacccagcttgcagcctttactaagagcatgtcttccctccaggatgatcgtgacagggtgatagatgaagctaagaaatgggagaggaagtttagtgatgcgattcaaagcaaagaagaagaaattagactcaaagaagataattgcagtgttctaaaggatcaacttagacagatgtccatccatatggaagaattaaagattaacatttccaggcttgaacatgacaagcagatttgggagtccaaggcccagacagaggtccagcttcagcagaaggtctgtgatactctacagggggaaaacaaagaacttttgtcccagctagaagagacacgccacctataccacagttctcagaatgaattagctaagttggaatcagaacttaagagtctcaaagaccagttgactgatttaagtaactctttagaaaaatgtaaggaacaaaaaggaaacttggaagggatcataaggcagcaagaggctgatattcaaaattctaagttcagttatgaacaactggagactgatcttcaggcctccagagaactgaccagtaggctgcatgaagaaataaatatgaaagagcaaaagattataagcctgctttctggcaaggaagaggcaatccaagtagctattgctgaactgcgtcagcaacatgataaagaaattaaagagctggaaaacctgctgtcccaggaggaagaggagaatattgttttagaagaggagaacaaaaaggctgttgataaaaccaatcagcttatggaaacactgaaaaccatcaaaaaggaaaacattcagcaaaaggcacagttggattcctttgttaaatccatgtcttctctccaaaatgatcgagaccgcatagtgggtgactatcaacagctggaagagcgacatctctctataatcttggaaaaagaccaactcatccaagaggctgctgcagagaataataagcttaaagaagaaatacgaggcttgagaagtcatatggatgatctcaattctgagaatgccaagctagatgcagaactgatccaatatagagaagacctgaaccaagtgataacaataaaggacagccaacaaaagcagcttcttgaagttcaacttcagcaaaataaggagctggaaaataaatatgctaaattagaagaaaagctgaaggaatctgaggaagcaaatgaggatctgcggaggtcctttaatgccctacaagaagagaaacaagatttatctaaagagattgagagtttgaaagtatctatatcccagctaacaagacaagtaacagccttgcaagaagaaggtactttaggactctatcatgcccagttaaaagtaaaagaagaagaggtacacaggttaagtgctttgttttcctcctctcaaaagagaattgcagaactggaagaagaattggtttgtgttcaaaaggaagctgccaagaaggtaggtgaaattgaagataaactgaagaaagaattaaagcatcttcatcatgatgcagggataatgagaaatgaaactgaaacagcagaagagagagtggcagagctagcaagagatttggtggagatggaacagaaattactcatggtcaccaaagaaaataaaggtctcacagcacaaattcagtcttttggaaggtctatgagttccttgcaaaatagtagagatcatgccaatgaggaacttgatgaactgaaaaggaaatatgatgccagtctgaaggaattggcacagttgaaagaacagggactcttaaacagagagagagatgctcttctttctgaaaccgccttttcaatgaactccactgaggagaatagcttgtctcaccttgagaaacttaaccaacagctcctatccaaagatgagcaattgcttcacttgtcctcacaactagaagattcttataaccaagtgcagtccttttccaaggctatggccagtctgcagaatgagagagatcacctgtggaatgagctggagaaatttcgaaagtcagaggaagggaagcagaggtctgcagctcagccttccaccagcccagctgaagtacagagtttaaaaaaagctatgtcttcactccaaaatgacagagacagactactgaaggaattgaagaatctgcagcagcaatacttacagattaatcaagagatcactgagttacatccactgaaggctcaacttcaggagtatcaagataagacaaaagcatttcagattatgcaagaagagctcaggcaggaaaacctctcctggcagcatgagctgcatcagctcaggatggagaagagttcctgggaaatacatgagaggagaatgaaggaacagtaccttatggctatctcagataaagatcagcagctcagtcatctgcagaatcttataagggaattgaggtcttcttcctcccagactcagcctctcaaagtgcaataccaaagacaggcatccccagagacatcagcttccccagatgggtcacaaaatctggtttatgagacagaacttctcaggacccagctcaatgacagcttaaaggaaattcaccaaaaggagttaagaattcagcaactgaacagcaacttctctcagctactggaagagaaaaacaccctttccattcagctctgcgataccagtcagagtcttcgtgagaaccagcagcactatggtgaccttttaaatcactgtgcagtcttggagaagcaggttcaagagctgcaggcggtgagtaaagagaaggggccactaaatatagatgttgctccaggagctccccaggaaaagaatggagttcacagaaagagtgaccctgaggaactaagggaaccgcagcaaagcttttctgaagctcagcagcagctatgcaacaccagacaggaagtgaatgaattaaggaagctgctggaagaagaacgagaccaaagagtggctgctgagaatgctctctctgtggccgaggagcagatcagacggttagagcacagtgaatgggactcttcccggactcctatcattggctcctgtggcactcaggagcaggcactgttaatagatcttacaagcaacagttgtcgaaggacccggagtggcgttggatggaagcgagtcctgcgttcactctgtcattcacggacccgagtgccacttctagcagccatctactttctaatgattcatgtcctgctcattctgtgttttacgggccatctatagacttagttgttactctttggaccactcccctcaaaacttggaattctctcacctctaacatcagaacatcaattccagtggaacagtcttcccatttacaggtcttctctccaactcttcacggaaagtgcctgcaaaaacagaggtggatacgaggacaggttggagctgcagggactggcgagtctgctttcttctactgccctgagcctgaacgcttctgcttaatctgagaatcacatttggtttgttgagcctaatatttgttgagattttgcaggaccctgatcttttgtggtcctgtaaaagatactgaggaatgtctttcagccaagccaagaggatggtttcaataaacctaataatctgaagttcagtatcattttgattgataactttctttgccttgtttgcctgtattttctcctgtttcagggggaaggtggctctgccataaacagagttcagggaaatgaacatgtcacctcataggacatctgatttaggtctcttgcagaatagggtggtgaaagctgaaggaactccctaggggttttagctgttagatcacatgggaggacagcatcttcttccctgccaatttcagatataattggagggagaatttcaggtcttagactataaggatagaatccctttgcttttgcccttgatcacatgtatactaaggtattaagtggcccaagtctttcctttcaccaaagggcagggagaagtgtctatggacagcagggttccaattcttgtcattccaggaatatctgaatattcctggaatgtggaccctgagacagtgctcaggggccactgggagccaatattaggcattgactctcagccaggagtctgactggtctaacaccacactgcaactcctgacctcttgaagtactaagctactttgctgttagtgacagttattacagtttctcagccccattgtctctgccctctgtggcaatggaaggagaatatagagaagacaaaattaaatatagatagacctgagaaggacagccaggatagaattccatttgtgcctattccctgcctcccctcccctcccccatcctaccagttggttattttctcattgcatacgtgatgtgttcactgcctagcctctccctaaagaagagagaagacaagtgggctgactgatctgctctaaatctactgtggtgattaaatcttggttacaacatcctgggaagtttcctgaacaactgtaaaataataaaattattttcagaatg

SEQ ID NO: 90728 - DNA, 126 bp, Artificial Sequence
  derived and/or modified sequence
atgctgagccggctgagcggcctggccaacgtggtgctgcacgagctgtctggagatgatgacacagaccagaacatgagggcccccctggaccctgagctgcaccaggagagtgacatggagtag

SEQ ID NO: 90729 - DNA, 9810 bp, Artificial Sequence
  derived and/or modified sequence
atgctgagccggctgagcggcctggccaacgtggtgctgcacgagctgtctggagatgatgacacagaccagaacatgagggcccccctggaccctgagctgcaccaggagagtgacatggagttcaacaacaccacccaggaggatgtgcaggagcggctggcctatgcagagcagctggtggtggagctgaaggacatcatccggcagaaggatgtgcagctgcagcagaaggatgaggccctgcaggaggagaggaaggctgctgacaacaagatcaagaagctgaagctgcacgccaaggccaagctgaccagcctgaacaagtacatcgaggagatgaaggcccagggcggcaccgtgctgcccacagagccccagagcgaggagcagctgagcaagcatgacaagagcagcacagaggaggagatggagattgagaagatcaagcacaagctgcaggagaaggaggagctgatcagcaccctgcaggcccagctgacccaggcccaggccgagcagcctgcccagagcagcacagagatggaggagtttgtgatgatgaagcagcagctgcaggagaaggaggagttcatcagcaccctgcaggcccagctgagccagacccaggccgagcaggccgcccagctgagctccatgcagcaggtggtgcgggagaaggatgccaggtttgagacccaggtgcggctgcatgaagatgagctgctgcagctggtgacccaggctgatgtggagacagagatgcagcagaagctgcgggtgctgcagaggaagctggaggagcacgaggagagcctggtgggccgggcccaggtggtggacctgctgcagcaggagctgacagctgctgagcagaggaaccagatcctgagccagcagctgcagcagatggaggccgagcacaacaccctgaggaacacagtggagacagagcgggaggagagcaagatcctgctggagaagatggagctggaggtggccgagaggaagctgtccttccacaacctgcaggaggagatgcaccacctgctggagcagtttgagcaggccggccaggcccaggccgagctggagagccgctacagcgccctggagcagaagcacaaggccgagatggaggagaagaccagccacatcctgagcctgcagaagacaggccaggagctgcagagcgcctgtgatgccctgaaggaccagaacagcaagctgctgcaggacaagaatgagcaggccgtgcagagcgcccagaccatccagcagctggaggaccagctgcagcagaagagcaaggagatcagccagttcctgaaccggctgcccctgcagcagcatgaaacagccagccagaccagcttcccagatgtgtacaatgaaggcacccaggccgtgacagaagaaaatattgccagcctgcagaagagggtggtggagctggagaatgaaaaaggagccctgctgctgagcagcattgagctggaggagctgaaggcagaaaatgagaagctgagcagccagatcaccctgctggaggcccagaacagaactggagaggccgaccgggaggtgtctgagatcagcatcgtggacatcgccaacaagaggagcagcagcgctgaggagagcggccaggatgtgctggagaacaccttcagccagaagcacaaggagctgtctgtgctgctgctggagatgaaggaggcccaggaggagatcgccttcctgaagctgcagctgcagggcaagagagctgaggaggccgaccacgaggtgctggaccagaaggagatgaagcagatggagggggagggcatcgcccccatcaagatgaaggtgttcctggaggacaccggccaggacttccccctgatgcccaatgaggagagcagcctgcctgctgtggagaaggagcaggccagcacagagcaccagagcaggaccagcgaggagatcagcctgaatgatgctggggtggagctgaagagcaccaagcaggatggagacaagagcctgtctgctgtgcctgacatcggccagtgccaccaggatgagctggagcggctgaagagccagatcctggagctggagctgaacttccacaaggcccaggagatctatgagaagaacctggatgagaaggccaaggagatcagcaacctgaaccagctgattgaggagttcaagaagaatgctgacaacaacagcagcgccttcaccgccctgtctgaggagcgggaccagctgctgagccaggtgaaggagctgtccatggtgacagagctgcgggcccaggtgaagcagctggagatgaacctggccgaggccgagcggcagaggcggctggactatgagagccagacagcccatgacaacctgctgacagagcagatccacagcctgagcattgaggccaagagcaaggatgtgaagattgaggtgctgcagaatgagctggatgatgtgcagctgcagttcagcgagcagagcaccctcatccgcagcctgcagagccagctgcagaacaaggagagcgaggtgctggagggcgctgagcgggtgcgccacatcagcagcaaggtggaggagctgagccaggccctgagccagaaggagctggagatcaccaagatggaccagctgctgctggagaagaagagagatgtggagaccctgcagcagaccatcgaggagaaggaccagcaggtgacagagatctccttctccatgacagagaagatggtgcagctgaatgaggagaagttcagcctgggcgtggagatcaagaccctgaaggagcagctgaacctgctgagcagagctgaggaggccaagaaggagcaggtggaggaggacaatgaggtgagcagcggcctgaagcagaactatgatgagatgagccctgctggccagatcagcaaggaggagctgcagcacgagtttgacctgctgaagaaggaaaatgagcagaggaagaggaagctgcaggccgccctgatcaacaggaaggagctgctgcagagggtgtcccggctggaggaggagctggccaacctgaaggatgagagcaagaaggagatccccctgtctgaaacagagcggggggaggtggaggaggacaaggagaacaaggagtacagcgagaagtgtgtgaccagcaagtgccaggagattgagatctacctgaagcagaccatcagcgagaaggaggtggagctgcagcacatcaggaaggacctggaggagaagctggccgctgaggagcagttccaggccctggtgaagcagatgaaccagaccctgcaggacaagaccaaccagattgacctgctgcaggccgagatcagcgagaaccaggccatcatccagaagctgatcaccagcaacacagatgccagtgatggagacagcgtggccctggtgaaggagaccgtggtgatcagccccccctgcaccggcagcagcgagcactggaagccagagctggaggagaagatcctggccctggagaaggagaaggagcagctgcagaagaagctgcaggaggccctgaccagcaggaaggccatcctgaagaaggcccaggagaaggagcggcacctgcgggaggagctgaagcagcagaaggatgactacaaccggctgcaggagcagtttgatgagcagagcaaagaaaatgaaaacatcggggaccagctgcggcagctgcagatccaggtgcgggagagcattgatggcaagctgcccagcacagaccagcaggagagctgcagcagcaccccaggcctggaggagcccctcttcaaggccacagagcagcaccacacccagcctgtgctggagagcaacctgtgcccagactggcccagccacagtgaagatgccagcgccctgcagggcggcacctctgtggcccagatcaaggcccagctgaaggagattgaagctgagaaggtggagctggagctgaaggtgagcagcaccaccagcgagctgaccaagaagtctgaggaggtgttccagctgcaggagcagatcaacaagcagggcctggagattgagagcctgaagacagtgtcccatgaggccgaggtgcacgccgagagcctgcagcagaagctggagagcagccagctgcagattgctggcctggagcacctgcgggagctgcagcccaagctggatgagctgcagaagctgatcagcaagaaggaggaggatgtgtcctacctgagcggccagctgtctgagaaggaggccgccctgaccaagatccagacagagatcatcgagcaggaggacctgatcaaggccctgcacacccagctggagatgcaggccaaggagcatgatgagcgcatcaagcagctgcaggtggagctgtgtgagatgaagcagaagccagaggagatcggggaggagagccgggccaagcagcagatccagaggaagctgcaggccgccctgatcagcaggaaggaggccctgaaggagaacaagagcctgcaggaggagctgagcctggcccggggcaccatcgagcggctgaccaagagcctggctgatgtggagagccaggtgtctgcccagaacaaggagaaggacacagtgctgggccgcctggccctgctgcaggaggagcgggacaagctgatcacagagatggacaggagcctgctggagaaccagagcctgagcagcagctgtgagagcctgaagctggccctggagggcctgacagaggacaaggagaagctggtgaaggagattgagagcctgaagagcagcaagattgctgagagcacagagtggcaggagaagcacaaggagctgcagaaggagtatgagatcctgctgcagagctatgaaaatgtgtccaatgaggccgagcgcatccagcacgtggtggaggccgtgcggcaggagaagcaggagctgtatggcaagctgcggagcacagaggccaacaagaaggagacagagaagcagctgcaggaggccgagcaggagatggaggagatgaaggagaagatgaggaagtttgccaagagcaagcagcagaagatcctggagctggaggaggagaatgaccggctgcgggcagaggtgcaccctgctggggacacagccaaggagtgcatggagaccctgctgagcagcaatgcctccatgaaggaggagctggagcgggtgaagatggagtatgagaccctgagcaagaagttccagagcctgatgtctgagaaggacagcctgtctgaggaggtgcaggacctgaagcaccagatcgagggcaatgtgtccaagcaggccaacctggaggccacagagaagcatgacaaccagaccaacgtgacagaggagggcacccagagcatccctggagaaacagaggagcaggacagcctgtccatgagcacccggcccacctgcagcgagagcgtgcccagcgccaagagcgccaacccagctgtgtccaaggacttcagcagccatgatgagatcaacaactacctgcagcagattgaccagctgaaggagagaattgctggcctggaggaggagaagcagaagaacaaggagttcagccagaccctggagaatgagaagaacaccctgctgagccagatcagcaccaaggatggagagctgaagatgctgcaggaggaggtgaccaagatgaacctgctgaaccagcagatccaggaggagctgagccgggtgaccaagctgaaggagacagctgaggaggagaaggatgacctggaggagcggctgatgaaccagctggccgagctgaatggcagcatcggcaactactgccaggatgtgacagatgcccagatcaagaatgagctgctggagagcgagatgaagaacctgaagaagtgtgtgtctgagctggaggaggagaagcagcagctggtgaaggagaagaccaaggtggagagcgagatcaggaaggagtacctggagaagatccagggcgcccagaaggagcccggcaacaagagccacgccaaggagctgcaggagctgctgaaggagaagcagcaggaggtgaagcagctgcagaaggactgcatccgctaccaggagaagatcagcgccctggagaggacagtgaaggccctggagtttgtgcagacagagagccagaaggacctggagatcaccaaggagaacctggcccaggccgtggagcacaggaagaaggcccaggccgagctggccagcttcaaggtgctgctggatgacacccagagcgaggccgcccgggtgctggccgacaacctgaagctgaagaaggagctgcagagcaacaaggagagcgtgaagagccagatgaagcagaaggatgaggacctggagcggcggctggagcaggccgaggagaagcacctgaaggagaagaagaacatgcaggagaagctggatgccctgcggcgggagaaggtgcacctggaggagaccatcggggagatccaggtgaccctgaacaagaaggacaaggaggtgcagcagctgcaggagaacctggacagcacagtgacccagctggccgccttcaccaagtccatgagcagcctgcaggatgaccgggacagagtgattgatgaggccaagaagtgggagaggaagttcagtgatgccatccagagcaaggaggaggagatccggctgaaggaggacaactgcagcgtgctgaaggaccagctgcggcagatgagcatccacatggaggagctgaagatcaacatcagccggctggagcatgacaagcagatctgggagagcaaggcccagacagaggtgcagctgcagcagaaggtgtgtgacaccctgcagggcgagaacaaggagctgctgagccagctggaggagaccaggcacctgtaccacagcagccagaatgagctggccaagctggagagcgagctgaagagcctgaaggaccagctgacagacctgagcaacagcctggagaagtgcaaggagcagaagggcaacctggagggcatcatccggcagcaggaggccgacatccagaacagcaagttctcctatgagcagctggagacagacctgcaggccagccgggagctgaccagccggctgcacgaggagatcaacatgaaggagcagaagatcatcagcctgctgagcggcaaggaggaggccatccaggtggccatcgccgagctgcggcagcagcacgacaaggagatcaaggagctggagaacctgctgagccaggaggaggaggagaacatcgtgctggaggaggagaacaagaaggctgtggacaagaccaaccagctgatggagaccctgaagaccatcaagaaggagaacatccagcagaaggcccagctggacagctttgtgaagtccatgagcagcctgcagaatgaccgggacagaattgtgggggactaccagcagctggaggagcggcacctgagcatcatcctggagaaggaccagctgatccaggaggccgctgctgagaacaacaagctgaaggaggagatccggggcctgcggagccacatggatgacctgaacagtgaaaatgccaagctggatgctgagctgatccagtaccgggaggacctgaaccaggtgatcaccatcaaggacagccagcagaagcagctgctggaggtgcagctgcagcagaacaaggagctggagaacaagtatgccaagctggaggagaagctgaaggagagcgaggaggccaatgaagacctgcggcgctccttcaatgccctgcaggaggagaagcaggacctgagcaaggagattgagagcctgaaggtgtccatcagccagctgacccggcaggtgacagccctgcaggaggagggcaccctgggcctgtaccacgcccagctgaaggtgaaggaggaggaggtgcaccggctgagcgccctcttcagcagcagccagaagagaattgctgagctggaggaggagctggtgtgtgtgcagaaggaggccgccaagaaggtgggggagattgaggacaagctgaagaaggagctgaagcacctgcaccatgatgctggcatcatgagaaatgaaacagaaacagctgaggagcgggtggccgagctggcccgggacctggtggagatggagcagaagctgctgatggtgaccaaggagaacaagggcctgacagcccagatccagagctttggccgctccatgagcagcctgcagaacagccgggaccacgccaatgaggagctggatgagctgaagaggaaatatgatgccagcctgaaggagctggcccagctgaaggagcagggcctgctgaaccgggagagagatgccctgctgtctgaaacagccttctccatgaacagcacagaggagaacagcctgagccacctggagaagctgaaccagcagctgctgagcaaggatgagcagctgctgcacctgagcagccagctggaggacagctacaaccaggtgcagagcttcagcaaggccatggccagcctgcagaatgaaagagaccacctgtggaatgagctggagaagttcaggaagtctgaggagggcaagcagaggtctgctgcccagcccagcaccagccctgctgaggtgcagagcctgaagaaggccatgagcagcctgcagaatgaccgggaccggctgctgaaggagctgaagaacctgcagcagcagtacctgcagatcaaccaggagatcacagagctgcaccccctgaaggcccagctgcaggagtaccaggacaagaccaaggccttccagatcatgcaggaggagctgcggcaggagaacctgtcctggcagcacgagctgcaccagctgaggatggagaagagctcctgggagatccatgaaagaaggatgaaggagcagtacctgatggccatcagtgacaaggaccagcagctgagccacctgcagaacctgatccgggagctgcggagcagcagcagccagacccagcccctgaaggtgcagtaccagaggcaggccagccctgagaccagcgccagcccagatggcagccagaacctggtgtatgaaacagagctgctgcggacccagctgaatgacagcctgaaggagatccaccagaaggagctgcgcatccagcagctgaacagcaacttcagccagctgctggaggagaagaacaccctgagcatccagctgtgtgacaccagccagagcctgcgggagaaccagcagcactacggggacctgctgaaccactgtgctgtgctggagaagcaggtgcaggagctgcaggccgtgtccaaggagaagggccccctgaacattgatgtggcccctggggccccccaggagaagaatggagtgcacaggaagagtgaccctgaggagctgcgggagccccagcagagcttcagcgaggcccagcagcagctgtgcaacacccggcaggaggtgaatgagctgaggaagctgctggaggaggagcgggaccagagggtggccgcagaaaatgccctgtctgtggccgaggagcagatccggcggctggagcacagcgagtgggacagcagcaggacccccatcatcggcagctgtggcacccaggagcaggccctgctgattgacctgaccagcaacagctgcaggaggaccaggtctggagtgggctggaagagggtgctgcggagcctgtgccacagcaggaccagggtgcccctgctggccgccatctacttcctgatgatccacgtgctgctgatcctgtgcttcaccggccacctgtag

SEQ ID NO: 90730 - DNA, 126 bp, Artificial Sequence
  derived and/or modified sequence
atgctgagccggctgagcggcctggccaacgtggtgctgcacgagttgtctggcgatgatgacacagatcagaatatgagagctcctctggatcctgagctacaccaagagtctgatatggagtag

SEQ ID NO: 90731 - DNA, 9810 bp, Artificial Sequence
  derived and/or modified sequence
atgctgagccggctgagcggcctggccaacgtggtgctgcacgagctgtctggcgacgatgatactgatcagaacatgagggcccccctcgatccagaactgcatcaggagagtgacatggaattcaataacaccacccaggaagatgttcaggaaagactggcctacgctgaacagctagtggttgagttgaaagatataatccggcaaaaggacgtccagttacaacagaaagacgaagcattgcaggaagagaggaaagcagccgacaacaaaattaagaaactaaagctgcacgctaaggcaaaactaacatcactgaataagtacatagaggagatgaaggcgcagggtggtaccgtgctgcccaccgagccacagtcagaagagcagctgagcaaacacgacaagtcctcgaccgaagaagagatggaaattgaaaaaattaaacacaaactgcaagagaaggaggagctgatcagcaccctgcaagcccagcttacacaggctcaagccgagcagcctgctcaatcttcaacagagatggaggagttcgttatgatgaagcagcagttgcaggagaaggaggagttcatatcaacattgcaggcgcagctgtcacaaactcaggctgagcaggccgcacagttgagctctatgcagcaggtagtccgagaaaaggatgctaggttcgaaacacaggtgcggctccacgaagacgaactgctccaactggtgacacaggccgatgtggagacagaaatgcaacagaaactgagagtgctccaacgaaagcttgaagagcacgaggagtcgctggttggcagagcgcaggtcgtggacttgctccagcaggagttgacggcagccgagcagcgcaatcagattctaagtcagcagcttcagcaaatggaggccgagcataacacactcagaaatacagtcgagactgaaagggaagaatccaagatcttattagaaaagatggagcttgaagtagccgaaagaaagctgagtttccataacctgcaggaagagatgcaccatctccttgagcagtttgaacaggccggtcaggcgcaggccgaactcgagtccagatatagtgcgttggagcaaaaacataaagccgaaatggaagagaagactagccacatcttgagtctccagaaaaccggtcaggagttgcagagtgcctgtgatgccttgaaggatcagaattcaaaactgctgcaggataagaacgagcaagccgtgcagagcgcgcagaccatccagcagctggaggatcagcttcaacagaagtccaaggagataagccagtttcttaatagactgcccctgcagcagcacgaaaccgccagtcaaaccagctttccggatgtgtataatgagggcacacaagccgtgactgaggagaacattgcctccctgcaaaagagagtggtggaacttgaaaacgagaaaggagcactcttgctttcttccatcgaattagaggaattaaaggccgagaacgaaaagctcagctcacagatcacactgcttgaggcccaaaaccgaaccggggaggcagacagggaggtttcagagatctccattgtggatatcgccaataagcggtcgtcgagtgccgaagaaagcggtcaggatgtgttggaaaacacatttagccaaaaacacaaggaattatctgtcctgctcctggagatgaaggaagcgcaggaagagattgccttccttaaacttcagctccaaggcaagagggccgaagaggcagaccatgaagtgttggatcagaaagaaatgaagcagatggaaggagagggcattgcccctataaagatgaaggtcttccttgaagataccggccaggactttcctctcatgcctaacgaggagagctctctgcctgccgtcgaaaaggaacaggccagcactgagcaccagtcaaggacatctgaggagatctcattaaatgatgccggcgtcgaattgaagagcaccaagcaagacggcgataagtctctcagcgcagttcctgacataggacagtgccaccaagacgagctggagcgactgaaatcccagatcctggagcttgaactgaactttcataaagctcaggagatttacgagaaaaatcttgatgagaaagccaaagaaattagcaatttgaaccagcttatcgaagagttcaagaaaaacgctgacaacaactcgtccgctttcacagcccttagcgaggaacgggaccagctgttgagtcaagtcaaagagttgagtatggttactgaactgcgtgcacaggtcaaacaactggagatgaacttagctgaagccgaacgccaaagacggctggactacgagagtcaaactgcgcacgataatctccttaccgaacagatccactccctgagcatcgaggctaagtctaaagacgttaaaattgaggtgctgcagaacgaactggacgatgtgcagctccagttcagcgagcaatcgactctcataagatccctccaaagtcaattgcaaaacaaggaatccgaggtgctggaaggagccgagcgagtgcggcacatcagcagtaaagtggaagagctgagccaagcattgagtcagaaagagcttgagatcactaaaatggatcagttgctcctagagaaaaagcgtgatgtggaaacgctgcagcagacgatcgaggaaaaggatcagcaagtgacagaaatttcttttagcatgactgagaagatggtgcaattgaatgaggaaaaatttagtctgggcgtggagatcaagacactcaaggagcagctcaaccttctaagtcgggccgaggaagcaaaaaaagagcaggttgaagaggacaacgaggtttcttctggtcttaaacagaattacgatgagatgtctccggcaggacagatctccaaagaagagctgcagcatgagttcgatctgctaaaaaaggaaaatgaacagaggaaaaggaagttacaagctgcccttatcaaccggaaggaactgctgcaacgggtctccagactggaggaagagctagctaacttaaaggacgaaagcaaaaaggagattcctttgagtgaaactgagaggggcgaggtggaagaggacaaagagaacaaagagtactccgagaaatgtgtgactagcaagtgccaagagatagagatatatctgaaacagaccatttctgaaaaggaagtggagctgcagcatatacggaaggatctggaggagaaactggcggcagaggaacagttccaggcacttgtgaaacaaatgaaccagactctgcaggataaaaccaatcagattgacctcttgcaagccgaaatcagtgaaaatcaagctataattcaaaagttgatcacttctaatacagatgcatctgatggtgactccgtagccctcgtgaaagaaaccgtggtgataagtcctccctgcactggtagttcagagcactggaaacccgagctcgaggagaaaattctcgcgctggaaaaggagaaggaacagctccagaaaaaactgcaagaggctctaaccagccgcaaggctatcttaaaaaaagcacaagaaaaggagaggcatctccgagaagaattgaagcagcaaaaagacgattataaccgtttgcaggagcagtttgacgaacagtcaaaagaaaatgaaaatatcggcgaccagctgagacagctgcaaatccaagtgagggagagcatcgacggcaaactcccaagtaccgatcaacaggagagttgcagttccactcccgggctagaagagcctttgttcaaggccactgaacaacatcatacgcaacccgtgctggagtcaaacctttgccctgattggccttcacactctgaagacgcaagcgccctgcaaggaggaacgtccgtcgcgcaaataaaggcccagctcaaggaaatcgaggccgaaaaagtggaacttgagctgaaggtatcaagcacaacaagcgaactcacaaaaaaatcagaggaggtcttccaactccaggagcagatcaacaaacagggtctggagatcgagagcctgaaaaccgtctcacacgaggccgaggtacacgctgaatcgctacagcagaaactggagtcaagccagctgcagattgcggggctggagcacctcagagaacttcagccaaagctggatgaactgcagaaactaattagcaaaaaggaggaggatgtgtcatacctctccgggcagctctcagaaaaagaagcggccttgaccaaaatccagacggaaatcatagaacaagaggaccttattaaggcccttcatacccagctggaaatgcaggcaaaggaacatgacgagcgcattaaacagctgcaggtggagctttgcgaaatgaaacagaagcctgaggagataggagaggaatcgcgcgctaagcaacagatccagaggaagctgcaggccgcgctgatcagccgaaaggaggccctgaaagagaataagtcattgcaggaggaactctccttggcccgcggtacaatcgagaggctgacaaaaagcctggccgatgtggaatctcaggtgagcgctcaaaataaagagaaagataccgtgctgggccggctggcgttgctgcaggaagagcgcgataaactgatcaccgaaatggatcgatcgttgctggaaaaccagtcactttccagctcttgtgaatcccttaaactcgccctggaaggcctgactgaagacaaagagaagttggtgaaggaaattgaaagtcttaagtcatctaaaatcgcagaatccacagaatggcaggaaaagcataaggaactgcagaaggagtacgaaatactcctgcagagctacgaaaacgtctctaacgaggcggaaaggattcagcacgtcgtggaggccgtgcgccaggagaagcaggaactctacggcaaacttaggagtacggaggcgaataagaaggaaactgagaaacagctccaggaggcagagcaagaaatggaagagatgaaagagaagatgaggaaattcgccaagagcaagcagcagaaaatactcgaacttgaagaggagaacgatcgccttagggccgaagtgcaccctgctggcgacaccgcaaaagaatgcatggaaactctgctctcatccaatgcgtctatgaaagaggagctggaacgcgtaaaaatggagtatgaaactctgtccaagaaatttcagagcctgatgagtgagaaagattccctgagcgaggaagtccaggacttaaagcatcagattgaaggaaatgtgtcaaaacaggccaatctggaagcaaccgaaaagcatgataatcaaactaacgtcacggaggaagggactcagtccatccctggagagaccgaggaacaggactccctcagcatgagtactcggcctacgtgcagtgaatcagtcccatctgctaagtctgctaatcctgctgtttctaaggactttagttcccatgacgaaatcaacaattatctgcagcagatcgatcagttaaaggagagaatagccggcttagaggaagaaaaacagaagaataaagagttttctcagaccttagagaacgagaaaaatactttgctctcgcaaataagtactaaggatggtgagctgaaaatgctgcaggaagaggtcactaaaatgaacctgctgaatcagcagattcaggaagagctttctcgtgtcaccaaactaaaggagactgcagaagaggaaaaggacgatttagaggagcggctgatgaaccagctagctgagctgaatgggagtattggaaattattgccaggatgtaactgatgcacagatcaaaaacgagcttttggaatctgaaatgaaaaacctcaaaaaatgcgtgagtgagctagaggaagaaaaacagcagctagtcaaggagaagactaaggtggagtccgaaatccgtaaggagtatttagagaagattcagggcgcccaaaaggagccgggcaataaatcacatgccaaggaactccaggagctcctgaaggagaagcagcaggaagtgaaacaactccagaaggactgcattcggtatcaggaaaaaataagcgctctggaacgaactgtgaaggcgctggagtttgtccagacggagagccagaaagatctggaaatcaccaaagaaaatctggctcaggccgtagagcaccggaaaaaagcacaggccgaactggcatcatttaaggtgctgttagatgacactcagtccgaagctgccagagttctggcagacaatctcaagctgaaaaaagagctgcagtctaataaggaatcagtcaaatctcaaatgaaacaaaaggacgaagaccttgaaaggcgacttgaacaggcggaagagaaacacttgaaggaaaagaagaatatgcaagaaaagctcgatgccctgagacgggagaaggtgcatcttgaagaaaccataggtgaaattcaagttactctgaataagaaggataaggaagtgcagcagctccaagaaaacctggattcaactgtcactcaactggctgctttcaccaaaagcatgagctccttgcaggacgatcgggatagggtgatcgacgaagccaaaaagtgggagagaaaattttctgatgcgatccagtcaaaagaagaggagatccgacttaaggaggataattgctccgtccttaaggaccagctaagacagatgtccatacacatggaggagctgaaaatcaacatctccaggctggagcatgataaacagatctgggagagcaaagctcaaacagaagtgcagttacagcaaaaggtatgtgacacactccaaggcgagaacaaggaattactgtcgcagttagaggaaacgcgccatttataccatagctctcaaaatgagctggctaagttagagtctgagttaaagtctctcaaggaccagctcaccgacttgtctaatagcctggagaaatgcaaggagcagaaagggaatctcgagggcatcattagacaacaggaggccgacatccagaactccaagttctcctatgagcagctagagaccgatttacaggccagtcgggagctgacttcacggttgcatgaagaaatcaatatgaaggaacagaaaattattagccttctctctggaaaggaggaagccattcaggttgccatagccgagctgcggcagcagcacgataaggagataaaggagctcgagaatctcctgtctcaggaggaggaggaaaatattgttttggaagaagagaacaaaaaggccgtggataaaacaaatcagcttatggaaacccttaagactatcaagaaagagaatatccagcaaaaagcgcagctagactccttcgtcaagagtatgagcagcctgcagaatgaccgggataggatcgtaggggactaccagcagcttgaagagaggcacttgtcgattattctagaaaaagaccagctgatacaggaggcggcagccgagaataataagttaaaggaggaaatcaggggcttgagaagtcacatggacgatctaaatagcgaaaatgctaagctcgacgctgaactgatccagtatagagaagatctgaaccaggtgatcaccatcaaagattctcagcagaagcagctgctcgaggttcagcttcagcaaaacaaggagcttgagaataagtatgcaaagctggaagagaaactcaaggagagtgaagaggcaaacgaagacctccgacggtccttcaacgccctgcaggaagaaaaacaggacttgagtaaagaaatagaaagtctgaaggtatccatatcccagctcacccgacaggtgacagcattgcaggaggaggggacactcggtctctaccatgcccagctgaaggtgaaggaggaggaagtccataggctgtctgctctcttctcttccagccaaaaaaggatcgccgagcttgaagaggaactggtgtgtgtgcagaaggaagctgctaagaaggttggggagatagaagataagctgaaaaaggagctcaagcaccttcaccacgatgcagggattatgcgcaatgagaccgaaaccgcagaagaacgagtcgcagagctggctagggacttggtagagatggagcagaagcttttgatggtgaccaaggaaaacaagggcctgacggcgcagatacaatcttttggtcggagcatgtcgagtttgcagaacagtagggatcacgctaatgaagaactagacgagctgaagcggaaatacgatgccagtctgaaagagttagctcaactcaaagagcaggggctactgaatagggagagagatgcgctgttgtccgagaccgctttcagtatgaattcaacagaagagaactccctctcgcacctggagaagctgaaccagcagctgttgtccaaagacgagcagctcttgcacctttcgtcccagctggaggattcctataaccaggtgcaatcatttagcaaggccatggctagtttgcaaaatgaacgggaccacctgtggaacgagttggagaagttccgaaagtctgaggaaggtaaacagcgatctgcagctcaaccttccacctctcccgcagaggtccagagccttaaaaaggccatgtctagcctgcagaacgatcgagatcgcctgctgaaggagttaaagaatcttcagcaacaatacctacagattaatcaggaaattacagaactccacccactgaaagctcaactacaagagtaccaggacaaaactaaggcatttcagattatgcaggaagagctccgtcaggagaacttgtcctggcagcacgaactgcatcagctacgcatggagaagagctcctgggagatacacgaaagacgcatgaaggagcagtacctgatggctatcagcgacaaagaccagcagctaagccatctgcagaatctgatccgcgagttaaggtcttcctcaagtcagacgcagccccttaaagtgcagtaccagagacaggcctccccagaaacgtccgcttcgccagacggctcacagaacttggtctacgagacagagctgctccgcacccagcttaacgattccctcaaggaaatccatcaaaaagaacttcgaatacagcagctgaacagtaacttttcccagctacttgaggagaagaatactctgtcgatccagctgtgcgatacctcccaaagcttgcgtgaaaaccagcagcattatggtgatctgctcaatcactgtgcagtgcttgagaagcaggtccaggagctccaggccgtgagcaaggagaagggacctcttaatattgacgtggcccctggcgctcctcaggagaaaaacggtgtccacaggaagtcagatcccgaagagctgcgtgaaccccagcagagcttttctgaggcgcagcagcagctatgtaacacccgccaggaggtgaatgaactgagaaagctgctcgaggaggaaagggatcagagggtggctgccgaaaatgccctgtcagtggcggaagagcagatccgccgcctggagcactcagaatgggatagcagcaggaccccaattattgggtcctgcggcactcaggagcaggccttgctgatagaccttaccagtaactcctgccggcggaccagaagcggggtggggtggaaaagagtgctgagaagcctctgccacagccgcactagggtacctctgttggccgccatttacttcttgatgatccacgttctgctgatcctctgctttactgggcatctctag

SEQ ID NO: 90732 - DNA, 126 bp, Artificial Sequence
  derived and/or modified sequence
atgctgtcaaggctcagcggcttggcgaatgtcgtgttgcatgagctttcgggagacgacgatactgatcaaaatatgagagcccctcttgatccggaacttcaccaggagtcagacatggagtag

SEQ ID NO: 90733 - DNA, 9809 bp, Artificial Sequence
  derived and/or modified sequence
atgttatcgcgcctgagtggcctggcaaacgtggtgctgcacgaactcagtggcgacgacgataccgaccagaacatgcgggctccactggacccagaactgcaccaagagtcggatatggaattcaataatactacgcaggaggatgttcaagagcgtcttgcttacgccgagcaacttgttgtcgagctaaaagacatcatccgacaaaaggatgttcaactccaacagaaggatgaggcactacaggaagagagaaaagctgccgacaacaagataaagaagctgaaattgcacgcgaaagccaaattgactagcctgaacaaatacatagaggagatgaaggcccagggaggaacagtgttaccaaccgagccacagagcgaggagcagctatctaagcacgataagagcagcacggaagaggagatggaaatcgaaaagataaagcacaaattacaagagaaagaagagctcatcagcactctccaggctcaactgactcaagctcaggcagagcaacctgcgcagtcctccacagagatggaagaattcgtgatgatgaaacagcaactgcaagagaaggaagagtttatttccacacttcaggcccagctgagccaaacgcaggccgagcaggcagcccagctgtcctctatgcagcaggttgtgagggaaaaggatgcaaggttcgagacacaggtccgcctgcacgaggacgagctcttacagttagtcacacaggcggatgttgagactgagatgcagcaaaagctcagagtgctccaaaggaaacttgaagaacacgaggagtcccttgtaggcagagcccaggtggtggatctgctacaacaggagctgacagccgcagaacagaggaaccagattctctcacagcagctgcagcagatggaggcagaacataacaccctaaggaatacagtggagacagaaagggaagagagcaagatattgttggaaaagatggagttagaagtggcagagcgtaagctgtcgttccacaatctgcaggaggaaatgcatcacttgttagagcagtttgaacaggctggtcaggcgcaggccgaattagagtctcgctattccgcccttgagcagaagcacaaggccgagatggaggagaaaacttcacacatcctttccctgcagaagaccggtcaggagctgcagtccgcctgtgatgccctcaaagaccagaactctaagctgctccaggataagaatgagcaagcagtccagtcagcccaaacaatccaacaactcgaagatcagctccagcaaaaatccaaagagatctctcagtttttgaatcgtctgccattacagcaacacgaaactgcgagtcagaccagtttcccggatgtttacaacgagggcacgcaggccgtaacagaagagaacattgcctcactgcagaaacgggtggtcgaactggaaaacgagaaaggcgcactgcttctgtcctccatcgagctcgaggagctgaaagccgagaatgagaagctttccagtcagatcactctgctggaggcccaaaatcgcacgggcgaggctgatagggaggtatctgaaattagcattgttgatattgcaaataagcggtcctcctcagcagaggagagcgggcaagacgtgctggaaaacacgttttctcaaaaacataaggaactgtctgttcttctccttgagatgaaggaggcccaggaagaaattgcttttctgaaattgcagctgcaggggaagagggccgaagaggcagatcacgaggttctggaccagaaggaaatgaaacagatggagggggaagggatcgcccctattaagatgaaagtcttcctggaggacacaggccaggacttccccttaatgcccaatgaagaaagctcgctccccgcagttgagaaagagcaagccagtaccgagcatcaatcacgcacttctgaggaaatctctctgaacgatgcaggtgtggagcttaaatcaaccaagcaggacggcgataaatcactttccgccgtcccagatattgggcaatgccatcaagacgagctggagcgcctcaagagccagatcctagaattggagttaaattttcataaagctcaggaaatttatgagaagaatctcgacgagaaggcgaaggagataagtaacttgaatcagctgatcgaagagttcaaaaagaatgccgataacaactcctcagcgtttacagctctgagcgaagagagggaccagctcttgtcccaggtgaaggagctgtcaatggtgaccgagcttcgcgctcaggtgaagcaattagagatgaaccttgctgaggccgaacgccagagacgccttgactacgagtctcagaccgcccacgataacttgctgacggagcagattcactccctgagtattgaagccaagtctaaggacgttaagatagaggtcttgcaaaacgagctggatgacgtgcagctgcagttttctgaacagagcactctgatccggtccctgcagtctcaactgcagaacaaggagagcgaggtactggagggcgctgagagagtgaggcacattagttccaaagtggaagagttatcccaagccctgtcacagaaggaactggaaatcacaaagatggatcagctgctgctcgagaagaagcgcgacgtggagaccctgcaacagactatcgaagaaaaagatcagcaggtgacagagatctcttttagcatgacagagaaaatggtgcagctgaatgaggaaaagttttcattgggcgtggaaatcaaaaccctaaaagagcagctgaatctcctcagccgggctgaggaggcaaagaaggagcaggtagaagaggacaatgaagtaagctctggtctcaaacagaactatgatgaaatgagcccggctggtcagatctcaaaggaggagctgcagcacgagtttgatctgctgaagaaggagaatgagcagcggaagcggaaactgcaggctgcacttattaacaggaaggagcttctgcagcgagttagccgcttggaggaggagctggcaaatttgaaggatgaatcgaagaaggaaatccccctgagtgaaactgagaggggtgaagtggaggaggataaggagaacaaagaatactcagagaagtgcgttacctcaaagtgtcaggaaatcgagatttacctaaagcagacaatcagcgaaaaggaggttgagttgcagcatatccgaaaggatctggaggagaagttggcggctgaagaacaattccaggctctggtgaagcaaatgaaccagacactgcaggacaagaccaaccagattgatctcctccaggcagagatcagcgagaaccaggcgatcatccagaagctgatcaccagtaataccgacgcctcagacggcgatagcgttgccctcgtcaaggaaacagtcgttatcagcccaccttgcacaggctcatccgagcactggaagcccgagctcgaggagaagatcctggcactcgagaaagaaaaggaacagctgcaaaagaagcttcaggaagctttaacatcccgcaaggcaatacttaaaaaagctcaggaaaaagagaggcacctgagggaggagctaaaacaacagaaggatgactacaatcgcctgcaggaacagttcgatgagcagagcaaagaaaacgagaacattggtgatcagctcaggcaactacaaatccaagttcgagagtctatcgatggtaaactgccgtcaaccgatcagcaagagtcttgctccagtacaccaggattggaagaacctctattcaaagccaccgaacagcaccacactcaacccgttctcgagagcaacttgtgtcctgattggccatctcattcggaagatgcttcggccctgcagggcggaacatcagtggctcaaattaaggcgcagttgaaagaaatagaggctgaaaaggttgaattagagctcaaagtcagcagcacaacaagtgaactgactaaaaagtcagaggaggtatttcagttgcaggagcaaattaacaaacagggacttgagattgagagcctgaagaccgttagtcatgaagccgaggtgcacgctgaatctctgcagcagaagctcgaatcttcacagctccagatcgccggacttgagcatctgcgcgaactgcagcctaaactcgacgaactccagaaattgattagcaaaaaggaggaggacgtttcctatctcagtggacagctttcagaaaaggaggccgcactgaccaaaatccagaccgagatcatcgagcaggaggacctgatcaaagcactacacacgcaattggagatgcaagccaaagaacatgatgaacggattaagcaattacaggtcgaactgtgcgagatgaagcagaaaccggaggagatcggtgaggaatctagggccaagcaacagatccaacggaagctgcaagccgctttgatctcacggaaggaagcactcaaagaaaacaaatccttgcaagaggagctttcattggctagaggaacgatagagaggttgactaaatccctagctgacgtggagagtcaggtgtcagcacagaacaaggaaaaggatacagtcttaggccgtttggccctcctccaagaagagcgggataagttaataacagagatggataggtccttactcgagaatcaaagtttgtcctctagctgtgagagtctgaagctcgctctggaagggctgaccgaggataaagagaaactggttaaggagatagagagtttgaaatctagcaaaatagctgagtcgacggagtggcaggaaaaacacaaggagttgcagaaggagtatgagatactgctccagtcctacgaaaacgtttcaaatgaagcagagagaatccagcacgtcgtcgaggccgtgcggcaggaaaaacaggagctctacggcaaacttcgctcaacagaggccaacaagaaagaaactgaaaagcagctccaagaggccgagcaggagatggaagagatgaaagagaagatgcggaagtttgccaagtcaaagcagcaaaaaattctggaactcgaggaagagaatgatcgcctcagagccgaagtgcatcctgcaggagacactgccaaggagtgcatggaaacactgttgtcctccaacgcaagcatgaaagaggagctggagagggtgaagatggagtacgaaaccctgtcaaagaaattccagtcattaatgtcagagaaagacagtttaagcgaggaggttcaggatttaaaacaccagattgaaggaaacgtgtcaaagcaggccaacctcgaggcgacggagaaacatgacaaccaaaccaatgtgaccgaggaggggactcagtcaattcccggagagacggaggaacaggacagcctgtctatgagtacccggcctacgtgtagcgaatcagtgccatccgctaaatctgctaatcccgctgtgagtaaggacttctcaagccacgacgaaattaacaactacctccagcagatcgatcaactgaaagaacggattgcagggttagaagaggagaaacaaaagaacaaagaattcagtcagaccctggagaacgagaagaatacccttctgagccaaatatccaccaaagatggcgaattaaagatgcttcaggaagaggtcaccaaaatgaatcttctgaaccagcagatccaggaagagctcagtagggtcactaagctgaaagaaactgccgaagaggaaaaagatgatctcgaagagagactaatgaaccagttggccgaacttaacggatcaataggcaattactgtcaggatgtgacggatgcacagattaaaaatgagttactcgagtctgagatgaaaaatctgaaaaaatgtgtgtctgaactcgaagaagaaaagcaacaactggtgaaagaaaagactaaggtggaaagcgaaattagaaaagagtatctcgaaaagattcaaggcgctcagaaagaaccaggcaataaaagtcacgctaaagagctccaggagctgctgaaggaaaagcaacaagaggtgaagcagctgcaaaaggactgtatccgctaccaggaaaagatctcagctctggaacgcaccgtgaaggccctcgaatttgtccagaccgagtcgcagaaggatctggagatcacaaaggagaatctggcacaggccgttgagcacagaaagaaggcacaggccgagctcgccagttttaaagtgctacttgatgacacccagtcggaagccgcaagggttctggctgataaccttaaactgaagaaggagttgcagtctaataaggagagtgtaaagagccagatgaagcagaaagacgaagatttagagaggcgtttggagcaagctgaagaaaaacaccttaaggagaagaaaaacatgcaagagaaactcgatgctctgaggcgggagaaggtgcacctggaggagaccattggggaaatccaggtgacgctgaataagaaggataaggaagtccagcagctgcaggaaaatctcgactcaactgtcacccaactggcggcatttactaaaagtatgtctagcctgcaggacgaccgcgaccgcgtcatcgacgaggctaagaagtgggagaggaagttcagcgacgcaatacagagtaaagaggaagagattagattgaaagaagacaattgttccgtgctaaaggatcagctgcggcagatgagcatccacatggaagagctcaagattaacattagtcggttggagcacgataagcagatatgggagagtaaggcccagaccgaggtccagctgcaacagaaagtctgcgataccctacagggagagaacaaggagttgctgtctcagctagaggagactcggcatctgtaccatagtagccaaaatgagctggcaaaactggaatcagaactcaagtccctgaaagatcagctgactgatctgtcaaactcccttgagaagtgcaaggagcaaaaaggaaatctcgaaggtataatcagacagcaggaggccgatattcagaattctaagttcagttatgagcagctagagacagatcttcaggcttcccgggaactaacttcacggctgcacgaagaaattaatatgaaggagcaaaaaataatctctctgctttctggtaaagaagaggcaatccaggtcgctatcgccgaactcagacagcagcacgacaaggagatcaaggaattggagaacctcttgagtcaggaagaggaagagaatattgtcctggaggaagaaaataaaaaagcagtggataaaacaaaccagctgatggaaacccttaaaaccattaagaaggagaatatacagcagaaagctcagttggactcattcgtcaagtctatgtcatcgctgcagaacgatcgcgaccgcatcgtcggggattaccaacagctggaagaaaggcatctgtccattatactcgagaaggaccagctgatacaggaggccgctgccgagaataacaaactgaaagaggaaattaggggcctccgcagccacatggatgacctgaatagcgagaacgctaaattggatgcagagctgatccagtatcgcgaagatctgaatcaggttatcactatcaaggacagccagcagaagcagctgttggaagtccagctccaacagaataaagagctcgagaacaaatatgccaaactagaagagaaattgaaagagtccgaagaagccaatgaagatttaaggcgtagctttaacgctttgcaggaagaaaagcaggacctatccaaagagatcgaatctctgaaggtgtccatctcccagcttactcgacaggtaactgctctgcaagaagaggggaccctggggctctaccacgcccaactgaaagttaaagaggaggaagtgcacaggctgtccgcgctcttctctagcagtcagaagagaatcgcagaactggaggaagagttagtatgtgtgcagaaggaggctgccaagaaggtcggcgagatcgaagataagctgaagaaggagctcaagcatctgcaccacgacgccggaatcatgaggaacgagaccgagaccgctgaggagagagttgccgagctggcccgagatctggtagagatggagcagaagctgctgatggtgacgaaggagaataaaggactcactgcccaaatacaatcattcggacgcagcatgtcatcattgcagaatagccgggatcacgccaatgaggagttggatgaactgaagagaaagtacgatgcttctttgaaagagctggcccagctcaaggagcagggactcctcaatagagaacgtgatgcactcctatcagagaccgccttcagtatgaatagcacagaggagaattctctaagtcacctagaaaaactgaatcagcaattactgagcaaagatgagcagctgctgcatttgtcaagtcagttggaggattcgtacaatcaagtacaatccttcagcaaggccatggccagtctccagaacgaacgggaccacttgtggaatgaattggagaagtttagaaaaagcgaagaaggaaaacagaggtccgctgcccagcccagcacttcccctgcagaggtgcaaagtcttaagaaggctatgtcttctcttcaaaatgaccgtgacaggcttctgaaagaattaaagaatctccaacaacagtatctacagataaatcaggagataaccgaactgcatccgctcaaagcacagttgcaagaataccaagacaaaacaaaggcctttcagataatgcaggaagagctccgtcaggaaaacctgtcctggcagcatgagctccatcagctgagaatggagaagtcatcttgggagattcatgaacgtaggatgaaggagcaatatctgatggctatcagcgataaagatcagcagttatctcatctccagaatctgatccgggaactgcggtccagcagttcgcagacccagcccttaaaggtacagtatcaaagacaggcttccccagaaacgagtgcctcccccgacgggtcccagaatctcgtctatgaaactgaactcttaaggacccagttgaatgacagtttaaaagaaatccaccagaaagaactgcgcattcaacagctcaattctaattttagccagctcttggaggaaaaaaacacactgtccatccagctatgtgatacctctcaatcccttcgtgaaaatcagcaacactatggagatctgctgaatcactgtgccgtgctcgagaagcaggtacaagagctccaggccgtctctaaggagaaggggccactcaacatagatgtggctccaggggcaccgcaggaaaagaacggcgttcacagaaagagcgaccccgaggagctgcgcgagcctcagcaatccttcagtgaggctcagcagcagctgtgtaacacccgacaagaggtaaacgaacttaggaaactgctcgaagaggagcgtgatcagcgggtggccgcagagaatgccttgtccgttgccgaggagcagattcggagactcgaacattcagagtgggatagctcaagaactccaatcatcgggtcatgcggaactcaggaacaagccctccttattgatctgacttcaaacagttgtagaaggacaagaagtggggtgggttggaagcgagtactacggtccttatgccatagccgcacacgggttcctctgttggcagctatctattttcttatgatccatgttctcctaatactatgcttcaccgggcacctcta

SEQ ID NO: 90734 - DNA, 126 bp, Artificial Sequence
  derived and/or modified sequence
atgctgagcagactgagcggcctggccaacgtggtgctgcacgagctgagcggcgacgacgacaccgaccagaacatgagagcccccctggaccccgagctgcaccaggagagcgacatggagtag

SEQ ID NO: 90735 - DNA, 9810 bp, Artificial Sequence
  derived and/or modified sequence
atgctgagcagactgagcggcctggccaacgtggtgctgcacgagctgagcggcgacgacgacaccgaccagaacatgagagcccccctggaccccgagctgcaccaggagagcgacatggagttcaacaacaccacccaggaggacgtgcaggagagactggcctacgccgagcagctggtggtggagctgaaggacatcatcagacagaaggacgtgcagctgcagcagaaggacgaggccctgcaggaggagagaaaggccgccgacaacaagatcaagaagctgaagctgcacgccaaggccaagctgaccagcctgaacaagtacatcgaggagatgaaggcccagggcggcaccgtgctgcccaccgagccccagagcgaggagcagctgagcaagcacgacaagagcagcaccgaggaggagatggagatcgagaagatcaagcacaagctgcaggagaaggaggagctgatcagcaccctgcaggcccagctgacccaggcccaggccgagcagcccgcccagagcagcaccgagatggaggagttcgtgatgatgaagcagcagctgcaggagaaggaggagttcatcagcaccctgcaggcccagctgagccagacccaggccgagcaggccgcccagctgagcagcatgcagcaggtggtgagagagaaggacgccagattcgagacccaggtgagactgcacgaggacgagctgctgcagctggtgacccaggccgacgtggagaccgagatgcagcagaagctgagagtgctgcagagaaagctggaggagcacgaggagagcctggtgggcagagcccaggtggtggacctgctgcagcaggagctgaccgccgccgagcagagaaaccagatcctgagccagcagctgcagcagatggaggccgagcacaacaccctgagaaacaccgtggagaccgagagagaggagagcaagatcctgctggagaagatggagctggaggtggccgagagaaagctgagcttccacaacctgcaggaggagatgcaccacctgctggagcagttcgagcaggccggccaggcccaggccgagctggagagcagatacagcgccctggagcagaagcacaaggccgagatggaggagaagaccagccacatcctgagcctgcagaagaccggccaggagctgcagagcgcctgcgacgccctgaaggaccagaacagcaagctgctgcaggacaagaacgagcaggccgtgcagagcgcccagaccatccagcagctggaggaccagctgcagcagaagagcaaggagatcagccagttcctgaacagactgcccctgcagcagcacgagaccgccagccagaccagcttccccgacgtgtacaacgagggcacccaggccgtgaccgaggagaacatcgccagcctgcagaagagagtggtggagctggagaacgagaagggcgccctgctgctgagcagcatcgagctggaggagctgaaggccgagaacgagaagctgagcagccagatcaccctgctggaggcccagaacagaaccggcgaggccgacagagaggtgagcgagatcagcatcgtggacatcgccaacaagagaagcagcagcgccgaggagagcggccaggacgtgctggagaacaccttcagccagaagcacaaggagctgagcgtgctgctgctggagatgaaggaggcccaggaggagatcgccttcctgaagctgcagctgcagggcaagagagccgaggaggccgaccacgaggtgctggaccagaaggagatgaagcagatggagggcgagggcatcgcccccatcaagatgaaggtgttcctggaggacaccggccaggacttccccctgatgcccaacgaggagagcagcctgcccgccgtggagaaggagcaggccagcaccgagcaccagagcagaaccagcgaggagatcagcctgaacgacgccggcgtggagctgaagagcaccaagcaggacggcgacaagagcctgagcgccgtgcccgacatcggccagtgccaccaggacgagctggagagactgaagagccagatcctggagctggagctgaacttccacaaggcccaggagatctacgagaagaacctggacgagaaggccaaggagatcagcaacctgaaccagctgatcgaggagttcaagaagaacgccgacaacaacagcagcgccttcaccgccctgagcgaggagagagaccagctgctgagccaggtgaaggagctgagcatggtgaccgagctgagagcccaggtgaagcagctggagatgaacctggccgaggccgagagacagagaagactggactacgagagccagaccgcccacgacaacctgctgaccgagcagatccacagcctgagcatcgaggccaagagcaaggacgtgaagatcgaggtgctgcagaacgagctggacgacgtgcagctgcagttcagcgagcagagcaccctgatcagaagcctgcagagccagctgcagaacaaggagagcgaggtgctggagggcgccgagagagtgagacacatcagcagcaaggtggaggagctgagccaggccctgagccagaaggagctggagatcaccaagatggaccagctgctgctggagaagaagagagacgtggagaccctgcagcagaccatcgaggagaaggaccagcaggtgaccgagatcagcttcagcatgaccgagaagatggtgcagctgaacgaggagaagttcagcctgggcgtggagatcaagaccctgaaggagcagctgaacctgctgagcagagccgaggaggccaagaaggagcaggtggaggaggacaacgaggtgagcagcggcctgaagcagaactacgacgagatgagccccgccggccagatcagcaaggaggagctgcagcacgagttcgacctgctgaagaaggagaacgagcagagaaagagaaagctgcaggccgccctgatcaacagaaaggagctgctgcagagagtgagcagactggaggaggagctggccaacctgaaggacgagagcaagaaggagatccccctgagcgagaccgagagaggcgaggtggaggaggacaaggagaacaaggagtacagcgagaagtgcgtgaccagcaagtgccaggagatcgagatctacctgaagcagaccatcagcgagaaggaggtggagctgcagcacatcagaaaggacctggaggagaagctggccgccgaggagcagttccaggccctggtgaagcagatgaaccagaccctgcaggacaagaccaaccagatcgacctgctgcaggccgagatcagcgagaaccaggccatcatccagaagctgatcaccagcaacaccgacgccagcgacggcgacagcgtggccctggtgaaggagaccgtggtgatcagccccccctgcaccggcagcagcgagcactggaagcccgagctggaggagaagatcctggccctggagaaggagaaggagcagctgcagaagaagctgcaggaggccctgaccagcagaaaggccatcctgaagaaggcccaggagaaggagagacacctgagagaggagctgaagcagcagaaggacgactacaacagactgcaggagcagttcgacgagcagagcaaggagaacgagaacatcggcgaccagctgagacagctgcagatccaggtgagagagagcatcgacggcaagctgcccagcaccgaccagcaggagagctgcagcagcacccccggcctggaggagcccctgttcaaggccaccgagcagcaccacacccagcccgtgctggagagcaacctgtgccccgactggcccagccacagcgaggacgccagcgccctgcagggcggcaccagcgtggcccagatcaaggcccagctgaaggagatcgaggccgagaaggtggagctggagctgaaggtgagcagcaccaccagcgagctgaccaagaagagcgaggaggtgttccagctgcaggagcagatcaacaagcagggcctggagatcgagagcctgaagaccgtgagccacgaggccgaggtgcacgccgagagcctgcagcagaagctggagagcagccagctgcagatcgccggcctggagcacctgagagagctgcagcccaagctggacgagctgcagaagctgatcagcaagaaggaggaggacgtgagctacctgagcggccagctgagcgagaaggaggccgccctgaccaagatccagaccgagatcatcgagcaggaggacctgatcaaggccctgcacacccagctggagatgcaggccaaggagcacgacgagagaatcaagcagctgcaggtggagctgtgcgagatgaagcagaagcccgaggagatcggcgaggagagcagagccaagcagcagatccagagaaagctgcaggccgccctgatcagcagaaaggaggccctgaaggagaacaagagcctgcaggaggagctgagcctggccagaggcaccatcgagagactgaccaagagcctggccgacgtggagagccaggtgagcgcccagaacaaggagaaggacaccgtgctgggcagactggccctgctgcaggaggagagagacaagctgatcaccgagatggacagaagcctgctggagaaccagagcctgagcagcagctgcgagagcctgaagctggccctggagggcctgaccgaggacaaggagaagctggtgaaggagatcgagagcctgaagagcagcaagatcgccgagagcaccgagtggcaggagaagcacaaggagctgcagaaggagtacgagatcctgctgcagagctacgagaacgtgagcaacgaggccgagagaatccagcacgtggtggaggccgtgagacaggagaagcaggagctgtacggcaagctgagaagcaccgaggccaacaagaaggagaccgagaagcagctgcaggaggccgagcaggagatggaggagatgaaggagaagatgagaaagttcgccaagagcaagcagcagaagatcctggagctggaggaggagaacgacagactgagagccgaggtgcaccccgccggcgacaccgccaaggagtgcatggagaccctgctgagcagcaacgccagcatgaaggaggagctggagagagtgaagatggagtacgagaccctgagcaagaagttccagagcctgatgagcgagaaggacagcctgagcgaggaggtgcaggacctgaagcaccagatcgagggcaacgtgagcaagcaggccaacctggaggccaccgagaagcacgacaaccagaccaacgtgaccgaggagggcacccagagcatccccggcgagaccgaggagcaggacagcctgagcatgagcaccagacccacctgcagcgagagcgtgcccagcgccaagagcgccaaccccgccgtgagcaaggacttcagcagccacgacgagatcaacaactacctgcagcagatcgaccagctgaaggagagaatcgccggcctggaggaggagaagcagaagaacaaggagttcagccagaccctggagaacgagaagaacaccctgctgagccagatcagcaccaaggacggcgagctgaagatgctgcaggaggaggtgaccaagatgaacctgctgaaccagcagatccaggaggagctgagcagagtgaccaagctgaaggagaccgccgaggaggagaaggacgacctggaggagagactgatgaaccagctggccgagctgaacggcagcatcggcaactactgccaggacgtgaccgacgcccagatcaagaacgagctgctggagagcgagatgaagaacctgaagaagtgcgtgagcgagctggaggaggagaagcagcagctggtgaaggagaagaccaaggtggagagcgagatcagaaaggagtacctggagaagatccagggcgcccagaaggagcccggcaacaagagccacgccaaggagctgcaggagctgctgaaggagaagcagcaggaggtgaagcagctgcagaaggactgcatcagataccaggagaagatcagcgccctggagagaaccgtgaaggccctggagttcgtgcagaccgagagccagaaggacctggagatcaccaaggagaacctggcccaggccgtggagcacagaaagaaggcccaggccgagctggccagcttcaaggtgctgctggacgacacccagagcgaggccgccagagtgctggccgacaacctgaagctgaagaaggagctgcagagcaacaaggagagcgtgaagagccagatgaagcagaaggacgaggacctggagagaagactggagcaggccgaggagaagcacctgaaggagaagaagaacatgcaggagaagctggacgccctgagaagagagaaggtgcacctggaggagaccatcggcgagatccaggtgaccctgaacaagaaggacaaggaggtgcagcagctgcaggagaacctggacagcaccgtgacccagctggccgccttcaccaagagcatgagcagcctgcaggacgacagagacagagtgatcgacgaggccaagaagtgggagagaaagttcagcgacgccatccagagcaaggaggaggagatcagactgaaggaggacaactgcagcgtgctgaaggaccagctgagacagatgagcatccacatggaggagctgaagatcaacatcagcagactggagcacgacaagcagatctgggagagcaaggcccagaccgaggtgcagctgcagcagaaggtgtgcgacaccctgcagggcgagaacaaggagctgctgagccagctggaggagaccagacacctgtaccacagcagccagaacgagctggccaagctggagagcgagctgaagagcctgaaggaccagctgaccgacctgagcaacagcctggagaagtgcaaggagcagaagggcaacctggagggcatcatcagacagcaggaggccgacatccagaacagcaagttcagctacgagcagctggagaccgacctgcaggccagcagagagctgaccagcagactgcacgaggagatcaacatgaaggagcagaagatcatcagcctgctgagcggcaaggaggaggccatccaggtggccatcgccgagctgagacagcagcacgacaaggagatcaaggagctggagaacctgctgagccaggaggaggaggagaacatcgtgctggaggaggagaacaagaaggccgtggacaagaccaaccagctgatggagaccctgaagaccatcaagaaggagaacatccagcagaaggcccagctggacagcttcgtgaagagcatgagcagcctgcagaacgacagagacagaatcgtgggcgactaccagcagctggaggagagacacctgagcatcatcctggagaaggaccagctgatccaggaggccgccgccgagaacaacaagctgaaggaggagatcagaggcctgagaagccacatggacgacctgaacagcgagaacgccaagctggacgccgagctgatccagtacagagaggacctgaaccaggtgatcaccatcaaggacagccagcagaagcagctgctggaggtgcagctgcagcagaacaaggagctggagaacaagtacgccaagctggaggagaagctgaaggagagcgaggaggccaacgaggacctgagaagaagcttcaacgccctgcaggaggagaagcaggacctgagcaaggagatcgagagcctgaaggtgagcatcagccagctgaccagacaggtgaccgccctgcaggaggagggcaccctgggcctgtaccacgcccagctgaaggtgaaggaggaggaggtgcacagactgagcgccctgttcagcagcagccagaagagaatcgccgagctggaggaggagctggtgtgcgtgcagaaggaggccgccaagaaggtgggcgagatcgaggacaagctgaagaaggagctgaagcacctgcaccacgacgccggcatcatgagaaacgagaccgagaccgccgaggagagagtggccgagctggccagagacctggtggagatggagcagaagctgctgatggtgaccaaggagaacaagggcctgaccgcccagatccagagcttcggcagaagcatgagcagcctgcagaacagcagagaccacgccaacgaggagctggacgagctgaagagaaagtacgacgccagcctgaaggagctggcccagctgaaggagcagggcctgctgaacagagagagagacgccctgctgagcgagaccgccttcagcatgaacagcaccgaggagaacagcctgagccacctggagaagctgaaccagcagctgctgagcaaggacgagcagctgctgcacctgagcagccagctggaggacagctacaaccaggtgcagagcttcagcaaggccatggccagcctgcagaacgagagagaccacctgtggaacgagctggagaagttcagaaagagcgaggagggcaagcagagaagcgccgcccagcccagcaccagccccgccgaggtgcagagcctgaagaaggccatgagcagcctgcagaacgacagagacagactgctgaaggagctgaagaacctgcagcagcagtacctgcagatcaaccaggagatcaccgagctgcaccccctgaaggcccagctgcaggagtaccaggacaagaccaaggccttccagatcatgcaggaggagctgagacaggagaacctgagctggcagcacgagctgcaccagctgagaatggagaagagcagctgggagatccacgagagaagaatgaaggagcagtacctgatggccatcagcgacaaggaccagcagctgagccacctgcagaacctgatcagagagctgagaagcagcagcagccagacccagcccctgaaggtgcagtaccagagacaggccagccccgagaccagcgccagccccgacggcagccagaacctggtgtacgagaccgagctgctgagaacccagctgaacgacagcctgaaggagatccaccagaaggagctgagaatccagcagctgaacagcaacttcagccagctgctggaggagaagaacaccctgagcatccagctgtgcgacaccagccagagcctgagagagaaccagcagcactacggcgacctgctgaaccactgcgccgtgctggagaagcaggtgcaggagctgcaggccgtgagcaaggagaagggccccctgaacatcgacgtggcccccggcgccccccaggagaagaacggcgtgcacagaaagagcgaccccgaggagctgagagagccccagcagagcttcagcgaggcccagcagcagctgtgcaacaccagacaggaggtgaacgagctgagaaagctgctggaggaggagagagaccagagagtggccgccgagaacgccctgagcgtggccgaggagcagatcagaagactggagcacagcgagtgggacagcagcagaacccccatcatcggcagctgcggcacccaggagcaggccctgctgatcgacctgaccagcaacagctgcagaagaaccagaagcggcgtgggctggaagagagtgctgagaagcctgtgccacagcagaaccagagtgcccctgctggccgccatctacttcctgatgatccacgtgctgctgatcctgtgcttcaccggccacctgtag

SEQ ID NO: 90736 - protein, 1057 aa, Artificial Sequence
  derived and/or modified sequence
MAAAPALKHWRTTLERVEKFVSPLYFTDCNLRGRLFGASCPVAVLSSFLTPERLPYQEAVQRDFRPAQVGDSFGPTWWTCWFRVELTIPEAWVGQEVHLCWESDGEGLVWRDGEPVQGLTKEGEKTSYVLTDRLGERDPRSLTLYVEVACNGLLGAGKGSMIAAPDPEKMFQLSRAELAVFHRDVHMLLVDLELLLGIAKGLGKDNQRSFQALYTANQMVNVCDPAQPETFPVAQALASRFFGQHGGESQHTIHATGHCHIDTAWLWPFKETVRKCARSWVTALQLMERNPEFIFACSQAQQLEWVKSRYPGLYSRIQEFACRGQFVPVGGTWVEMDGNLPSGEAMVRQFLQGQNFFLQEFGKMCSEFWLPDTFGYSAQLPQIMHGCGIRRFLTQKLSWNLVNSFPHHTFFWEGLDGSRVLVHFPPGDSYGMQGSVEEVLKTVANNRDKGRANHSAFLFGFGDGGGGPTQTMLDRLKRLSNTDGLPRVQLSSPRQLFSALESDSEQLCTWVGELFLELHNGTYTTHAQIKKGNRECERILHDVELLSSLALARSAQFLYPAAQLQHLWRLLLLNQFHDVVTGSCIQMVAEEAMCHYEDIRSHGNTLLSAAAAALCAGEPGPEGLLIVNTLPWKRIEVMALPKPGGAHSLGLTPSPGDSAQHGLCSCSSPHLTAAPAAPAACVRSARAPTDSASRPPPTKTDGSVTLDNGIIRVKLDPTGRLTSLVLVASGREAIAEGAVGNQFVLFDDVPLYWDAWDVMDYHLETRKPVLGQAGTLAVGTEGGLRGSAWFLLQISPNSRLSQEVVLDVGCPYVRFHTEVHWHEAHKFLKVEFPARVRSSQATYEIQFGHLQRPTHYNTSWDWARFEVWAHRWMDLSEHGFGLALLNDCKYGASVRGSILSLSLLRAPKAPDATADTGRHEFTYALMPHKGSFQDAGVIQAAYSLNFPLLALPAPSPAPATSWSAFSVSSPAVVLETVKQAESSPQRRSLVLRLYEAHGSHVDCWLHLSLPVQEAILCDLLERPDPAGHLTLRDNRLKLTFSPFQVLSLLLVLQPPPH

SEQ ID NO: 90737 - DNA, 3174 bp, Artificial Sequence
  derived and/or modified sequence
atggcagccgcgcccgccttaaaacactggcgaacgactctggaaagggtagagaagttcgtcagtcccttgtactttaccgactgcaatcttagaggacggcttttcggcgcctcttgtcccgtcgcagtcctcagttcatttttgacccctgaaaggttgccataccaggaggccgttcagcgggatttcaggcccgctcaagtgggggacagcttcggtcctacttggtggacttgctggttccgggtggaactcaccattcccgaggcttgggttggccaggaggtacatctgtgctgggagtccgacggcgagggcctagtgtggcgcgacggggaacccgtacagggtcttaccaaggagggcgaaaagacttcatacgtccttacagataggctcggcgaaagggacccaaggagccttaccctgtacgtggaagtggcctgcaatggcttacttggcgccgggaaagggtccatgatagcagccccagacccggagaagatgttccaactgtcacgggctgaactcgccgtgttccaccgagacgtacatatgctcctggttgacctcgaactcttactgggtattgctaaagggctaggaaaggacaaccagaggtcattccaggctttatatactgccaatcagatggtgaacgtctgcgatcctgcccagccagagacctttcctgtcgctcaggctctggccagccgctttttcggtcaacatggcggtgagtcccaacacactatacacgctacagggcactgtcatattgatacagcatggttatggccgtttaaggaaaccgtaaggaaatgtgctcgctcctgggtgaccgctttacagcttatggaacggaacccggagtttatcttcgcctgtagtcaagcacaacaactggagtgggtaaagagtcggtaccccggactgtacagccggattcaggaatttgcttgcagagggcagtttgtgccggtgggtggaacgtgggtcgagatggacggaaatcttcctagcggggaagctatggtgcgacaatttctccagggacagaactttttcctgcaggagttcgggaaaatgtgctccgagttctggctgccagacacgttcggctattccgctcagcttccccagatcatgcatgggtgcggcataagacgatttttaacccagaagctcagttggaatctggtaaactcattccctcaccatacgtttttctgggaaggcttggacggttcccgagtgctggtacatttccctcccggtgactcctatgggatgcagggtagcgtggaggaggtgctgaaaactgtggctaataatagggataagggaagggccaatcactccgcatttctgttcggctttggtgatggcggcggagggccgacacagactatgctcgatcgcctgaaaaggctctcaaatacggacggactgcctagagtgcagctgtcatcacccaggcagctatttagcgccctggagtccgactccgagcagctgtgtacatgggtgggagaactctttttggagttacacaatggcacatataccacccacgctcagataaaaaagggaaaccgcgaatgtgagcgaatactgcacgatgtggaacttctgtctagcttagctttggcccggagcgcccagtttttgtatcccgcagcgcagcttcagcacctatggcgtctcctcctactaaatcagttccacgacgtcgtgactgggagttgcatccagatggtggccgaggaggcaatgtgtcactacgaggacattcgctctcacggcaatactctgctgtctgctgccgccgctgccctgtgtgcaggagaaccgggccctgaagggttgctgatagttaacacactgccctggaagcgtatcgaggtgatggccttaccaaagccaggtggggcacattcactgggcctgacacctagtcccggggactccgcccagcacggcttatgctcctgcagctcccctcacctcaccgcggccccggccgctccagctgcttgtgttcgtagcgctcgagcgccgaccgattccgcgtcccggccgccccccaccaaaactgacggctcagtcacactcgacaacggaatcattagagtgaagttggaccccacaggccggctaacgagccttgtactggttgcctcgggaagggaggcaatcgcagaaggagccgtcgggaaccagttcgtgctatttgatgatgtgccactctactgggatgcatgggacgtgatggattatcacctggagacccgcaagcccgtgctgggccaggcaggcaccttggccgtgggcacagaaggggggttacgggggtccgcttggtttctccttcagatctcacccaattcacggctgtctcaggaggtagtcctcgatgtgggatgcccttacgtgaggtttcataccgaggtgcactggcacgaagcccacaaattcctcaaggtagagtttccagcccgcgtgcgtagcagccaggccacatacgaaattcagtttggccatctgcagagaccaacacactacaacacgagttgggattgggccaggttcgaggtgtgggctcatcggtggatggacctcagtgaacacgggtttggcctggccctacttaacgattgtaaatacggagcatcagtgaggggcagtatactgtctttgtccctgttgcgtgcccctaaagcaccggacgcaactgccgatactggcagacacgaattcacctacgcattaatgccacacaaggggtccttccaggatgctggggttatccaggcggcttacagcctcaatttcccactgctggctttacctgctccatctcccgcgcctgccaccagctggagcgccttttctgtgtcttcgccggccgtagtcctcgagacagtgaagcaggctgagagtagtcctcaacggcggtccttggtgctgagattatacgaagcccacggcagccacgttgactgctggctgcacctttccctcccagtgcaggaggcaatattatgcgacctgttggagaggccagatcctgccggccacctcaccttgcgcgacaatagattgaagctgaccttcagtccattccaggtgttgagcctgcttcttgtgctgcagcccccaccccactag

SEQ ID NO: 90738 - DNA, 3174 bp, Artificial Sequence
  derived and/or modified sequence
atggctgctgccccagccctgaagcactggaggaccaccctggagcgggtggagaagtttgtgagccccctgtacttcacagactgcaacctgcggggccgcctgtttggagccagctgccctgtggccgtgctgagcagcttcctgaccccagagcggctgccctaccaggaggccgtgcagagggacttccggcctgcccaggtgggggacagctttggccccacctggtggacctgctggttccgggtggagctgaccatccctgaggcctgggtgggccaggaggtgcacctgtgctgggagagtgatggagagggcctggtgtggagagatggagagcctgtgcagggcctgaccaaggagggggagaagaccagctatgtgctgacagaccggctgggggagcgggaccccaggagcctgaccctgtatgtggaggtggcctgcaatggcctgctgggcgctgggaagggctccatgattgctgccccagaccctgagaagatgttccagctgagcagagctgagctggccgtgttccacagagatgtgcacatgctgctggtggacctggagctgctgctgggcatcgccaagggcctgggcaaggacaaccagaggagcttccaggccctgtacacagccaaccagatggtgaatgtgtgtgaccctgcccagcctgagaccttccctgtggcccaggccctggccagccgcttcttcggccagcacggcggggagagccagcacaccatccacgccaccggccactgccacatcgacacagcctggctgtggcccttcaaggagaccgtgaggaaatgtgcccgctcctgggtgacagccctgcagctgatggagagaaatcctgagttcatctttgcctgcagccaggcccagcagctggagtgggtgaagagccgctacccaggcctgtacagccgcatccaggagtttgcctgccggggccagtttgtgcctgtgggcggcacctgggtggagatggatggcaacctgcccagcggggaggccatggtgcggcagttcctgcagggccagaacttcttcctgcaggagtttgggaagatgtgcagcgagttctggctgcctgacaccttcggctacagcgcccagctgccccagatcatgcacggctgcggcatccgccgcttcctgacccagaagctgtcctggaacctggtgaacagcttcccccaccacaccttcttctgggagggcctggatggcagccgggtgctggtgcacttccccccaggggacagctatggcatgcagggctctgtggaggaggtgctgaagacagtggccaacaacagagacaagggccgggccaaccacagcgccttcctgtttggatttggagatggcggcggcggccccacccagaccatgctggaccggctgaagaggctgagcaacacagatggcctgccccgggtgcagctgagcagcccccggcagctgttcagcgccctggagagtgacagcgagcagctgtgcacctgggtgggggagctgttcctggagctgcacaacggcacctacaccacccacgcccagatcaagaagggcaacagagaatgtgagcgcatcctgcatgatgtggagctgctgagcagcctggccctggcccggagcgcccagttcctgtacccagctgcccagctgcagcacctgtggaggctgctgctgctgaaccagttccatgatgtggtgacaggcagctgcatccagatggtggccgaggaggccatgtgccactatgaggacatccgcagccacggcaacaccctgctgtctgctgctgctgctgccctgtgtgccggggagcccggccctgagggcctgctgattgtgaacaccctgccctggaagagaattgaggtgatggccctgcccaagccaggaggagcccacagcctgggcctgacccccagccctggggacagcgcccagcacggcctgtgcagctgcagcagcccccacctgacagctgccccagctgccccagctgcctgtgtgcgcagcgcccgggcccccacagattctgccagccggcccccacccaccaagacagatggctctgtgaccctggacaatggcatcatccgggtgaagctggaccccaccggccgcctgaccagcctggtgctggtggccagcggccgggaggccatcgccgagggcgctgtgggcaaccagtttgtgctgtttgatgatgtgcccctgtactgggatgcctgggatgtgatggactaccacctggagaccaggaagcctgtgctgggccaggccggcaccctggccgtgggcacagagggcggcctgcggggcagcgcctggttcctgctgcagatcagccccaacagccggctgagccaggaggtggtgctggatgtgggctgcccctacgtgcgcttccacacagaggtgcactggcatgaggcccacaagttcctgaaggtggagttccctgcccgggtgcgcagcagccaggccacctatgagatccagtttggccacctgcagaggcccacccactacaacacctcctgggactgggccaggtttgaggtgtgggcccaccgctggatggacctgtctgagcacggcttcggcctggccctgctgaatgactgcaagtacggggcctctgtgcggggcagcatcctgagcctgagcctgctgcgggcccccaaggccccagatgccacagctgacaccggcagacatgagttcacctacgccctgatgccccacaagggcagcttccaggatgctggggtcatccaggccgcctacagcctgaacttccccctgctggccctgcctgcccccagccctgccccagccacctcctggagcgccttctctgtgagcagccctgctgtggtgctggagaccgtgaagcaggccgagagcagcccccagaggaggagcctggtgctgcggctgtatgaggcccacggcagccacgtggactgctggctgcacctgagcctgcctgtgcaggaggccatcctgtgtgacctgctggagaggccagaccctgctggccacctgaccctgcgggacaaccggctgaagctgaccttcagccccttccaggtgctgagcctgctgctggtgctgcagcccccaccccactag

SEQ ID NO: 90739 - DNA, 3300 bp, Artificial Sequence
  derived and/or modified sequence
gagagcccggcgatggcggctgcgccggccttgaagcactggcgcaccacgctggagcgggtggagaagttcgtgtcgccgctctactttaccgactgtaacctccgcggcaggctttttggggccagctgccctgtggctgtgctctccagcttcctgacgccggagagacttccctaccaggaggcagtccagcgggacttccgccccgcgcaggtcggcgacagcttcggacccacatggtggacctgctggttccgggtggagctgaccatcccagaggcatgggtgggccaggaagttcacctttgctgggaaagtgatggagaaggtctggtgtggcgtgatggagaacctgtccagggtttaaccaaagagggtgagaagaccagctatgtcctgactgacaggctgggggaaagagacccccgaagcctcactctctatgtggaagtagcctgcaatgggctcctgggggccgggaagggaagcatgattgcagcccctgaccctgagaagatgttccagctgagccgggctgagctagctgtgttccaccgggatgtccacatgctcctggtggatctggagctgctgctgggcatagccaagggcctcgggaaggacaaccagcgcagcttccaggccctgtacacagccaatcagatggtgaacgtgtgtgaccctgcccagcccgagaccttcccagtggcccaggccctggcctccaggttctttggccaacatgggggtgaaagccaacacaccattcatgccacagggcactgccacattgatacagcctggctttggcccttcaaagagactgtgaggaaatgtgcccggagctgggtgaccgccctgcagctcatggagcggaaccctgagttcatctttgcctgctcccaggcgcagcagctggaatgggtgaagagccgctaccctggcctgtactcccgcatccaggagtttgcgtgccgtgggcagtttgtgcctgtggggggcacctgggtggagatggatgggaacctgcccagtggagaggccatggtgaggcagtttttgcagggccagaacttctttctgcaggagtttgggaagatgtgctctgagttctggctgccggacacctttggctactcagcacagctcccccagatcatgcacggctgtggcatcaggcgctttctcacccagaaattgagctggaatttggtgaactccttcccacaccatacatttttctgggagggcctggatggctcccgtgtactggtccacttcccacctggcgactcctatgggatgcagggcagcgtggaggaggtgctgaagaccgtggccaacaaccgggacaaggggcgggccaaccacagtgccttcctctttggctttggggatgggggtggtggccccacccagaccatgctggaccgcctgaagcgcctgagcaatacggatgggctgcccagggtgcagctatcttctccaagacagctcttctcagcactggagagtgactcagagcagctgtgcacgtgggttggggagctcttcttggagctgcacaatggcacatacaccacccatgcccagatcaagaaggggaaccgggaatgtgagcggatcctgcacgacgtggagctgctcagtagcctggccctggcccgcagtgcccagttcctatacccagcagcccagctgcagcacctctggaggctccttcttctgaaccagttccatgatgtggtgactggaagctgcatccagatggtggcagaggaagccatgtgccattatgaagacatccgttcccatggcaatacactgctcagcgctgcagccgcagccctgtgtgctggggagccaggtcctgagggcctcctcatcgtcaacacactgccctggaagcggatcgaagtgatggccctgcccaaaccgggcggggcccacagcctaggcctcacccccagccctggtgacagtgcccagcatgggctatgctcctgttcctccccccacctcactgcagcccctgctgccccagcagcctgtgttcgtagtgcaagagcccctacagactcagcctcaaggcctcctcccacaaagactgatggctccgtgactctggacaatggcatcatccgagtgaagctggacccaactggtcgcctgacgtccttggtcctggtggcctctggcagggaggccattgctgagggcgccgtggggaaccagtttgtgctatttgatgatgtccccttgtactgggatgcatgggacgtcatggactaccacctggagacacggaagcctgtgctgggccaggcagggaccctggcagtgggcaccgagggcggcctgcggggcagcgcctggttcttgctacagatcagccccaacagtcggcttagccaggaggttgtgctggacgttggctgcccctatgtccgcttccacaccgaggtacactggcatgaggcccacaagttcctgaaggtggagttccctgctcgcgtgcggagttcccaggccacctatgagatccagtttgggcacctgcagcgacctacccactacaatacctcttgggactgggctcgatttgaggtgtgggcccatcgctggatggatctgtcagaacacggctttgggctggccctgctcaacgactgcaagtatggcgcgtcagtgcgaggcagcatcctcagcctctcgctcttgcgggcgcctaaagccccggacgctactgctgacacggggcgccacgagttcacctatgcactgatgccgcacaagggctctttccaggatgctggcgttatccaagctgcctacagcctaaacttccccctgttggctctgccagcccccagcccagcgcccgccacctcctggagtgcgttttccgtgtcttcacccgcggtcgtattggagaccgtcaagcaggcggagagcagcccccagcgccgctcgctggtcctgaggctgtatgaggcccacggcagccacgtggactgctggctgcacttgtcgctgccggttcaggaggccatcctctgcgatctcttggagcgaccagaccctgctggccacttgacccttcgggacaaccgcctgaagctcaccttttctcccttccaagtgctgtccctgttgctcgtgcttcagcctccgccacactgagtccctggggctggggttttgtttgtagaaggctctggggactcctaatttctgcttccccagcctaaagcagggatcagtcttttcttgtggaataaatccttggatcgggaa

SEQ ID NO: 90740 - DNA, 3174 bp, Artificial Sequence
  derived and/or modified sequence
atggccgccgcccccgccctgaagcactggcggaccaccctggagcgggtggaaaagttcgtgtcgccactgtacttcactgactgcaatctgaggggaagactgttcggcgcttcgtgtccagttgctgtgctgtcctccttcctgactcctgagcgactcccctatcaagaggccgtccagcgggacttcaggcccgcacaggtcggagattcttttgggccaacctggtggacctgttggtttagagtggagctcactatcccagaggcctgggtggggcaggaggtccatctctgctgggagtccgatggggaaggacttgtatggcgcgatggagaaccagtgcagggcctgaccaaggaaggggagaagacgtcctatgtgctgacagataggctgggagagagagacccccgctcactgacactctatgtcgaagtggcctgcaacggattactgggcgctggcaaagggtccatgatagccgccccagatcctgaaaagatgtttcagctgagtagagccgaactggccgtgttccatagagacgtgcacatgctactcgtggacctggagctcttattaggcattgctaagggacttggaaaggataatcaacgcagtttccaggccctgtacaccgcaaaccagatggtaaacgtatgtgatcctgcgcaacccgaaacattccctgtggcccaggcactcgctagcagattctttgggcagcatggcggagagtcacaacataccatacatgcgacaggacactgccatatcgacaccgcctggctgtggccctttaaagaaacagtaaggaagtgcgcccggagttgggttacagccctccagctgatggagaggaaccctgagtttatctttgcctgctcgcaggcccaacaattggagtgggtcaagtcccgctacccaggcttgtactccaggatccaggagttcgcctgccggggccaatttgtgcccgtgggaggaacttgggtggagatggatggaaacctcccaagtggagaggcaatggtgcgccagtttctgcagggacagaacttttttttacaggagttcggtaaaatgtgctccgagttctggttgcctgacactttcggatacagcgcgcagttgcctcaaatcatgcacgggtgcggaatacggcgattcctaacacaaaagcttagctggaatttggtaaacagctttccccaccatacgtttttctgggagggcctagacggctctagagtgctggttcactttcctcccggggacagctacggaatgcagggcagcgtggaggaagtgctgaagacagtcgccaacaaccgcgacaaaggcagggctaatcacagcgcttttctcttcggcttcggggatggcggaggcggcccaacgcagactatgctggacaggctgaagcgtctttcaaatactgacggactgccacgagtgcaactctcctcgcctcgtcagctgttcagcgctttggagtcagattcagagcagctgtgcacctgggtgggcgaactgttcttggaattacacaatggcacgtatacaacccatgcccagatcaaaaaaggcaacagggagtgtgaacgaattcttcatgacgtggagctgcttagtagccttgcgctggcccggagtgcccagttcctttatcctgctgcgcaactgcagcacctgtggcgcctcctgctgcttaaccagttccatgatgtggtgacagggagttgcatccagatggtagcagaggaggccatgtgccactatgaggacatccgatcacacggcaacacgctcttgtcggccgcagctgccgcgctgtgtgcaggtgagccgggaccggagggactgcttatcgttaacaccctcccatggaagcgtatcgaggtgatggcccttcctaaacccgggggggctcacagtctggggcttacgccatccccaggagacagcgctcaacacgggctttgcagctgttctagcccccacttaactgccgcgccagccgctcctgcagcatgcgtgcgaagtgcccgcgctccaaccgactcagcgagccggccgccccctaccaaaactgatgggtctgtaacactagacaacggcattattcgagttaaattggatccgactggtcgcctcactagcctggttctggtggcctcaggaagggaggcaattgcagagggtgcagtgggcaaccaatttgtcctcttcgacgatgtacctctgtactgggacgcctgggacgtaatggactatcacttagagacacggaagccggtgctggggcaggctggaacccttgctgtgggaactgaaggtggactgcggggaagcgcctggttccttctacagatctccccgaactccagacttagtcaggaggtcgtgctggatgtcggctgtccgtacgtacgctttcacaccgaagtgcactggcacgaagcccacaaatttcttaaagttgagttccccgccagagtgagatcctcccaggctacttatgagatccagttcggccacttgcagcgaccaacccactataatacttcctgggattgggccagatttgaagtgtgggcccaccggtggatggaccttagcgagcacgggttcgggctggccctgctcaacgattgtaagtacggagctagtgtaagggggagcatcctgagcctaagcctgctgagagctccaaaagctccagacgcaactgccgatactggccggcacgagttcacatacgccttgatgccacataaggggtcttttcaggatgccggggtgatccaggctgcttactccttgaactttcctttacttgcactgcccgcccccagtcccgcaccagccacctcctggtctgctttctcagtgtcttctcccgccgtcgtgctggaaacagttaagcaggccgagtcttccccacagaggagatcacttgtccttcgcctttacgaggcccatggttcccacgtggattgctggctccatctcagcctgcctgtgcaggaagctatcctgtgcgatctgctggagagacccgacccagccggccatctgacattgcgcgataaccggcttaaactgaccttttctccctttcaggttctctcgctgctcctggtgctacagcctccccctcactag

SEQ ID NO: 90741 - DNA, 3174 bp, Artificial Sequence
  derived and/or modified sequence
atggctgccgcacccgcacttaaacactggagaacgacgctggagcgggtcgagaagtttgtaagtcccctgtacttcacagactgtaacctcaggggaaggctttttggggcatcctgccccgtggcagttctcagtagtttcctgacacccgagcggctaccataccaggaggccgtgcaacgggatttccgcccagcacaggtgggcgatagcttcggtcctacctggtggacatgttggttccgggttgagctgacaattcctgaggcttgggtcggtcaggaagtccatctgtgctgggagagtgatggtgagggtctggtgtggcgagatggagagccggtgcagggactcaccaaggaaggagaaaaaaccagctatgtgctgactgatcggctgggagagcgggatcccagaagcctcaccctttacgtcgaagtggcctgcaacggcctcctgggagccggaaaggggtctatgatagccgcacccgatccagagaagatgtttcagctgtcacgtgccgagttggccgtctttcacagagatgtacacatgttgctggtggaccttgaacttttgcttgggatcgccaagggcctgggcaaggacaaccaacgctccttccaggcgctctacaccgctaaccagatggtgaatgtgtgtgaccctgcacaaccggagactttccctgtagcgcaggctctagcgtccaggttctttggtcagcacgggggagagtctcagcacacgatccatgctaccggccactgccacattgatactgcatggctgtggccttttaaagaaaccgtgcgcaagtgtgcgagatcatgggtgacggccttacagctgatggagaggaaccccgaatttatcttcgcttgcagtcaggcccagcagctggaatgggtgaaatcacggtatcccggactctacagtcgaatccaagaattcgcctgccgcggacaatttgtgccggtgggaggcacatgggtggaaatggatggcaatttgcccagcggggaggctatggtgcgtcaatttttgcagggtcaaaattttttccttcaggagtttggcaagatgtgttctgagttctggctgcccgacacatttggatacagtgcccagctaccacagattatgcatggatgtgggatcaggcgcttcctgacacagaagttatcgtggaacctggttaacagtttcccgcatcacacattcttctgggaaggcttggacggatcgcgagttctggtacatttccccccaggtgatagttatggcatgcagggctctgttgaggaggtgctaaagaccgtggcgaataacagggacaaaggccgagctaaccattccgcatttttgtttggcttcggagatgggggaggcggacccacccagaccatgttagacagacttaagagattaagcaacacagatggcctgccccgtgtgcagttaagtagcccaagacagctgtttagcgcgcttgaatccgattccgagcaactgtgtacctgggtgggtgaattgtttctggagttgcataacggcacgtacacgacccacgctcagatcaagaaaggaaaccgagagtgtgaacgcatcctacatgatgttgaactgctctcttccctggcgctagcccgtagcgcccagtttctgtaccccgcagcacaactacagcacctgtggcgcctgctcctgttaaaccagttccacgacgtggtaaccggctcttgcatccagatggttgctgaggaggcaatgtgccactatgaggacatcagatctcacggtaacaccctgctgtcggctgccgctgcagcgctctgcgccggtgagccgggacccgaagggttgctgattgtgaacacattgccatggaagagaattgaggttatggctctgcccaagcccggaggggctcactccctgggactgactcccagcccgggagatagcgcccagcacgggttgtgctcttgttcatcaccacacctgacagccgcacctgccgcacccgcagcttgcgtccgcagcgctagggctcctaccgacagcgcctcccgacccccacctaccaagacagatggctccgtcaccctcgacaacgggataattcgcgtcaagctggaccctacaggtagactaacttcgctcgtgctagtggcaagcgggagggaggcgatcgccgaaggggcagtcggcaaccaattcgtgctctttgacgacgtgcccctgtattgggacgcctgggacgtcatggactaccatctcgagactcgaaagccggttttggggcaggcagggacactggccgtagggactgagggaggactgcgtggaagtgcctggttcctgctgcagatttcacccaacagtaggcttagtcaggaggttgtgctggacgtcgggtgtccctatgttcgcttccacacagaggtccactggcacgaggcccataagtttctgaaggtggaattcccagcaagagtacggtcatctcaggccacctatgagattcagtttgggcatctgcagcggcctacacattataatacctcctgggattgggcaagattcgaggtgtgggcacatcgttggatggatctctcagaacatggttttggcctggcgctgttaaatgactgcaagtatggggcttccgttagaggaagcattctcagtctcagcctgctccgagcaccaaaggctccagatgctaccgccgacactggtagacacgagttcacatatgcactcatgccacacaagggaagtttccaggacgcgggtgtcatccaggctgcatattcgttgaacttccccctgctggcgttacccgcaccatcacccgcacctgctactagttggtccgcctttagcgtgagtagcccagctgtagtgctagagacggtcaagcaggccgagtctagcccccagcgtaggagtctcgttttacgcctttacgaggcgcatggcagccatgtggactgttggctgcacctcagtctgccagtgcaagaggctattctttgtgacctgctggaacgccctgaccccgctggccatctgactctgagggacaatagactgaagctgacattctcacctttccaggtcttgtccctcctgctggtgttacagccaccccctcactag

SEQ ID NO: 90742 - DNA, 3174 bp, Artificial Sequence
  derived and/or modified sequence
atggccgccgcccccgccctgaagcactggagaaccaccctggagagagtggagaagttcgtgagccccctgtacttcaccgactgcaacctgagaggcagactgttcggcgccagctgccccgtggccgtgctgagcagcttcctgacccccgagagactgccctaccaggaggccgtgcagagagacttcagacccgcccaggtgggcgacagcttcggccccacctggtggacctgctggttcagagtggagctgaccatccccgaggcctgggtgggccaggaggtgcacctgtgctgggagagcgacggcgagggcctggtgtggagagacggcgagcccgtgcagggcctgaccaaggagggcgagaagaccagctacgtgctgaccgacagactgggcgagagagaccccagaagcctgaccctgtacgtggaggtggcctgcaacggcctgctgggcgccggcaagggcagcatgatcgccgcccccgaccccgagaagatgttccagctgagcagagccgagctggccgtgttccacagagacgtgcacatgctgctggtggacctggagctgctgctgggcatcgccaagggcctgggcaaggacaaccagagaagcttccaggccctgtacaccgccaaccagatggtgaacgtgtgcgaccccgcccagcccgagaccttccccgtggcccaggccctggccagcagattcttcggccagcacggcggcgagagccagcacaccatccacgccaccggccactgccacatcgacaccgcctggctgtggcccttcaaggagaccgtgagaaagtgcgccagaagctgggtgaccgccctgcagctgatggagagaaaccccgagttcatcttcgcctgcagccaggcccagcagctggagtgggtgaagagcagataccccggcctgtacagcagaatccaggagttcgcctgcagaggccagttcgtgcccgtgggcggcacctgggtggagatggacggcaacctgcccagcggcgaggccatggtgagacagttcctgcagggccagaacttcttcctgcaggagttcggcaagatgtgcagcgagttctggctgcccgacaccttcggctacagcgcccagctgccccagatcatgcacggctgcggcatcagaagattcctgacccagaagctgagctggaacctggtgaacagcttcccccaccacaccttcttctgggagggcctggacggcagcagagtgctggtgcacttcccccccggcgacagctacggcatgcagggcagcgtggaggaggtgctgaagaccgtggccaacaacagagacaagggcagagccaaccacagcgccttcctgttcggcttcggcgacggcggcggcggccccacccagaccatgctggacagactgaagagactgagcaacaccgacggcctgcccagagtgcagctgagcagccccagacagctgttcagcgccctggagagcgacagcgagcagctgtgcacctgggtgggcgagctgttcctggagctgcacaacggcacctacaccacccacgcccagatcaagaagggcaacagagagtgcgagagaatcctgcacgacgtggagctgctgagcagcctggccctggccagaagcgcccagttcctgtaccccgccgcccagctgcagcacctgtggagactgctgctgctgaaccagttccacgacgtggtgaccggcagctgcatccagatggtggccgaggaggccatgtgccactacgaggacatcagaagccacggcaacaccctgctgagcgccgccgccgccgccctgtgcgccggcgagcccggccccgagggcctgctgatcgtgaacaccctgccctggaagagaatcgaggtgatggccctgcccaagcccggcggcgcccacagcctgggcctgacccccagccccggcgacagcgcccagcacggcctgtgcagctgcagcagcccccacctgaccgccgcccccgccgcccccgccgcctgcgtgagaagcgccagagcccccaccgacagcgccagcagacccccccccaccaagaccgacggcagcgtgaccctggacaacggcatcatcagagtgaagctggaccccaccggcagactgaccagcctggtgctggtggccagcggcagagaggccatcgccgagggcgccgtgggcaaccagttcgtgctgttcgacgacgtgcccctgtactgggacgcctgggacgtgatggactaccacctggagaccagaaagcccgtgctgggccaggccggcaccctggccgtgggcaccgagggcggcctgagaggcagcgcctggttcctgctgcagatcagccccaacagcagactgagccaggaggtggtgctggacgtgggctgcccctacgtgagattccacaccgaggtgcactggcacgaggcccacaagttcctgaaggtggagttccccgccagagtgagaagcagccaggccacctacgagatccagttcggccacctgcagagacccacccactacaacaccagctgggactgggccagattcgaggtgtgggcccacagatggatggacctgagcgagcacggcttcggcctggccctgctgaacgactgcaagtacggcgccagcgtgagaggcagcatcctgagcctgagcctgctgagagcccccaaggcccccgacgccaccgccgacaccggcagacacgagttcacctacgccctgatgccccacaagggcagcttccaggacgccggcgtgatccaggccgcctacagcctgaacttccccctgctggccctgcccgcccccagccccgcccccgccaccagctggagcgccttcagcgtgagcagccccgccgtggtgctggagaccgtgaagcaggccgagagcagcccccagagaagaagcctggtgctgagactgtacgaggcccacggcagccacgtggactgctggctgcacctgagcctgcccgtgcaggaggccatcctgtgcgacctgctggagagacccgaccccgccggccacctgaccctgagagacaacagactgaagctgaccttcagccccttccaggtgctgagcctgctgctggtgctgcagccccccccccactag

SEQ ID NO: 90743 - protein, 1017 aa, Artificial Sequence
  derived and/or modified sequence
MAAAPALKHWRTTLERVEKFVSPLYFTDCNLRGRLFGASCPVAVLSSFLTPERLPYQEAVQRDFRPAQVGDSFGPTWWTCWFRVELTIPEAWVGQEVHLCWESDGEGLVWRDGEPVQGLTKEGEKTSYVLTDRLGERDPRSLTLYVEVACNGLLGAGKGSMIAAPDPEKMFQLSRAELAVFHRDVHMLLVDLELLLGIAKGLGKDNQRSFQALYTANQMVNVCDPAQPETFPVAQALASRFFGQHGGESQHTIHATGHCHIDTAWLWPFKETVRKCARSWVTALQLMERNPEFIFACSQAQQLEWVKSRYPGLYSRIQEFACRGQFVPVGGTWVEMDGNLPSGEAMVRQFLQGQNFFLQEFGKMCSEFWLPDTFGYSAQLPQIMHGCGIRRFLTQKLSWNLVNSFPHHTFFWEGLDGSRVLVHFPPGDSYGMQGSVEEVLKTVANNRDKGRANHSAFLFGFGDGGGGPTQTMLDRLKRLSNTDGLPRVQLSSPRQLFSALESDSEQLCTWVGELFLELHNGTYTTHAQIKKGNRECERILHDVELLSSLALARSAQFLYPAAQLQHLWRLLLLNQFHDVVTGSCIQMVAEEAMCHYEDIRSHGNTLLSAAAAALCAGEPGPEGLLIVNTLPWKRIEVMALPKPGGAHSLALVTVPSMGYAPVPPPTSLQPLLPQQPVFVVQETDGSVTLDNGIIRVKLDPTGRLTSLVLVASGREAIAEGAVGNQFVLFDDVPLYWDAWDVMDYHLETRKPVLGQAGTLAVGTEGGLRGSAWFLLQISPNSRLSQEVVLDVGCPYVRFHTEVHWHEAHKFLKVEFPARVRSSQATYEIQFGHLQRPTHYNTSWDWARFEVWAHRWMDLSEHGFGLALLNDCKYGASVRGSILSLSLLRAPKAPDATADTGRHEFTYALMPHKAPSPAPATSWSAFSVSSPAVVLETVKQAESSPQRRSLVLRLYEAHGSHVDCWLHLSLPVQEAILCDLLERPDPAGHLTLRDNRLKLTFSPFQVLSLLLVLQPPPH

SEQ ID NO: 90744 - protein, 209 aa, Artificial Sequence
  derived and/or modified sequence
MAAAPALKHWRTTLERVEKFVSPLYFTDCNLRGRLFGASCPVAVLSSFLTPERLPYQEAVQRDFRPAQVGDSFGPTWWTCWFRVELTIPEAWVGQEVHLCWESDGEGLVWRDGEPVQGLTKEGEKTSYVLTDRLGERDPRSLTLYVEVACNGLLGAGKGSMIAAPDPEKMFQLSRAELAVFHRDVHMLLVDLELLLGIAKPGFGPSKRL

SEQ ID NO: 90745 - DNA, 3054 bp, Artificial Sequence
  derived and/or modified sequence
atggctgcagcccccgcgctgaaacattggagaactaccctcgagagagttgaaaagtttgtttctcccctgtacttcaccgactgtaacctgaggggccgtctcttcggggcaagttgtcccgtggccgtcctgagctcctttctcacacctgagcgactgccgtaccaggaggcagtccaaagggactttcggcctgctcaggtaggtgattccttcgggccaacatggtggacttgctggtttagagtggaactgaccatccctgaagcctgggttgggcaggaagtccatttgtgctgggaaagcgacggcgaagggctcgtgtggcgggatggagaacctgtgcagggtctgactaaggagggcgagaagactagctatgtattaaccgacagattaggagagcgcgatcctagaagcctgactctctatgtggaggttgcgtgtaacgggctgctgggggccgggaagggcagcatgattgccgcgcctgacccagagaaaatgtttcagctttccagagccgaattagccgtgtttcatcgcgacgtgcacatgctgctggttgacctagagctgctattgggtatcgctaagggtctggggaaggacaatcaaagatctttccaagcactgtacactgctaatcagatggtgaacgtgtgcgatcctgcccagccagaaaccttcccagtggctcaggcacttgccagccggttctttggccagcacggcggcgagagccagcataccattcacgctacgggccactgccacatcgacacagcgtggttatggccctttaaagagacggtccgcaaatgcgctcggagctgggtaaccgccctgcaattaatggagaggaaccctgaattcatctttgcctgtagccaggctcagcagctggagtgggtgaaaagtagatatcctggactgtactcacggattcaggaattcgcatgccggggtcagtttgttcccgtcggagggacttgggtggagatggacgggaatctgccaagtggcgaggccatggtgcgacaatttctccagggccagaatttttttctgcaggagtttggtaaaatgtgttctgaattctggttgccggatacttttggctatagtgctcagctgccccagattatgcatggctgcgggataaggaggtttcttacacagaagctgtcctggaacctggtcaactctttccctcaccacactttcttttgggaaggtctggatggctcaagggtactcgtccactttcctcctggggattcctacggaatgcagggctccgtcgaagaagtcctgaagacggtagcgaataaccgggacaaaggccgggctaatcactccgcatttctgtttggctttggcgatgggggcggcgggcctacgcagaccatgctggatcggctgaaacggctgagtaataccgatggcctgccccgggtacaactgtcttcacccagacagctattcagcgcgctggagtctgactctgagcagctgtgcacatgggtgggtgaattgtttctcgagcttcacaatggcacttatactactcacgcacaaattaagaagggcaacagagagtgtgagcggatcctgcacgacgtagaactgctttcgtccttagcattggctagatctgctcaatttctatatccagccgctcagctacagcacctatggcggcttctgttactgaaccagttccacgatgtggtgacgggctcatgtatacagatggtcgctgaggaggccatgtgtcattacgaagacattagatctcatggcaacacactcctcagtgcggccgctgccgcactctgtgcgggagagcctggacccgaaggactgctgatcgtcaatacactgccttggaaacggattgaggtcatggctctgcccaaacccggaggtgcccacagcctcgccttggtgacagtcccctccatgggttacgcgcccgtcccaccaccgaccagcttgcaacctctgctcccccagcagcccgtcttcgtcgtacaagaaactgatggctccgtgactctggacaacggtatcataagggttaagctagatcctacggggcgtctaacgtcactagtgcttgtggcctcaggccgtgaagccatagccgaaggagctgtggggaaccagttcgtgctcttcgatgacgtgccgttgtattgggatgcgtgggacgtgatggattaccacctggagactaggaagcctgtgctggggcaggccgggactctagctgttggaaccgagggcggtctcagaggatcagcctggttcctgctccagataagtccaaactcacgcctgagccaagaggtcgttctcgacgtggggtgtccatacgtgaggttccacaccgaggtccattggcatgaggcacacaagtttctgaaagtagaattccccgccagagtgcgatccagtcaggccacgtatgaaatccagttcggtcatctgcaaagaccaacccactataatacctcttgggactgggctcgttttgaagtgtgggcccaccggtggatggacctttctgaacacggcttcggcctagccctgctgaatgactgcaagtatggggctagcgtccgcggctccatactgtcgttaagcctattgcgtgcccctaaagcccccgatgccacagctgataccggacgacacgagtttacttacgccctgatgcctcacaaagccccttcacccgcaccagcgacctcatggtccgcttttagtgtttcaagcccggccgtcgttctggagacagtcaagcaagcagaatccagccctcagcggcgctcattagtgttacggctttacgaggcccatgggagccacgtggattgttggctgcacctctcccttccggtgcaggaggctatactgtgtgaccttcttgagagaccagaccccgccgggcacctgacacttagggataatcgcctgaaactcaccttctccccctttcaggtgctgagtctgctgctcgtgctccaacccccaccccactag

SEQ ID NO: 90746 - DNA, 3054 bp, Artificial Sequence
  derived and/or modified sequence
atggctgctgccccagccctgaagcactggaggaccaccctggagcgggtggagaagtttgtgagccccctgtacttcacagactgcaacctgcggggccgcctgtttggagccagctgccctgtggccgtgctgagcagcttcctgaccccagagcggctgccctaccaggaggccgtgcagagggacttccggcctgcccaggtgggggacagctttggccccacctggtggacctgctggttccgggtggagctgaccatccctgaggcctgggtgggccaggaggtgcacctgtgctgggagagtgatggagagggcctggtgtggagagatggagagcctgtgcagggcctgaccaaggagggggagaagaccagctatgtgctgacagaccggctgggggagcgggaccccaggagcctgaccctgtatgtggaggtggcctgcaatggcctgctgggcgctgggaagggctccatgattgctgccccagaccctgagaagatgttccagctgagcagagctgagctggccgtgttccacagagatgtgcacatgctgctggtggacctggagctgctgctgggcatcgccaagggcctgggcaaggacaaccagaggagcttccaggccctgtacacagccaaccagatggtgaatgtgtgtgaccctgcccagcctgagaccttccctgtggcccaggccctggccagccgcttcttcggccagcacggcggggagagccagcacaccatccacgccaccggccactgccacatcgacacagcctggctgtggcccttcaaggagaccgtgaggaaatgtgcccgctcctgggtgacagccctgcagctgatggagagaaatcctgagttcatctttgcctgcagccaggcccagcagctggagtgggtgaagagccgctacccaggcctgtacagccgcatccaggagtttgcctgccggggccagtttgtgcctgtgggcggcacctgggtggagatggatggcaacctgcccagcggggaggccatggtgcggcagttcctgcagggccagaacttcttcctgcaggagtttgggaagatgtgcagcgagttctggctgcctgacaccttcggctacagcgcccagctgccccagatcatgcacggctgcggcatccgccgcttcctgacccagaagctgtcctggaacctggtgaacagcttcccccaccacaccttcttctgggagggcctggatggcagccgggtgctggtgcacttccccccaggggacagctatggcatgcagggctctgtggaggaggtgctgaagacagtggccaacaacagagacaagggccgggccaaccacagcgccttcctgtttggatttggagatggcggcggcggccccacccagaccatgctggaccggctgaagaggctgagcaacacagatggcctgccccgggtgcagctgagcagcccccggcagctgttcagcgccctggagagtgacagcgagcagctgtgcacctgggtgggggagctgttcctggagctgcacaacggcacctacaccacccacgcccagatcaagaagggcaacagagaatgtgagcgcatcctgcatgatgtggagctgctgagcagcctggccctggcccggagcgcccagttcctgtacccagctgcccagctgcagcacctgtggaggctgctgctgctgaaccagttccatgatgtggtgacaggcagctgcatccagatggtggccgaggaggccatgtgccactatgaggacatccgcagccacggcaacaccctgctgtctgctgctgctgctgccctgtgtgccggggagcccggccctgagggcctgctgattgtgaacaccctgccctggaagagaattgaggtgatggccctgcccaagccaggaggagcccacagcctggccctggtgacagtgcccagcatgggctacgcccctgtgcccccacccaccagcctgcagcccctgctgccccagcagcctgtgtttgtggtgcaggagacagatggctctgtgaccctggacaatggcatcatccgggtgaagctggaccccaccggccgcctgaccagcctggtgctggtggccagcggccgggaggccatcgccgagggcgctgtgggcaaccagtttgtgctgtttgatgatgtgcccctgtactgggatgcctgggatgtgatggactaccacctggagaccaggaagcctgtgctgggccaggccggcaccctggccgtgggcacagaaggaggcctgcggggcagcgcctggttcctgctgcagatcagccccaacagccggctgagccaggaggtggtgctggatgtgggctgcccctacgtgcgcttccacacagaggtgcactggcatgaggcccacaagttcctgaaggtggagttccctgcccgggtgcgcagcagccaggccacctatgagatccagtttggccacctgcagaggcccacccactacaacacctcctgggactgggccaggtttgaggtgtgggcccaccgctggatggacctgtctgaacatggcttcggcctggccctgctgaatgactgcaagtatggagcctctgtgcggggcagcatcctgagcctgagcctgctgcgggcccccaaggccccagatgccacagctgacaccggcagacatgagttcacctacgccctgatgccccacaaggcccccagccctgccccagccacctcctggagcgccttctctgtgagcagccctgctgtggtgctggagaccgtgaagcaggccgagagcagcccccagaggaggagcctggtgctgcggctgtatgaggcccacggcagccacgtggactgctggctgcacctgagcctgcctgtgcaggaggccatcctgtgtgacctgctggagaggccagaccctgctggccacctgaccctgcgggacaaccggctgaagctgaccttcagccccttccaggtgctgagcctgctgctggtgctgcagcccccaccccactag

SEQ ID NO: 90747 - DNA, 3177 bp, Artificial Sequence
  derived and/or modified sequence
agcccggcgatggcggctgcgccggccttgaagcactggcgcaccacgctggagcgggtggagaagttcgtgtcgccgctctactttaccgactgtaacctccgcggcaggctttttggggccagctgccctgtggctgtgctctccagcttcctgacgccggagagacttccctaccaggaggcagtccagcgggacttccgccccgcgcaggtcggcgacagcttcggacccacatggtggacctgctggttccgggtggagctgaccatcccagaggcatgggtgggccaggaagttcacctttgctgggaaagtgatggagaaggtctggtgtggcgtgatggagaacctgtccagggtttaaccaaagagggtgagaagaccagctatgtcctgactgacaggctgggggaaagagacccccgaagcctcactctctatgtggaagtagcctgcaatgggctcctgggggccgggaagggaagcatgattgcagcccctgaccctgagaagatgttccagctgagccgggctgagctagctgtgttccaccgggatgtccacatgctcctggtggatctggagctgctgctgggcatagccaagggcctcgggaaggacaaccagcgcagcttccaggccctgtacacagccaatcagatggtgaacgtgtgtgaccctgcccagcccgagaccttcccagtggcccaggccctggcctccaggttctttggccaacatgggggtgaaagccaacacaccattcatgccacagggcactgccacattgatacagcctggctttggcccttcaaagagactgtgaggaaatgtgcccggagctgggtgaccgccctgcagctcatggagcggaaccctgagttcatctttgcctgctcccaggcgcagcagctggaatgggtgaagagccgctaccctggcctgtactcccgcatccaggagtttgcgtgccgtgggcagtttgtgcctgtggggggcacctgggtggagatggatgggaacctgcccagtggagaggccatggtgaggcagtttttgcagggccagaacttctttctgcaggagtttgggaagatgtgctctgagttctggctgccggacacctttggctactcagcacagctcccccagatcatgcacggctgtggcatcaggcgctttctcacccagaaattgagctggaatttggtgaactccttcccacaccatacatttttctgggagggcctggatggctcccgtgtactggtccacttcccacctggcgactcctatgggatgcagggcagcgtggaggaggtgctgaagaccgtggccaacaaccgggacaaggggcgggccaaccacagtgccttcctctttggctttggggatgggggtggtggccccacccagaccatgctggaccgcctgaagcgcctgagcaatacggatgggctgcccagggtgcagctatcttctccaagacagctcttctcagcactggagagtgactcagagcagctgtgcacgtgggttggggagctcttcttggagctgcacaatggcacatacaccacccatgcccagatcaagaaggggaaccgggaatgtgagcggatcctgcacgacgtggagctgctcagtagcctggccctggcccgcagtgcccagttcctatacccagcagcccagctgcagcacctctggaggctccttcttctgaaccagttccatgatgtggtgactggaagctgcatccagatggtggcagaggaagccatgtgccattatgaagacatccgttcccatggcaatacactgctcagcgctgcagccgcagccctgtgtgctggggagccaggtcctgagggcctcctcatcgtcaacacactgccctggaagcggatcgaagtgatggccctgcccaaaccgggcggggcccacagcctagccctggtgacagtgcccagcatgggctatgctcctgttcctccccccacctcactgcagcccctgctgccccagcagcctgtgttcgtagtgcaagagactgatggctccgtgactctggacaatggcatcatccgagtgaagctggacccaactggtcgcctgacgtccttggtcctggtggcctctggcagggaggccattgctgagggcgccgtggggaaccagtttgtgctatttgatgatgtccccttgtactgggatgcatgggacgtcatggactaccacctggagacacggaagcctgtgctgggccaggcagggaccctggcagtgggcaccgagggcggcctgcggggcagcgcctggttcttgctacagatcagccccaacagtcggcttagccaggaggttgtgctggacgttggctgcccctatgtccgcttccacaccgaggtacactggcatgaggcccacaagttcctgaaggtggagttccctgctcgcgtgcggagttcccaggccacctatgagatccagtttgggcacctgcagcgacctacccactacaatacctcttgggactgggctcgatttgaggtgtgggcccatcgctggatggatctgtcagaacacggctttgggctggccctgctcaacgactgcaagtatggcgcgtcagtgcgaggcagcatcctcagcctctcgctcttgcgggcgcctaaagccccggacgctactgctgacacggggcgccacgagttcacctatgcactgatgccgcacaaggcccccagcccagcgcccgccacctcctggagtgcgttttccgtgtcttcacccgcggtcgtattggagaccgtcaagcaggcggagagcagcccccagcgccgctcgctggtcctgaggctgtatgaggcccacggcagccacgtggactgctggctgcacttgtcgctgccggttcaggaggccatcctctgcgatctcttggagcgaccagaccctgctggccacttgacccttcgggacaaccgcctgaagctcaccttttctcccttccaagtgctgtccctgttgctcgtgcttcagcctccgccacactgagtccctggggctggggttttgtttgtagaaggctctggggactcctaatttctgcttccccagcctaaagcagggatcagtcttttcttgtggaataaatccttggatcgggaa

SEQ ID NO: 90748 - DNA, 3054 bp, Artificial Sequence
  derived and/or modified sequence
atggccgccgcccccgccctgaagcactggcggaccaccctggagcgggtggagaaatttgtttctccactgtattttaccgactgcaacttacgagggaggttattcggggccagctgtcctgtggcagtgttgtcctccttccttacacccgagcggttaccctatcaggaggcagtacagcgggattttcggccagcccaggttggtgactcatttggacccacttggtggacctgctggtttagagtcgaactaacaattccagaagcttgggttggccaagaggtgcatctgtgttgggagagtgatggagagggcctggtgtggcgcgacggagaacccgttcagggcctcacgaaggagggcgagaaaacctcatacgtcctcacagacaggctgggcgagagagacccccggagtttgacattatacgtagaggtggcttgcaacgggctgttaggtgcaggaaagggttccatgatcgcagcgcccgaccccgagaagatgttccagctctccagagcggagttggcagtgttccaccgggatgttcacatgctgctggtcgatcttgaactgctgctcggcatcgccaaagggctaggtaaagacaatcagagatcttttcaagccctctatacagcaaatcagatggttaatgtgtgcgatcctgcgcagcctgaaacatttcctgtggcccaggccctggcgagtcgcttctttggccagcatgggggtgaatcccagcacacaatacatgccacaggccactgccatatagacactgcctggttatggcccttcaaggagaccgtgaggaagtgtgcccgctcttgggtcactgcactgcaattgatggagagaaatccggaattcattttcgcctgtagtcaggcgcagcagctggaatgggtgaagtctaggtacccaggactgtactcgcggatacaggagtttgcatgccgcggccagtttgtgccagtggggggtacatgggtcgagatggatggcaatttaccatctggcgaggcgatggtccggcagtttcttcagggacagaattttttccttcaggaattcggaaaaatgtgttctgagttttggctgcccgacaccttcggatactctgctcagttgccacagatcatgcatgggtgtggcattagacgattcctgacacagaagctgtcttggaaccttgtgaactcctttccgcaccatacatttttttgggaaggccttgatgggagtcgtgtgctcgttcacttccccccaggagactcttacggaatgcagggtagtgtggaggaggtgctcaaaaccgtcgccaataatagggataaaggccgcgccaaccacagtgccttcctgttcggattcggagacggcggtggggggccgacacagaccatgctggatagacttaagaggttgtcaaatacagacggactgcctagggtacaactgagctcgccccgccagctattcagcgcgttagagagtgactcagagcagctctgcacttgggtgggtgaactcttccttgaactacataacggaacttacaccacccatgcccagattaagaagggaaacagagagtgcgagaggattctgcatgacgtggagctccttagctctctggccctggccagaagtgctcaattcctctacccagccgcccagctgcaacacctgtggcgacttctactgctcaaccagttccacgacgtggtcaccggatcatgtatccagatggtcgcagaagaggccatgtgccattacgaggacatcaggagtcacgggaatacactcttgagcgctgctgccgccgcactgtgcgcaggcgaacccggacccgaaggcctcctcattgtcaacacactgccatggaagagaatcgaggttatggcgcttcctaagccaggcggcgctcatagcttggcattagtcacagtgccgtccatgggctatgcacctgttccccccccaaccagcctccaacccctacttccacagcagcctgtcttcgtcgtacaggagacagatggctctgtgacactagataatgggatcatacgggtgaaacttgatcccacgggcagactgaccagcctcgtcctcgtagcctctggcagggaagcaatcgccgagggcgctgtaggcaaccagttcgtactttttgacgacgtgccattatattgggatgcatgggatgtgatggactaccatctcgaaacccggaaaccagtcctggggcaggccggtacactcgctgtaggaactgaggggggacttcgtgggagcgcttggttcctcctgcagatttcgcctaactctagactgtcccaggaggtggtactcgatgtcggatgcccctatgtgcggtttcacacagaggtgcattggcacgaggcccacaagtttttgaaagtggagttccccgccagagtgagatccagccaagccacttacgagatccaattcggacacttgcagagaccgacccattataacacctcttgggattgggcgcgattcgaagtgtgggcccatcggtggatggatctcagcgagcacggattcgggctggctttgctgaacgactgcaaatatggagccagcgtccgcggtagcatcctaagcctatcgctgcttcgggctcctaaagctcctgatgccaccgccgacacaggtcggcacgagtttacatacgctctgatgccgcacaaagccccatcacctgcccccgccacctcatggagcgccttttccgtgtctagtccagcagtcgtactcgagactgtgaagcaggctgagagtagtccacagcgcagaagcctcgttctaaggctctatgaagcccatggttcgcatgtggactgctggctgcacctgagtttgcctgtgcaggaggcaattctatgtgacctgctggagaggccggacccggccggccacctaaccctgagggacaatagacttaaactgaccttttcgcccttccaggtgctgtctctgctactggtgctgcagcctcccccgcactag

SEQ ID NO: 90749 - DNA, 3054 bp, Artificial Sequence
  derived and/or modified sequence
atggcggctgcacccgctctcaaacactggcgtaccacactggagcgggttgaaaaatttgtctcccccctgtacttcactgattgcaatctgaggggcagactgttcggagcctcctgtccggtggccgtgcttagctccttcttaacacctgagagactgccctaccaggaggcagtccaaagggacttccggcctgcccaggttggagattccttcggtcctacttggtggacatgctggttccgggtcgagctgactatacctgaggcctgggtcggccaggaagtacatctttgttgggagtcagacggtgagggtctggtgtggcgtgatggtgagcctgttcagggtctaactaaggaaggcgaaaagaccagctacgttctgacagatcggctgggcgagagggatccccgttcccttacactgtacgtcgaggtcgcatgcaacgggctcctcggggcagggaagggctccatgattgccgctcctgaccccgagaaaatgttccagctgagcagagccgaactggcagtgttccacagagatgtccacatgctcctggtggatctggagctccttctgggaatagccaagggactagggaaagataaccagagaagttttcaagcactctacacagccaatcagatggtgaacgtgtgcgaccccgcacagccagaaacctttcccgtggcccaggccctagcttcccgcttcttcggacagcatgggggagagtctcagcacactatccacgccaccggccactgccacatcgacacagcttggctctggcctttcaaagagaccgttcggaagtgtgctaggagctgggtgaccgcactgcaactgatggagagaaatcctgaattcattttcgcatgttctcaggctcagcagctggaatgggtgaaatcccggtatccagggctgtacagtaggatccaggagtttgcctgtcgcggacagttcgtgccagtcggaggcacgtgggtggagatggatggtaatttacctagcggcgaagctatggtcagacagtttctccaaggtcagaattttttcttacaagagtttggaaagatgtgttccgaattttggttaccggatacgtttggctactccgcacaactgccacagattatgcatggatgcggaattaggagattcctgacccagaaactgtcctggaacttggtaaactcatttccgcaccacacgttcttttgggagggccttgatggcagcagagtgttggttcatttcccgccaggcgattcctatggaatgcaaggcagtgtggaagaggtattaaaaaccgtggctaacaatagggataaaggacgggcaaaccatagtgcctttctgttcggttttggggatgggggaggcggtcctacccagacgatgctagaccgactgaaaaggctatccaacactgacggtttgcctcgagtccagttgtcctctcccagacaactgttctccgcgctggagagcgattccgagcaactctgcacctgggtaggagagcttttccttgagctccataatggaacatatacaacccacgctcaaatcaagaaggggaacagagagtgtgaacggatcctgcacgacgttgagctgctgtcgtcccttgccctggctaggtcagctcagtttttgtatcctgctgcccaactgcagcacctctggcgcctccttcttttaaaccagttccatgatgttgtgacgggaagctgtatccagatggtagcagaagaggcaatgtgccattatgaggatataagaagccacggtaacaccctcctgagtgccgcagcggcagcactgtgtgctggggagccgggacctgagggtctactcatcgtcaacacattgccatggaaaagaattgaggtcatggcgctgcctaagccagggggagcccattccctcgccctggttacggtccctagcatgggctatgcccctgtcccccctcctacttccctgcagccacttctgcctcagcagcccgtgtttgtcgtccaggagaccgatgggtctgtgacccttgacaacgggattatccgcgttaaattggaccccaccggacgactgacctccttggtgctggttgctagcggcagggaagcaattgccgagggtgcggtgggaaaccaattcgtcctatttgacgacgtgccgctttactgggacgcttgggatgtgatggattaccatttggaaacgagaaagccagtcctgggccaggcgggaactttggcagtgggtaccgagggcggtctgcggggttcagcgtggttcctcctgcagatatccccgaactctcgcttatcgcaggaagtagtgcttgacgtgggctgtccatacgtccgattccataccgaggttcattggcacgaagcgcacaagttccttaaagtagaattcccggcaagggtacggtcatcccaggccacatacgagatccaattcggtcaccttcagaggcccacccactataacacctcgtgggactgggccagattcgaggtttgggctcaccgatggatggacctctcagagcatggctttggcctggcccttctgaatgactgcaagtacggcgctagcgtcagagggtccatcttgtccctgtccctcctgagagcccctaaggctcctgatgctacagccgacacgggaagacatgagttcacgtacgcccttatgccccacaaggctccaagccctgcacctgccacctcatggagcgcattctccgtatcttcacctgccgtagtgctcgaaaccgttaaacaggctgagtcttccccacagcgccgatcactggtgcttcggttgtatgaagcccacggctctcacgtggactgctggctgcatctgtctttacctgtgcaggaggccatcctgtgtgatctgcttgagcggccagatcctgcaggccatttgaccctgcgagataaccgattgaaattgacattctcacccttccaggtcctctctttgctcttggttctgcagccaccacctcactag

SEQ ID NO: 90750 - DNA, 3054 bp, Artificial Sequence
  derived and/or modified sequence
atggccgccgcccccgccctgaagcactggagaaccaccctggagagagtggagaagttcgtgagccccctgtacttcaccgactgcaacctgagaggcagactgttcggcgccagctgccccgtggccgtgctgagcagcttcctgacccccgagagactgccctaccaggaggccgtgcagagagacttcagacccgcccaggtgggcgacagcttcggccccacctggtggacctgctggttcagagtggagctgaccatccccgaggcctgggtgggccaggaggtgcacctgtgctgggagagcgacggcgagggcctggtgtggagagacggcgagcccgtgcagggcctgaccaaggagggcgagaagaccagctacgtgctgaccgacagactgggcgagagagaccccagaagcctgaccctgtacgtggaggtggcctgcaacggcctgctgggcgccggcaagggcagcatgatcgccgcccccgaccccgagaagatgttccagctgagcagagccgagctggccgtgttccacagagacgtgcacatgctgctggtggacctggagctgctgctgggcatcgccaagggcctgggcaaggacaaccagagaagcttccaggccctgtacaccgccaaccagatggtgaacgtgtgcgaccccgcccagcccgagaccttccccgtggcccaggccctggccagcagattcttcggccagcacggcggcgagagccagcacaccatccacgccaccggccactgccacatcgacaccgcctggctgtggcccttcaaggagaccgtgagaaagtgcgccagaagctgggtgaccgccctgcagctgatggagagaaaccccgagttcatcttcgcctgcagccaggcccagcagctggagtgggtgaagagcagataccccggcctgtacagcagaatccaggagttcgcctgcagaggccagttcgtgcccgtgggcggcacctgggtggagatggacggcaacctgcccagcggcgaggccatggtgagacagttcctgcagggccagaacttcttcctgcaggagttcggcaagatgtgcagcgagttctggctgcccgacaccttcggctacagcgcccagctgccccagatcatgcacggctgcggcatcagaagattcctgacccagaagctgagctggaacctggtgaacagcttcccccaccacaccttcttctgggagggcctggacggcagcagagtgctggtgcacttcccccccggcgacagctacggcatgcagggcagcgtggaggaggtgctgaagaccgtggccaacaacagagacaagggcagagccaaccacagcgccttcctgttcggcttcggcgacggcggcggcggccccacccagaccatgctggacagactgaagagactgagcaacaccgacggcctgcccagagtgcagctgagcagccccagacagctgttcagcgccctggagagcgacagcgagcagctgtgcacctgggtgggcgagctgttcctggagctgcacaacggcacctacaccacccacgcccagatcaagaagggcaacagagagtgcgagagaatcctgcacgacgtggagctgctgagcagcctggccctggccagaagcgcccagttcctgtaccccgccgcccagctgcagcacctgtggagactgctgctgctgaaccagttccacgacgtggtgaccggcagctgcatccagatggtggccgaggaggccatgtgccactacgaggacatcagaagccacggcaacaccctgctgagcgccgccgccgccgccctgtgcgccggcgagcccggccccgagggcctgctgatcgtgaacaccctgccctggaagagaatcgaggtgatggccctgcccaagcccggcggcgcccacagcctggccctggtgaccgtgcccagcatgggctacgcccccgtgcccccccccaccagcctgcagcccctgctgccccagcagcccgtgttcgtggtgcaggagaccgacggcagcgtgaccctggacaacggcatcatcagagtgaagctggaccccaccggcagactgaccagcctggtgctggtggccagcggcagagaggccatcgccgagggcgccgtgggcaaccagttcgtgctgttcgacgacgtgcccctgtactgggacgcctgggacgtgatggactaccacctggagaccagaaagcccgtgctgggccaggccggcaccctggccgtgggcaccgagggcggcctgagaggcagcgcctggttcctgctgcagatcagccccaacagcagactgagccaggaggtggtgctggacgtgggctgcccctacgtgagattccacaccgaggtgcactggcacgaggcccacaagttcctgaaggtggagttccccgccagagtgagaagcagccaggccacctacgagatccagttcggccacctgcagagacccacccactacaacaccagctgggactgggccagattcgaggtgtgggcccacagatggatggacctgagcgagcacggcttcggcctggccctgctgaacgactgcaagtacggcgccagcgtgagaggcagcatcctgagcctgagcctgctgagagcccccaaggcccccgacgccaccgccgacaccggcagacacgagttcacctacgccctgatgccccacaaggcccccagccccgcccccgccaccagctggagcgccttcagcgtgagcagccccgccgtggtgctggagaccgtgaagcaggccgagagcagcccccagagaagaagcctggtgctgagactgtacgaggcccacggcagccacgtggactgctggctgcacctgagcctgcccgtgcaggaggccatcctgtgcgacctgctggagagacccgaccccgccggccacctgaccctgagagacaacagactgaagctgaccttcagccccttccaggtgctgagcctgctgctggtgctgcagccccccccccactag

SEQ ID NO: 90751 - protein, 941 aa, Artificial Sequence
  derived and/or modified sequence
MAAAPALKHWRTTLERVEKFVSPLYFTDCNLRGRLFGASCPVAVLSSFLTPERLPYQEAVQRDFRPAQVGDSFGPTWWTCWFRVELTIPEAWVGQEVHLCWESDGEGLVWRDGEPVQGLTKEGEKTSYVLTDRLGERDPRSLTLYVEVACNGLLGAGKGSMIAAPDPEKMFQLSRAELAVFHRDVHMLLVDLELLLGIAKAQQLEWVKSRYPGLYSRIQEFACRGQFVPVGGTWVEMDGNLPSGEAMVRQFLQGQNFFLQEFGKMCSEFWLPDTFGYSAQLPQIMHGCGIRRFLTQKLSWNLVNSFPHHTFFWEGLDGSRVLVHFPPGDSYGMQGSVEEVLKTVANNRDKGRANHSAFLFGFGDGGGGPTQTMLDRLKRLSNTDGLPRVQLSSPRQLFSALESDSEQLCTWVGELFLELHNGTYTTHAQIKKGNRECERILHDVELLSSLALARSAQFLYPAAQLQHLWRLLLLNQFHDVVTGSCIQMVAEEAMCHYEDIRSHGNTLLSAAAAALCAGEPGPEGLLIVNTLPWKRIEVMALPKPGGAHSLALVTVPSMGYAPVPPPTSLQPLLPQQPVFVVQETDGSVTLDNGIIRVKLDPTGRLTSLVLVASGREAIAEGAVGNQFVLFDDVPLYWDAWDVMDYHLETRKPVLGQAGTLAVGTEGGLRGSAWFLLQISPNSRLSQEVVLDVGCPYVRFHTEVHWHEAHKFLKVEFPARVRSSQATYEIQFGHLQRPTHYNTSWDWARFEVWAHRWMDLSEHGFGLALLNDCKYGASVRGSILSLSLLRAPKAPDATADTGRHEFTYALMPHKGSFQDAGVIQAAYSLNFPLLALPAPSPAPATSWSAFSVSSPAVVLETVKQAESSPQRRSLVLRLYEAHGSHVDCWLHLSLPVQEAILCDLLERPDPAGHLTLRDNRLKLTFSPFQVLSLLLVLQPPPH

SEQ ID NO: 90752 - DNA, 2826 bp, Artificial Sequence
  derived and/or modified sequence
atggcggctgcacctgccctgaaacactggcggaccacactcgaacgggtcgaaaagtttgtttctcctctgtattttaccgattgtaatctcagaggtcgcctgtttggagcatcttgcccagtggctgtgctcagcagcttcttaactcccgagagattaccctaccaggaggctgtgcagcgagacttcagaccagcccaggtgggtgatagcttcgggcctacgtggtggacttgctggtttagggtggagctcacgatacctgaggcttgggtggggcaggaggtgcatctctgttgggaaagcgacggtgaagggttagtctggagagacggggaaccagtgcaaggactgacaaaagaaggcgagaaaacatcctacgttcttaccgatcggctaggcgagcgggatcccagaagtctcactttgtacgttgaggtggcatgcaacggactactcggcgctggcaagggctccatgattgctgcgcccgaccctgaaaagatgttccaattaagccgagcagagctggcagtgtttcaccgggacgtgcatatgcttctggtggatctcgaactccttctgggaatcgctaaagcgcaacagctggagtgggtcaaatcgaggtacccaggactgtactcccgaatccaagagtttgcttgtagaggacagttcgtccctgtgggcggtacttgggtggaaatggatggcaacttgccttcaggtgaggccatggttcggcagtttttgcagggtcagaatttcttcttacaggagtttggaaaaatgtgctctgagttctggcttcccgacacttttggttattctgctcagctgccacagattatgcatgggtgcggtattcgacgcttcttgacacaaaagctgagctggaacctagtcaactctttccctcatcacactttcttttgggagggtctggacggatccagagtgctggtacactttccccccggcgactcatacgggatgcaaggaagtgtggaggaggtgcttaaaacagtggctaacaacagagataagggtcgggccaaccattcagccttcctcttcgggttcggtgacggagggggtgggcctacccagactatgttggataggcttaaacggctatctaataccgatggcctccctcgagtgcagttatctagtcctcggcagttgttttcagcattggaatcggatagtgagcaactgtgcacatgggtgggcgagctgtttctggagctgcataacggcacatatactacacacgcccagattaaaaaggggaatcgggagtgcgagagaatacttcatgatgttgagctgctatcctcattggcccttgctagaagcgcgcagtttctttacccagccgcacagctgcaacacctatggagattgttgctgcttaatcagtttcacgatgtggtcaccggatcctgtattcagatggtcgcagaagaggctatgtgccactacgaggatataaggtcccatggtaatacccttctgagtgcagctgccgccgccctttgcgctggcgaaccagggccggagggactactgattgtcaacactttaccttggaaacgtatcgaggtgatggcactacctaagcccgggggagcgcattctctcgcacttgtcacggtaccttcaatgggctacgctccagtcccccctccaaccagcctgcagcccctgctcccacaacaacctgtgttcgtggtacaagagactgacggttccgtcaccctcgacaatggtataattagggttaagctggacccaacaggccggctaaccagcctggtgctggtggcatcaggtcgcgaggcaatcgctgaaggagcagttgggaaccagtttgtgcttttcgatgatgttcccctgtattgggacgcgtgggatgttatggactatcacctcgaaacaagaaagcctgttttaggacaggccggcacgcttgccgtggggacggagggcgggctgcggggatcagcttggttccttctccagatttccccgaattcaagactcagccaagaggtagtgctcgacgttgggtgtccttacgtgcgtttccacacggaagtgcactggcacgaagctcacaaattcctgaaagtggaatttcctgcaagggtgagaagctcgcaagccacgtacgagattcagttcggacatctccaacggcccactcactataatacatcgtgggattgggcccggttcgaagtgtgggcccaccggtggatggatcttagtgaacatggcttcggccttgcactcttgaatgactgcaagtacggcgccagtgtcagaggatcgatcctgagtctgtcccttctgagagcacccaaggccccagatgccacggctgatacgggcagacacgagttcacctacgccctaatgcctcacaagggttcatttcaggacgccggggtgatccaggccgcttatagcttgaattttcctcttctcgccctgcccgcaccctcccctgcaccagctacctcctggagtgccttctctgtttctagcccagccgtcgtcctggagaccgttaagcaggctgaatcttctccccagcgtagatctctggtactccgcctttacgaagcccacgggtcccacgttgactgctggttgcatctttctttgcctgtccaggaagcaatcttgtgtgacctgctggaacgtcctgaccctgccggtcatctgactctgagagacaacagactaaaactcaccttcagccccttccaagtgctgagcctgctgctggtgctccaacctccgccacattag

SEQ ID NO: 90753 - DNA, 630 bp, Artificial Sequence
  derived and/or modified sequence
atggctgccgctcccgccctgaaacattggcggaccactttggaacgtgtggagaaattcgtgagcccgctctacttcacagattgtaatttaagaggaagactgtttggagcctcctgccccgttgccgtgctgtcgtccttcctgaccccggagagactgccctaccaggaagcggttcagagggactttaggcctgcacaagttggtgattctttcggtccaacctggtggacttgctggttccgcgtcgaactgaccattccggaggcttgggtcggccaggaggtacacctgtgttgggagtccgacggggagggacttgtgtggcgggatggggaacctgtgcaaggcctgactaaggaaggtgagaagacaagctatgtcctgactgaccgtctgggcgagcgagacccacggtctctcactctgtacgtggaggtcgcatgcaacgggctgctgggtgccggcaaggggagcatgattgcggcaccggacccggagaaaatgttccagctgagcagagctgaactggccgtttttcatcgcgacgtgcatatgctattggtggatttggagctgctattgggcatcgccaaacccgggttcggaccgtctaagcgtctttag

SEQ ID NO: 90754 - DNA, 2826 bp, Artificial Sequence
  derived and/or modified sequence
atggctgctgccccagccctgaagcactggaggaccaccctggagcgggtggagaagtttgtgagccccctgtacttcacagactgcaacctgcggggccgcctgtttggagccagctgccctgtggccgtgctgagcagcttcctgaccccagagcggctgccctaccaggaggccgtgcagagggacttccggcctgcccaggtgggggacagctttggccccacctggtggacctgctggttccgggtggagctgaccatccctgaggcctgggtgggccaggaggtgcacctgtgctgggagagtgatggagagggcctggtgtggagagatggagagcctgtgcagggcctgaccaaggagggggagaagaccagctatgtgctgacagaccggctgggggagcgggaccccaggagcctgaccctgtatgtggaggtggcctgcaatggcctgctgggcgctgggaagggctccatgattgctgccccagaccctgagaagatgttccagctgagcagagctgagctggccgtgttccacagagatgtgcacatgctgctggtggacctggagctgctgctgggcatcgccaaggcccagcagctggagtgggtgaagagccgctacccaggcctgtacagccgcatccaggagtttgcctgccggggccagtttgtgcctgtgggcggcacctgggtggagatggatggcaacctgcccagcggggaggccatggtgcggcagttcctgcagggccagaacttcttcctgcaggagtttgggaagatgtgcagcgagttctggctgcctgacaccttcggctacagcgcccagctgccccagatcatgcacggctgcggcatccgccgcttcctgacccagaagctgtcctggaacctggtgaacagcttcccccaccacaccttcttctgggagggcctggatggcagccgggtgctggtgcacttccccccaggggacagctatggcatgcagggctctgtggaggaggtgctgaagacagtggccaacaacagagacaagggccgggccaaccacagcgccttcctgtttggatttggagatggcggcggcggccccacccagaccatgctggaccggctgaagaggctgagcaacacagatggcctgccccgggtgcagctgagcagcccccggcagctgttcagcgccctggagagtgacagcgagcagctgtgcacctgggtgggggagctgttcctggagctgcacaacggcacctacaccacccacgcccagatcaagaagggcaaccgggagtgtgagcgcatcctgcatgatgtggagctgctgagcagcctggccctggcccggagcgcccagttcctgtacccagctgcccagctgcagcacctgtggaggctgctgctgctgaaccagttccatgatgtggtgacaggcagctgcatccagatggtggccgaggaggccatgtgccactatgaggacatccgcagccacggcaacaccctgctgtctgctgctgctgctgccctgtgtgccggggagcccggccctgagggcctgctgattgtgaacaccctgccctggaagagaattgaggtgatggccctgcccaagccaggaggagcccacagcctggccctggtgacagtgcccagcatgggctacgcccctgtgcccccacccaccagcctgcagcccctgctgccccagcagcctgtgtttgtggtgcaggagacagatggctctgtgaccctggacaatggcatcatccgggtgaagctggaccccaccggccgcctgaccagcctggtgctggtggccagcggccgggaggccatcgccgagggcgctgtgggcaaccagtttgtgctgtttgatgatgtgcccctgtactgggatgcctgggatgtgatggactaccacctggagaccaggaagcctgtgctgggccaggccggcaccctggccgtgggcacagagggcggcctgcggggcagcgcctggttcctgctgcagatcagccccaacagccggctgagccaggaggtggtgctggatgtgggctgcccctacgtgcgcttccacacagaggtgcactggcatgaggcccacaagttcctgaaggtggagttccctgcccgggtgcgcagcagccaggccacctatgagatccagtttggccacctgcagaggcccacccactacaacacctcctgggactgggccaggtttgaggtgtgggcccaccgctggatggacctgtctgagcacggcttcggcctggccctgctgaatgactgcaagtacggggcctctgtgcggggcagcatcctgagcctgagcctgctgcgggcccccaaggccccagatgccacagctgacaccggcagacatgagttcacctacgccctgatgccccacaagggcagcttccaggatgctggggtcatccaggccgcctacagcctgaacttccccctgctggccctgcctgcccccagccctgccccagccacctcctggagcgccttctctgtgagcagccctgctgtggtgctggagaccgtgaagcaggccgagagcagcccccagaggaggagcctggtgctgcggctgtatgaggcccacggcagccacgtggactgctggctgcacctgagcctgcctgtgcaggaggccatcctgtgtgacctgctggagaggccagaccctgctggccacctgaccctgcgggacaaccggctgaagctgaccttcagccccttccaggtgctgagcctgctgctggtgctgcagcccccaccccactag

SEQ ID NO: 90755 - DNA, 630 bp, Artificial Sequence
  derived and/or modified sequence
atggctgctgccccagccctgaagcactggaggaccaccctggagcgggtggagaagtttgtgagccccctgtacttcacagactgcaacctgcggggccgcctgtttggagccagctgccctgtggccgtgctgagcagcttcctgaccccagagcggctgccctaccaggaggccgtgcagagggacttccggcctgcccaggtgggggacagctttggccccacctggtggacctgctggttccgggtggagctgaccatccctgaggcctgggtgggccaggaggtgcacctgtgctgggagagtgatggagagggcctggtgtggagagatggagagcctgtgcagggcctgaccaaggagggggagaagaccagctatgtgctgacagaccggctgggggagcgggaccccaggagcctgaccctgtatgtggaggtggcctgcaatggcctgctgggcgctgggaagggctccatgattgctgccccagaccctgagaagatgttccagctgagcagagctgagctggccgtgttccacagagatgtgcacatgctgctggtggacctggagctgctgctgggcatcgccaagccaggcttcggccccagcaagaggctgtag

SEQ ID NO: 90756 - DNA, 2961 bp, Artificial Sequence
  derived and/or modified sequence
aagaggagcgagagcccggcgatggcggctgcgccggccttgaagcactggcgcaccacgctggagcgggtggagaagttcgtgtcgccgctctactttaccgactgtaacctccgcggcaggctttttggggccagctgccctgtggctgtgctctccagcttcctgacgccggagagacttccctaccaggaggcagtccagcgggacttccgccccgcgcaggtcggcgacagcttcggacccacatggtggacctgctggttccgggtggagctgaccatcccagaggcatgggtgggccaggaagttcacctttgctgggaaagtgatggagaaggtctggtgtggcgtgatggagaacctgtccagggtttaaccaaagagggtgagaagaccagctatgtcctgactgacaggctgggggaaagagacccccgaagcctcactctctatgtggaagtagcctgcaatgggctcctgggggccgggaagggaagcatgattgcagcccctgaccctgagaagatgttccagctgagccgggctgagctagctgtgttccaccgggatgtccacatgctcctggtggatctggagctgctgctgggcatagccaaggcgcagcagctggaatgggtgaagagccgctaccctggcctgtactcccgcatccaggagtttgcgtgccgtgggcagtttgtgcctgtggggggcacctgggtggagatggatgggaacctgcccagtggagaggccatggtgaggcagtttttgcagggccagaacttctttctgcaggagtttgggaagatgtgctctgagttctggctgccggacacctttggctactcagcacagctcccccagatcatgcacggctgtggcatcaggcgctttctcacccagaaattgagctggaatttggtgaactccttcccacaccatacatttttctgggagggcctggatggctcccgtgtactggtccacttcccacctggcgactcctatgggatgcagggcagcgtggaggaggtgctgaagaccgtggccaacaaccgggacaaggggcgggccaaccacagtgccttcctctttggctttggggatgggggtggtggccccacccagaccatgctggaccgcctgaagcgcctgagcaatacggatgggctgcccagggtgcagctatcttctccaagacagctcttctcagcactggagagtgactcagagcagctgtgcacgtgggttggggagctcttcttggagctgcacaatggcacatacaccacccatgcccagatcaagaaggggaaccgggaatgtgagcggatcctgcacgacgtggagctgctcagtagcctggccctggcccgcagtgcccagttcctatacccagcagcccagctgcagcacctctggaggctccttcttctgaaccagttccatgatgtggtgactggaagctgcatccagatggtggcagaggaagccatgtgccattatgaagacatccgttcccatggcaatacactgctcagcgctgcagccgcagccctgtgtgctggggagccaggtcctgagggcctcctcatcgtcaacacactgccctggaagcggatcgaagtgatggccctgcccaaaccgggcggggcccacagcctagccctggtgacagtgcccagcatgggctatgctcctgttcctccccccacctcactgcagcccctgctgccccagcagcctgtgttcgtagtgcaagagactgatggctccgtgactctggacaatggcatcatccgagtgaagctggacccaactggtcgcctgacgtccttggtcctggtggcctctggcagggaggccattgctgagggcgccgtggggaaccagtttgtgctatttgatgatgtccccttgtactgggatgcatgggacgtcatggactaccacctggagacacggaagcctgtgctgggccaggcagggaccctggcagtgggcaccgagggcggcctgcggggcagcgcctggttcttgctacagatcagccccaacagtcggcttagccaggaggttgtgctggacgttggctgcccctatgtccgcttccacaccgaggtacactggcatgaggcccacaagttcctgaaggtggagttccctgctcgcgtgcggagttcccaggccacctatgagatccagtttgggcacctgcagcgacctacccactacaatacctcttgggactgggctcgatttgaggtgtgggcccatcgctggatggatctgtcagaacacggctttgggctggccctgctcaacgactgcaagtatggcgcgtcagtgcgaggcagcatcctcagcctctcgctcttgcgggcgcctaaagccccggacgctactgctgacacggggcgccacgagttcacctatgcactgatgccgcacaagggctctttccaggatgctggcgttatccaagctgcctacagcctaaacttccccctgttggctctgccagcccccagcccagcgcccgccacctcctggagtgcgttttccgtgtcttcacccgcggtcgtattggagaccgtcaagcaggcggagagcagcccccagcgccgctcgctggtcctgaggctgtatgaggcccacggcagccacgtggactgctggctgcacttgtcgctgccggttcaggaggccatcctctgcgatctcttggagcgaccagaccctgctggccacttgacccttcgggacaaccgcctgaagctcaccttttctcccttccaagtgctgtccctgttgctcgtgcttcagcctccgccacactgagtccctggggctggggttttgtttgtagaaggctctggggactcctaatttctgcttccccagcctaaagcagggatcagtcttttcttgtggaataaatccttggatcgggaa

SEQ ID NO: 90757 - DNA, 2826 bp, Artificial Sequence
  derived and/or modified sequence
atggccgccgcccccgccctgaagcactggcggaccaccctggagcgagtggagaagtttgtcagtccgctttactttactgattgtaatctgcgggggcggctttttggggccagctgccctgtcgccgtgctgtcttcctttctaaccccggagagactcccttatcaggaagccgtgcagcgcgatttcaggcccgcccaggttggagactcatttggcccaacctggtggacttgttggttccgcgtggagctgactatcccagaggcctgggtcggacaggaggttcatctctgttgggaatcagatggtgagggattggtgtggcgggatggggagcccgttcagggccttactaaggagggagagaagactagttatgtgcttacggatagactgggcgaacgtgacccacgctcgctcacactgtacgtcgaggtagcctgcaatgggctactcggtgcaggaaaaggatcaatgatcgcagctccggaccccgaaaaaatgttccagctgagccgcgctgagttggccgtgttccatcgcgacgttcacatgctcctggtggatttggagttgctgcttggtatcgcaaaagctcagcagctggagtgggtgaaatcacggtacccaggcctctactcacggattcaggaattcgcatgtagaggccagttcgttcctgtgggggggacatgggtggaaatggatgggaatctgccatctggagaagcaatggtgagacagttcctgcaggggcagaacttttttttacaggaattcgggaaaatgtgttctgaattttggcttccagatacatttggatattccgcacagttgccgcagattatgcatgggtgcggaatacgaagattcctcactcagaagctatcctggaacctggttaactctttccctcatcacacttttttctgggaggggctggatggctccagagtgctggtccacttccctcccggggactcatacggtatgcagggctccgtcgaggaggtcctcaaaaccgtagccaacaacagggacaaggggagagccaaccatagtgcatttcttttcgggttcggggacggaggcggagggcctacgcagaccatgctggatcgcctgaagagattaagcaacactgacgggttgccccgggtgcagctttccagcccaaggcagttgttcagtgcactggaatctgattccgaacagttgtgtacttgggtgggggaactatttctcgagctgcacaacggtacgtatactacacatgcccagatcaaaaaagggaaccgagagtgtgaacggattctgcatgacgtggagctgctgtcctctctcgctctggcccgttccgcacaattcctataccccgccgctcagctgcaacacctgtggaggttactgctgttaaatcaattccacgacgtggtcactggttcctgtattcaaatggtagctgaggaggcgatgtgccattacgaagacatacgcagccacggtaataccctgctgagtgcagctgctgcagcgctgtgtgccggcgagcccggacctgaaggactgctgattgtgaatacactaccgtggaagcggatcgaggtgatggctttgcctaaaccgggaggagctcatagcctggctctcgtgacggtgccctctatgggttacgccccagtccccccccccacaagcctccagcctctgctgccacagcagcccgtctttgttgtccaggagacagatgggagtgtgacattggataacgggatcattcgagtcaagctggatccaactgggagattgacatcactggttctcgtcgccagcggacgggaggcgatagctgagggcgcggtgggtaaccagttcgtgctattcgatgacgtgcccctgtactgggacgcctgggacgtgatggactatcatctcgaaacacgaaagcccgtgctgggccaggctgggaccctcgccgtgggcacggaggggggcctacgtggatctgcatggtttctcctccagatctcaccgaactcgcgcctgagccaggaagtcgtcctggatgttggttgtccatatgtgcgctttcatactgaagtgcactggcatgaggcccataagttcctaaaagtggaattcccggcaagagtcagaagtagccaagcgacatacgaaattcagtttggacacctacaaaggccaactcactataacacctcgtgggactgggcccgatttgaagtctgggcccatcgatggatggacctcagtgaacacgggttcggcctcgcactcctgaacgattgcaaatacggggccagcgtccgtggctctatcctgagtctttccctgcttagggctcccaaagcccccgatgctactgccgacaccgggcggcacgagtttacctatgcgcttatgccgcataaggggtcattccaagatgcaggagtaatacaggccgcctacagtctgaattttccactgttggccctgcctgcaccatccccagcacctgccacaagctggtccgcattttccgtttccagccccgcggttgtcctcgagacagtcaagcaagctgaatctagtccgcagagacgatccttagtgctgcgtctgtacgaggcgcacggatctcatgtggactgttggctgcacctgtctctacctgtccaggaggctatcctgtgtgaccttctggagcggcctgatcccgctggacatctgaccctgcgagataatcggctgaagctgacatttagcccctttcaagttctctccctcctcctggtccttcagcctccacctcactag

SEQ ID NO: 90758 - DNA, 630 bp, Artificial Sequence
  derived and/or modified sequence
atggccgccgcccccgccctgaagcactggcggaccaccctggagcgggttgagaagtttgtcagccccctatacttcacagattgtaacctgcggggtcggttgttcggggcctcgtgccctgtagcagtcttgtcctcatttctcacgcccgagcggcttccctaccaggaggccgtgcaacgagacttccgccctgcgcaagtcggggactcctttggccctacttggtggacatgttggtttcgcgtcgaactgactattcctgaagcttgggtaggccaagaagtgcacctatgttgggaaagcgatggcgaaggcctggtgtggagagacggcgagcctgtccagggcttgacaaaggaaggtgagaagacgtcctacgttcttactgatcggctcggggagagagatccgcgatcgttgactctctatgtagaagttgcgtgtaatgggctcctgggagcagggaaggggagcatgattgccgcccctgatccagagaagatgtttcagctcagtcgagccgaactggctgtatttcaccgagatgtgcacatgcttctggtggacctggagctgctcctcggcatagctaaacccggctttgggccatccaagagactgtag

SEQ ID NO: 90759 - DNA, 2826 bp, Artificial Sequence
  derived and/or modified sequence
atggcggctgccccagcattgaagcattggcggaccaccctggagcgggtcgagaaattcgtctcgcccctctattttacggattgtaacttacggggaaggctgtttggagccagttgcccggtggctgttctctcgagttttctaactcctgaaagactgccctaccaggaagccgtgcagcgggactttcgcccagcccaggtgggagactcatttggacctacatggtggacgtgttggtttagagtcgagcttactattcctgaggcgtgggttggccaggaggtgcacctctgttgggaatcggatggggaaggacttgtctggcgggatggggaacccgtccagggccttaccaaggaaggggagaagaccagctacgtccttaccgacaggctaggagaaagggatcctcgatctctgactctttacgtggaagtggcctgcaacggcctgctgggggcaggtaaagggtcgatgattgctgcccctgatcctgaaaagatgttccaactgtctagagccgagttggccgtcttccatcgcgacgtgcacatgctgcttgttgacctagagctcttgctcgggatcgccaaagcccagcagctggagtgggtgaagtctcgctatccgggtctttattctaggatccaggaatttgcctgccgaggtcagtttgttcctgtcggcggaacatgggtcgagatggacgggaaccttccttccggcgaagcaatggttaggcagttcctgcagggtcagaacttcttcttgcaggagttcggcaagatgtgtagcgagttctggctgcccgacacttttgggtattctgctcagttacctcagatcatgcatggatgcgggatcaggcgattcttaacccagaagttaagctggaatctagtgaacagctttccacatcatacctttttctgggagggcctggatgggtctcgggtcttagtgcacttcccaccgggagattcttacggcatgcaggggagcgtagaagaagtgctgaagacagtagctaacaaccgggataaggggagagccaaccatagcgcctttttattcggatttggcgatggcggtggtggacccacgcagacaatgttagacagattaaagaggttatccaacacagatggccttccacgggtgcagctgtcttcccctcgacagctcttttccgccttagagtccgacagtgagcagctgtgtacgtgggttggcgagttatttctagagctccacaacggcacatatacaacacacgcacagattaaaaaggggaaccgggagtgcgagcggatcctgcatgacgtggagttactttctagcctcgctctggctaggagcgctcagtttttatacccggcagctcagctgcagcacctgtggcgcctgctgcttttaaatcaattccacgacgtggtaaccggcagctgcatccagatggtggccgaagaagccatgtgccattacgaggatatccgaagtcatggcaacacgctgctgtcagccgcagccgctgctctatgtgccggtgaacccggaccagaggggctcttaatcgttaacacactgccatggaaaaggatcgaggtcatggcactacccaaacccggaggtgctcactcattagcgctggttacggttccctccatgggctatgctccagtgcctcccccaacttcactacagccattgctgccgcagcaacctgtgtttgtggttcaggagacggatggaagcgtcacgttggataacggaataatcagggtaaagttagatcctactgggaggctgacctctctggtgctcgtcgcaagcggaagagaagccatcgctgaaggagcagtcggcaatcagttcgtgctatttgatgacgtgccactgtactgggacgcctgggacgtcatggattaccacctcgaaacaagaaaacctgtcctgggacaggcaggaacactagccgtggggacagaggggggtctgagaggctctgcctggttcctcctgcaaatcagccctaatagcaggttgtcacaggaggtcgtgcttgacgtgggatgtccgtacgtgcgcttccataccgaggtccactggcacgaggcacataagtttctgaaggttgaattccctgcaagggtccgctccagtcaggctacctatgagatccagtttgggcatctgcaaaggccaacccactataatacttcatgggactgggcccgtttcgaagtatgggcccacaggtggatggatcttagcgagcatgggttcggtctggccctgctgaatgattgcaaatacggagcatccgttcgcggttccatcctctctcttagcctccttcgagcacctaaggcaccagacgccaccgctgacaccggtcgccacgaatttacctatgccctgatgccacataagggctcctttcaggatgccggtgtcatccaggctgcgtacagcctcaactttcctctgcttgccctgcccgcacccagtccagccccagctactagttggtccgccttttcagtctcttctcccgcagtggtgctggagactgtgaagcaagctgagtcctcccctcagcgacgtagtttggtgctgcggctgtacgaggcacacggaagccacgtggactgttggttacacctgtcccttcctgtgcaagaagctattctgtgtgatttattggaacgtcccgatcctgctggacacctgactcttcgcgataacagactgaagttgactttttcgccatttcaagtgctttctttgctgctggtgctacagcccccaccccattag

SEQ ID NO: 90760 - DNA, 630 bp, Artificial Sequence
  derived and/or modified sequence
atggctgccgcaccagctttgaaacactggcggacaactctcgagagagtggaaaagttcgtttctcccctctattttacagactgcaacctgcggggtcggcttttcggagcaagttgccccgtagctgtgctgtccagcttccttactcccgaacggctcccctatcaggaagccgtgcagagagacttccgacccgctcaggtgggagatagttttggacccacctggtggacatgttggttccgggtcgagttaaccatacccgaggcctgggtggggcaggaggtccatctctgctgggaatcagatggcgaaggtttggtgtggagagacggggaacctgtccaggggctgacaaaagagggggagaaaactagttatgtgctgaccgatcggctcggcgagcgggacccaaggtctcttaccctttacgttgaggtggcgtgcaacggcctgctgggagcaggcaaaggttctatgatagctgctcccgaccctgagaaaatgttccagctctcgagggccgagcttgcagtgttccaccgcgacgtgcacatgctgctcgtggacttggagctcttgctggggatcgcaaaacccggatttggccctagtaaacggttatag

SEQ ID NO: 90761 - DNA, 2826 bp, Artificial Sequence
  derived and/or modified sequence
atggccgccgcccccgccctgaagcactggagaaccaccctggagagagtggagaagttcgtgagccccctgtacttcaccgactgcaacctgagaggcagactgttcggcgccagctgccccgtggccgtgctgagcagcttcctgacccccgagagactgccctaccaggaggccgtgcagagagacttcagacccgcccaggtgggcgacagcttcggccccacctggtggacctgctggttcagagtggagctgaccatccccgaggcctgggtgggccaggaggtgcacctgtgctgggagagcgacggcgagggcctggtgtggagagacggcgagcccgtgcagggcctgaccaaggagggcgagaagaccagctacgtgctgaccgacagactgggcgagagagaccccagaagcctgaccctgtacgtggaggtggcctgcaacggcctgctgggcgccggcaagggcagcatgatcgccgcccccgaccccgagaagatgttccagctgagcagagccgagctggccgtgttccacagagacgtgcacatgctgctggtggacctggagctgctgctgggcatcgccaaggcccagcagctggagtgggtgaagagcagataccccggcctgtacagcagaatccaggagttcgcctgcagaggccagttcgtgcccgtgggcggcacctgggtggagatggacggcaacctgcccagcggcgaggccatggtgagacagttcctgcagggccagaacttcttcctgcaggagttcggcaagatgtgcagcgagttctggctgcccgacaccttcggctacagcgcccagctgccccagatcatgcacggctgcggcatcagaagattcctgacccagaagctgagctggaacctggtgaacagcttcccccaccacaccttcttctgggagggcctggacggcagcagagtgctggtgcacttcccccccggcgacagctacggcatgcagggcagcgtggaggaggtgctgaagaccgtggccaacaacagagacaagggcagagccaaccacagcgccttcctgttcggcttcggcgacggcggcggcggccccacccagaccatgctggacagactgaagagactgagcaacaccgacggcctgcccagagtgcagctgagcagccccagacagctgttcagcgccctggagagcgacagcgagcagctgtgcacctgggtgggcgagctgttcctggagctgcacaacggcacctacaccacccacgcccagatcaagaagggcaacagagagtgcgagagaatcctgcacgacgtggagctgctgagcagcctggccctggccagaagcgcccagttcctgtaccccgccgcccagctgcagcacctgtggagactgctgctgctgaaccagttccacgacgtggtgaccggcagctgcatccagatggtggccgaggaggccatgtgccactacgaggacatcagaagccacggcaacaccctgctgagcgccgccgccgccgccctgtgcgccggcgagcccggccccgagggcctgctgatcgtgaacaccctgccctggaagagaatcgaggtgatggccctgcccaagcccggcggcgcccacagcctggccctggtgaccgtgcccagcatgggctacgcccccgtgcccccccccaccagcctgcagcccctgctgccccagcagcccgtgttcgtggtgcaggagaccgacggcagcgtgaccctggacaacggcatcatcagagtgaagctggaccccaccggcagactgaccagcctggtgctggtggccagcggcagagaggccatcgccgagggcgccgtgggcaaccagttcgtgctgttcgacgacgtgcccctgtactgggacgcctgggacgtgatggactaccacctggagaccagaaagcccgtgctgggccaggccggcaccctggccgtgggcaccgagggcggcctgagaggcagcgcctggttcctgctgcagatcagccccaacagcagactgagccaggaggtggtgctggacgtgggctgcccctacgtgagattccacaccgaggtgcactggcacgaggcccacaagttcctgaaggtggagttccccgccagagtgagaagcagccaggccacctacgagatccagttcggccacctgcagagacccacccactacaacaccagctgggactgggccagattcgaggtgtgggcccacagatggatggacctgagcgagcacggcttcggcctggccctgctgaacgactgcaagtacggcgccagcgtgagaggcagcatcctgagcctgagcctgctgagagcccccaaggcccccgacgccaccgccgacaccggcagacacgagttcacctacgccctgatgccccacaagggcagcttccaggacgccggcgtgatccaggccgcctacagcctgaacttccccctgctggccctgcccgcccccagccccgcccccgccaccagctggagcgccttcagcgtgagcagccccgccgtggtgctggagaccgtgaagcaggccgagagcagcccccagagaagaagcctggtgctgagactgtacgaggcccacggcagccacgtggactgctggctgcacctgagcctgcccgtgcaggaggccatcctgtgcgacctgctggagagacccgaccccgccggccacctgaccctgagagacaacagactgaagctgaccttcagccccttccaggtgctgagcctgctgctggtgctgcagccccccccccactag

SEQ ID NO: 90762 - DNA, 630 bp, Artificial Sequence
  derived and/or modified sequence
atggccgccgcccccgccctgaagcactggagaaccaccctggagagagtggagaagttcgtgagccccctgtacttcaccgactgcaacctgagaggcagactgttcggcgccagctgccccgtggccgtgctgagcagcttcctgacccccgagagactgccctaccaggaggccgtgcagagagacttcagacccgcccaggtgggcgacagcttcggccccacctggtggacctgctggttcagagtggagctgaccatccccgaggcctgggtgggccaggaggtgcacctgtgctgggagagcgacggcgagggcctggtgtggagagacggcgagcccgtgcagggcctgaccaaggagggcgagaagaccagctacgtgctgaccgacagactgggcgagagagaccccagaagcctgaccctgtacgtggaggtggcctgcaacggcctgctgggcgccggcaagggcagcatgatcgccgcccccgaccccgagaagatgttccagctgagcagagccgagctggccgtgttccacagagacgtgcacatgctgctggtggacctggagctgctgctgggcatcgccaagcccggcttcggccccagcaagagactgtag

SEQ ID NO: 90763 - protein, 533 aa, Artificial Sequence
  derived and/or modified sequence
MDLIPNLAVETWLLLAVSLILLYLYGTRTHGLFKKLGIPGPTPLPFLGNALSFRKGYWTFDMECYKKYRKVWGIYDCQQPMLAITDPDMIKTVLVKECYSVFTNRRPFGPVGFMKNAISIAEDEEWKRIRSLLSPTFTSGKLKEMVPIIAQYGDVLVRNLRREAETGKPVTLKHVFGAYSMDVITSTSFGVSIDSLNNPQDPFVENTKKLLRFNPLDPFVLSIKVFPFLTPILEALNITVFPRKVISFLTKSVKQIKEGRLKETQKHRVDFLQLMIDSQNSKDSETHKALSDLELMAQSIIFIFAGYETTSSVLSFIIYELATHPDVQQKVQKEIDTVLPNKAPPTYDTVLQLEYLDMVVNETLRLFPVAMRLERVCKKDVEINGMFIPKGVVVMIPSYVLHHDPKYWREPEKFLPERFSKKNKDNIDPYIYTPFGSGPRNCIGMRFALVNMKLALVRVLQNFSFKPCKETQIPLKLRFGGLLLTEKPIVLKAESRDETFVDMEPIHMDFLRSLAFQGPHLCFFWELLCPTIR

SEQ ID NO: 90764 - DNA, 1602 bp, Artificial Sequence
  derived and/or modified sequence
atggacctaatcccgaatttggccgtggaaacatggcttctcctggccgtctctctgatactcctgtatctgtatgggacacgaacacatggcttgttcaaaaagctgggcataccagggcccacaccccttccatttctcgggaatgcccttagcttccgaaagggttattggacctttgacatggagtgttataaaaaatatcggaaggtttgggggatctacgattgccagcagcccatgctggccataactgaccccgacatgatcaagaccgtactggtgaaggaatgctattccgtattcacgaataggcggcctttcggcccagttggttttatgaagaatgctataagtatcgctgaggatgaagagtggaaaaggatccggtctttactgtcacccacctttacgagtggcaaacttaaggaaatggtgcccataattgcacagtacggcgacgtcctggtgagaaacctgcgacgtgaggccgaaacagggaaacccgtcaccctgaagcacgtttttggggcctactccatggatgtgattacatccactagttttggcgtttcaatcgactcattgaataacccacaggatccctttgtggagaatacaaagaaactcctgcgattcaatcctctcgacccctttgtgttgtccatcaaagtgttcccctttttaacgcccatcctggaagcccttaatatcacagtgtttcccagaaaggtgatcagtttcttgactaaaagtgttaagcagattaaagagggaagactcaaggagactcagaagcatagagtggacttcctgcaactcatgatagattcgcagaactctaaagatagcgaaacacacaaagctctttctgacttggagctgatggcacagtccatcatctttattttcgcaggctacgaaacaactagtagtgtactgagcttcattatctacgaactggctactcatcccgacgtgcagcagaaagtgcagaaggagatcgatactgtattgcccaacaaggcacctcccacatacgatacggtgctccaactggaatatctggacatggtggtaaatgaaactctgaggctgtttcctgtggccatgcgtctggaaagggtatgcaagaaagacgtggaaataaacggcatgtttatccctaagggagtggtcgtaatgatcccttcctacgtcttgcaccatgatcccaagtactggcgtgaacccgagaagttcctccccgagagattttctaagaagaacaaagacaatatcgacccttatatctacaccccttttgggtccggcccgaggaactgtatcgggatgaggttcgccctggtgaacatgaaattagccctcgtccgcgtgctccagaatttcagtttcaaaccatgtaaggagacccagattcccctgaaactgcgctttggcggtctgctcctcacggagaagcctattgtactgaaggctgaaagccgcgacgagacgttcgtggatatggagccaatccacatggactttctgcggtcgctggcctttcagggtccccacctttgttttttttgggaactgctctgtcctacaataagatag

SEQ ID NO: 90765 - DNA, 1602 bp, Artificial Sequence
  derived and/or modified sequence
atggacctgatccccaacctggccgtggagacctggctgctgctggccgtgtccctcatcctgctgtacctgtatggcaccaggacccacggcctcttcaagaagctgggcatccctggccccacccccctgcccttcctgggcaatgccctgtccttcaggaagggctactggacctttgacatggagtgctacaagaagtacaggaaggtgtggggcatctatgactgccagcagcccatgctggccatcacagatcctgacatgatcaagacagtgctggtgaaggagtgctacagcgtcttcaccaacagaagacccttcggccctgtgggcttcatgaagaatgccatcagcattgctgaagatgaggagtggaagaggatccgcagcctgctgagccccaccttcaccagcggcaagctgaaggagatggtgcccatcatcgcccagtatggagatgtgctggtgaggaacctgcggcgggaggccgagaccgggaagcctgtgaccctgaagcacgtgtttggagcctacagcatggatgtgatcaccagcaccagctttggagtgtccattgacagcctgaacaacccccaggacccctttgtggagaacaccaagaagctgctgcgcttcaaccccctggacccctttgtgctgagcatcaaggtgttccccttcctgacccccatcctggaggccctgaacatcaccgtcttccccaggaaggtgatctccttcctgaccaagtctgtgaagcagatcaaggagggccgcctgaaggagacccagaagcaccgggtggacttcctgcagctgatgattgacagccagaacagcaaggacagcgagacccacaaggccctgagtgacctggagctgatggcccagagcatcatcttcatctttgctggctatgagaccaccagctctgtgctgtccttcatcatctatgagctggccacccacccagatgtgcagcagaaggtgcagaaggagattgacacagtgctgcccaacaaggccccacccacctatgacacagtgctgcagctggagtacctggacatggtggtgaatgagaccctgcggctcttccctgtggccatgaggctggagcgggtgtgcaagaaggatgtggagatcaatggcatgttcatccccaagggcgtggtggtgatgatccccagctatgtgctgcaccacgaccccaagtactggagggagcctgagaagttcctgcctgagcgcttcagcaagaagaacaaggacaacatcgacccctacatctacaccccatttggaagtggccccaggaactgcatcggcatgagatttgccctggtgaacatgaagctggccctggtgcgggtgctgcagaacttctccttcaagccctgcaaggagacccagatccccctgaagctgcgctttggaggcctgctgctgacagagaagcccatcgtgctgaaggccgagagcagagatgagacctttgtggacatggagcccatccacatggacttcctgcggagcctggccttccagggcccccacctgtgcttcttctgggagctgctgtgccccaccatcagatag

SEQ ID NO: 90766 - DNA, 1602 bp, Artificial Sequence
  derived and/or modified sequence
atggacctgatccccaacctggccgtggagacctggctgctgctggccgtttctctgattttgctctacctttacggcacaaggacacatggcctcttcaagaaacttggaatacctgggccaacgcccctccccttcctcgggaatgccctgagtttccggaagggttactggacttttgatatggagtgctacaaaaaatacagaaaagtctgggggatttacgattgccagcagcccatgctcgcaataaccgatcccgacatgattaagaccgtcctggtaaaggagtgttattctgtgttcacgaatcgaagaccatttgggcctgtggggttcatgaagaacgccatctctattgccgaggacgaagagtggaagcgcatacgctctttgctcagtccaactttcacctctggaaaactgaaagagatggtcccgattatagcccaatatggagacgtgctggtcaggaacctgcgaagggaagccgagacgggcaaacccgtcacactaaagcatgtcttcggagcttacagtatggacgtgatcacctcaacgtcattcggggtcagcatcgattctctgaacaatcctcaagatccttttgtcgaaaacactaaaaaactgctgcgcttcaatcctttggaccctttcgtgcttagcattaaggttttccccttcctgacaccaattctagaggcgcttaatatcacggtcttccctcgcaaagtcatctcgttcctcactaaatcggtgaagcagatcaaagaaggccgcttgaaagagacccagaagcatagggtggacttcctgcagttaatgatcgatagccagaatagtaaagattccgagactcataaagctctcagtgatctggagcttatggcacaaagcataattttcatttttgctggctacgaaaccacctcctcagtgctctcctttatcatttacgagctggcgacgcaccccgatgtgcagcaaaaggtgcagaaggagatcgacacggtgcttcctaataaagcacccccaacctacgataccgtgctgcagcttgagtacctggacatggtggtgaacgagaccctgcgcctttttcccgtggcgatgcgcctcgagcgggtgtgcaagaaggacgtggagattaatgggatgttcatccccaaaggcgtggtagttatgatccccagttatgtgttacatcatgacccgaaatactggcgggaaccggaaaagttcctgcctgagcggttttctaaaaaaaataaagacaacattgacccctatatttacaccccatttggctcaggacctaggaactgtattggcatgcggttcgctctggtgaatatgaaactcgctctagtccgcgtcctccagaatttcagtttcaagccatgcaaagagacacagataccactgaaactacggtttggggggcttctactcactgagaaacctatcgtactaaaggcagagtcgagagacgagaccttcgtcgatatggaacctattcacatggacttccttcgatcactcgcattccagggaccacatttgtgctttttctgggagctgctgtgccccacaattcggtag

SEQ ID NO: 90767 - DNA, 1602 bp, Artificial Sequence
  derived and/or modified sequence
atggatcttataccgaatctcgccgtggagacgtggttgctcctcgccgtgtcactcattctgttatacttatatggtacgcggacacatgggctgtttaaaaagctgggaattccaggtcccacccccttgccgttcttaggcaacgcgctgtcattccggaagggttactggacatttgacatggagtgctataagaaataccgcaaggtgtgggggatttacgactgccagcaacctatgctagccatcaccgacccagatatgattaaaactgtcttggtgaaggagtgctactcggtcttcaccaaccgtagaccttttgggcctgtggggtttatgaagaacgcaatatccatcgctgaggacgaggagtggaaacggatcagatctttgctgtctcctaccttcacctccggcaaattgaaagaaatggtgcccattattgcacagtacggtgatgtccttgtgaggaatcttcgaagagaagctgagaccgggaagcccgtgaccctgaagcacgttttcggagcatactcaatggatgtcataactagtactagttttggtgtgtccattgactcccttaataacccccaagacccgttcgtagaaaatacaaagaaactccttagatttaacccactggatccctttgtactgtcaataaaagttttcccgttcctaacaccaatcctggaagccttgaatattacagtttttcccagaaaagtgatcagttttctgaccaagtctgtgaaacagattaaagagggaagactcaaggagacacaaaagcacagggtcgactttctgcaacttatgatcgattcccagaattccaaagacagcgagacccacaaagctctctccgacctggagctgatggcacagtctatcatctttatctttgcgggttatgaaacaacttcctcagtgctgtccttcatcatctacgagctggcgacccacccggatgtgcagcagaaggtgcagaaagaaattgataccgttctcccgaataaggcccctcccacatacgatacagtgctccagctggagtacttggacatggtcgtgaatgagacactgcgcctctttccagtcgccatgcggctggaacgggtttgtaagaaggatgtggaaattaatggcatgtttatccctaagggggtggtggtgatgatcccttcctatgtgctgcatcatgaccccaagtattggcgagaacccgaaaaatttctgcccgaaagattttcgaagaagaacaaggacaatatcgatccttacatctatactccattcggcagtggtcctagaaattgcattggtatgcggtttgcgctggtgaatatgaaactggcactggtccgtgtgctgcagaactttagttttaaaccttgcaaagaaacccagatccccctgaagctaagattcgggggtttgctacttacagaaaaaccgatcgtacttaaggccgagtctcgggacgagacctttgtagatatggaaccgatccacatggattttttgcggtctcttgcctttcaggggcctcacctttgtttcttctgggagctcctgtgcccaaccatcaggtag

SEQ ID NO: 90768 - DNA, 1599 bp, Artificial Sequence
  derived and/or modified sequence
atggatctcatcccaaacttggccgtggaaacctggcttctcctggctgtcagcctgatactcctctatctatatggaacccgtacacatggactttttaagaagcttggaattccagggcccacacctctgccttttttgggaaatgctttgtccttccgtaagggctattggacgtttgacatggaatgttataaaaagtatagaaaagtctggggtatttatgactgtcaacagcctatgctggctatcacagatcccgacatgatcaaaacagtgctagtgaaagaatgttattctgtcttcacaaaccggaggcctttcgggccagtgggatttatgaaaaatgccatctctatagctgaggatgaagaatggaagagaatacgatcattgctgtctccaacattcaccagcggaaaactcaaggagatggtccctatcattgcccagtatggagatgtgttggtgagaaatctgaggcgggaagcagagacaggcaagcctgtcaccttgaaacacgtctttggggcctacagcatggatgtgatcactagcacatcatttggagtgagcatcgactctctcaacaatccacaagacccctttgtggaaaacaccaagaagcttttaagatttaatccattagatccattcgttctctcaataaaagtctttccattccttaccccaattcttgaagcattaaatatcactgtgtttccaagaaaagttataagttttctaacaaaatctgtaaaacagataaaagaaggtcgcctcaaagagacacaaaagcaccgagtggatttccttcagctgatgattgactctcagaattcaaaagactctgagacccacaaagctctgtctgatctggagctcatggcccaatcaattatctttatttttgctggctatgaaaccacgagcagtgttctctccttcattatatatgaactggccactcaccctgatgtccagcagaaagtgcagaaggaaattgatacagttttacccaataaggcaccacccacctatgatactgtgctacagttggagtatcttgacatggtggtgaatgaaacactcagattattcccagttgctatgagacttgagagggtctgcaaaaaagatgttgaaatcaatgggatgtttattcccaaaggggtggtggtgatgattccaagctatgttcttcatcatgacccaaagtactggagagagcctgagaagttcctccctgaaaggttcagtaaaaagaacaaggacaacatagatccttacatatacacaccctttggaagtggacccagaaactgcattggcatgaggtttgctctcgtgaacatgaaacttgctctagtcagagtccttcagaacttctccttcaaaccttgtaaagaaacacagatccccctgaaattacgctttggaggacttcttctaacagaaaaacccattgttctaaaggctgagtcaagggatgagacctttgtagatatggagcccattcacatggactttttaagaagcttggcattccagggcccacacctctgctttttttgggaactactttgtcctaccatcagg

SEQ ID NO: 90769 - DNA, 1602 bp, Artificial Sequence
  derived and/or modified sequence
atggacctgatccccaacctggccgtggagacctggctgctgctggccgtgagcctgatcctgctgtacctgtacggcaccagaacccacggcctgttcaagaagctgggcatccccggccccacccccctgcccttcctgggcaacgccctgagcttcagaaagggctactggaccttcgacatggagtgctacaagaagtacagaaaggtgtggggcatctacgactgccagcagcccatgctggccatcaccgaccccgacatgatcaagaccgtgctggtgaaggagtgctacagcgtgttcaccaacagaagacccttcggccccgtgggcttcatgaagaacgccatcagcatcgccgaggacgaggagtggaagagaatcagaagcctgctgagccccaccttcaccagcggcaagctgaaggagatggtgcccatcatcgcccagtacggcgacgtgctggtgagaaacctgagaagagaggccgagaccggcaagcccgtgaccctgaagcacgtgttcggcgcctacagcatggacgtgatcaccagcaccagcttcggcgtgagcatcgacagcctgaacaacccccaggaccccttcgtggagaacaccaagaagctgctgagattcaaccccctggaccccttcgtgctgagcatcaaggtgttccccttcctgacccccatcctggaggccctgaacatcaccgtgttccccagaaaggtgatcagcttcctgaccaagagcgtgaagcagatcaaggagggcagactgaaggagacccagaagcacagagtggacttcctgcagctgatgatcgacagccagaacagcaaggacagcgagacccacaaggccctgagcgacctggagctgatggcccagagcatcatcttcatcttcgccggctacgagaccaccagcagcgtgctgagcttcatcatctacgagctggccacccaccccgacgtgcagcagaaggtgcagaaggagatcgacaccgtgctgcccaacaaggccccccccacctacgacaccgtgctgcagctggagtacctggacatggtggtgaacgagaccctgagactgttccccgtggccatgagactggagagagtgtgcaagaaggacgtggagatcaacggcatgttcatccccaagggcgtggtggtgatgatccccagctacgtgctgcaccacgaccccaagtactggagagagcccgagaagttcctgcccgagagattcagcaagaagaacaaggacaacatcgacccctacatctacacccccttcggcagcggccccagaaactgcatcggcatgagattcgccctggtgaacatgaagctggccctggtgagagtgctgcagaacttcagcttcaagccctgcaaggagacccagatccccctgaagctgagattcggcggcctgctgctgaccgagaagcccatcgtgctgaaggccgagagcagagacgagaccttcgtggacatggagcccatccacatggacttcctgagaagcctggccttccagggcccccacctgtgcttcttctgggagctgctgtgccccaccatcagatag

SEQ ID NO: 90770 - protein, 148 aa, Artificial Sequence
  derived and/or modified sequence
MFRRPVLQVLRQFVRHESETTTSLVLERSLNRVHLLGRVGQDPVLRQVEGKNPVTIFSLATNEMWRSGDSEVYQLGDVSQKTTWHRISVFRPGLRDVAYQYVKKGSRIYLEGKIDYGEYMDKNNVRRQATTIIADNIIFLSDQTKEKE

SEQ ID NO: 90771 - protein, 135 aa, Artificial Sequence
  derived and/or modified sequence
MFRRPVLQVLRQFVRHESETTTSLVLERSLNRVHLLGRVGQDPVLRQVEGKNPVTIFSLATNEMWRSGDSEVYQLGDVSQKTTWHRISVFRPGLRDVAYQYVKKGSRIYLEGKIDYGEYMDKNNVRRQATTIIAD

SEQ ID NO: 90772 - protein, 121 aa, Artificial Sequence
  derived and/or modified sequence
MFRRPVLQVLRQFVRHESETTTSLVLERSLNRVHLLGRVGQDPVLRQVEGKNPVTIFSLATNEMWRSGDSEVYQLGDVSQKTTWHRISVFRPGLRDVAYQYVKKGSRIYLEGKIDYGEYMD

SEQ ID NO: 90773 - protein, 28 aa, Artificial Sequence
  derived and/or modified sequence
MFRRPVLQVLRQFVRHESETTTSLVLER

SEQ ID NO: 90774 - DNA, 447 bp, Artificial Sequence
  derived and/or modified sequence
atgttcagaagacccgtgctgcaggtgctgagacagttcgtgagacacgagagcgagaccaccaccagcctggtgctggagagaagcctgaacagagtgcacctgctgggcagagtgggccaggaccccgtgctgagacaggtggagggcaagaaccccgtgaccatcttcagcctggccaccaacgagatgtggagaagcggcgacagcgaggtgtaccagctgggcgacgtgagccagaagaccacctggcacagaatcagcgtgttcagacccggcctgagagacgtggcctaccagtacgtgaagaagggcagcagaatctacctggagggcaagatcgactacggcgagtacatggacaagaacaacgtgagaagacaggccaccaccatcatcgccgacaacatcatcttcctgagcgaccagaccaaggagaaggagtag

SEQ ID NO: 90775 - DNA, 408 bp, Artificial Sequence
  derived and/or modified sequence
atgttcagaagacccgtgctgcaggtgctgagacagttcgtgagacacgagagcgagaccaccaccagcctggtgctggagagaagcctgaacagagtgcacctgctgggcagagtgggccaggaccccgtgctgagacaggtggagggcaagaaccccgtgaccatcttcagcctggccaccaacgagatgtggagaagcggcgacagcgaggtgtaccagctgggcgacgtgagccagaagaccacctggcacagaatcagcgtgttcagacccggcctgagagacgtggcctaccagtacgtgaagaagggcagcagaatctacctggagggcaagatcgactacggcgagtacatggacaagaacaacgtgagaagacaggccaccaccatcatcgccgactag

SEQ ID NO: 90776 - DNA, 447 bp, Artificial Sequence
  derived and/or modified sequence
atgtttcgtcgtcccgtgcttcaggttctgagacaatttgtgcggcacgaatccgaaacaacaacctccttggtcttggaacgcagccttaatcgggtgcatctgttggggagagtgggacaggacccagttctacgtcaggtagaaggaaaaaatcctgtcactatattctcgctggccaccaatgaaatgtggcgatccggggatagcgaagtttatcagctgggggacgtctctcagaagacaacatggcaccggatctccgtctttagacccgggcttcgggatgtggcttatcagtacgtgaagaaggggagccgaatttatctggaaggcaagatcgactacggcgagtacatggacaagaacaatgtgaggcggcaggccactactataattgccgataatattatattcctctctgaccagactaaggagaaagaatag

SEQ ID NO: 90777 - DNA, 447 bp, Artificial Sequence
  derived and/or modified sequence
atgtttaggcgcccagtcctgcaggttctcagacaattcgtgagacacgaatccgagaccaccacgagcctagtgctggaaagatccctcaacagggtccacctcctggggcgggttggccaggaccccgtcctccggcaggtcgaaggcaagaatcccgtaacaatcttctctttagccacaaatgagatgtggcgaagcggcgactctgaggtctatcagctcggggatgtgagccagaagacaacctggcacaggatatctgtgttcagaccgggcctgagagatgttgcctaccaatatgttaagaagggcagtcggatttatctggaaggaaaaatagactacggagagtatatggacaagaacaacgtgcggaggcaggccaccactatcatcgccgataatatcattttcctcagtgatcagaccaaggagaaggaatag

SEQ ID NO: 90778 - DNA, 408 bp, Artificial Sequence
  derived and/or modified sequence
atgtttcgtcgacccgtgctgcaggtgttacgccagtttgtcaggcacgagtccgagaccaccacttcgctagtgctggagcggtctttgaaccgtgtccacttattaggccgtgttggccaggaccccgtgttgagacaagtcgaaggcaagaaccccgttaccatcttcagtttagccaccaatgagatgtggagatctggggactccgaagtctaccaactgggcgatgtgagtcagaagacaacctggcatagaatttcggttttccggcctggcttaagggacgtggcttatcagtatgtcaagaaaggttcgaggatctatctggaaggaaagatagattacggggaatatatggacaagaacaatgtgagaaggcaagcaaccactatcattgccgactag

SEQ ID NO: 90779 - DNA, 447 bp, Artificial Sequence
  derived and/or modified sequence
atgtttcggcgccccgtcctgcaagtcctgagacaattcgtccgacacgagagcgagaccacaacgtcccttgttctcgagagaagtttgaatcgcgtccacctcctggggagggtgggccaggaccccgtcctacggcaggtcgaaggcaagaatccagtgactatcttttctttggctacaaatgaaatgtggcgctctggggactccgaagtgtatcaactgggggacgttagccagaagaccacgtggcatagaatcagtgtattcagaccaggacttagagatgtcgcttatcagtatgtcaaaaagggaagtcggatttatttggagggaaaaatcgattacggtgagtacatggataaaaacaatgtccgacggcaagcaaccaccataattgcagacaacataatctttttgtccgaccaaaccaaggaaaaggaatag

SEQ ID NO: 90780 - DNA, 447 bp, Artificial Sequence
  derived and/or modified sequence
atgttcagaagacctgtgctgcaggtgctgcggcagtttgtgagacatgagagcgagaccaccaccagcctggtgctggagaggagcctgaacagagtgcacctgctgggccgggtgggccaggaccctgtgctgcggcaggtggagggcaagaaccctgtgaccatcttcagcctggccaccaatgagatgtggaggtctggggacagcgaggtgtaccagctgggagatgtgtcccagaagaccacctggcaccgcatcagcgtcttccggcccggcctgagagatgtggcctaccagtatgtgaagaagggcagccgcatctacctggagggcaagattgattatggagagtacatggacaagaacaacgtgcggcggcaggccaccaccatcatcgctgacaacatcatcttcctgagtgaccagaccaaggagaaggagtag

SEQ ID NO: 90781 - DNA, 408 bp, Artificial Sequence
  derived and/or modified sequence
atgttcagaagacctgtgctgcaggtgctgcggcagtttgtgagacatgagagcgagaccaccaccagcctggtgctggagaggagcctgaacagagtgcacctgctgggccgggtgggccaggaccctgtgctgcggcaggtggagggcaagaaccctgtgaccatcttcagcctggccaccaatgagatgtggaggtctggggacagcgaggtgtaccagctgggagatgtgtcccagaagaccacctggcaccgcatcagcgtcttccggcccggcctgagagatgtggcctaccagtatgtgaagaagggcagccgcatctacctggagggcaagattgattatggagagtacatggacaagaacaacgtgcggcggcaggccaccaccatcatcgctgactag

SEQ ID NO: 90782 - DNA, 447 bp, Artificial Sequence
  derived and/or modified sequence
atgttccggcggcccgtgctgcaggtgctgcggcagttcgtgcggcatgagagcgaaacaactaccagccttgttttggaacggtccctgaacagggtgcatcttctcggccgcgtcggtcaggatccagtgctgcgtcaggttgagggcaagaatccagtgacaatcttcagtctggcaaccaacgagatgtggcgtagcggagacagtgaggtctaccagctaggtgacgtgagccagaaaacgacgtggcaccggatatccgtattccggcctggcctacgagatgttgcatatcagtacgtgaaaaaaggatcaaggatttatctcgaaggcaagatcgactatggagagtatatggacaaaaacaacgtgcggaggcaagcaacaaccatcatagccgataatatcatcttcctctcggatcagacgaaggagaaagaatag

SEQ ID NO: 90783 - DNA, 447 bp, Artificial Sequence
  derived and/or modified sequence
atgttccggcggcccgtgctgcaggtgctgcggcagttcgtgcggcacgaatcagagaccactacgagtctcgtgttggaacgcagcctgaaccgcgttcacctgctcggaagggtgggtcaggacccagtgcttagacaggtggagggcaagaatcccgtcacaatattcagcctggctactaatgaaatgtggagatccggcgatagcgaagtgtatcagctgggagacgtttctcagaaaacaacctggcacagaatctctgtctttagaccaggtctgagggatgtggcgtaccagtatgtcaagaagggatctagaatttacctggagggcaagatcgattacggcgaatacatggataagaataacgtgaggagacaggctactacgatcattgcagacaatataatcttcctcagcgatcagactaaagagaaggagtag

SEQ ID NO: 90784 - DNA, 408 bp, Artificial Sequence
  derived and/or modified sequence
atgttccggcggcccgtgctgcaggtgctgcggcagttcgtgcggcatgagtcagaaaccacaacatcgttggtgctggagcgttccctgaatagagtgcatctgttgggaagagtgggccaggatccggtgctgcgccaagtcgaggggaaaaacccagtcacgatcttttctctggccacgaacgaaatgtggagaagtggcgactctgaagtataccagctgggcgacgtatcacaaaagaccacgtggcatcgaatttcagtttttaggcccggactgcgggacgtagcataccagtacgtgaaaaagggatcccgcatttacctcgagggaaagatcgattatggcgagtacatggataagaataacgtgcgaaggcaggctaccaccattattgctgattag

SEQ ID NO: 90785 - DNA, 447 bp, Artificial Sequence
  derived and/or modified sequence
atgttccggcggcccgtgctgcaggtgctgcggcagttcgtgcggcatgaatcagagaccaccactagcttggtgctggaacggtcactgaaccgggttcacctcctgggcagggtcggtcaggatccagtgctgcgccaggtcgaggggaagaatcctgtcactatcttcagcctggccaccaacgagatgtggcgctcaggcgacagcgaggtgtaccagttaggagatgtcagtcagaagacgacctggcatcgcatatctgtctttcgccctggtctgcgcgacgtggcttaccaatatgtgaaaaagggtagccggatttacctcgaggggaaaatagactacggagaatatatggataagaacaatgtgcgacgccaggctactaccatcatagcagacaacatcatatttctgtctgaccagaccaaagaaaaagaatag

SEQ ID NO: 90786 - DNA, 447 bp, Artificial Sequence
  derived and/or modified sequence
atgttccgtaggccagtgctgcaggtgcttagacagttcgtaaggcatgagtcagaaaccaccacttccctggtgctggaacgcagcctgaatagagtgcacctcctcggcagagtgggccaggatccagttctcagacaggtcgagggaaagaatcctgtcacaattttctcacttgccacaaatgagatgtggcggagcggagatagtgaggtgtaccagctgggcgatgtgtcgcagaaaaccacatggcaccgaatttcggtgttcaggcctggtttgcgtgatgtcgcctaccagtatgtcaaaaaaggttcccgcatatatctggagggcaaaatcgactatggcgagtatatggataagaataatgttcgcaggcaggctactaccattatcgccgataacatcatcttcctgtctgatcagacgaaagagaaagagtag

SEQ ID NO: 90787 - DNA, 447 bp, Artificial Sequence
  derived and/or modified sequence
atgttcaggaggcctgtgctgcaggtgctgagacagtttgttaggcatgagtccgagacgaccacatcccttgtcctggagaggtcattaaatagagtgcatctccttggcagagtgggccaggatcccgtgctgagacaagtggaaggcaaaaaccccgtgaccattttttcactggctacaaatgaaatgtggcgctccggggatagcgaagtgtaccagctcggcgacgtctcccagaagactacttggcacaggatctccgtgttcagacccggactaagagatgtggcttatcagtatgtcaagaagggctctaggatctatctggagggtaaaattgactatggagagtatatggacaaaaacaatgttagacgtcaggctaccacaattatcgcagataatattatctttctgtcagatcagaccaaagagaaggaatag

SEQ ID NO: 90788 - DNA, 408 bp, Artificial Sequence
  derived and/or modified sequence
atgtttaggcggcctgtcctgcaggtgttgcggcagttcgttcggcacgaatcagagacgacgaccagtcttgttctggaacgatctttaaatagggtgcacttgctcggaagggtcggacaggacccagtgctgcggcaggtggaaggcaagaacccagtgaccatcttctctttggctacaaacgagatgtggcggtccggggattcagaggtctaccagttgggcgatgtgtctcagaaaactacgtggcatagaatatcagtgttccggccaggcctgcgggacgttgcatatcagtatgtgaaaaagggctcacggatctatctggaagggaaaatcgactacggggagtatatggataagaataacgtgagacgccaggccaccacaatcatagcagactag

SEQ ID NO: 90789 - DNA, 447 bp, Artificial Sequence
  derived and/or modified sequence
atgttccggaggcctgtgcttcaagtcctccgccaatttgttagacacgagagtgagacaactacatctctggtgctggaaagaagcctgaatagggtgcacttacttgggcgagtggggcaggacccagtactgcggcaggtggaaggaaaaaaccctgttacaattttcagcctcgctacaaacgaaatgtggcggtccggggattcagaggtgtaccagcttggcgatgtgagtcagaagactacatggcacaggataagcgtgttccggcctgggctacgggacgtcgcatatcagtatgtgaagaaagggtctcgaatctacttggagggtaaaatagactacggagagtacatggataaaaataatgttaggagacaggccaccaccattatcgccgataatataattttcctgagtgaccagaccaaggagaaagagtag

SEQ ID NO: 90790 - DNA, 687 bp, Artificial Sequence
  derived and/or modified sequence
ctgtttcctttttcctctggcgagctttgcgttccctgtgcgccggaagtgatcccctgcgtggctgggctgctcgggttagatcgtcaggaaaagcctaaagattagactgtaagaaaagaaaatagaagccatgtttcgaagacctgtattacaggtacttcgtcagtttgtaagacatgagtccgaaacaactaccagtttggttcttgaaagatccctgaatcgtgtgcacttacttgggcgagtgggtcaggaccctgtcttgagacaggtggaaggaaaaaatccagtcacaatattttctctagcaactaatgagatgtggcgatcaggggatagtgaagtttaccaactgggtgatgtcagtcaaaagacaacatggcacagaatatcagtattccggccaggcctcagagacgtggcatatcaatatgtgaaaaaggggtctcgaatttatttggaagggaaaatagactatggtgaatacatggataaaaataatgtgaggcgacaagcaacaacaatcatagctgataatattatatttctgagtgaccagacgaaagagaaggagtagaaaggatgattcttctttggccatcatttggtacagtctcatttccaagtcatgtataatctttatggcttccaaggacaagaattaaaatactcttttacgtaaaa

SEQ ID NO: 90791 - DNA, 636 bp, Artificial Sequence
  derived and/or modified sequence
gtgcgccggaagtgatcccctgcgtggctgggctgctcgggttagatcgtcaggtgagggaggaagggatagccagcgcgaaggaagtgctggagtcgtgtgttttggctgcgcgtgatcctgcgtgggtcgggaggtgtttctgtgaaaagcctaaagattagactgtaagaaaagaaaatagaagccatgtttcgaagacctgtattacaggtacttcgtcagtttgtaagacatgagtccgaaacaactaccagtttggttcttgaaagatccctgaatcgtgtgcacttacttgggcgagtgggtcaggaccctgtcttgagacaggtggaaggaaaaaatccagtcacaatattttctctagcaactaatgagatgtggcgatcaggggatagtgaagtttaccaactgggtgatgtcagtcaaaagacaacatggcacagaatatcagtattccggccaggcctcagagacgtggcatatcaatatgtgaaaaaggggtctcgaatttatttggaagggaaaatagactatggtgaatacatggataaaaataatgtgaggcgacaagcaacaacaatcatagctgataatattatatttctgagtgaccagacgaaagagaaggagtag

SEQ ID NO: 90792 - DNA, 630 bp, Artificial Sequence
  derived and/or modified sequence
gggttagatcgtcaggtgagggaggaagggatagccagcgcgaaggaagtgctggagtcgtgtgttttggctgcgcgtgatcctgcgtgggtcgggaggtgtttctgtgtaggtgtctggccctttcatcagtcgtgcggaggaccgcgtgatttccttccagttctcctcggttttcaggaaaagcctaaagattagactgtaagaaaagaaaatagaagccatgtttcgaagacctgtattacaggtacttcgtcagtttgtaagacatgagtccgaaacaactaccagtttggttcttgaaagatccctgaatcgtgtgcacttacttgggcgagtgggtcaggaccctgtcttgagacaggtggaaggaaaaaatccagtcacaatattttctctagcaactaatgagatgtggcgatcaggggatagtgaagtttaccaactgggtgatgtcagtcaaaagacaacatggcacagaatatcagtattccggccaggcctcagagacgtggcatatcaatatgtgaaaaaggggtctcgaatttatttggaagggaaaatagactatggtgaatacatggataaaaataatgtgaggcgacaagcaacaacaatcatagctgataa

SEQ ID NO: 90793 - DNA, 989 bp, Artificial Sequence
  derived and/or modified sequence
acctctccctatggtgtggctggctagcccgggggtctctacgctgcttggtctttgttaacggagatgaaggcagtaatttttcagtaacaggtttcagatataagtcccttggtgatgctaatatttatggaggccttactatgcattaagaacttttttagaagtttagaaaatggcagtgaataaagcagatacaaatctctgctctaagggagcttgcatagtaatgaaatttgagaagacagtggattggaagtgggattaactcagaatcaaaattttgtcgatgggttggaggaagaggaagttatttgggaccaaaaagacatacaggtgtgagtttatttgggagggaggaaggaatcctcatcagatgtgcaggaatgttggaaaagcctaaagattagactgtaagaaaagaaaatagaagccatgtttcgaagacctgtattacaggtacttcgtcagtttgtaagacatgagtccgaaacaactaccagtttggttcttgaaagatccctgaatcgtgtgcacttacttgggcgagtgggtcaggaccctgtcttgagacaggtggaaggaaaaaatccagtcacaatattttctctagcaactaatgagatgtggcgatcaggggatagtgaagtttaccaactgggtgatgtcagtcaaaagacaacatggcacagaatatcagtattccggccaggcctcagagacgtggcatatcaatatgtgaaaaaggggtctcgaatttatttggaagggaaaatagactatggtgaatacatggataaaaataatgtgaggcgacaagcaacaacaatcatagctgataatattatatttctgagtgaccagacgaaagagaaggagtagaaaggatgattcttctttggccatcatttggtacagtctcatttccaagtcatgtataatctttatggcttccaaggacaagaattaaaatactcttttacgtaaaa

SEQ ID NO: 90794 - DNA, 447 bp, Artificial Sequence
  derived and/or modified sequence
atgttcagacgccccgtgttgcaggtccttcggcagtttgtcaggcacgagtctgaaacgactacttcactggtgcttgagaggagtctcaatcgggtacatctgttgggcagagtggggcaggatcccgttctcagacaggtggaaggtaaaaatccagtgactattttctcactcgccactaatgagatgtggcggtctggagactctgaggtgtaccaattgggcgatgtctcccagaaaaccacttggcaccgcatcagcgtgttccggccaggacttagagatgttgcgtaccagtacgtgaagaagggctcccgtatctacctcgaggggaaaatcgattacggcgagtacatggataaaaacaacgtgagacgacaggcaaccaccatcatcgccgataacatcattttcctgagcgatcagactaaagagaaagagtag

SEQ ID NO: 90795 - DNA, 366 bp, Artificial Sequence
  derived and/or modified sequence
atgttcaggagaccagtactgcaggtgctgaggcagttcgtgcgacacgagtccgaaaccactacatccctggtcctggagcgcagtctcaaccgggttcatctgctcggacgggttggccaggatcccgtgctacggcaggtggaagggaagaatcctgtgacaatctttagcctagctactaatgagatgtggaggtccggagattccgaagtttaccaattaggggacgtgtcacagaagactacttggcatcgcattagtgtatttcgaccggggttgagagacgtcgcttatcagtatgtgaaaaagggaagccgaatatacctggagggtaaaattgactacggagagtacatggactag

SEQ ID NO: 90796 - DNA, 447 bp, Artificial Sequence
  derived and/or modified sequence
atgttcaggagacctgtgcttcaggttttgagacagttcgtgaggcatgagagtgagacaaccacttctctggtgcttgaaaggagcctgaatagggtccacctcctgggacgtgtgggccaagacccagtgctgagacaggtcgagggcaagaaccctgtgaccatattctccttagcaaccaacgaaatgtggcgcagtggcgacagcgaagtgtaccagctgggagatgtgtcacagaaaactacgtggcaccggatcagcgtgttccgccctggcctgagagatgtggcctatcagtatgtgaagaaagggtcgagaatttacctggagggcaagatcgactacggcgaatatatggacaaaaataacgttcgtaggcaggcaacaaccatcatcgcggacaacatcatcttcctgagcgaccagaccaaagagaaggagtag

SEQ ID NO: 90797 - DNA, 408 bp, Artificial Sequence
  derived and/or modified sequence
atgtttaggcgcccagtcctacaggtgctgcggcagttcgtccgacatgaaagtgaaacgacaacaagtctagtcttggagcggtccttgaacagggtacacctactcggccgggttggccaggacccggtcttgcgacaagtggagggcaagaatccggtcaccatcttctcgcttgccactaatgagatgtggagatccggggatagtgaggtctatcaactcggtgacgtgtcacaaaagacaacatggcacaggattagtgtttttcgtcctggactcagggacgttgcatatcaatacgttaagaagggcagcagaatctacttggaggggaaaatcgactacggggagtacatggacaagaataatgttcgcagacaggccacgactataattgctgactag

SEQ ID NO: 90798 - DNA, 87 bp, Artificial Sequence
  derived and/or modified sequence
atgtttcgcagacctgttctacaagtccttcgtcagttcgtgaggcacgagagtgaaacgaccactagcctggtactcgaacgctag

SEQ ID NO: 90799 - DNA, 447 bp, Artificial Sequence
  derived and/or modified sequence
atgtttcgtcgccctgtattgcaggtgcttcgccagtttgtgcggcacgagtccgaaactactactagccttgtgctggagcggtcccttaacagagtgcatttactgggtagggtgggacaggatcccgtcctgaggcaggtggagggtaagaacccagtgacaatcttttctctggcaaccaacgagatgtggcggagcggggacagcgaggtttatcagctcggcgatgtgagccagaagaccacatggcataggatctccgtattcagacctggactccgagacgttgcctaccagtacgtaaagaagggctcaaggatatatcttgagggtaaaattgattatggtgagtacatggataaaaataacgttcgcagacaagcgactacaataattgcggataacataatctttctgagcgaccagaccaaggaaaaggagtag

SEQ ID NO: 90800 - DNA, 447 bp, Artificial Sequence
  derived and/or modified sequence
atgttcagaagaccagtcctgcaggtgctgcggcagtttgtcagacacgagagcgagactacaacgtctctggtgttggagcgtagccttaacagggtgcacctattgggcagggtgggccaggaccccgttcttcgccaggtggagggcaagaacccagtgacaatctttagcctggcgaccaacgagatgtggcgaagcggcgattccgaggtttaccagcttggcgatgtttcccaaaaaacaacatggcaccggatatcagtcttccggcctggtctccgcgatgtggcttaccagtacgttaaaaaaggtagccggatctatttggaggggaaaattgattatggcgaatacatggataagaataacgtacggcgacaggctacaaccatcatcgctgacaatatcatctttctgagtgaccagacaaaagaaaaagaatag

SEQ ID NO: 90801 - DNA, 447 bp, Artificial Sequence
  derived and/or modified sequence
atgttccgacgccccgtcttgcaggttctgagacaattcgtgcggcatgaatctgagaccacaacatcactggttctcgaacgatccctcaaccgcgtgcacctgttgggaagagttggccaggatccggtgctgcggcaggtggaaggcaagaatcctgtgaccatcttttctctggcaacaaacgagatgtggcgctctggcgactccgaagtataccagctgggggatgttagccaaaagacgacatggcatagaatttccgtcttcagacctggactgagggacgtcgcctatcagtacgttaagaagggaagtcgaatctacctagaaggcaagattgactatggcgagtatatggataagaataacgtgaggagacaagccactacaataatcgcggataacatcatcttcctgagcgaccaaacaaaggaaaaggagtag

SEQ ID NO: 90802 - DNA, 366 bp, Artificial Sequence
  derived and/or modified sequence
atgttcagaagacctgtgctgcaggtgctgcggcagtttgtgagacatgagagcgagaccaccaccagcctggtgctggagaggagcctgaacagagtgcacctgctgggccgggtgggccaggaccctgtgctgcggcaggtggagggcaagaaccctgtgaccatcttcagcctggccaccaatgagatgtggaggtctggggacagcgaggtgtaccagctgggagatgtgtcccagaagaccacctggcaccgcatcagcgtcttccggcccggcctgagagatgtggcctaccagtatgtgaagaagggcagccgcatctacctggagggcaagattgattatggagagtacatggactag

SEQ ID NO: 90803 - DNA, 87 bp, Artificial Sequence
  derived and/or modified sequence
atgttcagaagacctgtgctgcaggtgctgcggcagtttgtgagacatgagagcgagaccaccaccagcctggtgctggagaggtag

SEQ ID NO: 90804 - DNA, 447 bp, Artificial Sequence
  derived and/or modified sequence
atgttccggcggcccgtgctgcaggtgctgcggcagttcgtgcggcacgaatccgaaaccacaacctcattagtcctggaacgcagtctcaacagggtgcacttactggggcgggtcggccaggaccccgtgctccgccaagttgagggcaaaaatcccgtgacgatattctccttagccaccaacgagatgtggcgcagcggcgatagtgaagtttatcaactcggcgatgttagccagaagacgacttggcacagaatctccgtgtttagaccaggcctacgggacgtcgcgtatcagtacgtgaagaaagggagccggatctacttagagggcaaaatcgactacggagaatatatggataagaacaatgtgcgcaggcaagctaccacaataattgcagataacataattttcctgtcagaccagactaaggaaaaggaatag

SEQ ID NO: 90805 - DNA, 366 bp, Artificial Sequence
  derived and/or modified sequence
atgttccggcggcccgtgctgcaggtgctgcggcagttcgtgcggcacgagtcagagaccacaacatccttggttctggagcgttctctcaatcgcgtgcacctgctagggagggtaggccaggaccccgtgctgcgtcaagtggagggcaagaatccggtgaccattttctccctggcaactaatgagatgtggcggagtggagatagcgaagtttaccagctgggagacgtgagtcaaaagacgacctggcaccgaataagtgtgttccgccccgggctgcgtgatgtggcatatcagtatgtcaaaaaaggctcccgcatttatctggaggggaaaatcgattacggagagtacatggattag

SEQ ID NO: 90806 - DNA, 447 bp, Artificial Sequence
  derived and/or modified sequence
atgttccggcggcccgtgctgcaggtgctgcggcagttcgtgcggcatgaatcggaaacaaccacaagcctcgtgctagagaggagcctgaatcgcgtgcacctgctcgggagagtgggccaggatcccgtgctccgtcaggtggagggcaaaaatcccgtcactattttctccctcgccaccaacgaaatgtggcggtcaggcgattcagaagtttatcagctgggagatgtgtcccagaagacaacgtggcatcgaatttctgttttccgccctgggttgagggatgtcgcttatcagtacgtgaaaaaaggatccaggatttatctggagggaaaaatagattatggagagtatatggataagaacaacgttcggaggcaagcaacgaccatcatcgccgataatattatatttctgtcagaccaaactaaggagaaggaatag

SEQ ID NO: 90807 - DNA, 408 bp, Artificial Sequence
  derived and/or modified sequence
atgttccggcggcccgtgctgcaggtgctgcggcagttcgtgcggcatgagtctgagactacgacttctctggtcctggagaggagtctgaatagggtgcatctgctgggccgtgtagggcaggaccccgttttacgacaggttgagggcaagaatcccgttaccatcttcagcctggccaccaacgaaatgtggcggagtggagattcagaggtgtatcagcttggcgatgttagtcagaaaaccacatggcatagaatctctgtgtttcgccccgggctgcgggatgttgcctaccaatatgtgaaaaaaggatccagaatttacttggaggggaagatcgattatggagagtacatggacaagaataacgtgcgtagacaagctaccacgatcatcgccgattag

SEQ ID NO: 90808 - DNA, 87 bp, Artificial Sequence
  derived and/or modified sequence
atgttccggcggcccgtgctgcaggtgctgcggcagttcgtgcggcacgagagcgaaacgaccacatccctggttttggagagatag

SEQ ID NO: 90809 - DNA, 447 bp, Artificial Sequence
  derived and/or modified sequence
atgttccggcggcccgtgctgcaggtgctgcggcagttcgtgcggcacgagtcggaaacaacaacgagtcttgtgctggagagatcccttaatcgggttcaccttctgggccgcgttggccaggaccccgtcctgcgccaggttgaggggaaaaatcctgtcaccatcttctcactagccaccaatgagatgtggcgatctggagattccgaggtttaccaattaggagacgtgtctcagaagaccacctggcacaggattagcgtgttccgccccggactaagggacgtggcgtatcagtatgtgaagaaagggtctaggatatacctggagggcaagatcgattatggtgaatatatggacaagaataacgtaagacgtcaagccaccactataatagctgacaacatcattttcctgtcagaccagacaaaggaaaaagaatag

SEQ ID NO: 90810 - DNA, 447 bp, Artificial Sequence
  derived and/or modified sequence
atgttccggcggcccgtgctgcaggtgctgcggcagttcgtgcggcacgaaagcgagactacaaccagcctcgtgctggagcgatccctgaacagagtgcacttgctcggaagggttggccaggaccctgtgctcagacaagtcgagggtaaaaaccccgtcaccatcttttctctggctaccaacgaaatgtggcgaagcggagacagtgaggtgtaccagctaggagacgtgtcacagaagaccacatggcacagaataagtgtattccgccccgggttacgggatgtggcctatcaatacgtcaaaaagggctctcgcatctatctggaggggaaaattgattatggagaatatatggataagaacaatgtacggcgccaggccaccacaataatagcggataacattatctttctgagcgaccagactaaagaaaaggagtag

SEQ ID NO: 90811 - DNA, 447 bp, Artificial Sequence
  derived and/or modified sequence
atgttccggcggcccgtgctgcaggtgctgcggcagttcgtgcggcacgaatccgaaacaactacttccctcgtcttagaaaggagtctgaaccgtgtccatctgctgggtagagtcgggcaagatccagtgttgagacaggtcgaagggaagaatccagtgaccattttctccctagctacaaacgagatgtggcggagcggcgactccgaggtttaccaactcggcgatgtgtcccagaagactacctggcaccgcatatctgtgtttcgaccaggcctgcgggacgttgcctatcaatacgtgaaaaaggggtcgcgcatctacctcgaggggaagatcgattatggagagtatatggacaaaaataacgtgcgcaggcaagctactactataatcgcggacaatatcattttcctgagcgatcaaactaaggaaaaggaatag

SEQ ID NO: 90812 - DNA, 447 bp, Artificial Sequence
  derived and/or modified sequence
atgtttcgacgtccagttctgcaggtgctgcgccagtttgttagacacgaatctgagaccaccactagcctggtcctggagagatcactgaacagggtgcacttattgggcagggtgggccaagaccccgtgttgcgccaagttgaaggtaaaaatcccgttacaatcttttcccttgccacgaatgaaatgtggcggtctggtgattctgaagtgtaccaactgggagacgtttcgcagaagacgacatggcatagaataagcgtattcaggcctggacttcgggatgtggcttatcaatacgttaagaaagggagcagaatctatttggagggcaaaatagattacggcgagtatatggacaagaacaacgtcagacgccaggctaccaccatcatcgctgataatattatctttctgtccgatcagacaaaggagaaggaatag

SEQ ID NO: 90813 - DNA, 366 bp, Artificial Sequence
  derived and/or modified sequence
atgttccgcagacccgtgctgcaagtcctgagacagttcgtgcgccatgaatctgaaacaacaaccagcctagtgttagaaagatcacttaatagagtgcatcttttaggacgcgtgggccaggatccagtcctacgccaggttgaggggaaaaacccggtcacaatatttagcttagccactaatgagatgtggagaagtggcgattccgaagtgtatcagttaggtgacgtgtcacaaaagacaacatggcaccgaatatcagtgttccgcccagggctgagagatgttgcgtatcagtacgtgaaaaaaggcagccgcatatacttagagggcaaaatagattacggtgagtacatggactag

SEQ ID NO: 90814 - DNA, 447 bp, Artificial Sequence
  derived and/or modified sequence
atgttccggagacccgtcttacaggttctgcgacagttcgttcgacatgaaagcgagactaccacttccttagtgctggagcgatcattaaaccgcgtgcacctgctcggacgggtggggcaagaccctgttctgcgtcaagttgaggggaagaacccagttaccatattttcactggctactaatgagatgtggagatcaggtgatagcgaggtgtaccagctgggggacgtgtcacagaagaccacatggcatagaatctctgtgtttagacccggactgcgcgatgtcgcctatcagtacgtcaaaaagggctctcggatatacctcgagggtaaaattgactacggcgaatacatggataaaaacaacgtgcgccgtcaggcaacaaccatcattgccgacaatataatcttccttagcgatcagactaaggagaaagagtag

SEQ ID NO: 90815 - DNA, 408 bp, Artificial Sequence
  derived and/or modified sequence
atgtttcggagaccagtgttgcaggtccttcggcagttcgtgcgacatgaatctgagactacaaccagcctggtgctggagcgaagtctgaaccgggttcatctcctcggacgcgtggggcaggaccccgtgttacggcaggttgagggaaaaaatccagtaactattttttcacttgctacaaatgagatgtggcgatccggcgactccgaggtctaccagctcggagatgtctcacaaaagacaacttggcataggatatccgtgttccgtcccggtctgcgcgatgttgcctatcaatacgtgaagaagggatcacgtatttatctagagggcaaaatagattacggggagtacatggataaaaacaatgtgcgcaggcaggctaccacgattattgctgactag

SEQ ID NO: 90816 - DNA, 87 bp, Artificial Sequence
  derived and/or modified sequence
atgttcagacgtccagttctgcaggtgctccgccagttcgtaagacacgaaagcgaaaccacaacgtcactcgttctggagcggtag

SEQ ID NO: 90817 - DNA, 447 bp, Artificial Sequence
  derived and/or modified sequence
atgttccgtcggccagtcttacaggtgctgaggcagtttgttcgccatgagtctgagactaccacgagtctcgtactcgagcgttcactgaatcgggtgcatctgctcggcagggtgggacaggatccagtgcttcgccaggtcgaagggaagaacccagtgacaatcttttctctggcaactaatgagatgtggaggtcaggggactcagaggtttaccaactgggtgacgtgagccagaagactacctggcaccgtatcagtgtgttccgtcctggcctcagagacgtggcttaccaatacgtgaagaagggctcccggatttacctagagggtaagatcgactacggggagtacatggataaaaacaacgtgcggcgtcaggctaccaccatcattgctgacaacattattttcctcagtgatcagacaaaagagaaggagtag

SEQ ID NO: 90818 - DNA, 447 bp, Artificial Sequence
  derived and/or modified sequence
atgttcaggcggcctgtactgcaagtcttacgccagttcgttcgacacgagagtgaaactaccacatctctggtgctggagcgctccctgaatagagtccacctgttggggagggtaggacaggatcctgtactgagacaggtagagggcaaaaaccctgtgactatattcagcctcgctacaaatgagatgtggagatccggggactcagaggtgtatcagttgggtgacgtgagccagaaaacgacctggcatcgcatcagtgtttttcgaccaggcctccgcgacgttgcctatcagtacgtaaaaaagggatcccgaatttacttggaggggaagatcgactatggggagtacatggacaaaaacaacgtgaggagacaggctacaaccatcattgccgacaacatcattttcctaagcgaccaaacaaaggaaaaggaatag

SEQ ID NO: 90819 - DNA, 447 bp, Artificial Sequence
  derived and/or modified sequence
atgttcagacggcctgtgctccaagttctgcgacagttcgtgagacacgaatctgaaaccacgacgtccctagtcctcgaacggtccttgaatcgggtgcacctgctggggagggttggtcaggacccagtacttaggcaagtggaggggaaaaatcccgtaaccattttcagcctcgctaccaacgagatgtggcgttccggggacagcgaagtgtaccagttgggggacgtttcccaaaagacgacatggcaccgaatatctgtgttcagacccggattgcgcgacgtggcttaccagtatgtgaagaagggcagcaggatatatctggagggtaaaatcgactacggtgaatacatggacaaaaataatgttcggaggcaggcaacaacaatcatcgctgataacattatttttctcagcgatcagacaaaggagaaggagtag

SEQ ID NO: 90820 - DNA, 600 bp, Artificial Sequence
  derived and/or modified sequence
agatcgtcaggtgagggaggaagggatagccagcgcgaaggaagtgctggagtcgtgtgttttggctgcgcgtgatcctgcgtgggtcgggaggtgtttctgtgtaggtgtctggccctttcatcagtcgtgcggaggaccgcgtgatttccttccagttctcctcggttttcaggtggtggcgccatcttcggaaaagcctaaagattagactgtaagaaaagaaaatagaagccatgtttcgaagacctgtattacaggtacttcgtcagtttgtaagacatgagtccgaaacaactaccagtttggttcttgaaagatccctgaatcgtgtgcacttacttgggcgagtgggtcaggaccctgtcttgagacaggtggaaggaaaaaatccagtcacaatattttctctagcaactaatgagatgtggcgatcaggggatagtgaagtttaccaactgggtgatgtcagtcaaaagacaacatggcacagaatatcagtattccggccaggcctcagagacgtggcatatcaatatgtgaaaaaggggtctcgaatttatttggaagggaaaatagactatggtgaatacatggata

SEQ ID NO: 90821 - DNA, 731 bp, Artificial Sequence
  derived and/or modified sequence
tagatcgtcaggaaaagcctaaagattagactgtaagaaaagaaaatagaagccatgtttcgaagacctgtattacaggtacttcgtcagtttgtaagacatgagtccgaaacaactaccagtttggttcttgaaagatccctgaatcgtgtgcacttacttgggcgagtgggtcaggaccctgtcttgagacaggtggaaggaaaaaatccagtcacaatattttctctagcaactaatgagatgtggcgatcaggggatagtgaagtttaccaactgggtgatgtcagtcaaaagacaacatggcacagaatatcagtattccggccaggcctcagagacgtggcatatcaatatgtgaaaaaggggtctcgaatttatttggaagggaaaatagactatggtgaatacatggataaaaataatgtgaggcgacaagcaacaacaatcatagctgataatattatatttctgagtgaccagacgaaagagaaggagtagaaaggatgattcttctttggccatcatttgggattctgacacagccagcagcagtacgtgttcatcagcactgaagcagggcacctcctgattcagcagagagaccctcccctccccagccatgttggcggctgccctaggattgctgatgcccattgcaggggctgaatttctcattggcctggttggaaatggagtccctgtggtctgcagttttagaggatgggtca

SEQ ID NO: 90822 - DNA, 470 bp, Artificial Sequence
  derived and/or modified sequence
gtccacctctccctatggtgtggctggctagcccgggggtctctacgctgcttggtctttgttaacggagatgaaggcagtaatttttcagtaacaggtttcagatataagtcccttggtgatgctaatatttatggaggccttactatgcattaagaacttttttagaagtttagaaaatggcagtgaataaagcagatacaaatctctgctctaagggagcttgcatagtaatgaaatttgagaagacagtggattggaagtgggattaactcagaatcaaaattttgtcgatgggttggaggaagaggaagttatttgggaccaaaaagacatacaggtgaaaagcctaaagattagactgtaagaaaagaaaatagaagccatgtttcgaagacctgtattacaggtacttcgtcagtttgtaagacatgagtccgaaacaactaccagtttggttcttgaaagat

SEQ ID NO: 90823 - DNA, 676 bp, Artificial Sequence
  derived and/or modified sequence
ggtgtccacctctccctatggtgtggctggctagcccgggggtctctacgctgcttggtctttgttaacggagatgaaggaaaagcctaaagattagactgtaagaaaagaaaatagaagccatgtttcgaagacctgtattacaggtacttcgtcagtttgtaagacatgagtccgaaacaactaccagtttggttcttgaaagatccctgaatcgtgtgcacttacttgggcgagtgggtcaggaccctgtcttgagacaggtggaaggaaaaaatccagtcacaatattttctctagcaactaatgagatgtggcgatcaggggatagtgaagtttaccaactgggtgatgtcagtcaaaagacaacatggcacagaatatcagtattccggccaggcctcagagacgtggcatatcaatatgtgaaaaaggggtctcgaatttatttggaagggaaaatagactatggtgaatacatggataaaaataatgtgaggcgacaagcaacaacaatcatagctgataatattatatttctgagtgaccagacgaaagagaaggagtagaaaggatgattcttctttggccatcatttggtacagtctcatttccaagtcatgtataatctttatggcttccaaggacaagaattaaaatactcttttacgtaaaa

SEQ ID NO: 90824 - DNA, 366 bp, Artificial Sequence
  derived and/or modified sequence
atgttcagaagacccgtgctgcaggtgctgagacagttcgtgagacacgagagcgagaccaccaccagcctggtgctggagagaagcctgaacagagtgcacctgctgggcagagtgggccaggaccccgtgctgagacaggtggagggcaagaaccccgtgaccatcttcagcctggccaccaacgagatgtggagaagcggcgacagcgaggtgtaccagctgggcgacgtgagccagaagaccacctggcacagaatcagcgtgttcagacccggcctgagagacgtggcctaccagtacgtgaagaagggcagcagaatctacctggagggcaagatcgactacggcgagtacatggactag

SEQ ID NO: 90825 - DNA, 87 bp, Artificial Sequence
  derived and/or modified sequence
atgttcagaagacccgtgctgcaggtgctgagacagttcgtgagacacgagagcgagaccaccaccagcctggtgctggagagatag

SEQ ID NO: 90826 - protein, 644 aa, Artificial Sequence
  derived and/or modified sequence
MEIPAPEPEKTALSSQDPALSLKENLEDISGWGLPEARSKESVSFKDVAVDFTQEEWGQLDSPQRALYRDVMLENYQNLLALGPPLHKPDVISHLERGEEPWSMQREVPRGPCPEWELKAVPSQQQGICKEEPAQEPIMERPLGGAQAWGRQAGALQRSQAAPWAPAPAMVWDVPVEEFPLRCPLFAQQRVPEGGPLLDTRKNVQATEGRTKAPARLCAGENASTPSEPEKFPQVRRQRGAGAGEGEFVCGECGKAFRQSSSLTLHRRWHSREKAYKCDECGKAFTWSTNLLEHRRIHTGEKPFFCGECGKAFSCHSSLNVHQRIHTGERPYKCSACEKAFSCSSLLSMHLRVHTGEKPYRCGECGKAFNQRTHLTRHHRIHTGEKPYQCGSCGKAFTCHSSLTVHEKIHSGDKPFKCSDCEKAFNSRSRLTLHQRTHTGEKPFKCADCGKGFSCHAYLLVHRRIHSGEKPFKCNECGKAFSSHAYLIVHRRIHTGEKPFDCSQCWKAFSCHSSLIVHQRIHTGEKPYKCSECGRAFSQNHCLIKHQKIHSGEKSFKCEKCGEMFNWSSHLTEHQRLHSEGKPLAIQFNKHLLSTYYVPGSLLGAGDAGLRDVDPIDALDVAKLLCVVPPRAGRNFSLGSKPRN

SEQ ID NO: 90827 - protein, 612 aa, Artificial Sequence
  derived and/or modified sequence
MEIPAPEPEKTALSSQDPALSLKENLEDISGWGLPEARSKESVSFKDVAVDFTQEEWGQLDSPQRALYRDVMLENYQNLLALEWELKAVPSQQQGICKEEPAQEPIMERPLGGAQAWGRQAGALQRSQAAPWAPAPAMVWDVPVEEFPLRCPLFAQQRVPEGGPLLDTRKNVQATEGRTKAPARLCAGENASTPSEPEKFPQVRRQRGAGAGEGEFVCGECGKAFRQSSSLTLHRRWHSREKAYKCDECGKAFTWSTNLLEHRRIHTGEKPFFCGECGKAFSCHSSLNVHQRIHTGERPYKCSACEKAFSCSSLLSMHLRVHTGEKPYRCGECGKAFNQRTHLTRHHRIHTGEKPYQCGSCGKAFTCHSSLTVHEKIHSGDKPFKCSDCEKAFNSRSRLTLHQRTHTGEKPFKCADCGKGFSCHAYLLVHRRIHSGEKPFKCNECGKAFSSHAYLIVHRRIHTGEKPFDCSQCWKAFSCHSSLIVHQRIHTGEKPYKCSECGRAFSQNHCLIKHQKIHSGEKSFKCEKCGEMFNWSSHLTEHQRLHSEGKPLAIQFNKHLLSTYYVPGSLLGAGDAGLRDVDPIDALDVAKLLCVVPPRAGRNFSLGSKPRN

SEQ ID NO: 90828 - protein, 69 aa, Artificial Sequence
  derived and/or modified sequence
MEIPAPEPEKTALSSQDPALSLKENLEDISGWGLPEARSKSLALVTQAGVQWRNLGSLQPPPLGFKQFS

SEQ ID NO: 90829 - DNA, 3868 bp, Artificial Sequence
  derived and/or modified sequence
ttttgtgggagtccggtctgtccacttgccggtccctcagaccgtcggcggtctctgtccgcttcgggacctgtccgctggtcgctccgcgtccgatggctcctggccgcggaaccttaggcctggccctggtctccgagcgcgggttcgccgggaggagcgtgtggcgggggtgtgccggggcgtgagtgcgccgagcatggggctgagcctggtgtggggagtgggtatctgcggagccggcctgaaccccacctcagccgggcgcggggagggggctccgtgcgtgtgatcgtgcagctgtgagcgcgtggccgccccgcggggctccgctgcaggcccctcagccccaggagcagtactcgctcttcagggcctgccctggatcctggaggctacacagctgcccactcctcctggggaggctgccgtggaggccatggagatccctgccccggagcccgagaagacagctctttcctctcaggatcctgctctttccctgaaagagaatctcgaggatatatcgggttggggtcttcccgaagccaggtccaaggaatcggtgagtttcaaggatgtggctgtggacttcacccaggaggagtggggtcaactagactcccctcagagggccttgtaccgggatgtgatgttggagaactaccagaaccttcttgccctaggacctccactgcacaagccagatgtgatctctcatctggaacgaggcgaggagccatggagcatgcagagggaagtccccagagggccctgtccagaatgggagctgaaggcggtgccctctcaacagcagggcatttgcaaagaagaaccggcccaggagcccatcatggagcggcccctcggcggggcgcaggcgtgggggcgccaggcaggtgctctgcagaggagtcaggctgcgccctgggcgcccgcacctgccatggtctgggacgtccctgtagaggaattccccctcaggtgtcccctcttcgcccagcaacgcgttcccgaggggggacccttgctggacacacgcaagaacgtccaggccactgagggcagaaccaaggcccccgcgagactgtgtgcaggggaaaacgcctccacgccaagtgagccagaaaagttcccccaggtgcgccggcagcgcggggcgggcgccggggagggcgagttcgtgtgcggcgagtgcgggaaggcgttccgccagagctcctccctcacgctgcaccggcgctggcacagccgggagaaggcttacaagtgcgatgaatgcggcaaggccttcacctggagcaccaaccttctggagcaccggcgcatccacaccggcgagaagcccttcttctgcggcgagtgcgggaaggccttcagctgccactcgtccctcaacgtgcaccagcgcatccacacgggcgagcggccctacaagtgcagcgcctgcgagaaggccttcagctgcagctcgctgctcagcatgcacctgcgggtgcacaccggcgagaagccctaccggtgcggcgagtgcggcaaggccttcaaccagcgtacacacctcacacgccaccaccgcatccacacgggcgagaagccctaccagtgcggctcctgcggcaaggccttcacctgccactcatccctcaccgtgcatgagaagatccacagcggggacaagccgttcaagtgcagcgactgcgagaaggccttcaacagccgctcgcgcctcaccctccaccagaggacgcacacgggcgagaagcccttcaagtgcgccgactgcgggaagggcttcagctgccacgcgtacctgctcgtgcaccggcgcatccacagcggcgagaagcccttcaagtgcaacgagtgcggcaaagccttcagctcccacgcctacctcatcgtgcaccggcgcatccacacaggcgagaagcccttcgactgcagccagtgttggaaggccttcagctgccactcgtccctcatcgtgcaccagcgcatccacaccggtgagaagccctacaagtgcagcgagtgcggcagagccttcagccagaaccactgtctcattaaacatcagaaaatccactccggggagaagtcgtttaagtgtgagaaatgtggggagatgttcaactggagctcgcacctcactgagcaccagaggctgcacagcgaggggaagcccttggccatccagttcaacaaacacctgctcagcacatactacgtgcctggcagcctgctgggtgcaggggatgctggactgagggacgtggatcccatcgacgcgctggatgtggcaaagctcttgtgcgtggttccccccagagctggcaggaatttctccctggggagcaaacctcgaaactaacatgatgtgctttggtgtcagtagctgctttctgagctactcaacaaggaaagcaccctggtcctccctggctcctagatccagaccaccttcctccaggtgtgggagccttgccttatcacccccatcaggtctgcatgccagggtgcctcctctagttaaagtcagtcacctccccagaagggccacactccaggaggagtgttgagagtcatttgaggtagtcttgccacctgttttccttgatgggcctggaagttgttgacaaggggaaagatctttcttgccaataaaaagaagggatatcgttgggtgccatggctcacacctgtaatcttaacactgtgggaggccaaggcaaggggatcacttgagcccaggagtctaggaccagcctggacaacatggtgagacctcgtctctacaaaaaatgcaaaaattagccagatgtggcggcatgtccctgtggtcccagctactcaggaggctgaggtgggaggatcatttgagcctaggaggtcaaggctgcagtgagccatgattcacagcactgcactgcagcctgggtgacaaagcaagaccctgtgtgaaattaaaaggaggtatatcaactgttgtatcctcggacgggctcctgacacggctttaatcaggagtttcctccataaactattattttcagaataataataaaacaagaattatgactagcatcactttccagtgaacattattatattgctagagaggagaataatcttgggtggtgggcatttggaaaaagtgaatttcctggacttaactcatgtaaatagctctactgcagagctgtgtgtttagtgacagtgcagtcaggggcattcccacagctgtcacagcacggcccagcatcattgtagccagatcctaacatgccaacatcacctcttgccatttagcccctagtgagaaattgggagctaccaggcaggtgcccagtgcattcagggaagatgggcacaacatcaggatgggtgtgtctggaagctcctcttcactgaccagggctgggcagggccaccctgggctggtgaggctgccctgcagggcttctcactatgtagcaccagtcaccagcccaggtcacagaagaagcccctcccagcacccactggagaggggaagctgaagcccagggagacgggctccatggtggtcccacatggagctgttttgcaaaccctggaaaaggcggctctccctgtcccaacactcttcagagacaggaagacagagttaatcttgaatgaatgttatttctacttagtcctaagcaagaataagctgccctcttggtgatcatactttatacggagtgctatcgtttatgaaatgctttcagtatgctttttaaattatgcaggcaaaataaccacacttcagaaaatgtggacttctgaaaaataaaatccccataattcttaataaaactgccttttgcactttgatacatta

SEQ ID NO: 90830 - DNA, 1935 bp, Artificial Sequence
  derived and/or modified sequence
atggagatccccgcccccgagcccgagaagaccgccctgagcagccaggaccccgccctgagcctgaaggagaacctggaggacatcagcggctggggcctgcccgaggccagaagcaaggagagcgtgagcttcaaggacgtggccgtggacttcacccaggaggagtggggccagctggacagcccccagagagccctgtacagagacgtgatgctggagaactaccagaacctgctggccctgggcccccccctgcacaagcccgacgtgatcagccacctggagagaggcgaggagccctggagcatgcagagagaggtgcccagaggcccctgccccgagtgggagctgaaggccgtgcccagccagcagcagggcatctgcaaggaggagcccgcccaggagcccatcatggagagacccctgggcggcgcccaggcctggggcagacaggccggcgccctgcagagaagccaggccgccccctgggcccccgcccccgccatggtgtgggacgtgcccgtggaggagttccccctgagatgccccctgttcgcccagcagagagtgcccgagggcggccccctgctggacaccagaaagaacgtgcaggccaccgagggcagaaccaaggcccccgccagactgtgcgccggcgagaacgccagcacccccagcgagcccgagaagttcccccaggtgagaagacagagaggcgccggcgccggcgagggcgagttcgtgtgcggcgagtgcggcaaggccttcagacagagcagcagcctgaccctgcacagaagatggcacagcagagagaaggcctacaagtgcgacgagtgcggcaaggccttcacctggagcaccaacctgctggagcacagaagaatccacaccggcgagaagcccttcttctgcggcgagtgcggcaaggccttcagctgccacagcagcctgaacgtgcaccagagaatccacaccggcgagagaccctacaagtgcagcgcctgcgagaaggccttcagctgcagcagcctgctgagcatgcacctgagagtgcacaccggcgagaagccctacagatgcggcgagtgcggcaaggccttcaaccagagaacccacctgaccagacaccacagaatccacaccggcgagaagccctaccagtgcggcagctgcggcaaggccttcacctgccacagcagcctgaccgtgcacgagaagatccacagcggcgacaagcccttcaagtgcagcgactgcgagaaggccttcaacagcagaagcagactgaccctgcaccagagaacccacaccggcgagaagcccttcaagtgcgccgactgcggcaagggcttcagctgccacgcctacctgctggtgcacagaagaatccacagcggcgagaagcccttcaagtgcaacgagtgcggcaaggccttcagcagccacgcctacctgatcgtgcacagaagaatccacaccggcgagaagcccttcgactgcagccagtgctggaaggccttcagctgccacagcagcctgatcgtgcaccagagaatccacaccggcgagaagccctacaagtgcagcgagtgcggcagagccttcagccagaaccactgcctgatcaagcaccagaagatccacagcggcgagaagagcttcaagtgcgagaagtgcggcgagatgttcaactggagcagccacctgaccgagcaccagagactgcacagcgagggcaagcccctggccatccagttcaacaagcacctgctgagcacctactacgtgcccggcagcctgctgggcgccggcgacgccggcctgagagacgtggaccccatcgacgccctggacgtggccaagctgctgtgcgtggtgccccccagagccggcagaaacttcagcctgggcagcaagcccagaaactag

SEQ ID NO: 90831 - DNA, 1839 bp, Artificial Sequence
  derived and/or modified sequence
atggagatccccgcccccgagcccgagaagaccgccctgagcagccaggaccccgccctgagcctgaaggagaacctggaggacatcagcggctggggcctgcccgaggccagaagcaaggagagcgtgagcttcaaggacgtggccgtggacttcacccaggaggagtggggccagctggacagcccccagagagccctgtacagagacgtgatgctggagaactaccagaacctgctggccctggagtgggagctgaaggccgtgcccagccagcagcagggcatctgcaaggaggagcccgcccaggagcccatcatggagagacccctgggcggcgcccaggcctggggcagacaggccggcgccctgcagagaagccaggccgccccctgggcccccgcccccgccatggtgtgggacgtgcccgtggaggagttccccctgagatgccccctgttcgcccagcagagagtgcccgagggcggccccctgctggacaccagaaagaacgtgcaggccaccgagggcagaaccaaggcccccgccagactgtgcgccggcgagaacgccagcacccccagcgagcccgagaagttcccccaggtgagaagacagagaggcgccggcgccggcgagggcgagttcgtgtgcggcgagtgcggcaaggccttcagacagagcagcagcctgaccctgcacagaagatggcacagcagagagaaggcctacaagtgcgacgagtgcggcaaggccttcacctggagcaccaacctgctggagcacagaagaatccacaccggcgagaagcccttcttctgcggcgagtgcggcaaggccttcagctgccacagcagcctgaacgtgcaccagagaatccacaccggcgagagaccctacaagtgcagcgcctgcgagaaggccttcagctgcagcagcctgctgagcatgcacctgagagtgcacaccggcgagaagccctacagatgcggcgagtgcggcaaggccttcaaccagagaacccacctgaccagacaccacagaatccacaccggcgagaagccctaccagtgcggcagctgcggcaaggccttcacctgccacagcagcctgaccgtgcacgagaagatccacagcggcgacaagcccttcaagtgcagcgactgcgagaaggccttcaacagcagaagcagactgaccctgcaccagagaacccacaccggcgagaagcccttcaagtgcgccgactgcggcaagggcttcagctgccacgcctacctgctggtgcacagaagaatccacagcggcgagaagcccttcaagtgcaacgagtgcggcaaggccttcagcagccacgcctacctgatcgtgcacagaagaatccacaccggcgagaagcccttcgactgcagccagtgctggaaggccttcagctgccacagcagcctgatcgtgcaccagagaatccacaccggcgagaagccctacaagtgcagcgagtgcggcagagccttcagccagaaccactgcctgatcaagcaccagaagatccacagcggcgagaagagcttcaagtgcgagaagtgcggcgagatgttcaactggagcagccacctgaccgagcaccagagactgcacagcgagggcaagcccctggccatccagttcaacaagcacctgctgagcacctactacgtgcccggcagcctgctgggcgccggcgacgccggcctgagagacgtggaccccatcgacgccctggacgtggccaagctgctgtgcgtggtgccccccagagccggcagaaacttcagcctgggcagcaagcccagaaactag

SEQ ID NO: 90832 - DNA, 210 bp, Artificial Sequence
  derived and/or modified sequence
atggagatccccgcccccgagcccgagaagaccgccctgagcagccaggaccccgccctgagcctgaaggagaacctggaggacatcagcggctggggcctgcccgaggccagaagcaagagcctggccctggtgacccaggccggcgtgcagtggagaaacctgggcagcctgcagcccccccccctgggcttcaagcagttcagctag

SEQ ID NO: 90833 - DNA, 1935 bp, Artificial Sequence
  derived and/or modified sequence
atggagattcccgcacctgaacctgagaagaccgccctgtctagtcaagacccagccctgtccttgaaggaaaacctcgaggatatatctggttgggggttgcccgaagcaaggagcaaggaatccgtgagcttcaaagatgtagcggtcgatttcacgcaggaagaatggggacaactcgacagtccacaaagagctctgtacagggacgtgatgctggagaattaccagaacctgctggcgctcggcccccccctgcacaaaccagacgtcatctcacatcttgaacgcggggaagagccctggagcatgcagagagaagttcctcggggtccatgcccggagtgggagctaaaggcggtaccttcccagcagcagggtatctgcaaagaggaaccagcacaggaacctataatggagcgccccctgggcggggcccaggcttgggggagacaagctggcgctctgcagcggtctcaagctgctccctgggctccagcaccggcaatggtttgggacgtgcccgtggaggaatttccactgcgttgcccactgtttgcccagcagagggtgcccgagggggggcccctgctggatacccgaaaaaacgtgcaggctactgaggggcgtactaaagcacccgccaggttgtgcgcaggtgagaacgccagcacaccatccgaacccgaaaaattccctcaagtgaggagacaacgtggagccggtgccggagaaggggagttcgtgtgcggtgagtgtggaaaagcgttcagacagtccagcagtttgacccttcaccgacggtggcacagtcgcgagaaagcatataagtgtgatgagtgcggtaaagcctttacctggtccactaaccttttagagcaccgacggattcacactggcgagaagccatttttctgtggagaatgcggcaaagcgttttcctgtcactcatcattaaacgtacatcaaagaattcatacaggcgagcggccatacaaatgcagcgcttgcgaaaaggcatttagttgctcctcactgctgtcgatgcacttgcgggtgcatactggcgaaaagccctatcgatgcggcgagtgtggcaaggccttcaaccaacgaacgcatctgacacggcaccaccgcatccatacaggggagaagccttaccaatgtggctcttgcgggaaggcttttacatgccatagctccctcacggtccacgaaaagattcatagcggagataagcccttcaagtgcagcgactgtgagaaggccttcaactcccgttctcggctgacccttcaccaacgtacacacacaggcgaaaagccatttaagtgcgccgactgcggcaaaggtttctcctgtcatgcatatctattggtgcacagaaggatacatagcggggagaagcctttcaagtgtaacgagtgtgggaaagcgttctcttcacacgcatatctaatcgtgcatcgcaggatccacaccggagaaaaaccattcgattgttcccagtgttggaaagcctttagctgtcactcctccttaattgtgcaccagaggatacacaccggcgagaaaccctacaagtgctctgagtgtggacgcgccttcagccaaaatcactgcctgataaaacaccagaaaatccactctggggagaaaagcttcaagtgtgagaagtgtggggaaatgttcaattggtcgtcacatctcaccgagcatcagaggctccatagtgaaggaaagccacttgctattcagtttaacaagcacctgctgagcacctattatgttcccggaagtcttctgggcgcgggggacgccgggctgagggacgttgaccctatcgatgccctcgacgtggccaaacttctctgtgtcgtacctcccagagccgggcggaacttctctctgggctctaaacccaggaattag

SEQ ID NO: 90834 - DNA, 1935 bp, Artificial Sequence
  derived and/or modified sequence
atggagatccctgcccccgagccagagaaaactgccctgtcttctcaggacccagcactctcactgaaagaaaatctggaggacattagtggctgggggctgcctgaggctaggagtaaggaatccgtctcattcaaagatgtggcagtggactttacccaggaggagtggggacagctggactctccgcagagagcactttatcgcgacgttatgctggagaattatcagaacttattggctttagggcctccgctgcacaaaccagacgtgatcagccacctagagcgcggggaagaaccatggtccatgcaaagagaagttccccgaggtccttgcccagagtgggagctcaaggcagtgccctctcagcaacaggggatttgtaaggaggagcccgcccaggaaccgatcatggaacggcccttaggcggcgctcaggcctgggggcggcaggccggagccctccagcgctcccaagctgcaccctgggcccccgccccagccatggtgtgggatgtgccagttgaggagtttccattacgatgtcccctctttgcccagcagagggtgcccgaaggaggcccattactggatacacggaagaacgtgcaggctacagagggcagaacaaaggcccccgcacgactgtgcgctggggaaaacgcctccaccccctcagaaccagagaagttccctcaggtccgccggcagcgcggggcgggagccggtgagggtgagtttgtgtgcggcgagtgcggaaaggcatttcgtcagtctagctccctgaccctgcaccgtcggtggcactcccgggagaaggcatacaagtgtgacgagtgcggtaaggcctttacctggtccacaaatctgttggagcaccgccggattcacaccggcgagaagccattcttttgtggcgaatgcgggaaagcattcagctgtcactctagccttaacgtccaccagaggattcacacaggagaacgtccctacaagtgcagcgcctgtgaaaaagctttttcttgttcgtctctactctcgatgcacctgcgagtccataccggtgagaagccctataggtgcggcgaatgtggcaaagcgtttaatcaaagaacccacctgacccgacaccaccgcattcataccggggagaagccataccagtgtggttcttgtggcaaggcctttacatgtcacagtagtctcacagtgcacgaaaaaatccacagcggcgacaaaccattcaagtgctcagactgtgagaaggcttttaactcaagatccagactaactctgcaccagcgtacacacaccggcgaaaaacctttcaagtgcgctgactgtggaaagggattttcctgtcatgcgtatctgctggtccacagacgcattcattcaggagaaaaaccatttaagtgtaatgaatgtggcaaggcattttccagccacgcatacttaattgttcaccggcggatacacaccggcgaaaagccatttgattgtagccagtgttggaaggctttttcctgtcatagctctcttatcgtgcatcagcggatccacacaggggagaagccttataaatgttctgagtgtgggcgggcgtttagccagaaccattgcctgattaaacaccagaagattcatagtggtgagaagagctttaaatgcgagaagtgtggagagatgtttaattggagcagccatctgacggagcatcagcggttacactcagaaggaaaaccactcgcaatccagttcaataagcatctcctctcaacgtattatgtgcctggttccctactaggcgccggtgacgctggactgcgggatgtggatccaattgatgcactggatgtagcaaaacttttatgtgttgtgcctccccgtgcgggccgcaactttagcttaggctccaaaccccggaactag

SEQ ID NO: 90835 - DNA, 1839 bp, Artificial Sequence
  derived and/or modified sequence
atggaaatccctgctcctgaacccgagaagaccgccctgagcagtcaggaccctgcactttccctgaaagagaacctggaggacatttccggatgggggctacccgaggccaggagcaaagaaagcgtcagtttcaaagacgtagctgtcgatttcactcaggaggagtggggacagctcgacagcccccagagggccctatatagagacgttatgttagagaattatcaaaatctgcttgccctagagtgggaactgaaggccgttccaagtcagcagcaggggatatgtaaagaagaaccagcacaggaaccaattatggagcgacccctaggcggagctcaggcatgggggcggcaagccggcgcattgcagcggtctcaagccgccccatgggccccagctccagctatggtctgggacgtccctgtggaggaattccccttgcggtgccccctgtttgcacagcaacgtgtcccggaaggtggtccgctgctggatactagaaaaaatgtgcaggccaccgaaggcagaaccaaagctcctgcgcgactgtgtgccggcgagaatgcatctacccccagcgagccggagaagtttccacaggtccgtcgtcagcgcggagccggtgccggggaaggggagtttgtctgcggcgaatgcggaaaggcatttagacagagctcgtctcttacgcttcacaggagatggcatagcagggagaaggcctacaagtgcgatgagtgcggcaaggcctttacatggtccacgaacctgctggaacatcgcagaatacacacgggcgaaaaacctttcttttgcggagagtgtggcaaagcattcagctgccactcctctttaaatgtccaccagaggattcataccggggaaaggccgtacaaatgcagcgcgtgcgagaaggccttttcatgtagctctttgttatctatgcacttgagagtgcacactggcgagaagccctatcggtgtggtgaatgcggcaaggcctttaatcagaggacacatctaacccgccaccaccgcatacataccggcgaaaaaccataccagtgcggttcctgtgggaaagcattcacctgtcactcttctcttacagtgcacgaaaagattcatagtggtgataaaccctttaagtgctccgattgtgagaaggcgttcaacagcaggagtaggctgactctgcatcagagaacacatactggcgagaagccttttaagtgcgcagactgcggaaaaggattttcatgccacgcttacctgcttgtacaccggcgaatacactcaggagagaaaccattcaagtgtaacgagtgcggaaaggccttctcctcccatgcctatctaatcgtgcataggcgcatccacaccggcgaaaagcccttcgactgtagccagtgctggaaagccttttcatgccattcctccctcatagtgcaccagcggattcacaccggggagaagccatacaaatgttcagaatgcggaagagcattcagccaaaaccattgccttatcaaacaccaaaagattcactcgggggaaaagtccttcaaatgtgaaaagtgtggcgaaatgtttaactggtcctcccacttgactgagcatcagaggctacattctgaaggtaagcctctggctatacaatttaacaaacacctgctgtcaacctactatgtgccaggatcactcctcggcgccggcgatgcgggcctaagggacgttgaccccattgacgctctcgacgttgccaagctgctgtgcgtggtgccccctagagccgggcggaatttctcactcggatccaagccacgaaattag

SEQ ID NO: 90836 - DNA, 210 bp, Artificial Sequence
  derived and/or modified sequence
atggagatacccgcacccgagcccgagaagactgcactcagctctcaggacccggctctcagcttaaaagaaaatcttgaggacattagtggatggggactgccagaggcccggtccaaatctctggcccttgtgacacaagctggtgtgcaatggaggaacctcgggtcactccagcctcccccgttggggtttaaacagttcagctag

SEQ ID NO: 90837 - DNA, 1935 bp, Artificial Sequence
  derived and/or modified sequence
atggagatcccagcccctgagcctgagaagacagccctgagcagccaggaccctgccctgagcctgaaggagaacctggaggacatcagcggctggggcctgcctgaggcccggagcaaggagagcgtgtccttcaaggatgtggccgtggacttcacccaggaggagtggggccagctggacagcccccagagggccctgtacagagatgtgatgctggagaactaccagaacctgctggccctgggcccccccctgcacaagccagatgtgatcagccacctggagcggggggaggagccctggagcatgcagcgggaggtgccccggggcccctgcccagagtgggagctgaaggctgtgcccagccagcagcagggcatctgcaaggaggagcccgcccaggagcccatcatggagcggcccctgggcggggcccaggcctggggccggcaggccggggccctgcagaggagccaggccgccccctgggccccagccccagccatggtgtgggatgtgcctgtggaggagttccccctgcgctgccccctgtttgcccagcagagggtgcctgagggcggccccctgctggacaccaggaagaatgtgcaggccacagagggccgcaccaaggccccagcccggctgtgtgctggagaaaatgccagcaccccatctgagcctgagaagttcccccaggtgcggcggcagagaggagctggagctggggagggggagtttgtgtgtggggagtgtgggaaggccttccggcagagcagcagcctgaccctgcaccggcgctggcacagccgggagaaggcctacaagtgtgatgaatgtgggaaggccttcacctggagcaccaacctgctggagcaccggcgcatccacactggagagaagcccttcttctgtggggagtgtgggaaggccttcagctgccacagcagcctgaatgtgcaccagaggatccacactggagagcggccctacaagtgcagcgcctgtgagaaggccttcagctgcagcagcctgctgtccatgcacctgcgggtgcacactggagagaagccctaccgctgtggggagtgtgggaaggccttcaaccagaggacccacctgaccaggcaccaccgcatccacactggagagaagccctaccagtgtggcagctgtgggaaggccttcacctgccacagcagcctgactgtgcatgagaagatccacagcggggacaagcccttcaagtgcagcgactgtgagaaggccttcaacagccgcagccggctgaccctgcaccagaggacccacactggagagaagcccttcaagtgtgccgactgtgggaagggcttcagctgccacgcctacctgctggtgcaccggcgcatccacagcggggagaagcccttcaagtgcaatgaatgtgggaaggccttcagcagccacgcctacctgattgtgcaccggcgcatccacactggagagaagccctttgactgcagccagtgctggaaggccttcagctgccacagcagcctcatcgtgcaccagaggatccacactggagagaagccctacaagtgcagtgaatgtggccgggccttcagccagaaccactgcctgatcaagcaccagaagatccacagcggggagaagagcttcaagtgtgagaagtgtggggagatgttcaactggagcagccacctgacagagcaccagaggctgcacagcgagggcaagcccctggccatccagttcaacaagcacctgctgagcacctactacgtgcccggcagcctgctgggcgctggagatgctggcctgagagatgtggaccccattgatgccctggatgtggccaagctgctgtgtgtggtgcccccccgggccggcaggaacttcagcctgggcagcaagcccagaaattag

SEQ ID NO: 90838 - DNA, 1839 bp, Artificial Sequence
  derived and/or modified sequence
atggagatcccagcccctgagcctgagaagacagccctgagcagccaggaccctgccctgagcctgaaggagaacctggaggacatcagcggctggggcctgcctgaggcccggagcaaggagagcgtgtccttcaaggatgtggccgtggacttcacccaggaggagtggggccagctggacagcccccagagggccctgtacagagatgtgatgctggagaactaccagaacctgctggccctggagtgggagctgaaggctgtgcccagccagcagcagggcatctgcaaggaggagcccgcccaggagcccatcatggagcggcccctgggcggggcccaggcctggggccggcaggccggggccctgcagaggagccaggccgccccctgggccccagccccagccatggtgtgggatgtgcctgtggaggagttccccctgcgctgccccctgtttgcccagcagagggtgcctgagggcggccccctgctggacaccaggaagaatgtgcaggccacagagggccgcaccaaggccccagcccggctgtgtgctggagaaaatgccagcaccccatctgagcctgagaagttcccccaggtgcggcggcagagaggagctggagctggggagggggagtttgtgtgtggggagtgtgggaaggccttccggcagagcagcagcctgaccctgcaccggcgctggcacagccgggagaaggcctacaagtgtgatgaatgtgggaaggccttcacctggagcaccaacctgctggagcaccggcgcatccacactggagagaagcccttcttctgtggggagtgtgggaaggccttcagctgccacagcagcctgaatgtgcaccagaggatccacactggagagcggccctacaagtgcagcgcctgtgagaaggccttcagctgcagcagcctgctgtccatgcacctgcgggtgcacactggagagaagccctaccgctgtggggagtgtgggaaggccttcaaccagaggacccacctgaccaggcaccaccgcatccacactggagagaagccctaccagtgtggcagctgtgggaaggccttcacctgccacagcagcctgactgtgcatgagaagatccacagcggggacaagcccttcaagtgcagcgactgtgagaaggccttcaacagccgcagccggctgaccctgcaccagaggacccacactggagagaagcccttcaagtgtgccgactgtgggaagggcttcagctgccacgcctacctgctggtgcaccggcgcatccacagcggggagaagcccttcaagtgcaatgaatgtgggaaggccttcagcagccacgcctacctgattgtgcaccggcgcatccacactggagagaagccctttgactgcagccagtgctggaaggccttcagctgccacagcagcctcatcgtgcaccagaggatccacactggagagaagccctacaagtgcagtgaatgtggccgggccttcagccagaaccactgcctgatcaagcaccagaagatccacagcggggagaagagcttcaagtgtgagaagtgtggggagatgttcaactggagcagccacctgacagagcaccagaggctgcacagcgagggcaagcccctggccatccagttcaacaagcacctgctgagcacctactacgtgcccggcagcctgctgggcgctggagatgctggcctgagagatgtggaccccattgatgccctggatgtggccaagctgctgtgtgtggtgcccccccgggccggcaggaacttcagcctgggcagcaagcccagaaattag

SEQ ID NO: 90839 - DNA, 210 bp, Artificial Sequence
  derived and/or modified sequence
atggagatcccagcccctgagcctgagaagacagccctgagcagccaggaccctgccctgagcctgaaggagaacctggaggacatcagcggctggggcctgcctgaggcccggagcaagagcctggccctggtgacccaggccggcgtgcagtggaggaacctgggcagcctgcagcccccacccctgggcttcaagcagttctcctag

SEQ ID NO: 90840 - DNA, 1935 bp, Artificial Sequence
  derived and/or modified sequence
atggagatccccgcccccgagcccgagaagaccgccctgagcagccaagatcctgcattatccctgaaagagaatctggaagatatctccggttggggactgccggaggcgcggtccaaagaatccgtaagctttaaagacgtggcagtggatttcactcaggaggagtgggggcagttggattctccccagagggccctatacagagacgtcatgctcgaaaactaccagaacctactagccctgggccctccattgcacaagcccgacgtaattagccatctcgaaagaggagaggagccctggagtatgcagagagaagtccctcggggtccttgtcctgagtgggagctcaaagcagtcccctctcagcaacagggtatctgtaaggaggagcctgcccaggaacctatcatggaacgaccattggggggcgcacaggcatggggaagacaggccggagcgctgcagcgcagtcaggccgcaccatgggccccggcgcctgccatggtgtgggacgtgcccgtggaggagttcccattgcggtgtcctttatttgcccagcaacgcgtgccggaaggcggacccctgctcgacactaggaagaatgtccaggcgacagaaggacggactaaggccccggcccggctttgtgccggagaaaacgcctctaccccctctgagccagaaaaatttccacaggtccgcaggcagcggggcgcaggcgctggcgagggcgagttcgtctgcggagagtgtggaaaggcattcagacagtcctcctctttaaccctgcacaggcggtggcactcccgcgagaaagcctacaagtgcgatgagtgcggaaaggctttcacgtggtctacaaacctgctggagcataggcggatccacacgggcgagaaaccctttttctgcggagagtgcggaaaggccttctcatgccactccagtctgaacgttcatcagaggatccatacaggcgagcggccttacaagtgtagtgcctgcgaaaaggcgttcagctgttccagtctgcttagtatgcacttacgtgtgcacacaggggaaaaaccgtatcgttgcggggaatgcggaaaggcttttaaccagaggacacacctcaccagacaccaccgaattcataccggcgaaaagccctatcagtgcgggtcatgtggaaaggctttcacttgccattcctctctgaccgttcatgagaaaatccacagcggagacaagcctttcaaatgttccgattgcgagaaagcgtttaactctcgaagccgactgacattacatcagagaacccacacgggagagaaacctttcaaatgcgccgattgcggcaagggtttctcctgccatgcctacctgctcgtgcacaggcgcatccattccggtgagaagccattcaaatgtaatgaatgtggcaaggccttcagctcacatgcctacctgattgttcacagaagaatccacaccggcgaaaagccctttgattgtagccaatgctggaaggccttcagttgtcattcatctctcatcgttcaccaacgcatccacactggcgagaaaccctataagtgtagcgaatgcgggagggccttctctcaaaaccattgtctcatcaaacatcagaaaatccacagcggggagaaaagttttaaatgtgaaaaatgtggcgaaatgtttaactggagcagccacttgacagagcatcagagacttcacagtgaaggtaagccgctggcaatccagttcaataagcacctgctttcgacgtactatgtacccggtagcctcctgggagctggagacgccgggctcagggatgttgatcctatcgatgcgctcgacgttgcaaaactgctctgtgtggttcccccccgcgcaggcaggaactttagcctcggttcaaaacccagaaattag

SEQ ID NO: 90841 - DNA, 1935 bp, Artificial Sequence
  derived and/or modified sequence
atggagatccccgcccccgagcccgagaagaccgccctgagcagccaggatcccgcactgagcctgaaggaaaacctggaagatatcagcggatggggcctgcccgaggcccgctccaaggaatccgtatcctttaaagacgtagctgtcgacttcactcaggaagaatggggacagttggactcaccacagcgcgccctctatcgcgatgtgatgctggaaaattaccagaacctgctggccctgggtccacccctgcacaagcctgatgtgatatcccacctggaacggggggaggaaccctggtccatgcagcgggaagtgccccgggggccgtgccccgaatgggaactaaaggccgtccctagtcagcagcagggtatttgcaaagaggagcccgcgcaggagcctattatggagcgcccactcgggggcgcgcaggcttggggtcggcaggccggagctctgcagcgatctcaggccgcaccatgggctcctgcgcccgcaatggtctgggatgtgcctgttgaggaattccccctccgctgcccactgtttgctcaacagcgcgtcccagaggggggcccactgttggatacacgaaagaatgtgcaggcaactgagggccgcacaaaggctccagctcgcctctgcgccggagagaatgcatccaccccatcagaacccgaaaagttcccacaagtgaggcggcaacggggcgcaggggcaggtgagggtgaattcgtgtgcggcgagtgtggaaaggcctttaggcagtcaagctccttgacgctgcatagacgctggcactctcgtgagaaggcctacaaatgtgatgagtgcggcaaagccttcacttggtctaccaatctgctggagcatagacgaattcatacaggcgagaagccattcttctgtggcgagtgtggtaaagcgtttagttgccatagttccttaaatgtgcatcaacgcatccacaccggagaaagaccttataaatgtagcgcctgcgagaaggcattctcctgcagctctcttctctctatgcacttacgggtccacacgggcgaaaaaccctatagatgtggagagtgtggaaaggcattcaatcagcggacacatcttactaggcatcaccggatccatacaggtgagaaaccctatcagtgcgggtcatgtggcaaggcattcacatgtcattcctcccttactgtgcacgaaaaaatccatagtggcgataagccatttaaatgcagtgactgtgaaaaggcatttaactccaggagccggcttacactgcatcagcggacccatacaggagagaagcctttcaaatgcgccgactgcggcaaggggttctcctgtcacgcctacctcctggtgcatcgccgtatccactcaggagaaaagccgtttaagtgtaacgaatgtgggaaggctttcagcagtcatgcttacttgatagtccatagaagaatacatacgggcgagaagcctttcgactgttcacaatgctggaaagccttcagctgtcactcctctcttatcgtccaccagagaattcacaccggagagaagccttacaaatgctctgagtgcggccgggccttttcgcaaaatcattgtctcattaaacatcagaaaatacactctggcgaaaaatcctttaagtgtgagaagtgtggcgagatgttcaactggagctcgcacttgacagagcaccagcgcttgcactcagagggcaaacccctggctatccagttcaataaacatctcctgtcgacctattatgttcctggatctcttttgggcgcgggggatgcaggactaagggacgtggaccctatcgacgccctcgatgtggccaagctgctgtgtgtggttccacctcgagccggtaggaacttctctctggggtctaaacccagaaattag

SEQ ID NO: 90842 - DNA, 1839 bp, Artificial Sequence
  derived and/or modified sequence
atggagatccccgcccccgagcccgagaagaccgccctgagcagccaggaccctgctctgagcctgaaggagaatctggaggacatttccggatggggactacccgaagcaagatctaaggaaagtgtgtcctttaaggatgttgctgtggacttcacacaggaggagtgggggcaactggatagtcctcagcgagctctctacagagatgtgatgctggaaaattaccagaatctcctggcgctcgaatgggagctcaaagccgtgccttcccagcagcagggaatctgtaaggaagaaccagctcaggagcccatcatggagcgccctctgggcggtgctcaggcttggggccgccaggccggggctcttcaaagatctcaggccgctccatgggccccagcacctgccatggtgtgggacgtgcctgtggaggagtttcccttaagatgtcctctgtttgctcaacagagagtgcctgaaggtggtccattgctggatacacgcaagaatgtgcaggcgaccgagggcagaaccaaagctcctgccagactgtgtgcaggcgaaaatgcctccaccccttcagaaccggaaaagttccctcaggttaggcggcagcggggggcaggcgccggcgagggcgagtttgtctgcggagaatgcgggaaggccttccgtcaaagcagctcactgactctgcatcgtcgctggcactcgagagaaaaagcttataaatgtgatgagtgtggaaaggcattcacctggtcgacgaacctccttgagcatagaaggatccacactggggaaaaaccatttttctgtggcgaatgtggcaaggcgttctcgtgtcactcctcactgaacgtccatcagaggatccatactggcgagaggccatacaaatgctcagcttgcgaaaaagcctttagctgctcttcacttttaagcatgcacctaagggtgcatacaggagagaaaccctataggtgtggagagtgtggcaaggccttcaatcagcgaactcaccttactcggcaccacagaatccataccggagaaaagccctaccaatgcggcagctgtggaaaggcttttacctgtcacagctctctcacggtgcatgaaaagatacactccggcgacaagccctttaaatgcagcgactgtgagaaggcattcaattcaaggtctagactcaccttgcaccagcggacgcacactggcgaaaagccgttcaaatgcgctgactgtggaaaggggttctcctgccacgcttacctgttggtgcatcggcgaatccacagcggtgagaagccgtttaaatgcaacgagtgcggaaaggccttttccagccacgcctacctgatcgttcataggcgcattcatactggagaaaagccattcgactgctctcaatgctggaaggccttctcatgccactcttcactcatagtacatcaaaggattcacacaggagagaaaccttataagtgttcagaatgtggaagagccttcagccagaatcactgcctaattaagcatcagaagatccactctggcgagaagtcctttaaatgtgagaagtgcggggagatgtttaattggagtagtcacctgacagagcaccagaggctacactctgagggcaagccactagcaatccagttcaataagcacttacttagcacttactacgttcctgggtcccttctcggcgccggcgacgccggtctccgagatgtagaccctatcgacgctctcgatgtcgctaagctgctttgtgtggtaccccctcgagccggcagaaatttcagtcttggttcaaaaccccggaattag

SEQ ID NO: 90843 - DNA, 210 bp, Artificial Sequence
  derived and/or modified sequence
atggagatccccgcccccgagcccgagaagaccgccctgagcagccaggaccccgcactgagtctcaaagagaacttagaggacatcagcggttggggccttcccgaggcgcgatccaagagcctcgctctggtgacacaggcaggagtgcagtggagaaacttgggctccctccagcctcctccactggggtttaagcagttctcctag

SEQ ID NO: 90844 - DNA, 1935 bp, Artificial Sequence
  derived and/or modified sequence
atggagattcctgcaccagagccagaaaagacagccctgtcaagccaggatcctgcccttagtctgaaagagaacctggaagacatcagtgggtgggggctacctgaagccaggtcaaaagaatccgtgagcttcaaggatgtggctgtcgactttactcaggaggagtgggggcagctggacagtcctcagcgggctttgtatagagacgtgatgctggagaattatcagaatttgcttgccctggggcctcctttgcacaagccagacgtcatttctcatcttgagcgaggggaggagccatggagcatgcagagagaagtcccccgtggtccctgtccagaatgggagcttaaggccgtgccctcccagcaacagggcatatgcaaggaggaacccgcacaggaacccattatggagcggccactcggcggagctcaggcttggggcagacaggcgggagccctccagagatctcaagccgctccatgggctccggctccagcgatggtctgggacgtgcccgtggaggaatttcccctcaggtgccctctgtttgctcagcagagagtgcctgagggtggcccattgttagatactcggaagaacgtccaggcaacagaaggaagaacaaaggctcccgcacgcctttgtgcaggggagaatgccagcactccttctgagcctgaaaaattcccgcaagtacgtaggcagcggggagctggtgctggggaaggggagtttgtctgtggtgaatgcggcaaggcttttagacagtcttcgtcactaacactgcaccggcgttggcatagtcgagaaaaggcctacaaatgcgatgagtgcgggaaggctttcacatggagcactaatctcctggagcatcgcagaatccacactggggagaagccgtttttttgcggggaatgcggtaaagcctttagttgccacagttccctaaatgtgcaccaaagaatacataccggcgaaagaccttataagtgctcagcgtgcgagaaggccttcagctgttcatccctcctgtctatgcatctgagagtgcacaccggcgaaaagccatacaggtgcggcgaatgtggcaaggctttcaaccagaggacgcacctcacgagacatcacagaattcatacaggcgaaaaaccctaccaatgtggctcctgcggaaaggctttcacatgccatagttctcttactgtccatgagaagatccattctggagacaaacccttcaaatgttcagattgcgaaaaagcttttaactcacggagccgcctgacgctccaccagcgtactcacaccggcgagaaaccttttaaatgcgctgattgcgggaagggtttctcatgccacgcttacctgctcgtgcatcgtaggatccactccggcgaaaagccattcaagtgtaatgaatgcggaaaagctttctcctcccatgcttacctgatcgtccaccggaggatccataccggggaaaagcccttcgactgttcacagtgttggaaggcctttagctgtcatagcagtctcatagtccaccagcggattcacactggagaaaagccgtacaagtgctctgagtgtggaagagctttctcccagaaccattgcctgatcaagcatcagaaaatccactctggtgaaaagtccttcaagtgtgagaagtgcggagaaatgttcaactggtcaagccatctgaccgagcaccagaggttacactcagagggaaaacccctggccattcaatttaacaaacatctactttccacctattacgttcccggaagccttttgggggctggagacgcaggccttcgggatgtggatcccatcgatgcattggatgtggccaagcttctctgcgtggttccacccagggctgggaggaacttctcacttggttcaaagccccgaaactag

SEQ ID NO: 90845 - DNA, 1935 bp, Artificial Sequence
  derived and/or modified sequence
atggagattcctgcccctgagcccgagaagactgccctaagttctcaggatcccgctctctcgctcaaagaaaacctcgaggatatcagtggatggggactacccgaagcacggtcgaaagaaagcgtgtcttttaaggatgtggcagtggattttacacaggaggagtgggggcaactggactcaccccagagagcgttgtaccgagatgtcatgcttgaaaactaccagaacctgctggccttgggtccccctttgcacaagcccgatgtgatctcccacttagagcggggtgaggagccctggtcgatgcagagggaggtgccacgcggaccatgccctgaatgggagctgaaagctgttcctagccagcagcaggggatctgtaaagaagaacccgcacaagagcctattatggagaggccccttgggggagcccaggcctggggacgacaggcaggggcactgcagagatcgcaggcagccccatgggcccctgcccctgctatggtctgggacgtgcccgtggaggaattccccctaagatgcccactcttcgcccagcagcgcgtgcctgaaggtggaccattgttggacactagaaagaacgttcaggccaccgaagggaggactaaagcccctgcgcgtctttgtgcaggcgaaaacgccagtacaccctcagagcctgagaaattcccccaagttcggcgtcaaagaggagccggagcaggtgaaggtgagtttgtgtgcggtgagtgcgggaaggcattcagacaatcctcctcactcaccctgcacaggcgctggcactcaagagagaaggcgtataaatgtgatgagtgtggcaaggctttcacctggtctaccaacctgttggaacaccgacgtattcatacaggtgagaaaccatttttctgcggagaatgcggaaaagccttttcttgccactcctcactgaacgtacaccaacgtatccataccggcgagcgtccctataagtgtagtgcctgcgaaaaggctttttcctgctcatctctcctctctatgcacttgcgggtgcatacgggcgaaaagccctaccgatgtggggaatgcggaaaagcttttaaccagcgcactcaccttacacgccatcacagaattcacactggggaaaagccgtatcaatgcggatcctgcggcaaggcattcacctgtcactcgtctctgaccgtccatgaaaagatccactcaggcgacaagcccttcaagtgtagtgattgcgagaaggcctttaactcccggtcgagactcactctccaccaacgaacccacactggcgagaagccctttaaatgcgccgattgtgggaagggtttttcttgccacgcatacctcctcgttcataggagaatccactctggcgagaaacctttcaaatgtaatgagtgcggaaaggcattcagttcccatgcatatctgattgtgcaccggagaatccacaccggagagaagcctttcgactgctcccagtgctggaaggcctttagttgccactcctccctgattgtgcatcagcgtattcacactggcgaaaagccatataagtgctcggagtgtgggcgtgccttttctcaaaaccactgtctgataaaacaccagaagattcatagcggagaaaagtccttcaaatgcgaaaaatgcggagagatgttcaactggagctctcatcttacagagcatcagcgcctccactctgaaggaaagccactggcaatccagtttaataaacacctcctgtctacctactacgtccctggctccctgctgggcgctggcgatgctggattaagggatgtcgatccgatcgacgcattagatgtcgcgaaacttctttgtgtggttcccccacgcgctgggaggaacttctccctgggctcgaagcctagaaactag

SEQ ID NO: 90846 - DNA, 1839 bp, Artificial Sequence
  derived and/or modified sequence
atggagatccccgctcctgagcctgaaaaaaccgcgctatcgtcgcaggacccggcactctcactcaaggaaaatttggaagacattagcggctggggacttccggaagctaggagcaaagagtcagtgtcattcaaagacgtggctgtggattttactcaagaagaatggggtcagctcgattccccccagcgcgctctgtatagggatgtgatgctggaaaactatcaaaatctgctggccttagagtgggaactcaaggcagtaccgtcgcaacagcagggcatttgtaaagaagagcctgcgcaggagcccatcatggagagaccacttggtggcgctcaagcatggggccgtcaggcaggggctctgcaacgctcacaggcagccccatgggcacccgcaccagcaatggtgtgggatgtgccagttgaggaatttccgctgcgatgccccctgtttgcccaacagcgggtgccagaaggaggtccgctattggatactcgaaagaacgtccaggcaaccgaaggacgcacaaaagcacctgccaggctgtgcgccggagaaaacgcctcgactccttcggagcccgagaagtttccgcaggtacgcaggcagcgcggagccggtgcaggtgagggcgaatttgtctgcggcgaatgtggtaaagccttcaggcaaagctctagcctcactttgcacaggcggtggcacagccgcgagaaggcctacaagtgtgacgagtgtggcaaagccttcacttggtctacgaatttgttggagcatcgaaggatccacaccggggaaaaacccttcttttgtggcgagtgcggaaaagctttctcgtgtcatagctctttgaacgtgcaccagcgtattcatactggagaaagaccctataaatgctcagcttgcgaaaaggctttcagttgctcgagcctgctgtctatgcatctgcgggtgcacaccggagagaagccttacagatgcggcgagtgtggaaaagcgttcaaccagcggacccacttgacacggcaccaccgcatacatacaggggagaaaccctatcagtgcggatcttgcgggaaagccttcacctgccattcatcactgaccgtccacgagaaaatccacagcggtgacaagccattcaagtgcagcgactgtgagaaggccttcaactctcgctcacggttaacattgcaccagcgcacacacacaggagaaaaaccgttcaaatgcgccgattgcggcaaagggtttagctgtcacgcctacctcttagttcatcgacgtatccacagtggcgaaaaaccgttcaagtgcaacgaatgcggcaaagcctttagctcccatgcgtacttgatcgtgcaccggaggatccacaccggcgagaagcccttcgactgttctcagtgttggaaagctttctcgtgtcactcctccttgatcgtgcatcagcggattcacaccggggagaagccttacaagtgttctgagtgtggaagagcgttctcccagaatcactgtctaatcaagcaccagaagattcatagcggagaaaaatcctttaaatgcgaaaagtgcggtgagatgtttaattggtcaagccacctgacggaacatcaacggctgcactctgaaggcaagccactggctatacagttcaacaaacatctattgagtacatactacgttccaggatccctcctaggcgctggtgatgccggtctcagggacgtcgatcccattgacgccttagacgttgccaaactgttgtgcgtcgtcccaccaagggcgggtagaaatttttcgctcgggtccaaaccacgcaactag

SEQ ID NO: 90847 - DNA, 210 bp, Artificial Sequence
  derived and/or modified sequence
atggagatccccgctccagagcctgaaaagacagccctttcttcccaagaccctgcgctgtccttaaaggaaaatctggaagacattagtggttggggtcttccagaagcgagatccaagagtctcgccctcgtaacccaggcaggtgtgcagtggaggaatttgggatctcttcagccacctcctctcgggtttaagcaattttcatag

SEQ ID NO: 90848 - DNA, 2503 bp, Artificial Sequence
  derived and/or modified sequence
cttttgtgggagtccggtctgtccacttgccggtccctcagaccgtcggcggtctctgtccgcttcgggacctgtccgctggtcgctccgcgtccgatggctcctggccgcggaaccttaggcctggccctggtctccgagcgcggggcctgccctggatcctggaggctacacagctgcccactcctcctggggaggctgccgtggaggccatggagatccctgccccggagcccgagaagacagctctttcctctcaggatcctgctctttccctgaaagagaatctcgaggatatatcgggttggggtcttcccgaagccaggtccaaggaatcggtgagtttcaaggatgtggctgtggacttcacccaggaggagtggggtcaactagactcccctcagagggccttgtaccgggatgtgatgttggagaactaccagaaccttcttgccctaggacctccactgcacaagccagatgtgatctctcatctggaacgaggcgaggagccatggagcatgcagagggaagtccccagagggccctgtccagaatgggagctgaaggcggtgccctctcaacagcagggcatttgcaaagaagaaccggcccaggagcccatcatggagcggcccctcggcggggcgcaggcgtgggggcgccaggcaggtgctctgcagaggagtcaggctgcgccctgggcgcccgcacctgccatggtctgggacgtccctgtagaggaattccccctcaggtgtcccctcttcgcccagcaacgcgttcccgaggggggacccttgctggacacacgcaagaacgtccaggccactgagggcagaaccaaggcccccgcgagactgtgtgcaggggaaaacgcctccacgccaagtgagccagaaaagttcccccaggtgcgccggcagcgcggggcgggcgccggggagggcgagttcgtgtgcggcgagtgcgggaaggcgttccgccagagctcctccctcacgctgcaccggcgctggcacagccgggagaaggcttacaagtgcgatgaatgcggcaaggccttcacctggagcaccaaccttctggagcaccggcgcatccacaccggcgagaagcccttcttctgcggcgagtgcgggaaggccttcagctgccactcgtccctcaacgtgcaccagcgcatccacacgggcgagcggccctacaagtgcagcgcctgcgagaaggccttcagctgcagctcgctgctcagcatgcacctgcgggtgcacaccggcgagaagccctaccggtgcggcgagtgcggcaaggccttcaaccagcgtacacacctcacacgccaccaccgcatccacacgggcgagaagccctaccagtgcggctcctgcggcaaggccttcacctgccactcatccctcaccgtgcatgagaagatccacagcggggacaagccgttcaagtgcagcgactgcgagaaggccttcaacagccgctcgcgcctcaccctccaccagaggacgcacacgggcgagaagcccttcaagtgcgccgactgcgggaagggcttcagctgccacgcgtacctgctcgtgcaccggcgcatccacagcggcgagaagcccttcaagtgcaacgagtgcggcaaagccttcagctcccacgcctacctcatcgtgcaccggcgcatccacacaggcgagaagcccttcgactgcagccagtgttggaaggccttcagctgccactcgtccctcatcgtgcaccagcgcatccacaccggtgagaagccctacaagtgcagcgagtgcggcagagccttcagccagaaccactgtctcattaaacatcagaaaatccactccggggagaagtcgtttaagtgtgagaaatgtggggagatgttcaactggagctcgcacctcactgagcaccagaggctgcacagcgaggggaagcccttggccatccagttcaacaaacacctgctcagcacatactacgtgcctggcagcctgctgggtgcaggggatgctggactgagggacgtggatcccatcgacgcgctggatgtggcaaagctcttgtgcgtggttccccccagagctggcaggaatttctccctggggagcaaacctcgaaactaacatgatgtgctttggtgtcagtagctgctttctgagctactcaacaaggaaagcaccctggtcctccctggctcctagatccagaccaccttcctccaggtgtgggagccttgccttatcacccccatcaggtctgcatgccagggtgcctcctctagttaaagtcagtcacctccccagaagggccacactccaggaggagtgttgagagtcatttgaggtagtcttgccacctgttttccttgatgggcctggaagttgttgacaaggggaaagatctttcttgccaataaaaagaagggatatcgttgggtgccatggctcacacctgtaatcttaacactgtgggaggccaa

SEQ ID NO: 90849 - DNA, 3159 bp, Artificial Sequence
  derived and/or modified sequence
gtagtttgcgcctatttcgcgcaggcgcgctttcccgcagcggccgcctgctgctctttgtggcagtcgcagtccttttgtgggagtccggtctgtccacttgccggtccctcagaccgtcggcggtctctgtccgcttcgggacctgtccgctggtcgctccgcgtccgatggctcctggccgcggaaccttaggcctggccctggtctccgagcgcgggttcgccgggaggagcgtgtggcgggggtgtgccggggcgtgagtgcgccgagcatggggctgagcctggtgtggggagtgggtatctgcggagccggcctgaaccccacctcagccgggcgcggggagggggctccgtgcgtgtgatcgtgcagctgtgagcgcgtggccgccccgcggggctccgctgcaggcccctcagccccaggagcagtactcgctcttcagggcctgccctggatcctggaggctacacagctgcccactcctcctggggaggctgccgtggaggccatggagatccctgccccggagcccgagaagacagctctttcctctcaggatcctgctctttccctgaaagagaatctcgaggatatatcgggttggggtcttcccgaagccaggtccaaggaatcggtgagtttcaaggatgtggctgtggacttcacccaggaggagtggggtcaactagactcccctcagagggccttgtaccgggatgtgatgttggagaactaccagaaccttcttgccctaggacctccactgcacaagccagatgtgatctctcatctggaacgaggcgaggagccatggagcatgcagagggaagtccccagagggccctgtccagaatgggagctgaaggcggtgccctctcaacagcagggcatttgcaaagaagaaccggcccaggagcccatcatggagcggcccctcggcggggcgcaggcgtgggggcgccaggcaggtgctctgcagaggagtcaggctgcgccctgggcgcccgcacctgccatggtctgggacgtccctgtagaggaattccccctcaggtgtcccctcttcgcccagcaacgcgttcccgaggggggacccttgctggacacacgcaagaacgtccaggccactgagggcagaaccaaggcccccgcgagactgtgtgcaggggaaaacgcctccacgccaagtgagccagaaaagttcccccaggtgcgccggcagcgcggggcgggcgccggggagggcgagttcgtgtgcggcgagtgcgggaaggcgttccgccagagctcctccctcacgctgcaccggcgctggcacagccgggagaaggcttacaagtgcgatgaatgcggcaaggccttcacctggagcaccaaccttctggagcaccggcgcatccacaccggcgagaagcccttcttctgcggcgagtgcgggaaggccttcagctgccactcgtccctcaacgtgcaccagcgcatccacacgggcgagcggccctacaagtgcagcgcctgcgagaaggccttcagctgcagctcgctgctcagcatgcacctgcgggtgcacaccggcgagaagccctaccggtgcggcgagtgcggcaaggccttcaaccagcgtacacacctcacacgccaccaccgcatccacacgggcgagaagccctaccagtgcggctcctgcggcaaggccttcacctgccactcatccctcaccgtgcatgagaagatccacagcggggacaagccgttcaagtgcagcgactgcgagaaggccttcaacagccgctcgcgcctcaccctccaccagaggacgcacacgggcgagaagcccttcaagtgcgccgactgcgggaagggcttcagctgccacgcgtacctgctcgtgcaccggcgcatccacagcggcgagaagcccttcaagtgcaacgagtgcggcaaagccttcagctcccacgcctacctcatcgtgcaccggcgcatccacacaggcgagaagcccttcgactgcagccagtgttggaaggccttcagctgccactcgtccctcatcgtgcaccagcgcatccacaccggtgagaagccctacaagtgcagcgagtgcggcagagccttcagccagaaccactgtctcattaaacatcagaaaatccactccggggagaagtcgtttaagtgtgagaaatgtggggagatgttcaactggagctcgcacctcactgagcaccagaggctgcacagcgaggggaagcccttggccatccagttcaacaaacacctgctcagcacatactacgtgcctggcagcctgctgggtgcaggggatgctggactgagggacgtggatcccatcgacgcgctggatgtggcaaagctcttgtgcgtggttccccccagagctggcaggaatttctccctggggagcaaacctcgaaactaacatgatgtgctttggtgtcagtagctgctttctgagctactcaacaaggaaagcaccctggtcctccctggctcctagatccagaccaccttcctccaggtgtgggagccttgccttatcacccccatcaggtctgcatgccagggtgcctcctctagttaaagtcagtcacctccccagaagggccacactccaggaggagtgttgagagtcatttgaggtagtcttgccacctgttttccttgatgggcctggaagttgttgacaaggggaaagatctttcttgccaataaaaagaagggatatcgttgggtgccatggctcacacctgtaatcttaacactgtgggaggccaaggcaaggggatcacttgagcccaggagtctaggaccagcctggacaacatggtgagacctcgtctctacaaaaaatgcaaaaattagccagatgtggcggcatgtccctgtggtcccagctactcaggaggctgaggtgggaggatcatttgagcctaggaggtcaaggctgcagtgagccatgattcacagcactgcactgcagcctgggtgacaaagcaagaccctgtgtgaaattaaaaggaggtatatcaactgttgtatcctcggacgggctcctgacacggctttaatcaggagtttcctccataaactattattttcagaataataataaaacaagaattatgacta

SEQ ID NO: 90850 - DNA, 1839 bp, Artificial Sequence
  derived and/or modified sequence
atggagatccctgccccggagcccgagaagacagctctttcctctcaggatcctgctctttccctgaaagagaatctcgaggatatatcgggttggggtcttcccgaagccaggtccaaggaatcggtgagtttcaaggatgtggctgtggacttcacccaggaggagtggggtcaactagactcccctcagagggccttgtaccgggatgtgatgttggagaactaccagaaccttcttgccctagaatgggagctgaaggcggtgccctctcaacagcagggcatttgcaaagaagaaccggcccaggagcccatcatggagcggcccctcggcggggcgcaggcgtgggggcgccaggcaggtgctctgcagaggagtcaggctgcgccctgggcgcccgcacctgccatggtctgggacgtccctgtagaggaattccccctcaggtgtcccctcttcgcccagcaacgcgttcccgaggggggacccttgctggacacacgcaagaacgtccaggccactgagggcagaaccaaggcccccgcgagactgtgtgcaggggaaaacgcctccacgccaagtgagccagaaaagttcccccaggtgcgccggcagcgcggggcgggcgccggggagggcgagttcgtgtgcggcgagtgcgggaaggcgttccgccagagctcctccctcacgctgcaccggcgctggcacagccgggagaaggcttacaagtgcgatgaatgcggcaaggccttcacctggagcaccaaccttctggagcaccggcgcatccacaccggcgagaagcccttcttctgcggcgagtgcgggaaggccttcagctgccactcgtccctcaacgtgcaccagcgcatccacacgggcgagcggccctacaagtgcagcgcctgcgagaaggccttcagctgcagctcgctgctcagcatgcacctgcgggtgcacaccggcgagaagccctaccggtgcggcgagtgcggcaaggccttcaaccagcgtacacacctcacacgccaccaccgcatccacacgggcgagaagccctaccagtgcggctcctgcggcaaggccttcacctgccactcatccctcaccgtgcatgagaagatccacagcggggacaagccgttcaagtgcagcgactgcgagaaggccttcaacagccgctcgcgcctcaccctccaccagaggacgcacacgggcgagaagcccttcaagtgcgccgactgcgggaagggcttcagctgccacgcgtacctgctcgtgcaccggcgcatccacagcggcgagaagcccttcaagtgcaacgagtgcggcaaagccttcagctcccacgcctacctcatcgtgcaccggcgcatccacacaggcgagaagcccttcgactgcagccagtgttggaaggccttcagctgccactcgtccctcatcgtgcaccagcgcatccacaccggtgagaagccctacaagtgcagcgagtgcggcagagccttcagccagaaccactgtctcattaaacatcagaaaatccactccggggagaagtcgtttaagtgtgagaaatgtggggagatgttcaactggagctcgcacctcactgagcaccagaggctgcacagcgaggggaagcccttggccatccagttcaacaaacacctgctcagcacatactacgtgcctggcagcctgctgggtgcaggggatgctggactgagggacgtggatcccatcgacgcgctggatgtggcaaagctcttgtgcgtggttccccccagagctggcaggaatttctccctggggagcaaacctcgaaactaa

SEQ ID NO: 90851 - DNA, 3744 bp, Artificial Sequence
  derived and/or modified sequence
ggtgtggggagtgggtatctgcggagccggcctgaaccccacctcagccgggcgcggggagggggctccgtgcgtgtgatcgtgcagctgtgagcgcgtggccgccccgcggggctccgctgcaggcccctcagccccaggagcagtactcgctcttcagggcctgccctggatcctggaggctacacagctgcccactcctcctggggaggctgccgtggaggccatggagatccctgccccggagcccgagaagacagctctttcctctcaggatcctgctctttccctgaaagagaatctcgaggatatatcgggttggggtcttcccgaagccaggtccaagagtttggctcttgtcacccaggctggagtgcagtggcgcaatcttggctcactgcaacctccacctcttgggttcaagcaattctcctgacctcaggaatcggtgagtttcaaggatgtggctgtggacttcacccaggaggagtggggtcaactagactcccctcagagggccttgtaccgggatgtgatgttggagaactaccagaaccttcttgccctaggacctccactgcacaagccagatgtgatctctcatctggaacgaggcgaggagccatggagcatgcagagggaagtccccagagggccctgtccagaatgggagctgaaggcggtgccctctcaacagcagggcatttgcaaagaagaaccggcccaggagcccatcatggagcggcccctcggcggggcgcaggcgtgggggcgccaggcaggtgctctgcagaggagtcaggctgcgccctgggcgcccgcacctgccatggtctgggacgtccctgtagaggaattccccctcaggtgtcccctcttcgcccagcaacgcgttcccgaggggggacccttgctggacacacgcaagaacgtccaggccactgagggcagaaccaaggcccccgcgagactgtgtgcaggggaaaacgcctccacgccaagtgagccagaaaagttcccccaggtgcgccggcagcgcggggcgggcgccggggagggcgagttcgtgtgcggcgagtgcgggaaggcgttccgccagagctcctccctcacgctgcaccggcgctggcacagccgggagaaggcttacaagtgcgatgaatgcggcaaggccttcacctggagcaccaaccttctggagcaccggcgcatccacaccggcgagaagcccttcttctgcggcgagtgcgggaaggccttcagctgccactcgtccctcaacgtgcaccagcgcatccacacgggcgagcggccctacaagtgcagcgcctgcgagaaggccttcagctgcagctcgctgctcagcatgcacctgcgggtgcacaccggcgagaagccctaccggtgcggcgagtgcggcaaggccttcaaccagcgtacacacctcacacgccaccaccgcatccacacgggcgagaagccctaccagtgcggctcctgcggcaaggccttcacctgccactcatccctcaccgtgcatgagaagatccacagcggggacaagccgttcaagtgcagcgactgcgagaaggccttcaacagccgctcgcgcctcaccctccaccagaggacgcacacgggcgagaagcccttcaagtgcgccgactgcgggaagggcttcagctgccacgcgtacctgctcgtgcaccggcgcatccacagcggcgagaagcccttcaagtgcaacgagtgcggcaaagccttcagctcccacgcctacctcatcgtgcaccggcgcatccacacaggcgagaagcccttcgactgcagccagtgttggaaggccttcagctgccactcgtccctcatcgtgcaccagcgcatccacaccggtgagaagccctacaagtgcagcgagtgcggcagagccttcagccagaaccactgtctcattaaacatcagaaaatccactccggggagaagtcgtttaagtgtgagaaatgtggggagatgttcaactggagctcgcacctcactgagcaccagaggctgcacagcgaggggaagcccttggccatccagttcaacaaacacctgctcagcacatactacgtgcctggcagcctgctgggtgcaggggatgctggactgagggacgtggatcccatcgacgcgctggatgtggcaaagctcttgtgcgtggttccccccagagctggcaggaatttctccctggggagcaaacctcgaaactaacatgatgtgctttggtgtcagtagctgctttctgagctactcaacaaggaaagcaccctggtcctccctggctcctagatccagaccaccttcctccaggtgtgggagccttgccttatcacccccatcaggtctgcatgccagggtgcctcctctagttaaagtcagtcacctccccagaagggccacactccaggaggagtgttgagagtcatttgaggtagtcttgccacctgttttccttgatgggcctggaagttgttgacaaggggaaagatctttcttgccaataaaaagaagggatatcgttgggtgccatggctcacacctgtaatcttaacactgtgggaggccaaggcaaggggatcacttgagcccaggagtctaggaccagcctggacaacatggtgagacctcgtctctacaaaaaatgcaaaaattagccagatgtggcggcatgtccctgtggtcccagctactcaggaggctgaggtgggaggatcatttgagcctaggaggtcaaggctgcagtgagccatgattcacagcactgcactgcagcctgggtgacaaagcaagaccctgtgtgaaattaaaaggaggtatatcaactgttgtatcctcggacgggctcctgacacggctttaatcaggagtttcctccataaactattattttcagaataataataaaacaagaattatgactagcatcactttccagtgaacattattatattgctagagaggagaataatcttgggtggtgggcatttggaaaaagtgaatttcctggacttaactcatgtaaatagctctactgcagagctgtgtgtttagtgacagtgcagtcaggggcattcccacagctgtcacagcacggcccagcatcattgtagccagatcctaacatgccaacatcacctcttgccatttagcccctagtgagaaattgggagctaccaggcaggtgcccagtgcattcagggaagatgggcacaacatcaggatgggtgtgtctggaagctcctcttcactgaccagggctgggcagggccaccctgggctggtgaggctgccctgcagggcttctcactatgtagcaccagtcaccagcccaggtcacagaagaagcccctcccagcacccactggagaggggaagctgaagcccagggagacgggctccatggtggtcccacatggagctgttttgcaaaccctggaaaaggcggctctccctgtcccaacactcttcagagacaggaagacagagttaatcttgaatgaatgttatttctacttagtcctaagcaagaataagctgccctcttggtgatcatactttatacggagtgctatcgtttatgaaatgctttcagtatgctttttaaattatgcaggcaaaataaccacacttcagaaaatgtggacttctgaaaaataaaatccccataattcttaataaaactgccttttgcactttga

SEQ ID NO: 90852 - protein, 169 aa, Artificial Sequence
  derived and/or modified sequence
MAPPWVPAMGFTLAPSLGCFVGSRFVHGEGLRWYAGLQKPSWHPPHWVLGPVWGTLYSAMGYGSYLVWKELGGFTEKAVVPLGLYTGQLALNWAWPPIFFGARQMGWALVDLLLVSGAAAATTVAWYQVSPLAARLLYPYLAWLAFTTTLNYCVWRDNHGWRGGRRLPE

SEQ ID NO: 90853 - protein, 107 aa, Artificial Sequence
  derived and/or modified sequence
MAPPWVPAMGFTLAPSLGCFVGSRFVHGEGLRWYAGLQKPSWHPPHWVLGPVWGTLYSAMGYGSYLVWKELGGFTEKAVVPLGLYTGQLALNWAWPPIFFGARQMGW

SEQ ID NO: 90854 - DNA, 510 bp, Artificial Sequence
  derived and/or modified sequence
atggcccccccctgggtgcccgccatgggcttcaccctggcccccagcctgggctgcttcgtgggcagcagattcgtgcacggcgagggcctgagatggtacgccggcctgcagaagcccagctggcaccccccccactgggtgctgggccccgtgtggggcaccctgtacagcgccatgggctacggcagctacctggtgtggaaggagctgggcggcttcaccgagaaggccgtggtgcccctgggcctgtacaccggccagctggccctgaactgggcctggccccccatcttcttcggcgccagacagatgggctgggccctggtggacctgctgctggtgagcggcgccgccgccgccaccaccgtggcctggtaccaggtgagccccctggccgccagactgctgtacccctacctggcctggctggccttcaccaccaccctgaactactgcgtgtggagagacaaccacggctggagaggcggcagaagactgcccgagtag

SEQ ID NO: 90855 - DNA, 324 bp, Artificial Sequence
  derived and/or modified sequence
atggcccccccctgggtgcccgccatgggcttcaccctggcccccagcctgggctgcttcgtgggcagcagattcgtgcacggcgagggcctgagatggtacgccggcctgcagaagcccagctggcaccccccccactgggtgctgggccccgtgtggggcaccctgtacagcgccatgggctacggcagctacctggtgtggaaggagctgggcggcttcaccgagaaggccgtggtgcccctgggcctgtacaccggccagctggccctgaactgggcctggccccccatcttcttcggcgccagacagatgggctggtag

SEQ ID NO: 90856 - DNA, 510 bp, Artificial Sequence
  derived and/or modified sequence
atggcccctccgtgggtgcctgccatgggattcactctggccccatcactgggatgcttcgtaggctcccgttttgtgcatggcgaaggattacgatggtacgctggactgcaaaaaccgtcatggcacccacctcactgggtgttgggccctgtttggggaacgctttactctgcgatgggctacgggtcctatcttgtctggaaggaactcggggggttcacagagaaggcagtggtgcccctgggactgtataccggtcagctggctctgaattgggcttggccgcctatcttttttggagctcgccagatgggctgggcccttgtagatctgcttctggtgagcggcgctgctgccgctaccaccgtcgcttggtaccaggtcagcccactggctgcacgcttgttgtatccatacctggcatggctagcctttaccaccactctgaattattgcgtgtggcgggacaaccacggatggcgtggtggcaggcggttgccagaatag

SEQ ID NO: 90857 - DNA, 510 bp, Artificial Sequence
  derived and/or modified sequence
atggcaccaccttgggtacccgctatgggtttcacccttgcgccttccttgggctgcttcgtggggtcccggtttgtacacggagaaggcctgcgatggtatgccggccttcagaagccatcctggcacccccctcactgggtcctcgggccggtttgggggactctctacagcgccatgggatatggatcgtatctcgtgtggaaggagctcggcgggttcactgagaaggccgtggttccgcttggcctctacaccggccaactcgccctgaattgggcgtggcctcccattttctttggggcaaggcagatgggctgggccctggtagacctgctacttgtgagtggcgccgcagcagccactactgtagcttggtatcaagtgtctccactggcggcaaggctgctatacccctatctcgcatggctggcctttacgactactctaaattattgcgtctggagggacaatcatggctggcgcgggggccggcggctgccggagtag

SEQ ID NO: 90858 - DNA, 309 bp, Artificial Sequence
  derived and/or modified sequence
atggctccccacctactctggtgtcccacgaatgggctggggcttggcggttctccagccggccagtggggcggcgggagccattacagaggcctggtccctggcgagcccgctggtaggccacccgccttaccattgcccggcctggcgggcctgcacgaccatactcagctcctccgcatggctggtcagccctggctggcatggggaactgcagccgcccgcgtgtctgcccgcccaaccagagattgtagttgcacgtcgcgttgccaccatgcctgtgacgtggtggcagtgaccctgagctag

SEQ ID NO: 90859 - DNA, 324 bp, Artificial Sequence
  derived and/or modified sequence
atggccccaccctgggtgcccgccatgggctttactctcgcccctagcctgggctgttttgtgggaagccgttttgtgcacggcgagggcctccggtggtatgcgggccttcagaaaccctcatggcatccaccccactgggtgcttgggcctgtatggggcactctgtactcagctatgggatacggtagttacctcgtatggaaggaactgggtggcttcacagagaaggcagtggtcccattaggactgtacacaggccagctcgccctgaactgggcttggcctccgatcttcttcggcgctcggcagatgggctggtag

SEQ ID NO: 90860 - DNA, 510 bp, Artificial Sequence
  derived and/or modified sequence
atggccccaccctgggtgcctgccatgggcttcaccctggcccccagcctgggctgctttgtgggcagcagatttgtgcatggagagggcctgcgctggtacgccggcctgcagaagcccagctggcaccccccccactgggtgctgggccctgtgtggggcaccctgtacagcgccatgggctacggcagctacctggtgtggaaggagctgggcggcttcacagagaaggctgtggtgcccctgggcctgtacacaggccagctggccctgaactgggcctggccacccatcttcttcggggcccggcagatgggctgggccctggtggacctgctgctggtgtctggagctgctgctgccaccaccgtggcctggtaccaggtgagccccctggccgcccggctgctgtacccctacctggcctggctggccttcaccaccaccctgaactactgtgtgtggagggacaaccacggctggaggggcggccgccgcctgcctgagtag

SEQ ID NO: 90861 - DNA, 324 bp, Artificial Sequence
  derived and/or modified sequence
atggccccaccctgggtgcctgccatgggcttcaccctggcccccagcctgggctgctttgtgggcagcagatttgtgcatggagagggcctgcgctggtacgccggcctgcagaagcccagctggcaccccccccactgggtgctgggccctgtgtggggcaccctgtacagcgccatgggctacggcagctacctggtgtggaaggagctgggcggcttcacagagaaggctgtggtgcccctgggcctgtacacaggccagctggccctgaactgggcctggccacccatcttcttcggggcccggcagatgggctggtag

SEQ ID NO: 90862 - DNA, 510 bp, Artificial Sequence
  derived and/or modified sequence
atggcccccccctgggtgcccgccatgggcttcaccctggccccctccctaggatgtttcgtaggttcgcggttcgtgcatggggaaggactgcgttggtacgcaggattacagaaaccttcttggcaccccccacactgggttctggggccagtctggggcacactctatagcgctatgggctatgggtcttatctcgtgtggaaggaactgggcggatttaccgaaaaggctgtagtgcctttggggctttacactggccagctggctttgaactgggcctggcctccaatcttcttcggggcaagacagatggggtgggcactggtggatctgctgctggtgagcggggcggccgccgctactaccgttgcttggtatcaggtgagccctctggctgcaagactcctgtatccatacctggcttggctggcgtttaccacaactctcaattattgtgtgtggcgggacaatcacgggtggagaggcggccgtcgcctgccagaatag

SEQ ID NO: 90863 - DNA, 510 bp, Artificial Sequence
  derived and/or modified sequence
atggcccccccctgggtgcccgccatgggcttcaccctggccccctccctgggctgcttcgtggggtccagattcgtccatggggaagggctccgatggtacgccggcttacagaaaccttcgtggcacccaccccactgggtcctggggcctgtgtggggaacactgtacagtgctatgggctatggcagctatctggtctggaaagagctgggaggctttaccgagaaggccgttgtacccctaggcctgtacacgggacaacttgctttgaactgggcttggccacccatattctttggcgctcgccagatggggtgggccctagtggatttactcctcgtgagtggcgccgcagctgcaaccactgtggcctggtatcaggtgagccccctggccgcccgactgctatacccttatctggcttggctggcgttcactaccactttgaattactgtgtctggcgagacaaccacggctggaggggaggccggcggctgcccgaatag

SEQ ID NO: 90864 - DNA, 309 bp, Artificial Sequence
  derived and/or modified sequence
atggccccccacctgctgtggtgccccaccaacggcctgggcctgggcggaagcccagccggtcagtggggcggcggctcccactacagaggacttgtgccaggagaaccagccggtcgaccgcccgccctacccctgcctgggctggccgggctgcacgaccacacccagctgctgaggatggcgggccagccctggctggcatggggaaccgctgctgcacgagtctccgcgcggccgacgcgggactgtagctgcactagccgctgccaccatgcatgtgatgtggtggcagtcacgctcagctag

SEQ ID NO: 90865 - DNA, 324 bp, Artificial Sequence
  derived and/or modified sequence
atggcccccccctgggtgcccgccatgggcttcaccctggcccccagtctagggtgctttgtgggctccagatttgttcatggggaggggctcagatggtatgcgggactgcagaaacctagctggcaccccccgcactgggtcctgggacccgtttggggcactctttatagtgctatgggctacggttcttacctcgtctggaaggaactcggagggttcacagaaaaggctgtggtgcctcttgggctctatactgggcagctggcacttaactgggcgtggccccccatcttcttcggcgctcgccagatgggttggtag

SEQ ID NO: 90866 - DNA, 510 bp, Artificial Sequence
  derived and/or modified sequence
atggctcctccatgggtgcccgcaatgggtttcactctcgccccatcgctgggctgtttcgttggatcccgcttcgtccacggcgaggggctgagatggtacgccggacttcagaagcccagctggcatcccccacattgggtgctggggccagtgtggggtactctgtacagcgctatgggctatggtagttatctggtgtggaaggaactgggcggatttactgagaaagccgtggttcccctcgggctctacactgggcaactcgctctgaactgggcctggcctccaatttttttcggcgcaagacagatggggtgggctctcgtggatttgctgctggtttcaggcgctgccgcagccacaactgtagcgtggtaccaggtaagccctcttgcagcaagactgttgtacccctatctcgcctggctggcctttacaacgaccctcaactactgtgtctggagggacaaccatggctggcgtggaggcaggaggctcccagagtag

SEQ ID NO: 90867 - DNA, 510 bp, Artificial Sequence
  derived and/or modified sequence
atggctccaccatgggtgcctgccatgggcttcactctcgccccatctctcgggtgcttcgtcgggtctaggttcgtacacggcgaaggcctccgctggtatgccggactgcagaaaccaagctggcacccaccacattgggtgctggggcctgtatggggcacgctgtattccgcaatgggctacggaagttatcttgtgtggaaggaactgggcggattcacagagaaagccgtggtgcccctgggcttatacaccggtcagctagcccttaactgggcttggcctcccatcttctttggcgctcggcagatgggctgggccctggtggatctgctgctcgtgtcaggggcagccgcagcaacaacggtggcatggtaccaagtctctcctctggccgcacggctcctttacccctatctggcatggctggcctttacaaccaccttgaactactgtgtatggcgcgacaaccatggatggaggggagggagaaggctaccagagtag

SEQ ID NO: 90868 - DNA, 309 bp, Artificial Sequence
  derived and/or modified sequence
atggccccacatctgctttggtgtccaaccaacggcttgggccttggtgggtcaccagccggacagtggggtggtgggtcacactatagagggctggtgccaggcgaaccagccggacggcctccagccctccctctgcctgggctggccggtctacacgaccatacacagctcttgcgcatggccggacagccatggctagcatggggcacagccgcagccagggtgagcgcccgaccaaccagagattgttcatgtacctccaggtgccaccacgcctgtgatgtggtggctgtaaccctgtcgtag

SEQ ID NO: 90869 - DNA, 324 bp, Artificial Sequence
  derived and/or modified sequence
atggcccctccatgggtccctgccatgggttttacactggccccaagcttgggatgctttgtgggtagtcgctttgtgcatggtgaggggctccgctggtacgcgggactacagaagccttcctggcaccctccacattgggttctgggccctgtatggggcactctatacagcgctatgggctatggatcatacctcgtttggaaggaattgggaggattcacagagaaggccgtggtgccattgggtctctataccggccagctggcactgaactgggcttggcccccaatattttttggcgctaggcagatggggtggtag

SEQ ID NO: 90870 - DNA, 955 bp, Artificial Sequence
  derived and/or modified sequence
ccctctcctgcccattccgcggatgggcaatcccaggcggaactcccttgagggtctcagaatatctgggagacctcgggctcttgatctccgagacaccccgtttcgtagtggagaacagtccagatcggggaagtttattttgcccaaagccggttagaggccccctggccctcgattcccagtgcggggctcagagctcccctgaacagcagctgcagcagccatggccccgccctgggtgcccgccatgggcttcacgctggcgcccagcctggggtgcttcgtgggctcccgctttgtccacggcgagggtctccgctggtacgccggcctgcagaagccctcgtggcacccgccccactgggtgctgggccctgtctggggcacgctctactcagccatggggtacggctcctacctggtctggaaagagctgggaggcttcacagagaaggctgtggttcccctgggcctctacactgggcagctggccctgaactgggcatggccccccatcttctttggtgcccgacaaatgggctgggccttggtggatctcctgctggtcagtggggcggcggcagccactaccgtggcctggtaccaggtgagcccgctggccgcccgcctgctctacccctacctggcctggctggccttcacgaccacactcaactactgcgtatggcgggacaaccatggctggcgtgggggacggcggctgccagagtgagtgcccggcccaccagggactgcagctgcaccagcaggtgccatcacgcttgtgatgtggtggccgtcacgctttcatgaccactgggcctgctagtctgtcagggccttggcccaggggtcagcagagcttcagaggtggccccacctgagcccccacccgggagcagtgtcctgtgctttctgcatgcttagagcatgttcttggaacatggaattt

SEQ ID NO: 90871 - DNA, 881 bp, Artificial Sequence
  derived and/or modified sequence
ggcggctgggaggggcggggcggatgcggggacagcggcctggctaactcctgccaggcagtgcccttcccggagcgtgccctcgccgctgagctcccctgaacagcagctgcagcagccatggccccgccctgggtgcccgccatgggcttcacgctggcgcccagcctggggtgcttcgtgggctcccgctttgtccacggcgagggtctccgctggtacgccggcctgcagaagccctcgtggcacccgccccactgggtgctgggccctgtctggggcacgctctactcagccatggggtacggctcctacctggtctggaaagagctgggaggcttcacagagaaggctgtggttcccctgggcctctacactgggcagctggccctgaactgggcatggccccccatcttctttggtgcccgacaaatgggctgggccttggtggatctcctgctggtcagtggggcggcggcagccactaccgtggcctggtaccaggtgagcccgctggccgcccgcctgctctacccctacctggcctggctggccttcacgaccacactcaactactgcgtatggcgggacaaccatggctggcgtgggggacggcggctgccagagtgagtgcccggcccaccagggactgcagctgcaccagcaggtgccatcacgcttgtgatgtggtggccgtcacgctttcatgaccactgggcctgctagtctgtcagggccttggcccaggggtcagcagagcttcagaggtggccccacctgagcccccacccgggagcagtgtcctgtgctttctgcatgcttagagcatgttcttggaacatggaattttataagctgaataaagtttttgacttccttta

SEQ ID NO: 90872 - DNA, 636 bp, Artificial Sequence
  derived and/or modified sequence
agcggcctggctaactcctgccaggcagtgcccttcccggagcgtgccctcgccgctggtacggctcctacctggtctggaaagagctgggaggcttcacagagaaggctgtggttcccctgggcctctacactgggcagctggccctgaactgggcatggccccccatcttctttggtgcccgacaaatgggctgggccttggtggatctcctgctggtcagtggggcggcggcagccactaccgtggcctggtaccaggtgagcccgctggccgcccgcctgctctacccctacctggcctggctggccttcacgaccacactcaactactgcgtatggcgggacaaccatggctggcgtgggggacggcggctgccagagtgagtgcccggcccaccagggactgcagctgcaccagcaggtgccatcacgcttgtgatgtggtggccgtcacgctttcatgaccactgggcctgctagtctgtcagggccttggcccaggggtcagcagagcttcagaggtggccccacctgagcccccacccgggagcagtgtcctgtgctttctgcatgcttagagcatgttcttggaacatggaattttataagctgaataaagtttttgacttccttt

SEQ ID NO: 90873 - DNA, 672 bp, Artificial Sequence
  derived and/or modified sequence
caggaagcgcggtcccaggagtggccgacgctccctctcctgcccattccgcggatgggcaatcccaggcggaactcccttgagggtctcagaatatctgggagacctcgggctcttgatctccgagacaccccgtttcgtagtggagaacagtccagatcggggaagtttattttgcccaaagccggttagaggccccctggccctcgattcccagtgcggggctcaggtgcgttgcagcctagacgggtcttactgtgagccgagcagcctctgggacctgtctgcttcccctaccccttgcaaagaagccggagcccagagctcccctgaacagcagctgcagcagccatggccccgccctgggtgcccgccatgggcttcacgctggcgcccagcctggggtgcttcgtgggctcccgctttgtccacggcgagggtctccgctggtacgccggcctgcagaagccctcgtggcacccgccccactgggtgctgggccctgtctggggcacgctctactcagccatggggtacggctcctacctggtctggaaagagctgggaggcttcacagagaaggctgtggttcccctgggcctctacactgggcagctggccctgaactgggcatggccccccatcttctttggtgcccgacaaatgggctgg

SEQ ID NO: 90874 - DNA, 925 bp, Artificial Sequence
  derived and/or modified sequence
tcaagcttttggaccctcgtacagaagctaatacgactcactatagggaaataagagagaaaagaagagtaagaagaaatataagagccaccatggtatccaagggggaggaggacaacatggcgatcatcaaggagttcatgcgattcaaggtgcacatggaaggttcggtcaacggacacgaatttgaaatcgaaggagagggtgaaggaaggccctatgaagggacacagaccgcgaaactcaaggtcacgaaagggggaccacttcctttcgcctgggacattctttcgccccagtttatgtacgggtccaaagcatatgtgaagcatcccgccgatattcctgactatctgaaactcagctttcccgagggattcaagtgggagcgggtcatgaactttgaggacgggggtgtagtcaccgtaacccaagactcaagcctccaagacggcgagttcatctacaaggtcaaactgcgggggactaactttccgtcggatgggccggtgatgcagaagaaaacgatgggatgggaagcgtcatcggagaggatgtacccagaagatggtgcattgaagggggagatcaagcagagactgaagttgaaagatgggggacattatgatgccgaggtgaaaacgacatacaaagcgaaaaagccggtgcagcttcccggagcgtataatgtgaatatcaagttggatattacttcacacaatgaggactacacaattgtcgaacagtacgaacgcgctgagggtagacactcgacgggaggcatggacgagttgtacaaatgataataggctggagcctcggtggccatgcttcttgccccttgggcctccccccagcccctcctccccttcctgcacccgtacccccgtggtctttgaataaagtctgagtgggcggctctaga

SEQ ID NO: 90875 - DNA, 874 bp, Artificial Sequence
  derived and/or modified sequence
gggaaataagagagaaaagaagagtaagaagaaatataagagccaccatggtatccaagggggaggaggacaacatggcgatcatcaaggagttcatgcgattcaaggtgcacatggaaggttcggtcaacggacacgaatttgaaatcgaaggagagggtgaaggaaggccctatgaagggacacagaccgcgaaactcaaggtcacgaaagggggaccacttcctttcgcctgggacattctttcgccccagtttatgtacgggtccaaagcatatgtgaagcatcccgccgatattcctgactatctgaaactcagctttcccgagggattcaagtgggagcgggtcatgaactttgaggacgggggtgtagtcaccgtaacccaagactcaagcctccaagacggcgagttcatctacaaggtcaaactgcgggggactaactttccgtcggatgggccggtgatgcagaagaaaacgatgggatgggaagcgtcatcggagaggatgtacccagaagatggtgcattgaagggggagatcaagcagagactgaagttgaaagatgggggacattatgatgccgaggtgaaaacgacatacaaagcgaaaaagccggtgcagcttcccggagcgtataatgtgaatatcaagttggatattacttcacacaatgaggactacacaattgtcgaacagtacgaacgcgctgagggtagacactcgacgggaggcatggacgagttgtacaaatgataataggctggagcctcggtggccatgcttcttgccccttgggcctccccccagcccctcctccccttcctgcacccgtacccccgtggtctttgaataaagtctgagtgggcggc

SEQ ID NO: 90876 - DNA, 954 bp, Artificial Sequence
  derived and/or modified sequence
gggaaataagagagaaaagaagagtaagaagaaatataagagccaccatggtatccaagggggaggaggacaacatggcgatcatcaaggagttcatgcgattcaaggtgcacatggaaggttcggtcaacggacacgaatttgaaatcgaaggagagggtgaaggaaggccctatgaagggacacagaccgcgaaactcaaggtcacgaaagggggaccacttcctttcgcctgggacattctttcgccccagtttatgtacgggtccaaagcatatgtgaagcatcccgccgatattcctgactatctgaaactcagctttcccgagggattcaagtgggagcgggtcatgaactttgaggacgggggtgtagtcaccgtaacccaagactcaagcctccaagacggcgagttcatctacaaggtcaaactgcgggggactaactttccgtcggatgggccggtgatgcagaagaaaacgatgggatgggaagcgtcatcggagaggatgtacccagaagatggtgcattgaagggggagatcaagcagagactgaagttgaaagatgggggacattatgatgccgaggtgaaaacgacatacaaagcgaaaaagccggtgcagcttcccggagcgtataatgtgaatatcaagttggatattacttcacacaatgaggactacacaattgtcgaacagtacgaacgcgctgagggtagacactcgacgggaggcatggacgagttgtacaaatgataataggctggagcctcggtggccatgcttcttgccccttgggcctccccccagcccctcctccccttcctgcacccgtacccccgtggtctttgaataaagtctgagtgggcggcaaaaaaaaaaaaaaaaaaaaaaaaaaaaaaaaaaaaaaaaaaaaaaaaaaaaaaaaaaaaaaaaaaaaaaaaaaaaaaaa

SEQ ID NO: 90877 - DNA, 1014 bp, Artificial Sequence
  derived and/or modified sequence
gggaaataagagagaaaagaagagtaagaagaaatataagagccaccatggtatccaagggggaggaggacaacatggcgatcatcaaggagttcatgcgattcaaggtgcacatggaaggttcggtcaacggacacgaatttgaaatcgaaggagagggtgaaggaaggccctatgaagggacacagaccgcgaaactcaaggtcacgaaagggggaccacttcctttcgcctgggacattctttcgccccagtttatgtacgggtccaaagcatatgtgaagcatcccgccgatattcctgactatctgaaactcagctttcccgagggattcaagtgggagcgggtcatgaactttgaggacgggggtgtagtcaccgtaacccaagactcaagcctccaagacggcgagttcatctacaaggtcaaactgcgggggactaactttccgtcggatgggccggtgatgcagaagaaaacgatgggatgggaagcgtcatcggagaggatgtacccagaagatggtgcattgaagggggagatcaagcagagactgaagttgaaagatgggggacattatgatgccgaggtgaaaacgacatacaaagcgaaaaagccggtgcagcttcccggagcgtataatgtgaatatcaagttggatattacttcacacaatgaggactacacaattgtcgaacagtacgaacgcgctgagggtagacactcgacgggaggcatggacgagttgtacaaatgataataggctggagcctcggtggccatgcttcttgccccttgggcctccccccagcccctcctccccttcctgcacccgtacccccgtggtctttgaataaagtctgagtgggcggcaaaaaaaaaaaaaaaaaaaaaaaaaaaaaaaaaaaaaaaaaaaaaaaaaaaaaaaaaaaaaaaaaaaaaaaaaaaaaaaaaaaaaaaaaaaaaaaaaaaaaaaaaaaaaaaaaaaaaaaaaaaaaaaaaaaaaaaaaaaa

SEQ ID NO: 90878 - DNA, 920 bp, Artificial Sequence
  derived and/or modified sequence
tcaagcttttggaccctcgtacagaagctaatacgactcactatagggaaataagagagaaaagaagagtaagaagaaatataagagccaccatggtatccaagggggaggaggacaacatggcgatcatcaaggagttcatgcgattcaaggtgcacatggaaggttcggtcaacggacacgaatttgaaatcgaaggagagggtgaaggaaggccctatgaagggacacagaccgcgaaactcaaggtcacgaaagggggaccacttcctttcgcctgggacattctttcgccccagtttatgtacgggtccaaagcatatgtgaagcatcccgccgatattcctgactatctgaaactcagctttcccgagggattcaagtgggagcgggtcatgaactttgaggacgggggtgtagtcaccgtaacccaagactcaagcctccaagacggcgagttcatctacaaggtcaaactgcgggggactaactttccgtcggatgggccggtgatgcagaagaaaacgatgggatgggaagcgtcatcggagaggatgtacccagaagatggtgcattgaagggggagatcaagcagagactgaagttgaaagatgggggacattatgatgccgaggtgaaaacgacatacaaagcgaaaaagccggtgcagcttcccggagcgtataatgtgaatatcaagttggatattacttcacacaatgaggactacacaattgtcgaacagtacgaacgcgctgagggtagacactcgacgggaggcatggacgagttgtacaaatgataataggctggagcctcggtggccatgcttcttgccccttgggcctccccccagcccctcctccccttcctgcacccgtacccccgtggtctttgaataaagtctgagtgggcggct

SEQ ID NO: 90879 - DNA, 1514 bp, Artificial Sequence
  derived and/or modified sequence
gctgaggccccgccccacttccgggttgggccgtgggctggggagtcgtggaggcgcggtcctggtccccacccggcgcgctgggactcgcccgcctcccgtctgtcaccccctgcgcctcgccgggacaacggggcggcctggcgggtggcatcgagatctgcatcaccttccccaccgagtacgtgaagacgcagctgcagctggacgagcgctcgcacccgccgcggtaccggggcatcggggactgcgtgcggcagacggttcgcagccatggcgtcctgggcctgtaccgcggccttagctccctgctctacggttccatccccaaggcggccgtcaggtttggaatgttcgagttcctcagcaaccacatgcgggatgcccagggacggctggacagcacgcgtgggctgctgtgcggcctgggcgctggcgtggccgaggccgtggtggtcgtgtgccccatggagaccatcaaggtgaagttcatccacgaccagacctccccaaaccccaagtacagaggattcttccacggggttagggagattgtgcgggaacaagggctgaaggggacgtaccagggcctcacagccactgtcctgaagcagggctcgaaccaggccatccgcttcttcgtcatgacctccctgcgcaactggtaccgaggggacaaccccaacaagcccatgaaccctctgatcactggggtcttcggagctattgcaggcgcagccagtgtctttggaaacactcctctggatgtgattaagacccggatgcagggcctggaggcgcacaaataccggaacacgtgggactgcggcttgcagatcctgaagaaggaggggctcaaggcattctacaagggcactgtcccccgcctgggccgggtctgcctggatgtggccatagtgtttgtcatctatgatgaagtggtgaagctgctcaacaaagtgtggaagacggactaagcctagagaggccgcaaggggaccgccccaggcaccgccagagtgtcctgctacctttgtctcacgattccagtgcagtagtgccaaaaggccccttcccacgtccctcgagctctgtagcctggtctgtgcattgtggctgtcaaatccatgtgtcccccctgtggtctgtgtgtgacaccaccactgtgtcccagtgtctggcccagccatggctggatgtgcatctggcctatgaccctgtgcctgtgtttcatgttctgtgtcacgtgaccctgtgccccgcctcccggggtgcccgtgtggcctgggtcctcggccctgtagccctggcccggtcccagtccggtgccttccaccctgccctggcctaccacagctgcctccgggcctcggcctggcttcaccgcattccaggggctgcagccccctgcttctcccgccattggccttaactggccctcgggccctctctccgccccggacagggtggcacccaccactctcaggaccaccctgccaaggcagaataaaccg

SEQ ID NO: 90880 - protein, 385 aa, Artificial Sequence
  derived and/or modified sequence
MESLASDGFKLKEVSSVNSPPSQPPQPVVPAKPVQCVHHVSTQPSCPGRGKMSKLLNPEEMTSRDYYFDSYAHFGIHEEMLKDEVRTLTYRNSMYHNKHVFKDKVVLDVGSGTGILSMFAAKAGAKKVFGIECSSISDYSEKIIKANHLDNIITIFKGKVEEVELPVEKVDIIISEWMGYCLFYESMLNTVIFARDKWLKPGGLMFPDRAALYVVAIEDRQYKDFKIHWWENVYGFDMTCIRDVAMKEPLVDIVDPKQVVTNACLIKEVDIYTVKTEELSFTSAFCLQIQRNDYVHALVTYFNIEFTKCHKKMGFSTAPDAPYTHWKQTVFYLEDYLTVRRGEEIYGTISMKPNAKNVRDLDFTVDLDFKGQLCETSVSNDYKMR

SEQ ID NO: 90881 - DNA, 1158 bp, Artificial Sequence
  derived and/or modified sequence
atggagagcctggccagcgacggcttcaagctgaaggaggtgagcagcgtgaacagcccccccagccagcccccccagcccgtggtgcccgccaagcccgtgcagtgcgtgcaccacgtgagcacccagcccagctgccccggcagaggcaagatgagcaagctgctgaaccccgaggagatgaccagcagagactactacttcgacagctacgcccacttcggcatccacgaggagatgctgaaggacgaggtgagaaccctgacctacagaaacagcatgtaccacaacaagcacgtgttcaaggacaaggtggtgctggacgtgggcagcggcaccggcatcctgagcatgttcgccgccaaggccggcgccaagaaggtgttcggcatcgagtgcagcagcatcagcgactacagcgagaagatcatcaaggccaaccacctggacaacatcatcaccatcttcaagggcaaggtggaggaggtggagctgcccgtggagaaggtggacatcatcatcagcgagtggatgggctactgcctgttctacgagagcatgctgaacaccgtgatcttcgccagagacaagtggctgaagcccggcggcctgatgttccccgacagagccgccctgtacgtggtggccatcgaggacagacagtacaaggacttcaagatccactggtgggagaacgtgtacggcttcgacatgacctgcatcagagacgtggccatgaaggagcccctggtggacatcgtggaccccaagcaggtggtgaccaacgcctgcctgatcaaggaggtggacatctacaccgtgaagaccgaggagctgagcttcaccagcgccttctgcctgcagatccagagaaacgactacgtgcacgccctggtgacctacttcaacatcgagttcaccaagtgccacaagaagatgggcttcagcaccgcccccgacgccccctacacccactggaagcagaccgtgttctacctggaggactacctgaccgtgagaagaggcgaggagatctacggcaccatcagcatgaagcccaacgccaagaacgtgagagacctggacttcaccgtggacctggacttcaagggccagctgtgcgagaccagcgtgagcaacgactacaagatgagatag

SEQ ID NO: 90882 - DNA, 1158 bp, Artificial Sequence
  derived and/or modified sequence
atggagtccctggcaagcgatgggttcaaattaaaggaagtctctagcgtgaactctccaccctcacagccacctcagcccgtcgtaccggcaaagccagttcagtgtgtgcatcacgtctccactcagccaagctgcccaggccgaggaaagatgtccaagttactcaatcctgaagagatgacctccagagattattacttcgactcctatgcccacttcggaatccatgaggagatgctgaaggatgaggtcagaacattaacctatcggaacagtatgtaccacaataaacacgtttttaaggacaaggtggtgctggacgtcggcagtggaaccggaattctgagtatgtttgccgccaaggcaggtgcgaagaaagtcttcggaatagagtgcagttccatatctgattactctgagaagatcatcaaagccaaccacctggacaatatcataacaatattcaagggtaaagtggaagaagtagaactgcccgttgagaaggtggacattataatctcagagtggatgggatattgcctcttctacgaatctatgttaaacaccgtgatctttgccagggacaaatggttgaagcctgggggcctaatgttcccagatcgggccgctctgtacgtggtggctattgaggatagacagtacaaggattttaaaattcattggtgggaaaacgtttatggcttcgacatgacttgcattagagatgtggcgatgaaggaacccctcgtggatattgttgatcccaaacaggtggtaaccaatgcatgccttataaaagaggttgatatatataccgtgaaaacagaggaacttagcttcacctctgccttttgcctccaaattcagcggaacgactacgtgcatgcactggtgacctacttcaacatcgaattcaccaagtgccacaagaaaatgggcttcagtaccgcccctgacgcaccctacacccactggaaacaaacagtcttctatctggaggactacctgacggtccggcgaggtgaggagatatacggaactatcagcatgaagcctaatgctaagaatgtgagggatctggacttcactgtcgacctggatttcaagggacagctgtgtgagaccagcgtgagcaatgactataaaatgcgttag

SEQ ID NO: 90883 - DNA, 1158 bp, Artificial Sequence
  derived and/or modified sequence
atggagagcctggccagtgatggcttcaagctgaaggaggtgtcctctgtgaacagcccccccagccagcccccccagcctgtggtgcctgccaagcctgtgcagtgtgtgcaccacgtgtccacccagcccagctgccccggccggggcaagatgagcaagctgctgaaccctgaggagatgaccagccgggactactactttgacagctatgcccacttcggcatccacgaggagatgctgaaggatgaggtgaggaccctgacctacagaaattccatgtaccacaacaagcacgtgttcaaggacaaggtggtgctggatgtgggcagcggcaccggcatcctgtccatgtttgctgccaaggccggggccaagaaggtgtttggaattgagtgcagcagcatcagtgactacagcgagaagatcatcaaggccaaccacctggacaacatcatcaccatcttcaagggcaaggtggaggaggtggagctgcctgtggagaaggtggacatcatcatcagcgagtggatgggctactgcctcttctatgagagcatgctgaacacagtcatctttgcccgggacaagtggctgaagccaggcggcctgatgtttcctgaccgggccgccctgtatgtggtggccatcgaggaccggcagtacaaggacttcaagatccactggtgggagaatgtgtatggctttgacatgacctgcatcagagatgtggccatgaaggagcccctggtggacatcgtggaccccaagcaggtggtgaccaatgcctgcctgatcaaggaggtggacatctacacagtgaagacagaggagctgtccttcaccagcgccttctgcctgcagatccagagaaatgactatgtgcacgccctggtgacctacttcaacatcgagttcaccaagtgccacaagaagatgggcttcagcacagccccagatgccccctacacccactggaagcagacagtgttctacctggaggactacctgactgtgcggcggggggaggagatctacggcaccatctccatgaagcccaatgccaagaatgtgcgggacctggacttcaccgtggacctggacttcaagggccagctgtgtgagacctctgtgtccaatgactacaagatgaggtag

SEQ ID NO: 90884 - DNA, 1158 bp, Artificial Sequence
  derived and/or modified sequence
atggagagcctggccagcgacggcttcaagctgaaggaggtgagctccgtcaacagcccaccctcacagccaccccagccagtggtcccggccaaacctgtgcagtgtgtgcaccacgtgagcacacagccctcctgtcccggaaggggcaagatgagcaaactgctgaatcctgaggagatgacatcacgcgattattattttgatagctacgcccatttcgggatacatgaagaaatgctcaaagacgaagtgcggactttgacatataggaactcaatgtaccataataaacacgtgttcaaagataaggtcgttctcgatgtcggctccggcaccggcatcctctccatgttcgccgccaaggccggcgccaagaaagtgtttggaatagaatgcagttctatttccgactactctgagaagatcattaaggccaaccacttggataatataattaccatcttcaaggggaaagtagaggaggtcgagctgcccgtggaaaaagtggacattatcatcagcgagtggatggggtactgtttattctacgagagtatgctgaatacagtcatttttgccagggacaagtggctcaaacccggcggcctcatgttcccggatagagccgcactatacgtagtcgcgatagaggatagacagtataaggactttaagatccactggtgggagaacgtttatggcttcgatatgacctgtatccgggacgttgctatgaaagaaccactggtggatattgttgaccccaagcaagtcgtcacaaatgcttgcctgattaaggaggtggatatctatactgtgaaaacagaggagctgagctttacgtccgcgttttgtctccagatccagagaaacgattatgtgcatgcccttgtcacctactttaatatcgagttcacgaaatgccataagaaaatgggattttcaactgcacctgacgctccctacacacattggaaacaaaccgtgttttacctcgaggattatcttactgttcgccgcggcgaggagatctatggaaccattagcatgaagccaaatgccaaaaacgtgagagatctcgactttaccgtggaccttgacttcaaaggtcagctgtgcgagacatcagtgagtaatgattacaagatgaggtag

SEQ ID NO: 90885 - DNA, 1204 bp, Artificial Sequence
  derived and/or modified sequence
atttctgcaccagggaggcttgctgtttgaatgtgtgccaggttgaatggagtctctggcttcagatggattcaagctgaaagaggtttcttctgtgaacagccccccctcccagcccccccagcccgtcgtccctgctaagcccgtgcaatgcgtccatcatgtgtccactcaacccagctgcccaggacggggcaagatgtccaagctgctgaacccagaggagatgacctcgagagattattacttcgactcctatgcccactttgggatccacgaggaaatgctgaaggatgaggtgcggactctcacttaccggaactccatgtaccacaacaagcacgtgttcaaggacaaagtggtactggatgtggggagtggtactgggatcctttccatgttcgctgccaaggcaggggccaagaaggtgtttgggatcgaatgctccagtatttctgactactcagagaagatcattaaggccaaccacttggacaacatcatcaccatatttaagggtaaagtggaagaggtggagctgcctgtggagaaggtggacatcatcatcagcgagtggatgggctactgtctgttctatgagtccatgctcaacacggtgatctttgccagggacaagtggctgaaacctggagggcttatgtttccagaccgggcagctttgtacgtggtagcgattgaagacagacagtacaaggacttcaaaatccactggtgggagaatgtctatggctttgacatgacctgcatccgggacgtggccatgaaggagcctctagtggacatcgtggatccaaagcaagtggtgaccaatgcctgtttgataaaggaggtggacatttacacagtgaagacggaagagctatcgttcacatctgcattctgcctgcagatacagcgcaacgactacgtccacgccctggtcacctattttaatattgaatttaccaagtgccacaagaaaatggggttttccacagcccctgatgctccctacacccactggaagcagaccgtcttctacttggaagattacctcactgtccggaggggggaggaaatctacgggaccatatccatgaagccaaatgccaaaaatgtgcgagacctcgatttcacagtagacttggattttaagggacagctgtgtgaaacatctgtatctaatgactacaaaatgcgttag

SEQ ID NO: 90886 - DNA, 1158 bp, Artificial Sequence
  derived and/or modified sequence
atggaatcactcgcatcagatggtttcaagttgaaggaagtatcatccgtcaactcccctcccagtcagccacctcagcctgttgtaccagctaagcctgttcagtgcgtgcatcatgtgtcaacccagccctcttgccctggacggggaaagatgagcaagttattaaaccccgaagaaatgacctccagggattattacttcgacagctacgcgcattttggaattcatgaggagatgctcaaagatgaggtgaggaccctgacctaccgtaattccatgtaccacaacaaacatgtatttaaggataaagttgttcttgacgttggcagcggaacaggtatactgagcatgtttgccgctaaggccggagcgaagaaggtgtttgggatcgagtgcagcagcatctcagattacagcgagaagatcataaaagctaaccacctcgacaacataataactatttttaaagggaaggtggaagaggttgagctcccggtagaaaaggtagatatcataatcagcgaatggatgggctattgtctgttctatgagagcatgttaaatacagtcattttcgctagagacaaatggctgaaacctgggggtttaatgtttcccgatagggccgctctttatgttgtggctattgaggaccggcagtataaggacttcaagattcattggtgggaaaacgtctatggctttgatatgacctgtatcagggacgtggccatgaaggaacccttggtagacatcgtcgatccaaagcaagtcgtgactaacgcctgccttattaaagaggtcgacatttacacggtaaagacagaagagttaagctttacatccgctttttgtctgcagatccaaaggaacgattatgtgcatgccctggttacttatttcaatatcgagttcactaaatgccataaaaagatgggcttttccacagctcccgatgcaccatacacccactggaaacagaccgtgttctatctggaggactacctcaccgtccgcagaggtgaagagatctatgggactatctcaatgaaacccaacgcaaagaacgtccgtgaccttgactttacagtggacctggacttcaaaggtcaactgtgcgagacttcagtcagtaacgattacaagatgaggtag

SEQ ID NO: 90887 - protein, 231 aa, Artificial Sequence
  derived and/or modified sequence
MPKAKGKTRRQKFGYSVNRKRLNRNARRKAAPRIECSHIRHAWDHAKSVRQNLAEMGLAVDPNRAVPLRKRKVKAMEVDIEERPKELVRKPYVLNDLEAEASLPEKKGNTLSRDLIDYVRYMVENHGEDYKQSGKTSSILCRRGRWRWSDWFTSQLPQAEASPGPVKLEPGCKARRCCVAPEELARSHGIRRLHHVHTPRSGEGTVLRGSNLYSSGGSRKSQNLLFSGWVM

SEQ ID NO: 90888 - DNA, 696 bp, Artificial Sequence
  derived and/or modified sequence
atgcctaaagcaaaaggcaagacacgcaggcagaaattcggctatagtgtgaataggaaacgcctgaaccgcaacgccaggagaaaagctgcaccgcggattgagtgcagtcacattcgccacgcctgggaccacgccaagtcagtccgacagaatttggccgagatgggcctggctgtagaccccaaccgcgcggtcccgctccgaaagcggaaagtgaaagcaatggaagtcgatatagaagaacgccccaaagagttagtgcgcaaaccttacgttctcaacgacttggaagctgaggcctcacttccggagaaaaagggtaacacactgagtcgtgatctaatagattatgttcggtacatggtagaaaaccacggcgaggattataagcagagtgggaagacaagctccatcttgtgtcggcggggacgctggcggtggagcgattggtttacctctcagcttcctcaggcagaggcctctcctggacccgtgaagctagagcctggatgcaaagctaggaggtgctgtgtggccccagaagagttggccagatcccacgggatccgcaggctacatcacgtgcataccccccgctccggggaaggtactgtgttgaggggttctaacctatattcttccggcggatctcgcaaatctcaaaatttgttattcagtgggtgggtgatgtag

SEQ ID NO: 90889 - DNA, 763 bp, Artificial Sequence
  derived and/or modified sequence
agtttgttacacgaggtctgagagacagaggcagcgtgtttgagctgctggtgcggtggtcagcgcgatgcccaaggccaagggcaaaacccggaggcagaagtttggttacagtgtcaaccgaaagcgtctgaaccggaatgctcgacggaaggcagcgccgcggatcgaatgctcccacatccgacatgcctgggaccacgctaaatcggtacggcagaacctggccgagatggggttggctgtggaccccaacagggcggtgcccctccgtaagagaaaggtgaaggccatggaggtggacatagaggagaggcctaaagagcttgtacggaagccctatgtgctgaatgacctggaggcagaagccagccttccagaaaagaaaggaaatactctgtctcgggacctcattgactatgtacgctacatggtagagaaccacggggaggactataagcagagtggcaagacttcctcgattctttgcagaagaggaagatggaggtggagtgactggtttacatcacagctgccccaggctgaggcgtcccccggaccagtgaagctggagccagggtgtaaggcaaggaggtgctgtgtggctccagaggagctggccaggtcccatggaatcagaaggttacaccacgtgcacactccccgctctggggaaggaactgttctcagaggctccaatttatattcatctgggggttcacggaaaagccagaacctgctgttttcagggtgggtgatgtaa

SEQ ID NO: 90890 - DNA, 696 bp, Artificial Sequence
  derived and/or modified sequence
atgcccaaggccaagggcaagacccggcggcagaagtttggctacagcgtgaacaggaagaggctgaacagaaatgcccggaggaaggccgcccccagaattgaatgtagccacatcagacatgcctgggaccacgccaagtctgtgcggcagaacctggccgagatgggcctggccgtggaccccaacagagctgtgcccctgaggaagaggaaggtgaaggccatggaggtggacatcgaggagcggcccaaggagctggtgaggaagccctacgtgctgaatgacctggaggccgaggccagcctgcctgagaagaagggcaacaccctgagccgggacctgattgattatgtgcgctacatggtggagaaccacggggaggactacaagcagagcggcaagaccagcagcatcctgtgccggcggggccgctggcgctggagcgactggttcaccagccagctgccccaggccgaggccagccctggccctgtgaagctggagcccggctgcaaggcccggcgctgctgcgtggcccctgaggagctggcccggagccacggcatccggcggctgcaccacgtgcacacccccaggtctggagagggcaccgtgctgcggggcagcaacctgtacagcagcggcggcagcaggaagagccagaacctgctcttcagcggctgggtgatgtag

SEQ ID NO: 90891 - DNA, 696 bp, Artificial Sequence
  derived and/or modified sequence
atgcccaaggccaagggcaagacccggcggcagaagttcggctactcggttaatcgtaaaaggttgaatcgcaacgcacggagaaaggctgcccctcgtatcgaatgctcccacatcagacatgcttgggatcatgccaagtccgtcagacagaacctggcggaaatggggctcgcagttgatcccaatcgagccgtcccattacgaaagcgaaaggtaaaagccatggaggtggacatcgaggaaaggcctaaggagctggtgcgaaagccctacgtgctgaacgatctcgaggcagaagcatctttacccgagaaaaaaggcaacaccctgtcgcgggatctgatagattacgtcagatacatggtggagaaccatggggaagattataagcagagcggcaagacctcctcaatcttatgtcgcagaggccgatggaggtggtccgattggtttacaagccagctgccacaagctgaagcctccccaggaccagtaaagttagaaccaggatgtaaggccagaagatgctgcgtcgccccagaagagttggcccgctcgcacggcattaggcgcctgcaccacgtgcacactcctaggtctggggaaggaactgttcttcgtggctccaatttatactcctctggtggcagtcgcaagtctcaaaacctactttttagcgggtgggtgatgtag

SEQ ID NO: 90892 - DNA, 696 bp, Artificial Sequence
  derived and/or modified sequence
atgcctaaggccaaggggaaaactaggcgccagaaatttgggtactctgtaaatcgaaagaggctgaatcgtaacgcgaggagaaaagcagcgccaaggattgagtgcagccacattcgccatgcttgggaccatgctaagtcagtcagacagaaccttgctgaaatgggtttggctgtggacccaaatagagctgtgcctttacggaagaggaaagtaaaggccatggaagtcgacattgaggaacgacctaaagagttggtccgaaaaccttacgtgctaaacgacctggaagccgaagcgagtctcccagagaaaaagggcaacacactgtctcgagacctgatcgattacgtgcgctacatggtcgagaaccatggagaggactataagcaatcagggaagacaagctctatcttgtgtcgcagaggaagatggcgttggtccgattggtttaccagtcaattgcctcaggctgaggcttcaccaggtcctgtgaagttagagccaggctgtaaggcaaggaggtgttgtgtggctcccgaagaactggccaggagtcatggaatcagaaggctacaccacgtacatacaccgagatctggcgaaggaaccgtgttacggggaagtaatctctactccagcggtggaagccggaaatcccagaacctgctttttagcggctgggttatgtag

SEQ ID NO: 90893 - DNA, 696 bp, Artificial Sequence
  derived and/or modified sequence
atgcccaaggccaagggcaagaccagaagacagaagttcggctacagcgtgaacagaaagagactgaacagaaacgccagaagaaaggccgcccccagaatcgagtgcagccacatcagacacgcctgggaccacgccaagagcgtgagacagaacctggccgagatgggcctggccgtggaccccaacagagccgtgcccctgagaaagagaaaggtgaaggccatggaggtggacatcgaggagagacccaaggagctggtgagaaagccctacgtgctgaacgacctggaggccgaggccagcctgcccgagaagaagggcaacaccctgagcagagacctgatcgactacgtgagatacatggtggagaaccacggcgaggactacaagcagagcggcaagaccagcagcatcctgtgcagaagaggcagatggagatggagcgactggttcaccagccagctgccccaggccgaggccagccccggccccgtgaagctggagcccggctgcaaggccagaagatgctgcgtggcccccgaggagctggccagaagccacggcatcagaagactgcaccacgtgcacacccccagaagcggcgagggcaccgtgctgagaggcagcaacctgtacagcagcggcggcagcagaaagagccagaacctgctgttcagcggctgggtgatgtag

SEQ ID NO: 90894 - protein, 236 aa, Artificial Sequence
  derived and/or modified sequence
MPKAKGKTRRQKFGYSVNRKRLNRNARRKAAPRIECSHIRHAWDHAKSVRQNLAEMGLAVDPNRAVPLRKRKVKAMEVDIEERPKELVRKPYVLNDLEAEASLPEKKGNTLSRDLIDYVRYMVENHGEDYKSGKTSSILCRRGRWRWSDWFTSQLPQAEASPGPVKLEPGCKARRCCVAPEELARSHGIRRLHTRAHSPLWGRNCSQRLQFIFIWGFTEKPEPAVFRVGDVNIVCT

SEQ ID NO: 90895 - DNA, 711 bp, Artificial Sequence
  derived and/or modified sequence
atgcctaaggcaaaggggaagaccaggcgacagaaattcggctactctgtcaataggaagcggctcaaccgcaatgcgaggcgaaaagccgcccctcgcatcgagtgtagccatatccggcacgcctgggatcatgctaaatctgtcagacagaacctggccgaaatggggctcgcagtcgaccccaaccgagccgttccgctgcggaaaagaaaagtgaaggctatggaagtggatatcgaggagaggcccaaggagctagtgcggaaaccctatgtgctcaacgacctggaagctgaagctagtctgcctgagaagaagggcaacactcttagccgggacctgatcgactacgtgagatacatggtggaaaatcacggcgaagattacaagtctggcaaaacgtcaagcatcctgtgccggcgaggaaggtggcgatggtccgactggttcacaagccagttgcctcaggctgaggcctccccaggaccagtgaaactcgagccagggtgcaaggccaggcgatgctgcgtggcgcccgaagagttagctagatcccacggcatcagacggctgcacactagagctcacagcccgctctggggacgtaactgctcacagcgtctgcagttcatcttcatctggggatttactgagaagcctgagccagccgtgtttagagtgggagacgtgaatattgtgtgcacatag

SEQ ID NO: 90896 - DNA, 952 bp, Artificial Sequence
  derived and/or modified sequence
gtcatgaaaggggcggggaaacgaataaattgagccttgtacgcaggcgcaaatgctcgttgcatcctgggagtcgtagtgctcagcacggtagtgctacaaaaggactacatttccccaaatgcccgcaaagccttgtgcacgccttccggaaggagtttgttacacgaggtctgagagacagaggcagcgtgtttgagctgctggtgcggtggtcagcgcgatgcccaaggccaagggcaaaacccggaggcagaagtttggttacagtgtcaaccgaaagcgtctgaaccggaatgctcgacggaaggcagcgccgcggatcgaatgctcccacatccgacatgcctgggaccacgctaaatcggtacggcagaacctggccgagatggggttggctgtggaccccaacagggcggtgcccctccgtaagagaaaggtgaaggccatggaggtggacatagaggagaggcctaaagagcttgtacggaagccctatgtgctgaatgacctggaggcagaagccagccttccagaaaagaaaggaaatactctgtctcgggacctcattgactatgtacgctacatggtagagaaccacggggaggactataagagtggcaagacttcctcgattctttgcagaagaggaagatggaggtggagtgactggtttacatcacagctgccccaggctgaggcgtcccccggaccagtgaagctggagccagggtgtaaggcaaggaggtgctgtgtggctccagaggagctggccaggtcccatggaatcagaaggttacacacacgtgcacactccccgctctggggaaggaactgttctcagaggctccaatttatattcatctgggggttcacggaaaagccagaacctgctgttttcagggtgggtgatgtaaatatagtgtgtacataataaagcaaatatatttta

SEQ ID NO: 90897 - DNA, 711 bp, Artificial Sequence
  derived and/or modified sequence
atgcccaaggccaagggcaagacccggcggcagaagtttggctacagcgtgaacaggaagaggctgaacagaaatgcccggaggaaggccgcccccagaattgaatgtagccacatcagacatgcctgggaccacgccaagtctgtgcggcagaacctggccgagatgggcctggccgtggaccccaacagagctgtgcccctgaggaagaggaaggtgaaggccatggaggtggacatcgaggagcggcccaaggagctggtgaggaagccctacgtgctgaatgacctggaggccgaggccagcctgcctgagaagaagggcaacaccctgagccgggacctgattgattatgtgcgctacatggtggagaaccacggggaggactacaagagcggcaagaccagcagcatcctgtgcagaagaggccgctggcgctggagcgactggttcaccagccagctgccccaggccgaggccagccctggccctgtgaagctggagcccggctgcaaggcccggcgctgctgcgtggcccctgaggagctggcccggagccacggcatccggcggctgcacacccgggcccacagccccctgtggggcaggaactgcagccagaggctgcagttcatcttcatctggggcttcacagagaagccagagcctgctgtgttccgggtgggagatgtgaacatcgtgtgcacctag

SEQ ID NO: 90898 - DNA, 711 bp, Artificial Sequence
  derived and/or modified sequence
atgcccaaggccaagggcaagacccggcggcagaagttcggctactccgtgaatcgcaaaagactgaatcgcaacgcccgcagaaaagccgcaccacggatcgagtgctcccatatcagacatgcctgggaccacgccaagtccgtgagacaaaatcttgcagaaatgggactagcggtggatcccaacagggccgtgccactccgtaagcgcaaggtaaaggcaatggaagtggacatcgaagaaaggcctaaagaacttgtgaggaaaccttacgttctgaatgatctcgaggctgaggcttctctaccagaaaagaaaggaaacactctatcccgagacctgatcgactacgttaggtacatggttgagaatcacggcgaggactataaatccggaaagacatcaagcatcttgtgcagaagaggcagatggcgctggagcgactggttcacttctcagctgccacaggcagaagcctccccagggccggtaaaactggaaccaggatgtaaggctagacgatgctgtgtggcccctgaggaactggctagatcacatggaattcgcaggttacacactagagcgcattcacccctatggggaaggaattgctcccaaaggttgcagttcatttttatctgggggtttaccgaaaaaccagagccagcagtgtttcgagtaggggacgtgaacattgtttgtacgtag

SEQ ID NO: 90899 - DNA, 711 bp, Artificial Sequence
  derived and/or modified sequence
atgcctaaggctaaaggaaagacccgcagacagaagttcggatattcagtaaaccggaagcgcctgaacagaaatgcacggagaaaggccgctcccagaattgagtgttcacacattcggcacgcctgggatcatgctaagagtgtgcgccaaaatttagccgaaatgggattagctgtggatcctaatagggcagtgcccctaaggaagcggaaagtgaaagcaatggaagtggacatcgaggaacgccctaaagagctggtcagaaagccttatgtactgaacgatcttgaagcggaggcaagtctccctgaaaagaagggaaacacgcttagccgggaccttatcgactacgtccgatacatggttgagaaccatggcgaagactacaagtccggcaaaacctcctccatcctgtgtcgccgaggtaggtggaggtggtcggattggttcacaagccagctgccacaggctgaggcatccccgggacctgttaaactcgaacctggctgtaaagccaggagatgctgtgtggcccctgaggagctggccaggagccacggtattcgcagactacacactagggctcattcccccctctggggaaggaactgctcccaaaggcttcagttcatttttatctggggtttcactgagaagcccgagcccgcagtgttcagggtgggagacgtgaatattgtgtgtacctag

SEQ ID NO: 90900 - DNA, 711 bp, Artificial Sequence
  derived and/or modified sequence
atgcccaaggccaagggcaagaccagaagacagaagttcggctacagcgtgaacagaaagagactgaacagaaacgccagaagaaaggccgcccccagaatcgagtgcagccacatcagacacgcctgggaccacgccaagagcgtgagacagaacctggccgagatgggcctggccgtggaccccaacagagccgtgcccctgagaaagagaaaggtgaaggccatggaggtggacatcgaggagagacccaaggagctggtgagaaagccctacgtgctgaacgacctggaggccgaggccagcctgcccgagaagaagggcaacaccctgagcagagacctgatcgactacgtgagatacatggtggagaaccacggcgaggactacaagagcggcaagaccagcagcatcctgtgcagaagaggcagatggagatggagcgactggttcaccagccagctgccccaggccgaggccagccccggccccgtgaagctggagcccggctgcaaggccagaagatgctgcgtggcccccgaggagctggccagaagccacggcatcagaagactgcacaccagagcccacagccccctgtggggcagaaactgcagccagagactgcagttcatcttcatctggggcttcaccgagaagcccgagcccgccgtgttcagagtgggcgacgtgaacatcgtgtgcacctag

SEQ ID NO: 90901 - protein, 189 aa, Artificial Sequence
  derived and/or modified sequence
MFRSDAYHPDHFNCTHCGKELTAEARELKGELYCLPCHDKMGVPICGACRRPIEGRVVNALGKQWHVEHFVCAKCEKPFLGHRHYEKKGLAYCETHYNQLFGDVCYNCSHVIEGDVVSALNKAWCVSCFSCSTCNSKLTLKNKFVEFDMKPVCKRCYEKFPLELKKRLKKLSELTSRKAQPKATDLNSA

SEQ ID NO: 90902 - DNA, 570 bp, Artificial Sequence
  derived and/or modified sequence
atgttcagaagcgacgcctaccaccccgaccacttcaactgcacccactgcggcaaggagctgaccgccgaggccagagagctgaagggcgagctgtactgcctgccctgccacgacaagatgggcgtgcccatctgcggcgcctgcagaagacccatcgagggcagagtggtgaacgccctgggcaagcagtggcacgtggagcacttcgtgtgcgccaagtgcgagaagcccttcctgggccacagacactacgagaagaagggcctggcctactgcgagacccactacaaccagctgttcggcgacgtgtgctacaactgcagccacgtgatcgagggcgacgtggtgagcgccctgaacaaggcctggtgcgtgagctgcttcagctgcagcacctgcaacagcaagctgaccctgaagaacaagttcgtggagttcgacatgaagcccgtgtgcaagagatgctacgagaagttccccctggagctgaagaagagactgaagaagctgagcgagctgaccagcagaaaggcccagcccaaggccaccgacctgaacagcgcctag

SEQ ID NO: 90903 - DNA, 570 bp, Artificial Sequence
  derived and/or modified sequence
atgttccgaagtgatgcctatcaccccgatcactttaattgtacccattgcggaaaagaactgacagccgaggccagagaacttaagggggagctctattgtctaccttgtcacgacaagatgggagtgcccatctgcggagcgtgccgccgccctatcgagggccgggtcgttaatgccctaggcaaacagtggcacgtggaacactttgtttgcgctaaatgcgagaaaccattcctcggacaccgccattacgaaaaaaagggtctcgcttattgcgaaactcactataaccagctgtttggtgacgtttgctacaactgtagtcacgtaatagagggagacgttgttagtgccctgaataaggcatggtgtgtttcttgtttttcctgctctacatgtaacagtaagcttaccctgaaaaacaagtttgtagagtttgatatgaagcctgtgtgcaagcgctgctatgagaaattcccattggagttaaaaaaaagactcaagaaactcagtgagctgacatcacggaaagcccagccaaaagccacagatcttaactcagcctag

SEQ ID NO: 90904 - DNA, 570 bp, Artificial Sequence
  derived and/or modified sequence
atgtttaggtccgatgcttaccacccagaccacttcaactgtacacactgcggtaaggaactcacagcggaagcgcgggagctgaaaggcgagctgtactgcctgccatgtcatgacaaaatgggggtgcccatctgtggggcctgtagaagaccaatcgagggccgcgttgtgaatgcactgggcaaacagtggcacgttgaacactttgtttgcgccaagtgcgaaaaaccgtttcttggacacaggcattatgagaaaaagggcctggcttattgcgagacccattacaatcagctctttggcgacgtctgctataactgttctcatgtaatcgagggcgacgtggtttcggcactgaacaaggcctggtgtgtaagttgcttttcctgcagcacttgcaactctaaactcacactgaagaataagtttgtcgaattcgatatgaaacctgtgtgcaagagatgctatgaaaaatttccgctggagctgaaaaagcggctcaaaaaactgtcagagttgacatctcgtaaagcccagcctaaggccaccgacttgaactccgcttag

SEQ ID NO: 90905 - DNA, 570 bp, Artificial Sequence
  derived and/or modified sequence
atgttcagaagtgacgcttatcatcctgatcactttaattgcactcattgcggtaaggaactcaccgcagaggctcgggagctcaaaggcgagctgtactgtctcccatgtcatgacaagatgggagttcctatctgcggcgcttgtcggaggcccatcgagggtcgcgttgttaatgccctcggcaaacagtggcacgtggagcactttgtttgtgcaaaatgcgagaagccattcttggggcatagacattacgaaaaaaagggactggcctactgcgagacgcattataaccagctattcggggatgtctgctacaactgttcccatgtcatcgaaggggacgttgtgtcagctctgaataaagcgtggtgcgtttcttgtttcagctgttccacatgcaattctaaattaactctgaagaataaatttgttgagttcgatatgaaacctgtttgcaaaaggtgttacgagaagtttccactggagctgaaaaagcgcttgaagaagttgtcagagttaaccagtagaaaggcacagcctaaagctacagatctcaacagtgcgtag

SEQ ID NO: 90906 - DNA, 570 bp, Artificial Sequence
  derived and/or modified sequence
atgtttaggtcggatgcgtaccacccagaccattttaattgtacacattgtggtaaggagctcactgctgaggctagggaactgaaaggtgaactgtactgtctgccgtgtcacgataagatgggtgtgcccatctgtggggcttgtaggaggcctatcgagggccgcgtcgttaacgccctgggaaagcagtggcatgtggagcattttgtttgcgctaagtgcgaaaagccgttcctgggacatcgccactatgagaagaaagggctcgcttactgcgagacacactacaatcagctctttggcgatgtatgctataactgctcacatgtcatcgagggcgatgtggtgtcagctttgaataaggcctggtgtgtgtcatgtttttcttgtagtacgtgcaatagcaaactaacgctgaagaataagtttgtcgagtttgacatgaaaccagtatgtaaacggtgctacgagaaattcccactggaactgaagaaacgtctgaagaagttatcagagttgacgtcacggaaggcccagcctaaggctactgatcttaactctgcctag

SEQ ID NO: 90907 - DNA, 570 bp, Artificial Sequence
  derived and/or modified sequence
atgttcagaagtgatgcataccatccggaccacttcaactgcactcattgtggtaaggaactgaccgccgaagccagggagctcaaaggggagttgtattgcctcccttgtcacgacaagatgggggtgcccatctgcggggcctgtaggaggcctatagagggccgggtggtcaatgccctgggaaagcaatggcacgtcgaacattttgtttgtgcgaaatgcgaaaagcccttcctcggccatcgccactatgagaagaaaggcctcgcttattgcgaaacccattataaccagttattcggcgacgtgtgctacaactgtagtcacgttatcgaaggggatgtggtgtctgcactgaacaaagcctggtgtgtctcctgcttcagctgctcaacgtgcaattctaaactaaccctgaagaacaagttcgtggagtttgacatgaagccggtgtgcaagagatgttacgagaaatttcctcttgaacttaaaaaaaggctgaaaaagttgagcgagctcactagccgcaaggcacagccgaaggcaacagatctgaattctgcttag

SEQ ID NO: 90908 - DNA, 570 bp, Artificial Sequence
  derived and/or modified sequence
atgttcagaagtgatgcctaccacccagaccacttcaactgcacccactgcggcaaggagctgacagctgaggcccgggagctgaagggggagctgtactgcctgccctgccacgacaagatgggcgtgcccatctgtggggcctgccggcggcccatcgagggccgggtggtgaatgccctgggcaagcagtggcacgtggagcactttgtgtgtgccaagtgtgagaagcccttcctgggccaccgccactatgagaagaagggcctggcctactgtgagacccactacaaccagctgtttggagatgtgtgctacaactgcagccacgtgattgaaggagatgtggtgtctgccctgaacaaggcctggtgtgtgtcctgcttcagctgcagcacctgcaacagcaagctgaccctgaagaacaagtttgtggagtttgacatgaagcctgtgtgcaagcgctgctatgagaagttccccctggagctgaagaagaggctgaagaagctgtctgagctgaccagcaggaaggcccagcccaaggccacagacctgaacagcgcctag

SEQ ID NO: 90909 - DNA, 570 bp, Artificial Sequence
  derived and/or modified sequence
atgttccggagcgacgcctaccaccccgaccacttcaactgcacccattgcgggaaggaacttacggctgaggcaagagaactaaagggtgagctgtactgtctgccttgccatgacaaaatgggagtgcctatctgtggcgcctgtaggagaccaattgaagggagagttgtcaacgcgctcggtaaacagtggcacgtagaacattttgtgtgcgcgaaatgcgaaaaacctttcctgggccaccggcactacgagaaaaagggcctggcttactgtgagacccactacaatcagctcttcggggatgtctgttataattgtagccacgtgattgagggcgatgtcgtgagtgccctcaataaagcttggtgtgtgagctgtttcagctgctctacctgcaactctaagctgaccttgaagaacaaattcgtcgaatttgacatgaagccagtttgtaaacgatgttatgagaagtttccactcgagctcaaaaagcgtttaaagaagctttctgaactgaccagtagaaaggcccagcccaaggccaccgatctaaactccgcttag

SEQ ID NO: 90910 - DNA, 570 bp, Artificial Sequence
  derived and/or modified sequence
atgttccggagcgacgcctaccaccccgaccacttcaactgcacccattgcggaaaagagctgacagctgaagcgagagaactcaagggcgagctgtactgtctgccctgccacgacaaaatgggtgtaccaatttgtggcgcctgcaggcggcctattgagggtagagtggttaacgctttgggtaagcagtggcatgttgagcatttcgtgtgcgccaagtgcgagaagcccttcctggggcatagacattacgagaaaaagggccttgcatactgcgagacccactacaaccagctgtttggggacgtatgctataattgcagccacgtgatcgaaggggatgttgtctcagctttaaataaggcgtggtgcgtgagctgtttcagctgttcgacctgcaattccaagcttactctgaaaaataagttcgtagaattcgacatgaagcctgtgtgcaagcgctgctatgagaaattcccgctggagctgaagaaaaggctcaagaagcttagcgaactgacgtcccgcaaggcccagccgaaagcaaccgatctaaacagcgcctag

SEQ ID NO: 90911 - DNA, 570 bp, Artificial Sequence
  derived and/or modified sequence
atgttccggagcgacgcctaccaccccgaccacttcaactgcacccattgtggaaaagagctgaccgcggaggcgcgggagttgaagggagagttatattgcctgccttgtcatgacaaaatgggcgtgcctatttgtggggcatgtcggaggccaatcgaaggcagggtggtgaacgccctcggcaagcagtggcacgttgagcatttcgtctgcgccaagtgcgagaaaccttttctcggtcatcgacattatgagaagaaaggtctggcgtattgtgaaacccattacaaccagctctttggtgacgtctgctataattgttcccatgtgattgagggcgatgttgtgtccgctttgaacaaggcgtggtgtgtgtcatgttttagttgctcaacatgtaattccaaactcaccctgaagaataagttcgtcgaattcgatatgaagccagtgtgcaagagatgttatgaaaaatttccgcttgagttgaagaagcggctgaaaaaactcagcgagcttacctctcgtaaggctcagcctaaagccacagatctgaattctgcgtag

SEQ ID NO: 90912 - DNA, 570 bp, Artificial Sequence
  derived and/or modified sequence
atgttccggagcgacgcctaccaccccgaccacttcaactgcacccactgtgggaaagaactgactgcagaagctcgcgagttgaaaggtgaactttactgcctaccttgtcatgacaagatgggcgttcccatttgcggggcatgccgccgtcccatcgaagggagagttgtgaatgctcttgggaaacaatggcatgtcgagcattttgtctgcgccaaatgcgaaaaaccctttctgggccatcgccactacgagaaaaaaggattagcttactgtgaaacccactacaatcagctgttcggcgacgtctgttacaactgtagccatgtcatcgagggcgacgtagtgagcgcgcttaataaggcctggtgtgtttcatgtttttcatgttctacctgtaactccaagctgacgctcaaaaacaaatttgtggaattcgacatgaaacccgtgtgcaaacgctgttacgaaaagtttccgctcgaactcaaaaagcggcttaagaaactctcggaacttacctccagaaaagcccaacctaaagcaaccgatctaaacagtgcctag

SEQ ID NO: 90913 - DNA, 570 bp, Artificial Sequence
  derived and/or modified sequence
atgttccggagcgacgcctaccaccccgaccacttcaactgcacccactgcggtaaagaactgacagctgaggctcgagagctgaagggcgaactgtattgtcttccttgtcatgacaagatgggtgtgccaatctgtggggcttgcaggcgtccaatcgaaggtagagtagtgaatgcactgggaaaacagtggcacgtggaacacttcgtctgtgcaaaatgcgagaaaccattcttggggcacaggcattacgagaagaagggtttagcctactgcgaaactcattataatcagctgtttggagatgtgtgttacaactgttctcacgttatcgaaggggacgtcgtttccgcgctaaacaaggcttggtgtgtcagctgtttctcctgctccacctgcaacagcaagctcaccctcaaaaacaagttcgtggaatttgatatgaaaccggtctgtaagcgatgttatgagaagttcccgctggaactcaaaaagcgcctcaagaagctctcagaactcaccagcaggaaagcccagcctaaagccaccgatctcaactctgcatag

SEQ ID NO: 90914 - DNA, 570 bp, Artificial Sequence
  derived and/or modified sequence
atgtttaggagtgacgcttatcacccggatcatttcaattgcacacactgcggcaaagagcttactgccgaagcgagggagctcaagggcgagctttactgcctgccatgtcatgacaaaatgggagtgcccatttgtggcgcatgtcgtagaccaattgaggggagggtcgtgaacgcactgggtaagcagtggcacgtagagcatttcgtgtgcgcgaaatgcgagaagccctttttggggcatcggcactatgaaaaaaaagggctggcatactgcgaaactcactacaaccagctgttcggagacgtgtgctacaattgctcccacgtgattgaaggcgatgtagtgtcagcccttaataaggcctggtgcgtgagctgtttcagctgttctacctgtaatagtaagctgactttgaagaataaattcgtggagtttgacatgaaacccgtctgcaaacggtgttacgaaaaatttccattagaactgaaaaaacgattgaaaaagctgagcgaacttacctcccggaaagcacagcctaaggcgaccgacttgaattccgcgtag

SEQ ID NO: 90915 - DNA, 570 bp, Artificial Sequence
  derived and/or modified sequence
atgtttcggagcgatgcgtatcatcctgaccattttaactgtacccactgtggcaaggaactaacagccgaggcccgagaattgaagggcgagttgtactgccttccatgccacgataagatgggagttcctatttgtggcgcttgtcgtagaccaattgagggccgagtggttaatgccctgggcaagcagtggcacgtcgagcattttgtctgtgcaaagtgcgaaaagccgtttcttggtcaccgccactacgagaagaaggggcttgcttactgcgagacccattacaaccagctgttcggcgacgtttgttacaattgctctcatgtgatcgaaggggacgtggtctcggctctgaataaggcctggtgtgtttcatgtttcagttgcagcacttgcaattccaaattgactttgaagaacaagtttgtggaattcgatatgaagccagtgtgcaaaaggtgctacgagaaattccctctcgaactcaagaaacggcttaagaaactctccgaattaacctccaggaaagctcagcccaaagcaacagacttgaatagtgcctag

SEQ ID NO: 90916 - DNA, 570 bp, Artificial Sequence
  derived and/or modified sequence
atgtttaggagcgacgcgtatcaccctgatcactttaattgtacacattgcggcaaagaacttaccgccgaggccagagagctgaagggcgaactgtactgtttaccctgccatgataaaatgggggtgcctatctgcggagcttgcagacgaccaattgaaggtagagtggtcaacgcactgggtaagcagtggcatgtggagcattttgtctgcgccaagtgcgaaaagcctttcctggggcaccgacattatgaaaaaaaggggttggcttactgcgagacacattacaatcagttgtttggcgatgtttgctacaattgttcacacgtcattgagggtgacgttgtcagcgctcttaacaaagcatggtgtgtgagttgtttttcatgtagtacctgtaactccaaactgaccctgaagaacaagttcgtggagttcgacatgaagcccgtgtgcaaacgctgttacgagaagttcccattggagctcaaaaagagactgaagaagctgtcagagctcacctccaggaaggcacagcccaaagcaaccgacttaaactctgcatag

SEQ ID NO: 90917 - DNA, 570 bp, Artificial Sequence
  derived and/or modified sequence
atgtttcgctccgatgcctaccatcccgatcactttaactgcacccactgcggaaaggagctgacagcagaggccagggagctcaagggtgaactgtattgcttaccgtgccatgacaaaatgggagtgccaatatgcggtgcctgtcggaggccaattgagggacgcgtcgttaacgcactcggcaaacagtggcacgtggaacactttgtgtgtgcaaaatgcgagaagccatttttgggccatagacattacgaaaaaaagggcttggcgtactgtgaaacccactacaatcagttgttcggcgacgtctgttacaactgtagccacgtcatcgaaggtgacgtggtctcggcactgaacaaagcctggtgtgtgagttgcttttcttgtagcacctgtaacagcaagctgacacttaagaacaagtttgtggagttcgatatgaaaccagtttgcaaaagatgctacgagaagttccctctagaactaaagaagcgactcaaaaaactgtctgagttgaccagccgtaaagcccagcctaaggctacagacttaaactctgcctag

SEQ ID NO: 90918 - DNA, 570 bp, Artificial Sequence
  derived and/or modified sequence
atgtttcgctctgatgcatatcatcccgatcatttcaattgtactcactgtggcaaggagttgaccgctgaggctcgcgaactgaagggtgagctttattgtctgccctgccatgacaagatgggtgtgccaatatgcggagcctgccgccgtccaatcgagggacgagtcgtgaacgcattagggaagcagtggcacgtagagcattttgtgtgtgctaaatgcgagaagccttttctgggccatcgtcactatgagaaaaaaggcctggcatattgcgagacccattataatcagctcttcggagacgtgtgctataattgctcccatgtgattgagggtgatgtcgtgtctgcattgaataaagcttggtgcgtgagttgtttctcttgcagcacatgtaactccaagctgaccctgaagaacaagtttgtggagttcgacatgaagcccgtgtgtaaaagatgctatgagaagttcccactggagctgaagaagagacttaagaaactgagcgagttgacttccaggaaagcacagcccaaggccacagacctgaattccgcttag

SEQ ID NO: 90919 - DNA, 1926 bp, Artificial Sequence
  derived and/or modified sequence
atggccgtggactgtcctggggatctggggaccagaatgatgcctatccgcaggtcagcgcagctggaacgaattcggcagcagcaggaggacatgaggagaagaagggaggaagagggtaagaagcaggagctggacttgaactcttctatgcggttaaaaaaactggcccagattccgccgaagactggcatcgacaatcctatgtttgacacagaagaaggcatcgttctggaatctccacattatgctgtcaagatccttgaaatcgaagacctttttagctcacttaaacatatccagcacacgttagtggattcacaaagccaggaagacatctccttgctcctccagctggtgcagaacaaggacttccaaaacgcattcaaaatccataatgccatcaccgtgcacatgaacaaagccagcccccctttccctctgataagcaatgctcaagacctggctcaggaagtgcaaacagttctgaaacccgtgcaccacaaggagggccaagagctgactgcacttttaaatactccacatattcaagctctcctattggctcatgataaggtcgctgagcaggagatgcagcttgagccaattaccgatgagagggtttatgaatctataggtcagtatggaggcgaaaccgtgaagattgttcgcattgagaaggcaagagacattcctctaggcgcaaccgtcaggaacgaaatggactctgtgatcatcagtcgcattgtgaaaggaggagcggcggagaagtctggtttactgcacgagggggacgaggttctggaaatcaacggcatcgaaattcgcggaaaagacgtgaatgaagtgttcgacctcctcagtgacatgcacggaacactgacatttgtgcttatacctagccagcagatcaagccaccccctgcaaaggagacggtgattcacgtcaaagcccactttgactatgaccctagcgacgacccatatgtgccttgcagggaattggggttgagcttccagaagggcgacatcctccatgtcatttctcaggaagatccgaactggtggcaggcttatagagaaggagatgaagataaccagcccctcgcgggcctggtgccagggaaatcctttcagcagcagagggaggccatgaagcagacaatcgaggaggataaggagcctgagaaatcggggaagctctggtgcgccaagaaaaataagaaaaaaagaaaaaaggtgctatacaacgctaacaaaaacgacgactatgataatgaggagatcctgacatacgaggagatgtctctctaccaccagccggctaacaggaagaggccaataatcctgatcggaccgcagaattgtggacagaatgagctccgccagaggcttatgaacaaagagaaagatcgtttcgcgagcgctgtgcctcacactaccagatcccgccgtgatcaggaggtggctgggagagattatcactttgtgagccgccaggcctttgaggcagatatcgctgctggcaagtttatcgaacatggggagtttgagaagaacctgtacggaacatcaatcgatagcgtgcggcaggtgattaattctggaaagatctgcctgttgtcactgcgcacccagagtctcaagacactgagaaattcggacctaaagccctacattatcttcattgcaccaccatcccaggaaaggttgagggccctgctggccaaggaggggaagaaccctaagcccgaagagcttagggaaataatagagaaaactcgtgagatggagcagaacaacggccattatttcgatacggcaatagtcaacagcgacttggacaaggcctaccaggaactgctgcgcctgatcaacaaacttgacactgaacctcagtgggtgccatccacatggctgagatag

SEQ ID NO: 90920 - DNA, 450 bp, Artificial Sequence
  derived and/or modified sequence
atggctgtggactgtccgggcgacctaggcacgaggatgatgcccattcgcagaagcgctcaactggagaggatcaggcagcaacaagaggacatgcgtagaaggagggaggaggagggaaagaaacaagagcttgacctgaactcttctatgcgacttaaaaaactggctcagattcctccaaagacaggcatcgacaacccaatgtttgacacagaggagggcattgtccttgagtccccccattatgccgttaagatactggagatcgaagacctctttagcagcttaaaacacatccaacacacactggtggattcgcagtcccaggaggacatttctctgctactccagttggtccagaacaaagatttccagaacgcctttaaaatccacaacgctatcacagtgcatatgaataaagcttctcccccatttccactaatttag

SEQ ID NO: 90921 - DNA, 1926 bp, Artificial Sequence
  derived and/or modified sequence
atggctgtggactgccctggggacctgggcaccaggatgatgcccatcagaagaagtgcccagctggagcgcatccggcagcagcaggaggacatgagaagaagaagagaggaggagggcaagaagcaggagctggacctgaacagctccatgaggctgaagaagctggcccagatcccccccaagacaggaattgacaaccccatgtttgacacagaggagggcatcgtgctggagagcccccactatgctgtgaagatcctggagattgaagatctcttcagcagcctgaagcacatccagcacaccctggtggacagccagagccaggaggacatcagcctgctgctgcagctggtgcagaacaaggacttccagaatgccttcaagatccacaatgccatcaccgtgcacatgaacaaggccagcccccccttccccctcatcagcaatgcccaggacctggcccaggaggtgcagacagtgctgaagcctgtgcaccacaaggagggccaggagctgacagccctgctgaacaccccccacatccaggccctgctgctggcccatgacaaggtggccgagcaggagatgcagctggagcccatcacagatgagcgggtgtatgagagcatcggccagtatggaggagaaacagtgaagatcgtgagaattgagaaggcccgggacatccccctgggcgccaccgtgagaaatgagatggattctgtcatcatcagcagaattgtgaagggcggcgctgctgagaagagcggcctgctgcacgagggagatgaggtgctggagatcaatggaattgagatccggggcaaggatgtgaatgaggtgtttgacctgctgagtgacatgcacggcaccctgacctttgtgctgatccccagccagcagatcaagcccccaccagccaaggagaccgtcatccacgtgaaggcccactttgattatgaccccagtgatgacccctacgtgccctgccgggagctgggcctgtccttccagaagggggacatcctgcacgtgatcagccaggaggaccccaactggtggcaggcctaccgggagggagatgaggacaaccagcccctggccggcctggtgcctgggaagagcttccagcagcagcgggaggccatgaagcagaccatcgaggaggacaaggagcctgagaagagcggcaagctgtggtgtgccaagaagaacaagaagaagaggaagaaggtgctgtacaatgccaacaagaatgatgattatgacaatgaggagatcctgacctatgaggagatgagcctgtaccaccagcctgccaacaggaagaggcccatcatcctgattggcccccagaactgtggccagaatgagctgcggcagaggctgatgaacaaggagaaggacagatttgccagcgctgtgccccacaccaccaggagccggcgggaccaggaggtggccggccgggactaccactttgtgtcccggcaggcctttgaggccgacattgctgctgggaagttcatcgagcacggggagtttgagaagaacctgtatggcaccagcattgacagcgtgcggcaggtgatcaacagcggcaagatctgcctgctgagcctgcggacccagagcctgaagaccctgaggaacagcgacctgaagccctacatcatcttcatcgccccacccagccaggagcggctgcgggccctgctggccaaggagggcaagaaccccaagccagaggagctgcgggagatcatcgagaagacccgggagatggagcagaacaacggccactactttgacacagccatcgtgaacagcgacctggacaaggcctaccaggagctgctgcggctcatcaacaagctggacacagagccccagtgggtgcccagcacctggctgaggtag

SEQ ID NO: 90922 - DNA, 450 bp, Artificial Sequence
  derived and/or modified sequence
atggctgtggactgccctggggacctgggcaccaggatgatgcccatcagaagaagtgcccagctggagcgcatccggcagcagcaggaggacatgagaagaagaagagaggaggagggcaagaagcaggagctggacctgaacagctccatgaggctgaagaagctggcccagatcccccccaagacaggaattgacaaccccatgtttgacacagaggagggcatcgtgctggagagcccccactatgctgtgaagatcctggagattgaagatctcttcagcagcctgaagcacatccagcacaccctggtggacagccagagccaggaggacatcagcctgctgctgcagctggtgcagaacaaggacttccagaatgccttcaagatccacaatgccatcaccgtgcacatgaacaaggccagcccccccttccccctcatctag

SEQ ID NO: 90923 - DNA, 1926 bp, Artificial Sequence
  derived and/or modified sequence
atggccgtggactgccccggcgacctgggcacccggatgatgcccattaggaggtccgcacaactggaaagaatccgccagcagcaggaagatatgcggaggcgtagagaagaagaaggaaagaaacaggagttagatctgaactcctcaatgcggctgaaaaagctagcacaaatacctcccaagacaggaatcgataatcccatgttcgacacggaggaggggattgtgctggagagcccacactatgcggtgaagatcttagagatcgaggatctcttctccagtctgaagcacatccaacacactttggtcgatagccagtcccaggaggacattagcttacttctgcagctggttcaaaacaaggattttcagaacgccttcaaaatccacaatgccataaccgtacacatgaataaagcctcccctcctttcccactgatttccaatgcccaggacctcgctcaggaggtgcagaccgtgcttaagcccgtccaccacaaagagggccaggagctcacagcactgttgaataccccacatatacaggccctgctgctggcccatgataaagtggctgaacaagaaatgcagcttgaaccgattacggacgaacgagtgtacgaaagtatcggacagtatggaggggaaaccgtgaagatcgtgagaatcgaaaaggcgagagatatccccctgggcgcgactgttcggaatgagatggactctgtcatcatctctcgaatcgtcaaaggaggtgctgccgagaagtcaggacttttgcacgagggcgacgaagttctggaaatcaacggaatcgagattagaggcaaggatgttaatgaggttttcgacctcctttccgatatgcatgggacactgacgttcgtactgattccaagtcagcagatcaagcctcctccagccaaagagactgttatccacgtgaaggctcattttgattacgacccatctgacgacccatacgttccgtgccgggagctgggtcttagttttcagaagggtgacattttgcatgtgatttctcaggaggaccccaattggtggcaggcttatcgtgaaggagacgaagacaaccagcccctcgccgggctggtgcccggtaagagtttccaacagcaacgggaagccatgaaacagacaattgaggaagacaaagagcctgaaaagtcgggaaagctctggtgcgcgaaaaagaataagaaaaaacggaagaaggtcctgtacaacgctaacaaaaacgatgactatgataacgaagagatcctgacgtatgaagagatgtctctttaccaccagccagctaaccgaaagagacccatcattctgatcgggccacagaactgcggacaaaatgaactaaggcaacggctgatgaacaaggagaaggatagatttgcctctgctgtcccgcacactacaagatcacgcagggaccaggaggtagccggcagagattatcatttcgttagccgtcaggcctttgaggccgacatcgctgcgggtaagttcattgaacacggtgaattcgaaaagaatttatacgggacttccattgattcagttcggcaagtgattaacagcggtaaaatttgcctcttgtcactccgcactcagagccttaaaacgcttaggaattccgatctgaaaccatacatcatctttatcgctcctccttctcaagaacggttgagagcactgttggccaaagagggcaagaatccaaagccggaggagctcagggagatcatagaaaaaaccagagagatggagcagaacaacggccattattttgatacggctattgtgaacagtgacttagataaagcctatcaagagttactgcggctgatcaataaacttgatacggagccgcagtgggtaccgtccacctggctgcgctag

SEQ ID NO: 90924 - DNA, 450 bp, Artificial Sequence
  derived and/or modified sequence
atggccgtggactgccccggcgacctgggcacccggatgatgcccattcggcgctcagcccaacttgaaagaatacgacagcaacaggaggatatgcgcagaagaagagaggaggagggtaaaaagcaggaactggacctcaattcatcgatgcgcctgaagaaattggcccagatcccgccgaaaaccggcatcgacaatccaatgtttgacacagaggaagggatcgtgctcgagagtccacactatgctgtcaagattctcgaaatagaggatttattttctagcctgaaacatatacagcacactcttgtggacagtcaatcacaggaagatattagccttctgctccagctggtacaaaacaaagatttccagaatgcattcaagatacacaatgcgataactgtccacatgaacaaggcttctccccctttccctttgatttag

SEQ ID NO: 90925 - DNA, 1926 bp, Artificial Sequence
  derived and/or modified sequence
atggctgttgactgtcctggggatctcggaaccaggatgatgcccattagacggagtgcacaattggagcgtatcaggcagcagcaggaagacatgcggagaagacgcgaagaggagggaaagaagcaggagctggacttgaattcttctatgcgcttaaaaaaattggcacagattccccctaaaactgggatcgacaatcctatgttcgatactgaggagggtattgtgttggaaagtccacactatgccgttaaaatccttgagattgaagatttgttctcgagccttaagcacattcagcacaccctggttgattcacaaagccaagaggacatctccttgttgctccagctggtccaaaacaaggactttcagaacgcatttaagatccacaacgctatcaccgtgcacatgaataaagccagtccgcctttcccactgatttccaatgctcaagatctggcccaagaagtgcagactgtactcaagcccgtgcaccacaaggagggccaggaactgacagcacttctgaatacgcctcatatccaggcattattacttgcccacgacaaggtggccgagcaggaaatgcagctcgaacccatcacggacgagagagtgtatgagagcataggccagtatggtggtgaaactgtaaagatcgtcaggattgaaaaggccagggacatcccactgggcgctaccgtaaggaacgagatggattcagtcattatatctagaatcgttaaaggaggtgctgccgaaaagagcggtctgctgcacgaaggagacgaggttctggaaattaacgggatcgagattcgcggtaaggacgtcaacgaggtttttgatctcctctcagacatgcatgggacactcacatttgttctgatcccctctcagcagatcaagccccctcccgcaaaagaaacagtgatccacgttaaagcgcatttcgattatgacccatctgacgatccttacgtcccctgtagagaacttggcctgtcctttcaaaagggcgacatccttcatgtcatctcacaggaggatcccaactggtggcaggcctatcgtgagggggacgaagacaatcaacctcttgccggattggtgccagggaaatcattccagcagcagcgagaagcaatgaagcagactattgaagaagataaggaacctgaaaagtctggtaaactgtggtgtgccaagaaaaacaaaaaaaaaaggaaaaaggtcctctacaacgctaacaaaaacgacgattacgacaatgaggagatcctcacctacgaggaaatgtctctgtaccaccagcctgccaatcggaaacggcctatcattctgataggtccccagaactgcggacaaaatgagcttaggcaacgacttatgaacaaggaaaaggacagatttgcctccgcagtgccccacactactaggagcagacgtgatcaagaagtggccggaagggactaccacttcgtgtcccgacaggccttcgaagctgacatcgccgctggcaaatttatcgaacatggagaatttgaaaaaaacttgtacgggacttctatagactccgtgcgccaggttattaactcaggaaagatctgtctgctgagtctcagaacgcagtcacttaaaaccttgcgcaactccgacctgaagccttacataatctttatcgcccctccttcacaggaaaggctgcgtgcgctcctcgccaaggagggcaaaaatccgaaacctgaggaacttcgtgaaattatcgaaaaaactagagagatggagcagaataatggccattactttgatacagcaatcgttaattctgacctggacaaggcttaccaagaactccttagattgattaataagctggataccgagccacagtgggtaccaagcacctggctgcggtag

SEQ ID NO: 90926 - DNA, 450 bp, Artificial Sequence
  derived and/or modified sequence
atggccgtggactgtccaggagatctggggacgcggatgatgcccatcagacgtagcgcccagctggagcgtatacgtcagcagcaagaggacatgagaaggcggcgagaagaggaggggaaaaagcaagaacttgatctcaattcctcaatgagacttaaaaaactagcacaaattccacctaagactggcatcgacaaccctatgtttgacaccgaggaaggaatcgtgctggagagtccacactacgccgtgaaaatcctggagattgaggacctgtttagttccctcaaacatatccagcatactctggtggacagccagtcccaggaagacatctccctgctgttgcagctggtgcaaaacaaagactttcaaaatgcatttaagatccataatgcgattactgtacacatgaacaaagcgtcaccaccattcccactgatttag

SEQ ID NO: 90927 - DNA, 1926 bp, Artificial Sequence
  derived and/or modified sequence
atggccgtggactgccccggcgacctgggcaccagaatgatgcccatcagaagaagcgcccagctggagagaatcagacagcagcaggaggacatgagaagaagaagagaggaggagggcaagaagcaggagctggacctgaacagcagcatgagactgaagaagctggcccagatcccccccaagaccggcatcgacaaccccatgttcgacaccgaggagggcatcgtgctggagagcccccactacgccgtgaagatcctggagatcgaggacctgttcagcagcctgaagcacatccagcacaccctggtggacagccagagccaggaggacatcagcctgctgctgcagctggtgcagaacaaggacttccagaacgccttcaagatccacaacgccatcaccgtgcacatgaacaaggccagcccccccttccccctgatcagcaacgcccaggacctggcccaggaggtgcagaccgtgctgaagcccgtgcaccacaaggagggccaggagctgaccgccctgctgaacaccccccacatccaggccctgctgctggcccacgacaaggtggccgagcaggagatgcagctggagcccatcaccgacgagagagtgtacgagagcatcggccagtacggcggcgagaccgtgaagatcgtgagaatcgagaaggccagagacatccccctgggcgccaccgtgagaaacgagatggacagcgtgatcatcagcagaatcgtgaagggcggcgccgccgagaagagcggcctgctgcacgagggcgacgaggtgctggagatcaacggcatcgagatcagaggcaaggacgtgaacgaggtgttcgacctgctgagcgacatgcacggcaccctgaccttcgtgctgatccccagccagcagatcaagcccccccccgccaaggagaccgtgatccacgtgaaggcccacttcgactacgaccccagcgacgacccctacgtgccctgcagagagctgggcctgagcttccagaagggcgacatcctgcacgtgatcagccaggaggaccccaactggtggcaggcctacagagagggcgacgaggacaaccagcccctggccggcctggtgcccggcaagagcttccagcagcagagagaggccatgaagcagaccatcgaggaggacaaggagcccgagaagagcggcaagctgtggtgcgccaagaagaacaagaagaagagaaagaaggtgctgtacaacgccaacaagaacgacgactacgacaacgaggagatcctgacctacgaggagatgagcctgtaccaccagcccgccaacagaaagagacccatcatcctgatcggcccccagaactgcggccagaacgagctgagacagagactgatgaacaaggagaaggacagattcgccagcgccgtgccccacaccaccagaagcagaagagaccaggaggtggccggcagagactaccacttcgtgagcagacaggccttcgaggccgacatcgccgccggcaagttcatcgagcacggcgagttcgagaagaacctgtacggcaccagcatcgacagcgtgagacaggtgatcaacagcggcaagatctgcctgctgagcctgagaacccagagcctgaagaccctgagaaacagcgacctgaagccctacatcatcttcatcgccccccccagccaggagagactgagagccctgctggccaaggagggcaagaaccccaagcccgaggagctgagagagatcatcgagaagaccagagagatggagcagaacaacggccactacttcgacaccgccatcgtgaacagcgacctggacaaggcctaccaggagctgctgagactgatcaacaagctggacaccgagccccagtgggtgcccagcacctggctgagatag

SEQ ID NO: 90928 - DNA, 450 bp, Artificial Sequence
  derived and/or modified sequence
atggccgtggactgccccggcgacctgggcaccagaatgatgcccatcagaagaagcgcccagctggagagaatcagacagcagcaggaggacatgagaagaagaagagaggaggagggcaagaagcaggagctggacctgaacagcagcatgagactgaagaagctggcccagatcccccccaagaccggcatcgacaaccccatgttcgacaccgaggagggcatcgtgctggagagcccccactacgccgtgaagatcctggagatcgaggacctgttcagcagcctgaagcacatccagcacaccctggtggacagccagagccaggaggacatcagcctgctgctgcagctggtgcagaacaaggacttccagaacgccttcaagatccacaacgccatcaccgtgcacatgaacaaggccagcccccccttccccctgatctag

SEQ ID NO: 90929 - DNA, 1797 bp, Artificial Sequence
  derived and/or modified sequence
cgacgagcggaacggagtgcgggttcccggggagggggcgtgcaggatcgggttgtggggggtgcgctgtagggctaaggagaagatgagctttggggggccctgaggaggaggggagtcaggattaaccgaggacagggtcgcagcgggggcatggggaggacgggcccgagagcgccgctcctccccaaaactaggatttggagcctcacgttctcccgcaaaacgagccctgtgggtgccaggccaggggcggctcccaggtgtggagggggcaaggtacgggcgtctgccgtcgctaagtgcccccttccacttaaggcacaccttcgcctccgattccgaaccgcccggggacagaggcaagtggcaaagcagggagggcggaggactctgccaccctccctcaggatgcctgagggccccgagctgcacctggccagccagtttgtgaatgaggcctgcagggcgctggtgttcggcggctgcgtggagaagtcctctgtcagccgcaaccctgaggtgccctttgagagcagtgcctaccgcatctcagcttcagcccgcggcaaggagctgcgcctgatactgagccctctgcctggggcccagccccaacaggagccactggccctggtcttccgcttcggcatgtccggctcttttcagctggtgccccgcgaggagctgccacgccatgcccacctgcgcttttacacggccccgcctggcccccggctcgccctatgtttcgtggacatccgccggttcggccgctgggaccttgggggaaagtggcagccgggccgcgggccctgtgtcttgcaggagtaccagcagttcagggagaatgtgctacgaaacctagcggataaggcctttgaccggcccatctgcgaggccctcctggaccagaggttcttcaatggcattggcaactatctgcgggcagagatcctgtaccggctgaagatccccccctttgagaaggcccgctcggtcctggaggccctgcagcagcacaggccgagcccggagctgaccctgagccagaagataaggaccaagctgcagaatccagacctgctggagctatgtcactcagtgcccaaggaagtggtccagttggggggcaaaggctacgggtcagagagcggggaggaggactttgctgcctttcgagcctggctgcgctgctatggcatgccaggcatgagctccctgcaggaccggcatggccgtaccatctggttccagggggatcctggaccgttggcacccaaagggcgcaagtcccgcaaaaagaaatccaaggccacacagctgagtcctgaggacagagtggaggacgctttgcctccaagcaaggccccttccaggacacgaagggcaaagagagaccttcctaagaggactgcaacccagcggcctgaggggaccagcctccagcaggacccagaagctcccacagtgcccaagaaggggaggaggaaggggcgacaggcagcctctggccactgcagaccccggaaggtcaaggctgacatcccatccttggaaccagaggggacctcagcctcttagcaggaggctctccttgcttgcactcaccctttcttattgtcttgccctgcatctgggggtctgaatttttgggagcaggcaatatctgaaggtgcaaacaggccctacggctgttccctgcacaactctcatggttttaattgtaccccatcttccacatctttaaagctcatgtgaaaaatgctgcatttttaataaactgatacatttgaa

SEQ ID NO: 90930 - protein, 275 aa, Artificial Sequence
  derived and/or modified sequence
MSRELAPLLLLLLSIHSALAMRICSFNVRSFGESKQEDKNAMDVIVKVIKRCDIILVMEIKDSNNRICPILMEKLNREKLVSVKRSYHYHDYQDGDADVFSREPFVVWFQSPHTAVKDFVIIPLHTTPETSVKEIDELVEVYTDVKHRWKAENFIFMGDFNAGCSYVPKKAWKNIRLRTDPRFVWLIGDQEDTTVKKSTNCAYDRIVLRGQEIVSSVVPKSNSVFDFQKAYKLTEEEALDVSDHFPVEFKLQSSRAFTNSKKSVTLRKKTKSKRS

SEQ ID NO: 90931 - DNA, 828 bp, Artificial Sequence
  derived and/or modified sequence
atgagcagagaactcgcccccctgctcctcctgctgctgtcaatccacagcgcgctggccatgcggatttgttctttcaacgtgcggtctttcggcgagtccaagcaagaggataagaacgccatggacgtgatcgtcaaggtgatcaaacgctgtgacatcatcctggtgatggaaataaaggactcaaacaatcgaatatgccctattttaatggaaaaattgaatcgagagaagttggtctccgtgaagagatcctatcattaccacgactaccaggacggggatgccgatgtgttctcacgagagcctttcgttgtgtggttccagtctccacataccgccgttaaggattttgtaattatacccctccatacaacaccggagacttccgtgaaagaaattgacgagctggtggaggtgtacaccgacgtgaagcaccggtggaaagctgagaattttatcttcatgggagatttcaacgctggctgctcctacgtccctaaaaaggcatggaagaacatccggctccggactgacccacggtttgtgtggctcattggtgatcaggaagacactaccgttaagaagtccacgaattgcgcctacgaccgaatcgtgctccgggggcaggagatagtttcctccgttgtacccaaatccaatagtgtcttcgactttcaaaaagcttacaagctcaccgaagaggaagccctggacgtttccgatcacttccccgtggagttcaaactgcagagctcccgtgcattcaccaactccaaaaagtcggttactttgcggaagaagaccaagagcaagcggagttag

SEQ ID NO: 90932 - DNA, 828 bp, Artificial Sequence
  derived and/or modified sequence
atgagccgggagctggcccccctgctgctgctgctgctgagcatccacagcgccctggccatgaggatctgcagcttcaacgtgcgcagctttggagagagcaagcaggaggacaagaatgccatggatgtgattgtgaaggtgatcaagagatgtgacatcatcctggtgatggagatcaaggacagcaacaaccgcatctgccccatcctgatggagaagctgaaccgggagaagctggtgtctgtgaagaggagctaccactaccatgactaccaggatggagatgctgatgtgttcagccgggagccctttgtggtgtggttccagagcccccacacagctgtgaaggactttgtgatcatccccctgcacaccaccccagagacctctgtgaaggagattgatgagctggtggaggtgtacacagatgtgaagcaccgctggaaggccgagaacttcatcttcatgggagacttcaatgccggctgcagctatgtgcccaagaaggcctggaagaacatccggctgaggacagaccccaggtttgtgtggctgattggagaccaggaggacaccaccgtgaagaagagcaccaactgtgcctatgaccgcatcgtgctgcggggccaggagatcgtgtcctctgtggtgcccaagagcaacagcgtgtttgacttccagaaggcctacaagctgacagaggaggaggccctggatgtgtctgaccacttccctgtggagttcaagctgcagagcagccgggccttcaccaacagcaagaagtctgtgaccctgaggaagaagaccaagagcaagaggagctag

SEQ ID NO: 90933 - DNA, 828 bp, Artificial Sequence
  derived and/or modified sequence
atgagccgggagctggcccccctgctgctgctgctgctgagcatccacagtgcacttgcaatgagaatttgcagcttcaatgtgcgttcttttggcgaatctaaacaggaagacaaaaatgccatggacgtaattgtaaaggtgattaagcggtgtgatattatattagtgatggaaattaaagactctaacaaccgtatctgtcctatcctgatggagaagctcaatcgggagaagttagtctcggtcaaacgctcataccactatcacgactatcaggacggagacgccgatgtcttctcaagagagccatttgttgtctggttccagagtccccacacagccgtgaaggattttgttattattccactccatactacgccagaaacatcagtgaaggaaattgacgagctagtagaagtttacaccgatgtgaaacatcggtggaaggcagaaaattttatcttcatgggggactttaatgccgggtgctcatacgtgcctaagaaggcttggaaaaacatccgtctacgcactgaccctagatttgtttggttgataggcgatcaggaggataccacggtcaaaaagagcaccaactgcgcctacgaccgaatcgtgctgagagggcaggagatcgtatcttcagtggtgcctaagtccaactctgtgttcgatttccagaaagcttataagctgaccgaggaagaagcgctcgatgtttccgaccacttcccagtcgagtttaaattacagagctcccgggcgttcaccaactcaaaaaagtcggttactctgcgtaagaagacaaagtcgaagcggtcgtag

SEQ ID NO: 90934 - DNA, 828 bp, Artificial Sequence
  derived and/or modified sequence
atgtctagggagctggccccactgttgctgctactgctcagtatccactccgcactggccatgcggatttgttcgttcaacgtgaggagcttcggggaaagtaagcaggaagacaaaaatgcaatggatgtcattgtgaaggtgataaagcgatgcgatatcatccttgtaatggagatcaaggactccaacaatcgtatatgcccaatcctgatggagaagctgaatcgtgaaaagctggttagtgtgaagagatcgtatcactatcacgattaccaggacggagatgccgatgtgttctcacgggagccttttgtggtttggttccaaagtccccatacagccgtcaaggatttcgtgatcatccctttgcatacgaccccggagaccagcgtaaaagaaattgatgagctggtggaggtgtacacagacgtaaagcataggtggaaggccgaaaattttattttcatgggggacttcaacgccggttgtagttatgtgccgaaaaaagcctggaaaaatattcggctgagaacagacccccgtttcgtgtggctgatcggagaccaggaggacaccaccgtcaagaagtccaccaactgcgcttatgataggattgtgctgagggggcaggagattgtgtcatctgtagtgccgaagtctaattcagtgtttgattttcaaaaagcctacaagctcactgaggaggaggccctagatgtcagcgaccactttccagtggagttcaaactgcaaagcagtagagcctttacaaacagtaagaagtccgtaacgttgcggaaaaagaccaaatccaagcgctcttag

SEQ ID NO: 90935 - DNA, 828 bp, Artificial Sequence
  derived and/or modified sequence
atgagcagagagctggcccccctgctgctgctgctgctgagcatccacagcgccctggccatgagaatctgcagcttcaacgtgagaagcttcggcgagagcaagcaggaggacaagaacgccatggacgtgatcgtgaaggtgatcaagagatgcgacatcatcctggtgatggagatcaaggacagcaacaacagaatctgccccatcctgatggagaagctgaacagagagaagctggtgagcgtgaagagaagctaccactaccacgactaccaggacggcgacgccgacgtgttcagcagagagcccttcgtggtgtggttccagagcccccacaccgccgtgaaggacttcgtgatcatccccctgcacaccacccccgagaccagcgtgaaggagatcgacgagctggtggaggtgtacaccgacgtgaagcacagatggaaggccgagaacttcatcttcatgggcgacttcaacgccggctgcagctacgtgcccaagaaggcctggaagaacatcagactgagaaccgaccccagattcgtgtggctgatcggcgaccaggaggacaccaccgtgaagaagagcaccaactgcgcctacgacagaatcgtgctgagaggccaggagatcgtgagcagcgtggtgcccaagagcaacagcgtgttcgacttccagaaggcctacaagctgaccgaggaggaggccctggacgtgagcgaccacttccccgtggagttcaagctgcagagcagcagagccttcaccaacagcaagaagagcgtgaccctgagaaagaagaccaagagcaagagaagctag

SEQ ID NO: 90936 - DNA, 1321 bp, Artificial Sequence
  derived and/or modified sequence
agaatccagcactccaagcactgctgtcttctcacagagtcttgaagccagagcagcgccaggatgtcacgggagctggccccactgctgcttctcctcctctccatccacagcgccctggccatgaggatctgctccttcaacgtcaggtcctttggggaaagcaagcaggaagacaagaatgccatggatgtcattgtgaaggtcatcaaacgctgtgacatcatactcgtgatggaaatcaaggacagcaacaacaggatctgccccatactgatggagaagctgaacagggaaaagctggtgtctgtgaagaggagttatcactaccatgactatcaggatggagacgcagatgtgttttccagggagccctttgtggtctggttccaatctccccacactgctgtcaaagacttcgtgattatccccctgcacaccaccccagagacatccgttaaggagatcgatgagttggttgaggtctacacggacgtgaaacaccgctggaaggcggagaatttcattttcatgggtgacttcaatgccggctgcagctacgtccccaagaaggcctggaagaacatccgcttgaggactgaccccaggtttgtttggctgatcggggaccaagaggacaccacggtgaagaagagcaccaactgtgcatatgacaggattgtgcttagaggacaagaaatcgtcagttctgttgttcccaagtcaaacagtgtttttgacttccagaaagcttacaagctgactgaagaggaggccctggatgtcagcgaccactttccagttgaatttaaactacagtcttcaagggccttcaccaacagcaaaaaatctgtcactctaaggaagaaaacaaagagcaaacgctcctagacccaagggtctcatcttattaaccatttcttgcctctaaataaaatgtctctaacagatatgaactgctccctgtacttaggaaacaagagtgatccaactgctttcattttttgacctgaatttattctgacttgagccaaattggaaggagaatcttttgtatctctcttggtctcatacctcccctgaattgtctaaaagggaaccaggggcatttgtagaccaaaatgatgatcttcatgccctgagccagagccccatccactgtcactggccctgctcaaccctgtcatgcgagaggctgcagggggaggaagagcgtcagctttcagtcctcatgaggggtcctgttccacacgcaatgaccagaaacaccaaggccccagctgcccctgtgatttgggcaattaactgttttaagagtctg

SEQ ID NO: 90937 - DNA, 1059 bp, Artificial Sequence
  derived and/or modified sequence
atggaaaatgataccaataacctggcaaaaccaacgctacccatcaagactttccggggtgccccgcccaacagctttgaggagttcccctttagtgccttggagggttggacaggcgccactatcaccgtgaagataaagtgcccagaagagagtgcatctcatctacatgtaaaaaatgcaaccatgggatacctgactagttccttgtctaccaagcttatcccagcaatataccttctagtcttcgtcgttggtgtgccagccaatgctgtaaccctttggatgttgttctttcgtacacggtccatttgtactaccgtcttttatactaacctggcgatagctgacttcctcttctgcgttactctaccctttaaaattgcttaccacctcaatgggaacaattgggtgtttggggaagtcctgtgcagggctaccaccgtgatattttacgggaacatgtattgttcaatcctattgcttgcatgcataagtataaataggtatcttgcaatagtgcaccctttcacttacagaggcctcccgaagcatacttacgctctggtgacttgtgggcttgtgtgggctacagttttcctctacatgttgccctttttcatattgaagcaggagtactatcttgtccagccagacatcacgacctgtcatgacgtccacaatacctgtgaatcctcttctccgttccagctttattattttatctctctggccttcttcggctttttgatacctttcgtgctcatcatctattgctatgccgctattattcgcaccctcaacgcctatgaccatcgctggctctggtacgtgaaggcctcgctgcttattctcgtaatatttaccatctgcttcgcaccatcgaacatcatcttgatcattcatcacgcgaattactactacaataatactgatggtctgtacttcatatatttgattgcactgtgccttggctccctcaattcatgtttggatccttttctgtactttctgatgtctaagactcgcaaccattctacagcctatttgaccaagtag

SEQ ID NO: 90938 - DNA, 1059 bp, Artificial Sequence
  derived and/or modified sequence
atggagaatgacaccaacaacctggccaagcccaccctgcccatcaagaccttccggggggccccacccaacagctttgaggagttccccttcagcgccctggagggctggacaggagccaccatcaccgtgaagatcaagtgcccagaggagagcgccagccacctgcacgtgaagaatgccaccatgggctacctgaccagcagcctgagcaccaagctgatcccagccatctacctgctggtgtttgtggtgggcgtgcctgccaatgctgtgaccctgtggatgctgttcttccgcaccaggagcatctgcaccaccgtcttctacaccaacctggccatcgctgacttcctgttctgtgtgaccctgcccttcaagatcgcctaccacctgaatggaaacaactgggtgtttggagaggtgctgtgccgggccaccaccgtcatcttctacggcaacatgtactgcagcatcctgctgctggcctgcatcagcatcaaccgctacctggccatcgtgcaccccttcacctaccggggcctgcccaagcacacctacgccctggtgacctgtggcctggtgtgggccaccgtcttcctgtacatgctgcccttcttcatcctgaagcaggagtactacctggtgcagcctgacatcaccacctgccatgatgtgcacaacacctgtgagagcagcagccccttccagctgtactacttcatcagcctggccttcttcggcttcctgatcccctttgtgctgatcatctactgctatgctgccatcatccgcaccctgaatgcctatgaccaccgctggctgtggtacgtgaaggccagcctgctgatcctggtgatcttcaccatctgctttgcccccagcaacatcatcctgatcatccaccacgccaactactactacaacaacacagatggcctgtacttcatctacctgattgccctgtgcctgggcagcctgaacagctgcctggaccccttcctgtacttcctgatgagcaagaccaggaaccacagcacagcctacctgaccaagtag

SEQ ID NO: 90939 - DNA, 1059 bp, Artificial Sequence
  derived and/or modified sequence
atggagaacgacaccaacaacctggccaagcccaccctgcccatcaagacttttaggggggccccgccaaatagctttgaggagtttcccttcagtgctctagaaggctggaccggtgctacaattacagtgaaaataaaatgccctgaggaatccgcaagccatcttcatgtaaaaaatgctacgatgggttacttgacctcctccctttcaacgaaacttataccagctatttacctgctggtttttgtcgtgggggttcctgccaacgctgttacactgtggatgttgttcttccgcactcgatccatctgcaccactgtgttctacaccaacctcgccatcgctgactttctgttttgcgttacactgccattcaaaattgcctatcacctaaacggtaacaactgggtttttggtgaggttctgtgccgcgctaccacagtcatcttctatggcaatatgtactgctccatcctcctcctggcctgtattagcattaaccgttacctggcgatcgtgcacccattcacctatagagggttgccaaagcacacatatgccctcgtgacgtgtggcctcgtctgggctaccgtgtttctgtacatgcttccatttttcattttaaagcaggaatactatctggtgcagcccgacatcacaacatgtcacgacgtgcacaatacgtgtgagagcagttcacctttccagctgtactactttattagtctggctttcttcggattcctgataccattcgtgctgataatctattgctacgcagctattatacggacactgaatgcatacgaccatcgctggctgtggtacgtaaaagcatcactccttatccttgtcattttcacgatttgctttgctccctcaaatataatactgattattcaccacgcaaattattactacaataacacagacggcttgtacttcatctacctcattgctctgtgcctgggaagcctgaacagctgtttggatccattcttgtactttctgatgtccaagacacgtaaccactcaactgcctatcttacaaagtag

SEQ ID NO: 90940 - DNA, 1059 bp, Artificial Sequence
  derived and/or modified sequence
atggagaatgataccaataatctcgccaagccaacactccccataaagacattccgcggagcaccccctaactcattcgaggaattccctttttcagcgttggaagggtggaccggcgcaacaattacagtgaaaatcaaatgcccggaagaaagcgcaagccacctccacgtgaaaaatgcaactatgggctatctgacctcctccctttctactaagcttataccggctatctacttgcttgtgttcgtcgtcggggttcccgctaacgctgtcacgctctggatgctgtttttccggaccaggtccatctgcacaaccgtattttacaccaaccttgccattgcagactttcttttctgcgtcactttacctttcaaaattgcgtaccacctaaacggaaataactgggttttcggggaggtcctctgtcgagccaccacagtgattttctacggcaatatgtactgttccatccttctgctggcttgcattagtatcaatagatacctcgcaattgttcatccatttacatatcggggtctgcctaaacacacttatgctttggtgacctgcggcctggtgtgggccactgttttcctgtacatgttgcccttctttatcctgaagcaggagtattacctggtgcagccggacatcacaacttgtcacgacgtccacaacacgtgcgagagttctagccccttccagctgtattatttcatctctctagcctttttcggcttcctgatacctttcgtgctgataatttattgctacgctgctattatcagaaccctaaatgcctacgaccaccgctggttatggtatgtgaaggcttcactcctgatcttagtgatcttcaccatatgctttgccccatccaacataatcctcatcatccatcacgcaaactactattacaataataccgacggcctgtacttcatttatttgatcgcgttgtgtctcggttcccttaacagttgtttggatcccttcctgtacttcttgatgagcaaaacccggaatcacagcactgcctacctgactaagtag

SEQ ID NO: 90941 - DNA, 1059 bp, Artificial Sequence
  derived and/or modified sequence
atggagaacgacaccaacaacctggccaagcccaccctgcccatcaagaccttcagaggcgccccccccaacagcttcgaggagttccccttcagcgccctggagggctggaccggcgccaccatcaccgtgaagatcaagtgccccgaggagagcgccagccacctgcacgtgaagaacgccaccatgggctacctgaccagcagcctgagcaccaagctgatccccgccatctacctgctggtgttcgtggtgggcgtgcccgccaacgccgtgaccctgtggatgctgttcttcagaaccagaagcatctgcaccaccgtgttctacaccaacctggccatcgccgacttcctgttctgcgtgaccctgcccttcaagatcgcctaccacctgaacggcaacaactgggtgttcggcgaggtgctgtgcagagccaccaccgtgatcttctacggcaacatgtactgcagcatcctgctgctggcctgcatcagcatcaacagatacctggccatcgtgcaccccttcacctacagaggcctgcccaagcacacctacgccctggtgacctgcggcctggtgtgggccaccgtgttcctgtacatgctgcccttcttcatcctgaagcaggagtactacctggtgcagcccgacatcaccacctgccacgacgtgcacaacacctgcgagagcagcagccccttccagctgtactacttcatcagcctggccttcttcggcttcctgatccccttcgtgctgatcatctactgctacgccgccatcatcagaaccctgaacgcctacgaccacagatggctgtggtacgtgaaggccagcctgctgatcctggtgatcttcaccatctgcttcgcccccagcaacatcatcctgatcatccaccacgccaactactactacaacaacaccgacggcctgtacttcatctacctgatcgccctgtgcctgggcagcctgaacagctgcctggaccccttcctgtacttcctgatgagcaagaccagaaaccacagcaccgcctacctgaccaagtag

SEQ ID NO: 90942 - protein, 231 aa, Artificial Sequence
  derived and/or modified sequence
MRRAPSLVLFFLVALCGRGNCRVANAEEKLMDDLLNKTRYNNLIRPATSSSQLISIKLQLSLAQLISVNEREQIMTTNVWLKQEWTDYRLTWNSSRYEGVNILRIPAKRIWLPDIVLYNKSLRTGSTWLWWWTGCSCGCSCLCASWALWGSSYRPSSRPMQLLRGPTLPSVTEGPLGCGVRGCEWPGGHFAASFWVVADEALSKYVSIGHQPHQTSHSRGTGKDGGLGCPL

SEQ ID NO: 90943 - DNA, 696 bp, Artificial Sequence
  derived and/or modified sequence
atgcgtcgagccccctccctcgtgctattctttcttgtcgccctatgtggccgcggcaactgtcgggttgctaatgccgaagaaaagcttatggacgacctgctcaataagacaaggtataacaatctgatcagaccagcaacatccagctcacaactgatctctattaagctgcagttatctctcgcacagcttattagcgtgaacgagcgggagcagattatgactaccaacgtttggctcaagcaggagtggactgactatcgcttgacatggaactcaagtcgttatgaaggagtaaatattctacggattccggcgaaaagaatctggctgcccgatatagtcctgtataataaaagccttagaaccggtagcacctggttgtggtggtggaccggctgcagttgcggttgttcctgcctctgtgcctcctgggctttgtggggatccagctacagaccttcttctcgacctatgcagctgctgcgaggacctaccctgccgtcagtgactgagggacccctgggatgcggagtcaggggctgtgagtggcccggaggccacttcgccgcatctttctgggtcgtcgccgatgaggccctgtccaagtatgtgagcattgggcaccagcctcatcagaccagccattcaaggggaacgggaaaggatgggggtctgggttgtccgctttag

SEQ ID NO: 90944 - DNA, 696 bp, Artificial Sequence
  derived and/or modified sequence
atgaggcgggcccccagcctggtgctcttcttcctggtggccctgtgtggccggggcaactgccgggtggccaatgctgaggagaagctgatggatgacctgctgaacaagacccgctacaacaacctgatccggcctgccaccagcagcagccagctgatcagcatcaagctgcagctgagcctggcccagctgatctctgtgaatgaaagagagcagatcatgaccaccaacgtgtggctgaagcaggagtggacagactaccgcctgacctggaacagcagccgctatgaaggagtgaacatcctgcgcatcccagccaagaggatctggctgcctgacatcgtgctgtacaacaagagcctgaggacaggcagcacctggctgtggtggtggacaggctgcagctgtggctgcagctgcctgtgtgcctcctgggccctgtggggcagcagctaccggcccagcagccggcccatgcagctgctgcggggccccaccctgcccagcgtgacagagggccccctgggctgcggcgtgcggggctgtgagtggccaggcggccactttgctgccagcttctgggtggtggctgatgaggccctgagcaaatatgtgtccatcggccaccagccccaccagaccagccacagccggggcaccgggaaggatggcggcctgggctgccccctgtag

SEQ ID NO: 90945 - DNA, 696 bp, Artificial Sequence
  derived and/or modified sequence
atgcggcgggcccccagcctggtgctgttcttcctggtggccctgtgcggaaggggcaactgtagagtagcgaatgctgaggagaaactcatggatgacctgctgaataagactcgctataataacctgatccggccggcgactagttctagccagctgatctctatcaaactgcagttgtcactagcgcagcttattagtgtgaatgaacgcgagcagatcatgaccacgaacgtgtggttgaaacaggagtggacagactatagactgacctggaattcctctaggtacgaaggagtgaacatcttgaggatccccgctaagaggatctggctcccagacatagtcctctacaataagagcctaagaacagggtctacctggctatggtggtggaccgggtgctcatgtggttgtagctgcctctgtgcttcttgggcactgtgggggtcttcctacagaccctcctctaggccgatgcaactgcttaggggccccacactgccatccgtgaccgaaggtccactgggctgtggagtgcggggctgtgaatggcccggcggccattttgcagcctctttttgggtggttgcagatgaggctctttcaaagtacgtttctattgggcatcagccacatcagactagtcactcgaggggcacagggaaggatggaggactaggctgccctttgtag

SEQ ID NO: 90946 - DNA, 696 bp, Artificial Sequence
  derived and/or modified sequence
atgagacgagctccaagtctggttctgttcttcttggtcgccctgtgtggccgaggaaactgcagagtcgctaatgcggaagagaagctgatggatgacctgctgaataaaacgcgctataataacctgatcaggcctgcaactagtagcagtcaactgatatcaatcaagcttcagctcagcctcgcccagctgatatcagtcaatgaaagagagcagatcatgacaactaacgtgtggctaaagcaggaatggacagactatcggttgacatggaactcctctcgctacgagggagtgaacatactgcgcattccagccaaacgcatttggcttcctgacatcgtcctctataataaatctttgcggacaggatctacctggctctggtggtggactggatgttcttgcgggtgtagctgtctttgcgcttcctgggccctgtggggatcctcttacaggccctctagtcggcctatgcagcttctgcgtggacccacactgccctccgtgacggagggacctttaggttgtggagtccggggatgtgaatggccaggcggacatttcgccgcttctttctgggtggtcgcagacgaagcgttatccaagtacgtctccattggacatcagccgcatcaaacaagtcacagtagagggacgggtaaagacggagggctcggctgccctctgtag

SEQ ID NO: 90947 - DNA, 1355 bp, Artificial Sequence
  derived and/or modified sequence
ccgccagcaaacctcgggggccaggaccggcgctcactcgaccgcgcggctcacgggtgccctgtgaccccacagcggagctcgcggcggctgccacccggccccgccggccatgaggcgcgcgccttccctggtccttttcttcctggtcgccctttgcgggcgcgggaactgccgcgtggccaatgcggaggaaaagctgatggacgaccttctgaacaaaacccgttacaataacctgatccgcccagccaccagctcctcacagctcatctccatcaagctgcagctctccctggcccagcttatcagcgtgaatgagcgagagcagatcatgaccaccaatgtctggctgaaacaggaatggactgattaccgcctgacctggaacagctcccgctacgagggtgtgaacatcctgaggatccctgcaaagcgcatctggttgcctgacatcgtgctttacaacaagtcgttgaggactggaagtacgtggctatggtggtggaccggctgttcctgtgggtgttcatgtttgtgtgcgtcctgggcactgtggggctcttcctaccgcccctcttccagacccatgcagcttctgaggggccctacgctgcccagcgtgactgagggccccctgggttgtggggtgagaggatgtgagtggccgggtgggcactttgctgcttctttctgggttgtggctgatgaggccctaagtaaatatgtgagcattggccatcaaccccatcaaaccagccacagccgtggaacaggcaaggatgggggcctgggctgtcctctctgaatgccttggagggatcccaggaagccccagtaggagggagcttcagacagttcaattctggcctgtcttccttccctgcaccgggcaatggggataaagatgacttcgtagcagcacctactatgcttcaggcatggtgccggcctgcctctccatcaccatctctctccacttccccttgtccagttcctcacacacttctagattcttcccagctcagaggcttggcatttgccatatcatcatctttttttttttcttttaaacggagtcttgctatatcgcccaggctcaagtgattctcctgcctcaacctcccaagtagctgggattacagaaagccgccaccgtgcccagctaatttttgtatttttgttggccaggctgatttcgaactcctgacctcaaatgacccacctgcctcggcctcccaaagtgctaggattacaagtgtgagccactatgcctggccttccctatcttctacctgaaccttcttcctcttcccccagggcttcccaagctctttccacagccacatcagtca

SEQ ID NO: 90948 - DNA, 696 bp, Artificial Sequence
  derived and/or modified sequence
atgagaagagcccccagcctggtgctgttcttcctggtggccctgtgcggcagaggcaactgcagagtggccaacgccgaggagaagctgatggacgacctgctgaacaagaccagatacaacaacctgatcagacccgccaccagcagcagccagctgatcagcatcaagctgcagctgagcctggcccagctgatcagcgtgaacgagagagagcagatcatgaccaccaacgtgtggctgaagcaggagtggaccgactacagactgacctggaacagcagcagatacgagggcgtgaacatcctgagaatccccgccaagagaatctggctgcccgacatcgtgctgtacaacaagagcctgagaaccggcagcacctggctgtggtggtggaccggctgcagctgcggctgcagctgcctgtgcgccagctgggccctgtggggcagcagctacagacccagcagcagacccatgcagctgctgagaggccccaccctgcccagcgtgaccgagggccccctgggctgcggcgtgagaggctgcgagtggcccggcggccacttcgccgccagcttctgggtggtggccgacgaggccctgagcaagtacgtgagcatcggccaccagccccaccagaccagccacagcagaggcaccggcaaggacggcggcctgggctgccccctgtag

SEQ ID NO: 90949 - DNA, 2157 bp, Artificial Sequence
  derived and/or modified sequence
atgctgcagcaggagctgctgagcagaaccagcctggagacccagaagctggacctgatgaccgaggtgagcgagctgaagctgaagctggtgggcatggagaaggagcagagagagcaggaggagaagcagagaaaggccgaggagctgctgcaggagctgagacacctgaagatcaaggtggaggagctggagaacgagagaaaccagtacgagtggaagctgaaggccaccaaggccgaggtggcccagctgcaggagcaggtggccctgaaggacgccgagatcgagagactgcacagccagctgagcagaaccgccgccctgcacagcgagagccacaccgagagagaccaggagatccagagactgaagatgggcatggagaccctgctgctggccaacgaggacaaggacagaagaatcgaggagctgaccggcctgctgaaccagtacagaaaggtgaaggagatcgtgatggtgacccagggccccagcgagagaaccctgagcatcaacgaggaggagcccgagggcggcttcagcaagtggaacgccaccaacaaggaccccgaggagctgttcaagcaggagatgccccccagatgcagcagccccaccgtgggccccccccccctgccccagaagagcctggagaccagagcccagaagaagctgagctgcagcctggaggacctgagaagcgagagcgtggacaagtgcatggacggcaaccagcccttccccgtgctggagcccaaggacagccccttcctggccgagcacaagtaccccaccctgcccggcaagctgagcggcgccacccccaacggcgaggccgccaagagcccccccaccatctgccagcccgacgccaccggcagcagcctgctgagactgagagacaccgagagcggctgggacgacaccgccgtggtgaacgacctgagcagcaccagcagcggcaccgagagcggcccccagagccccctgacccccgacggcaagagaaaccccaagggcatcaagaagttctggggcaagatcagaagaacccagagcggcaacttctacaccgacaccctgggcatggccgagttcagaagaggcggcctgagagccaccgccggccccagactgagcagaaccagagacagcaagggccagaagagcgacgccaacgcccccttcgcccagtggagcaccgagagagtgtgcgcctggctggaggacttcggcctggcccagtacgtgatcttcgccagacagtgggtgagcagcggccacaccctgctgaccgccaccccccaggacatggagaaggagctgggcatcaagcaccccctgcacagaaagaagctggtgctggccgtgaaggccatcaacaccaagcaggaggagaagagcgccctgctggaccacatctgggtgaccagatggctggacgacatcggcctgccccagtacaaggaccagttccacgagagcagagtggacagaagaatgctgcagtacctgaccgtgaacgacctgctgttcctgaaggtgaccagccagctgcaccacctgagcatcaagtgcgccatccacgtgctgcacgtgaacaagttcaacccccactgcctgcacagaagacccgccgacgagagcaacctgagccccagcgaggtggtgcagtggagcaaccacagagtgatggagtggctgagaagcgtggacctggccgagtacgcccccaacctgagaggcagcggcgtgcacggcggcctgatcatcctggagcccagattcaccggcgacaccctggccatgctgctgaacatccccccccagaagaccctgctgagaagacacctgaccaccaagttcaacgccctgatcggccccgaggccgagcaggagaagagagagaagatggccagccccgcctacacccccctgaccaccaccgccaaggtgagacccagaaagctgggcttcagccacttcggcaacatcagaaagaagaagttcgacgagagcaccgactacatctgccccatggagcccagcgacggcgtgagcgacagccacagagtgtacagcggctacagaggcctgagccccctggacgcccccgagctggacggcctggaccaggtgggccagatcagctag

SEQ ID NO: 90950 - DNA, 1203 bp, Artificial Sequence
  derived and/or modified sequence
atgctgcagcaggagctgctgagcagaaccagcctggagacccagaagctggacctgatgaccgaggtgagcgagctgaagctgaagctggtgggcatggagaaggagcagagagagcaggaggagaagcagagaaaggccgaggagctgctgcaggagctgagacacctgaagatcaaggtggaggagctggagaacgagagaaaccagtacgagtggaagctgaaggccaccaaggccgaggtggcccagctgcaggagcaggtggccctgaaggacgccgagatcgagagactgcacagccagctgagcagaaccgccgccctgcacagcgagagccacaccgagagagaccaggagatccagagactgaagatgggcatggagaccctgctgctggccaacgaggacaaggacagaagaatcgaggagctgaccggcctgctgaaccagtacagaaaggtgaaggagatcgtgatggtgacccagggccccagcgagagaaccctgagcatcaacgaggaggagcccgagggcggcttcagcaagtggaacgccaccaacaaggaccccgaggagctgttcaagcaggagatgccccccagatgcagcagccccaccgtgggccccccccccctgccccagaagagcctggagaccagagcccagaagaagctgagctgcagcctggaggacctgagaagcgagagcgtggacaagtgcatggacggcaaccagcccttccccgtgctggagcccaaggacagccccttcctggccgagcacaagtaccccaccctgcccggcaagctgagcggcgccacccccaacggcgaggccgccaagagcccccccaccatctgccagcccgacgccaccggcagcagcctgctgagactgagagacaccgagagcggctgggacgacaccgccgtggtgaacgacctgagcagcaccagcagcggcaccgagagcggcccccagagccccctgacccccgacggcaagagaaaccccaagggcatcaagaagttctggggcaagatcagaagaacccagagcggcaacttctacaccgacaccctgggcatggccgagttcagaagaggcggcctgagagccaccgccggccccagactgagcagaaccagagacagcaagggccagggcctgcagtggctgcccggcccccagcccccctag

SEQ ID NO: 90951 - DNA, 2157 bp, Artificial Sequence
  derived and/or modified sequence
atgctccaacaggaactgctgtcacggacgtcacttgagacacagaaattagatctcatgaccgaagtgtctgaattgaaactgaaactggtgggtatggaaaaggagcagagggagcaggaagagaaacagagaaaagcagaagagctcttacaggagttgagacatttgaaaatcaaggtcgaggaattggagaacgaaaggaaccagtatgagtggaagctgaaggccaccaaagctgaagtcgctcagttgcaggagcaggtcgccctcaaggacgctgaaattgagcggctgcactcacaattgagtagaacagcggccctgcattcggagagccatactgagagagatcaggaaatacagagactgaaaatgggaatggaaacgctcttgctagcaaacgaagacaaggacagacgtatcgaagagctcactggtttactgaatcaatatcggaaagtgaaggagattgtcatggtgacacaggggcccagcgagcgcactctatccataaacgaagaagaacccgagggaggctttagcaagtggaatgctaccaacaaggacccagaggaactctttaaacaagagatgcccccacggtgctctagcccgacagtcgggcccccacctctaccacaaaagagcctggagactagggcacaaaaaaagctgagttgcagtcttgaggatcttagatcagagtcggtcgataaatgcatggacggcaaccaaccattccccgtgctggagccaaaggatagcccctttctggccgagcacaagtaccccacattgcccgggaaactgtcaggagctacacccaacggcgaagccgcaaaatccccccccaccatttgccagcctgacgccaccgggagctctctgcttaggcttcgggacaccgaaagcggctgggatgatacagctgtggtcaatgatctgagttccacatcctccggcacagagtcaggcccccaaagtcccctaacccccgacgggaaaagaaatccaaaaggaattaagaaattttggggcaagatacggaggactcagtccggtaacttctataccgatactctgggtatggctgaattcagaagaggggggttaagggccacggcaggcccccgcctgtcaaggactcgcgattccaaaggccaaaagtccgatgcaaacgcaccgtttgcccagtggtccaccgaaagagtttgcgcatggctggaggattttggtcttgcacagtacgtgattttcgctcggcaatgggtcagctctggccataccctcctgaccgccacaccacaagacatggaaaaagagctggggatcaagcacccactgcacaggaagaaactggtccttgcggttaaagccattaatacgaaacaggaggaaaagagcgcccttctggatcatatatgggtaacacgctggttggacgatatcggactgccccagtataaggaccagtttcatgagtccagggtcgatcggcggatgctgcagtacttgactgtgaacgatctcctgttcctcaaggtaacatcccagctccaccacctgtccatcaaatgtgccatccacgttttacacgtcaataagttcaaccctcactgtctccaccggcgcccagcagacgagagtaacctgtccccaagcgaggtagtgcagtggagcaaccaccgcgttatggaatggctacgaagcgtcgacctagctgagtacgcgccgaatctgaggggcagtggtgtgcacggcggcctgataattctcgagccaaggttcaccggtgacaccctagccatgttgttaaatatcccaccgcagaaaactctgctcaggcgccacctgacaactaaatttaacgcattaatcgggcccgaagcggagcaagagaagagagaaaagatggcatcacccgcctatactcctcttactactacagcgaaagtgcgccccagaaagttgggtttcagccatttcggcaacatcagaaaaaaaaaatttgacgaaagcaccgattatatatgccccatggaaccatctgacggcgtatccgacagccaccgagtatactctggatatcgcggcttaagtcccttggacgcgcccgagctcgacgggctagaccaggttgggcaaatctcctag

SEQ ID NO: 90952 - DNA, 1203 bp, Artificial Sequence
  derived and/or modified sequence
atgttgcagcaggaactgcttagccgcacaagcttagaaactcagaagcttgatttgatgacagaggtttcagagctcaagcttaaactggttgggatggaaaaggagcagcgggagcaggaggaaaaacagcggaaggccgaagaactcttgcaagagctgcgccatttaaagatcaaggtagaagagttagagaacgaacgcaatcagtatgagtggaaactgaaagcaaccaaggctgaggttgcacaactgcaggagcaggtggctctaaaggatgcagagattgagcggctccactcgcagctgtccagaacagcagccctccatagtgagtcacacaccgagcgggatcaagagattcaacggttgaaaatggggatggaaaccctgctcttggccaatgaagataaggataggaggatcgaggagctcaccggactgctgaatcagtatcgaaaggtcaaggagatcgtgatggtcacgcaggggcccagtgaacgtacactctctattaacgaggaggaacccgaggggggcttcagcaagtggaacgctaccaataaggatcccgaagagctgtttaagcaggaaatgccaccccgatgtagctcccccactgtaggcccaccacctcttccacagaaaagcctggaaacgcgcgcacaaaagaagctgtcatgcagcctagaggatctgaggtcggagtctgtggacaagtgtatggacgggaaccagccatttccagtcctcgaacctaaagacagtccatttctggccgagcacaagtaccccacgctgcctggaaaactgagcggtgccacccccaacggagaggccgctaagagtccaccgacaatctgtcagcccgatgctacaggctcgagcctgttacggctgagagatacggaatccggctgggatgacactgccgtggtgaacgatctcagtagcacatcatcagggacagaatccggtccccagtccccgttgacccccgatggcaaaaggaatcctaaaggcataaagaaattttggggcaaaatccggcgcacacagtcaggaaatttctatacagatacactgggaatggccgagttcaggaggggaggtttgagagctaccgctggtccccgcctgagccggacacgagacagcaaaggtcagggactgcagtggctcccagggccacaacctccatag

SEQ ID NO: 90953 - DNA, 2157 bp, Artificial Sequence
  derived and/or modified sequence
atgctgcagcaggagctgctgagcaggaccagcctggagacccagaagctggacctgatgacagaggtgtctgagctgaagctgaagctggtgggcatggagaaggagcagcgggagcaggaggagaagcagaggaaggccgaggagctgctgcaggagctgcggcacctgaagatcaaggtggaggagctggagaatgaaagaaaccagtatgagtggaagctgaaggccaccaaggccgaggtggcccagctgcaggagcaggtggccctgaaggatgctgagattgaaaggctgcacagccagctgagcaggacagctgccctgcacagcgagagccacacagagcgggaccaggagatccagaggctgaagatgggcatggagaccctgctgctggccaatgaagacaaggaccggcgcatcgaggagctgaccggcctgctgaaccagtacaggaaggtgaaggagatcgtgatggtgacccagggccccagcgagaggaccctgagcatcaatgaggaggagcctgagggcggcttcagcaagtggaatgccaccaacaaggaccctgaggagctgttcaagcaggagatgccaccccgctgcagcagccccaccgtgggccccccacccctgccccagaagagcctggagacccgggcccagaagaagctgagctgcagcctggaggacctgcggtctgagagcgtggacaagtgcatggatggcaaccagcccttccctgtgctggagcccaaggacagccccttcctggccgagcacaagtaccccaccctgcccgggaagctgagcggggccaccccaaatggagaggccgccaagagcccccccaccatctgccagccagatgccaccggcagcagcctgctgcggctgcgggacacagaaagtggctgggatgacacagctgtggtgaatgacctgagcagcaccagcagcggcacagaaagtggcccccagagccccctgaccccagatggcaagaggaaccccaagggcatcaagaagttctggggcaagatccggaggacccagagcggcaacttctacacagacaccctgggcatggccgagttccggcggggcggcctgcgggccacagctggcccccggctgagcaggacccgggacagcaagggccagaagagtgatgccaatgccccctttgcccagtggagcacagagcgggtgtgtgcctggctggaggactttggcctggcccagtatgtgatctttgcccggcagtgggtgagcagcggccacaccctgctgacagccaccccccaggacatggagaaggagctgggcatcaagcaccccctgcacaggaagaagctggtgctggccgtgaaggccatcaacaccaagcaggaggagaagagcgccctgctggaccacatctgggtgacccgctggctggatgacatcggcctgccccagtacaaggaccagttccacgagagccgggtggacaggaggatgctgcagtacctgactgtgaatgacctgctcttcctgaaggtgaccagccagctgcaccacctgagcatcaagtgtgccatccacgtgctgcacgtgaacaagttcaacccccactgcctgcaccggcggccagcagatgagagcaacctgagccccagcgaggtggtgcagtggagcaaccaccgggtgatggagtggctgcggtctgtggacctggccgagtatgcccccaacctgcggggcagcggcgtgcatggaggcctcatcatcctggagccccgcttcaccggggacaccctggccatgctgctgaacatccccccccagaagaccctgctgcggcggcacctgaccaccaagttcaatgccctgattggccctgaggccgagcaggagaagcgggagaagatggccagccctgcctacacccccctgaccaccacagccaaggtgcggcccaggaagctgggcttcagccactttggaaacatcaggaagaagaagtttgatgagagcacagactacatctgccccatggagcccagtgatggagtgtctgacagccaccgggtgtacagcggctaccggggcctgagccccctggatgcccctgagctggatggcctggaccaggtgggccagatctcctag

SEQ ID NO: 90954 - DNA, 1203 bp, Artificial Sequence
  derived and/or modified sequence
atgctgcagcaggagctgctgagcaggaccagcctggagacccagaagctggacctgatgacagaggtgtctgagctgaagctgaagctggtgggcatggagaaggagcagcgggagcaggaggagaagcagaggaaggccgaggagctgctgcaggagctgcggcacctgaagatcaaggtggaggagctggagaatgaaagaaaccagtatgagtggaagctgaaggccaccaaggccgaggtggcccagctgcaggagcaggtggccctgaaggatgctgagattgaaaggctgcacagccagctgagcaggacagctgccctgcacagcgagagccacacagagcgggaccaggagatccagaggctgaagatgggcatggagaccctgctgctggccaatgaagacaaggaccggcgcatcgaggagctgaccggcctgctgaaccagtacaggaaggtgaaggagatcgtgatggtgacccagggccccagcgagaggaccctgagcatcaatgaggaggagcctgagggcggcttcagcaagtggaatgccaccaacaaggaccctgaggagctgttcaagcaggagatgccaccccgctgcagcagccccaccgtgggccccccacccctgccccagaagagcctggagacccgggcccagaagaagctgagctgcagcctggaggacctgcggtctgagagcgtggacaagtgcatggatggcaaccagcccttccctgtgctggagcccaaggacagccccttcctggccgagcacaagtaccccaccctgcccgggaagctgagcggggccaccccaaatggagaggccgccaagagcccccccaccatctgccagccagatgccaccggcagcagcctgctgcggctgcgggacacagaaagtggctgggatgacacagctgtggtgaatgacctgagcagcaccagcagcggcacagaaagtggcccccagagccccctgaccccagatggcaagaggaaccccaagggcatcaagaagttctggggcaagatccggaggacccagagcggcaacttctacacagacaccctgggcatggccgagttccggcggggcggcctgcgggccacagctggcccccggctgagcaggacccgggacagcaagggccagggcctgcagtggctgcccggcccccagcccccatag

SEQ ID NO: 90955 - DNA, 2157 bp, Artificial Sequence
  derived and/or modified sequence
atgctgcagcaggagctgctgagccggaccagcctggagacccagaagctggatcttatgaccgaagtctccgagcttaagttgaagctcgtgggaatggaaaaagaacaacgagaacaggaagagaaacaacgaaaggcagaagagctgctccaagagctgcggcatctgaagataaaagtcgaggaattagaaaatgaacggaatcagtacgagtggaaactcaaggctacaaaggctgaggtcgcccagttgcaagaacaagtcgctttaaaagatgcagagattgagcgcctgcactcgcaattgtccagaactgctgcccttcactccgagtctcacactgagcgggatcaagagatacagcgcctaaagatgggaatggagaccctgctgctggctaacgaagacaaggatcggcggatcgaggaacttacaggcctgttgaatcagtatagaaaagtcaaagaaatcgtgatggtcacccaaggacccagcgaaaggacactgtcaattaacgaggaggaacctgaggggggcttctctaaatggaacgctactaacaaagatccagaggagttattcaagcaggaaatgcctccaagatgctcctcccctaccgtcggccccccacctctgcctcaaaaatccctcgaaaccagagctcagaagaaactcagttgctccctggaggatctcagaagcgaatctgtggacaagtgcatggatgggaaccagccatttccagtgcttgaaccgaaggatagcccgtttctggccgaacataagtaccccacactgcccgggaagctctctggtgccacaccaaacggagaagctgccaagagcccacctaccatctgtcagcccgacgcgaccggaagttccttgcttcgtctcagggacaccgagtctgggtgggatgacacggccgtggtaaatgacctcagctcaaccagttccggtacagagagtggcccacagtcccccctgacaccagatggcaagcgcaaccccaagggtattaagaaattctggggcaagatacggagaacgcagagtggtaacttctatactgacaccctgggcatggctgaatttcgtaggggcggactccgggcaacggcaggccctagactttcccggactcgtgacagcaaggggcagaaaagtgacgcgaatgcgccatttgcacagtggtctaccgaaagggtctgcgcctggctggaggactttggcctggcccagtacgtcatttttgctaggcaatgggtttcatctgggcataccctgctcacagccacgcctcaggacatggaaaaggagttagggattaagcatccactacacaggaaaaagctcgtgcttgccgtgaaagcaatcaatactaagcaggaggaaaaatccgcactactggatcatatttgggtgacaaggtggctggatgatatcggtctccctcaatataaggatcagttccacgagtctagggtggatcgcagaatgctacagtacctcacagtgaatgacctattatttctgaaagtaacctcccaactccatcacctcagtattaagtgtgccattcacgtgctccacgtcaataaattcaacccacactgcttgcacagacgtcctgccgacgagtcgaacctgtccccctccgaggtagtgcaatggagcaatcatcgcgtgatggaatggctgaggtctgttgatctagcagagtatgcccctaatttacgaggttccggcgtccacggtgggctcatcatcctggagccccgatttaccggggacaccttggccatgttgcttaatatacccccacaaaaaacactgctgcgcagacacctgactactaagtttaatgcactgatcggtcctgaagcagaacaggagaagcgagagaagatggcatctccagcttatacacccctcaccacaaccgcaaaggtccgacctagaaagctaggcttcagccacttcggaaatatacggaaaaagaaatttgatgagagtacggactatatctgtcccatggagccgagcgacggtgtatcagatagccacagggtttacagcgggtatcgaggcttatcacccctcgatgctcctgagctggatggcctggatcaggttgggcagatttcctag

SEQ ID NO: 90956 - DNA, 1203 bp, Artificial Sequence
  derived and/or modified sequence
atgctgcagcaggagctgctgagccggaccagcctggagacccagaagctggatctcatgacagaggtatcagaactgaagctgaaattggtgggtatggagaaagagcaaagggaacaagaggagaagcagcggaaagccgaggagctgctgcaagagctccgccacctgaaaataaaggtggaggaactcgagaacgagcgcaaccagtatgagtggaaattaaaagctacaaaggccgaagtggcccaactccaggaacaagtagcactgaaagacgctgaaatcgaacgattgcactctcagctttccagaacagcagcactgcactctgagagtcatactgaaagggatcaggaaatccagaggctgaaaatgggaatggagacactcttacttgccaatgaagataaagacagacggatcgaagagctgacaggcttgctgaatcagtataggaaagttaaagagatcgtcatggtgacgcagggaccatcagaacgtacgctgagcatcaacgaggaggaacccgagggaggtttctcgaaatggaatgctactaataaagatcctgaagaactgtttaaacaggagatgccacctagatgctcgtcccctaccgttgggcctccccctttgcctcagaagagcctggaaacccgggcgcagaagaaacttagctgctccctagaggatcttcggagtgaaagcgtcgacaagtgtatggacggaaatcaacctttccctgtgttggagcctaaagactcaccgttcctagccgagcacaagtacccaaccctgccgggcaaactgagcggggctacgcccaatggggaagctgccaaatcaccccccacaatttgccagccagacgccacgggaagctccctcctgcgcctgcgagacactgaaagcggatgggatgacaccgcagtcgtgaatgaccttagcagtacttcaagcgggaccgaatctggcccccagagccccctgactcctgacgggaaaaggaacccaaaaggcattaaaaagttttgggggaaaattcggaggacccagtctggaaacttctacacagatacgctggggatggccgaattcaggagaggaggactaagggccacagcggggccccgcctgtctcgcacccgcgatagcaaaggacaggggctgcagtggctgccaggacctcagccgccttag

SEQ ID NO: 90957 - DNA, 2157 bp, Artificial Sequence
  derived and/or modified sequence
atgctgcaacaggagttactaagcaggacttccctcgagacccaaaagctggatttgatgacagaagtgagtgaacttaaattaaagctggtggggatggagaaagagcagagagaacaggaggaaaagcaacgtaaagctgaagagctgctgcaggaactgcgccatctcaagatcaaggttgaagagttagaaaatgaacgcaaccaatatgagtggaaattgaaggccaccaaagcggaagtagctcaactacaggagcaggttgcccttaaagatgccgaaattgaacggttacactcacagctcagccgaacagcggcattgcactccgaatcccatactgagcgcgaccaggagatccaacggctgaaaatgggcatggaaactctgctacttgccaacgaagacaaggataggcgcatcgaagagttaaccggcctgctaaatcagtataggaaggtcaaggagatcgtcatggttacccagggaccctcagagagaacgctgagtataaacgaggaagaacctgagggcggattttcgaagtggaacgccactaataaagatccggaggagctttttaagcaagagatgccccctcgatgtagttcacccacagtgggaccacctccactgccccagaagtctttggagactcgagcccagaaaaaactgagctgctccttagaagaccttaggtccgaaagtgtggacaagtgcatggatggaaatcagcctttccccgtgctagaacctaaagactcgccgttccttgccgaacataagtatccgaccctccccggtaagctaagcggcgcaactcccaacggagaagccgcaaagagccctccaaccatttgccaaccagacgcaacaggtagcagcctgctgcgtctcagagataccgagagcggctgggacgatacagccgtggttaacgatctgagtagcacaagttctggaactgaatctggccctcagtctcccctcacaccagacgggaagcgaaaccctaagggtattaaaaaattctggggcaagatacgacggactcagtccggaaatttctatacagacacgctcggcatggccgaatttagaaggggaggcctgagagctacggctgggcctcgcttatcccggacgagagactcgaagggccagaaaagtgacgcgaatgccccattcgcccagtggagtactgagcgagtttgcgcctggctggaagacttcggtcttgctcagtacgtgatattcgctcgacagtgggtaagtagcggtcacacactgctcactgccacaccccaggacatggaaaaagaactgggaatcaaacacccattgcatcgtaaaaagttagtccttgccgtgaaagccataaacaccaagcaggaagaaaagtcagccctgcttgatcacatctgggtcacacggtggcttgatgatatcggcttgccccagtataaagaccaatttcacgaaagcagagtcgaccgtaggatgttgcagtatctgaccgtgaacgatctgctgtttctaaaagtcacttcccagttgcaccacctttcaatcaaatgtgccattcatgttctgcacgtgaacaagtttaatccccattgtctacacagaaggcccgcagacgaaagtaatctgtcccccagcgaggtggtacagtggtctaaccaccgcgtcatggagtggctacgctctgttgatctcgcagagtatgccccaaacctgcgaggaagcggcgtgcacgggggtctgatcattctagagccgcgtttcaccggagatacactggctatgctgcttaacattcccccacagaaaactttattacgcaggcacctaaccacaaagttcaatgccttgattggccctgaggccgagcaagagaaacgggagaaaatggctagccctgcttacacacctttaaccactacagcaaaggtcagaccgagaaagttggggtttagccactttggaaacatccgcaagaagaagtttgatgaaagcaccgattatatatgtcccatggagccctcggatggggtgtctgattctcatcgtgtgtactccggctatcggggattgtcacccctcgatgcccctgagctcgacggcctggaccaggtcggccagatctcatag

SEQ ID NO: 90958 - DNA, 1203 bp, Artificial Sequence
  derived and/or modified sequence
atgctacagcaagagctgctctcacgcacctccctagagacccagaagcttgacctgatgacagaggtgtccgagttaaagctcaaactagtaggtatggagaaagagcagagagagcaggaagaaaaacagaggaaggccgaggaactcttacaagagctgaggcacctgaaaataaaggtagaagaactcgagaatgagcgcaatcaatacgagtggaaactgaaggcaaccaaagcagaagtagcgcagctgcaggagcaggtggcgctgaaagacgccgaaattgagcgcctgcattctcagttgtctcgtaccgctgccttgcattccgaatcgcatacagagcgcgatcaggagatccagcgcctcaagatgggtatggagactcttctcttagctaacgaggataaggaccgacgcatcgaggaactcaccggcctgctcaatcagtacaggaaggttaaagagatagtgatggttacccaaggcccttcggagcggacactatccataaacgaggaagagccagaaggaggcttctcaaaatggaacgccacaaataaggatccagaagagcttttcaaacaagagatgccaccacgctgttcttcacctaccgtgggtcctccacctttgcctcagaagtccttggagacgagggctcagaagaagctctcctgcagcctagaggacctgagaagtgagagtgtggacaagtgtatggacggtaatcagcccttcccagtcctggaaccaaaggactccccatttctggccgagcataaatatcctactcttcctggtaaactttctggggcaacacctaacggggaggccgctaagtccccgccaacgatctgccagccagacgcaactgggagctcccttctgcggctgagagacaccgagagcggttgggatgatacagccgttgttaacgacctctcttccacatcatctggtacagagtcaggcccacaatctcccttaactcccgatggcaaaagaaatccaaagggaattaagaagttttgggggaagatccggagaactcagagcggcaacttctacactgacaccctgggaatggcggaatttcgcagaggagggctgcgcgctaccgctggtcctcggcttagtcgcactcgcgacagcaagggccagggactgcaatggctccctgggcctcaacccccttag

SEQ ID NO: 90959 - protein, 733 aa, Artificial Sequence
  derived and/or modified sequence
MGKLITRMWKLLRRRSAPKELLSRTSLETQKLDLMTEVSELKLKLVGMEKEQREQEEKQRKAEELLQELRHLKIKVEELENERNQYEWKLKATKAEVAQLQEQVALKDAEIERLHSQLSRTAALHSESHTERDQEIQRLKMGMETLLLANEDKDRRIEELTGLLNQYRKVKEIVMVTQGPSERTLSINEEEPEGGFSKWNATNKDPEELFKQEMPPRCSSPTVGPPPLPQKSLETRAQKKLSCSLEDLRSESVDKCMDGNQPFPVLEPKDSPFLAEHKYPTLPGKLSGATPNGEAAKSPPTICQPDATGSSLLRLRDTESGWDDTAVVNDLSSTSSGTESGPQSPLTPDGKRNPKGIKKFWGKIRRTQSGNFYTDTLGMAEFRRGGLRATAGPRLSRTRDSKGQKSDANAPFAQWSTERVCAWLEDFGLAQYVIFARQWVSSGHTLLTATPQDMEKELGIKHPLHRKKLVLAVKAINTKQEEKSALLDHIWVTRWLDDIGLPQYKDQFHESRVDRRMLQYLTVNDLLFLKVTSQLHHLSIKCAIHVLHVNKFNPHCLHRRPADESNLSPSEVVQWSNHRVMEWLRSVDLAEYAPNLRGSGVHGGLIILEPRFTGDTLAMLLNIPPQKTLLRRHLTTKFNALIGPEAEQEKREKMASPAYTPLTTTAKVRPRKLGFSHFGNIRKKKFDESTDYICPMEPSDGVSDSHRVYSGYRGLSPLDAPELDGLDQVGQIS

SEQ ID NO: 90960 - DNA, 2202 bp, Artificial Sequence
  derived and/or modified sequence
atgggcaagctgatcaccagaatgtggaagctgctgagaagaagaagcgcccccaaggagctgctgagcagaaccagcctggagacccagaagctggacctgatgaccgaggtgagcgagctgaagctgaagctggtgggcatggagaaggagcagagagagcaggaggagaagcagagaaaggccgaggagctgctgcaggagctgagacacctgaagatcaaggtggaggagctggagaacgagagaaaccagtacgagtggaagctgaaggccaccaaggccgaggtggcccagctgcaggagcaggtggccctgaaggacgccgagatcgagagactgcacagccagctgagcagaaccgccgccctgcacagcgagagccacaccgagagagaccaggagatccagagactgaagatgggcatggagaccctgctgctggccaacgaggacaaggacagaagaatcgaggagctgaccggcctgctgaaccagtacagaaaggtgaaggagatcgtgatggtgacccagggccccagcgagagaaccctgagcatcaacgaggaggagcccgagggcggcttcagcaagtggaacgccaccaacaaggaccccgaggagctgttcaagcaggagatgccccccagatgcagcagccccaccgtgggccccccccccctgccccagaagagcctggagaccagagcccagaagaagctgagctgcagcctggaggacctgagaagcgagagcgtggacaagtgcatggacggcaaccagcccttccccgtgctggagcccaaggacagccccttcctggccgagcacaagtaccccaccctgcccggcaagctgagcggcgccacccccaacggcgaggccgccaagagcccccccaccatctgccagcccgacgccaccggcagcagcctgctgagactgagagacaccgagagcggctgggacgacaccgccgtggtgaacgacctgagcagcaccagcagcggcaccgagagcggcccccagagccccctgacccccgacggcaagagaaaccccaagggcatcaagaagttctggggcaagatcagaagaacccagagcggcaacttctacaccgacaccctgggcatggccgagttcagaagaggcggcctgagagccaccgccggccccagactgagcagaaccagagacagcaagggccagaagagcgacgccaacgcccccttcgcccagtggagcaccgagagagtgtgcgcctggctggaggacttcggcctggcccagtacgtgatcttcgccagacagtgggtgagcagcggccacaccctgctgaccgccaccccccaggacatggagaaggagctgggcatcaagcaccccctgcacagaaagaagctggtgctggccgtgaaggccatcaacaccaagcaggaggagaagagcgccctgctggaccacatctgggtgaccagatggctggacgacatcggcctgccccagtacaaggaccagttccacgagagcagagtggacagaagaatgctgcagtacctgaccgtgaacgacctgctgttcctgaaggtgaccagccagctgcaccacctgagcatcaagtgcgccatccacgtgctgcacgtgaacaagttcaacccccactgcctgcacagaagacccgccgacgagagcaacctgagccccagcgaggtggtgcagtggagcaaccacagagtgatggagtggctgagaagcgtggacctggccgagtacgcccccaacctgagaggcagcggcgtgcacggcggcctgatcatcctggagcccagattcaccggcgacaccctggccatgctgctgaacatccccccccagaagaccctgctgagaagacacctgaccaccaagttcaacgccctgatcggccccgaggccgagcaggagaagagagagaagatggccagccccgcctacacccccctgaccaccaccgccaaggtgagacccagaaagctgggcttcagccacttcggcaacatcagaaagaagaagttcgacgagagcaccgactacatctgccccatggagcccagcgacggcgtgagcgacagccacagagtgtacagcggctacagaggcctgagccccctggacgcccccgagctggacggcctggaccaggtgggccagatcagctag

SEQ ID NO: 90961 - DNA, 654 bp, Artificial Sequence
  derived and/or modified sequence
atgctgcagtacctgaccgtgaacgacctgctgttcctgaaggtgaccagccagctgcaccacctgagcatcaagtgcgccatccacgtgctgcacgtgaacaagttcaacccccactgcctgcacagaagacccgccgacgagagcaacctgagccccagcgaggtggtgcagtggagcaaccacagagtgatggagtggctgagaagcgtggacctggccgagtacgcccccaacctgagaggcagcggcgtgcacggcggcctgatcatcctggagcccagattcaccggcgacaccctggccatgctgctgaacatccccccccagaagaccctgctgagaagacacctgaccaccaagttcaacgccctgatcggccccgaggccgagcaggagaagagagagaagatggccagccccgcctacacccccctgaccaccaccgccaaggtgagacccagaaagctgggcttcagccacttcggcaacatcagaaagaagaagttcgacgagagcaccgactacatctgccccatggagcccagcgacggcgtgagcgacagccacagagtgtacagcggctacagaggcctgagccccctggacgcccccgagctggacggcctggaccaggtgggccagatcagctag

SEQ ID NO: 90962 - DNA, 2202 bp, Artificial Sequence
  derived and/or modified sequence
atgggcaaattgatcacccggatgtggaagcttctcaggcggcgaagtgcccccaaagaactgctgagtcgcacatcgcttgagacccagaaattggatcttatgactgaggtgtctgaactgaagctcaaactggtgggaatggagaaggagcaacgggagcaggaggagaagcagcgcaaggccgaagagctactgcaagagcttagacacctcaagataaaagtcgaagagctcgagaacgaaagaaaccaatacgagtggaagttgaaggcgaccaaagctgaagttgctcagttacaggagcaagtggcgctgaaagatgcggaaatcgagagactgcattctcagctcagtcgtaccgcggcattgcacagtgaaagtcacaccgaacgggaccaggagatccagagactcaaaatgggaatggagaccctactgctggccaacgaggacaaggaccggcgaatcgaggagctcacgggtctattaaaccaatatagaaaagtcaaagagatcgtcatggtgacacaggggccatccgaacgcaccctgtcaattaatgaagaggagccagagggcgggttttcaaaatggaacgccacaaacaaggatcctgaggagctgttcaaacaggagatgcctccgcgatgtagctcacctaccgtcggacctcccccgttaccacagaaatccctggagacccgcgcacagaagaaattaagttgttccctggaagaccttcggagcgagagcgtcgataagtgcatggacggcaaccagccgtttcccgttctcgagcctaaggactctcccttcctcgctgagcacaagtatcccaccttaccaggcaaactgtcaggtgccactcctaatggagaagcggccaagtccccacctacaatctgccagcctgatgctaccgggtcctcgctattacgactgcgggatacagaaagcggatgggacgacacagctgtggtgaatgacctgagctctacaagttctggtactgagagcggaccacaaagccccctaacgccagacgggaaacggaatcctaaaggcattaaaaaattctggggcaaaatcaggcgtacgcaaagcggaaacttttataccgacaccctcggaatggcagaattcagacggggaggcctgcgagcgacagccggccctcgcttgagtcgtacaagagatagcaaaggtcagaaaagcgatgctaacgccccgttcgctcagtggtcaaccgagagagtgtgcgcatggctggaagactttgggctggcacagtacgtgatattcgcccgtcagtgggtctctagcggtcacacactgctaaccgccacacctcaggacatggaaaaggaattgggtatcaagcaccctctgcaccggaaaaagcttgtgttggccgtaaaggccattaatacgaagcaggaagaaaaatcagccctgctcgaccacatatgggtgactcgctggttggatgatattggtctgccccaatataaggaccagttccatgagtcccgcgttgatcggaggatgcttcagtaccttacagtgaacgacctcctgtttctcaaggtaacatcacaattacatcacctgagtataaaatgcgccatccatgtcctacatgtaaacaagttcaatccccactgtctccacaggcgccctgcggacgagtcaaatctctctccttccgaagtcgttcagtggtctaaccacagagtcatggagtggctcaggagtgtggacttagctgagtatgcaccaaacctaagaggctcaggcgtacacgggggcctgattattttggaacccagattcacgggggatacactcgcaatgcttctcaacattcctcctcaaaagacccttctccgtcgccacctgaccacgaagttcaatgcactgattggccccgaggcagagcaagagaaacgggagaagatggctagtcccgcttatactcctctcacaacaacggcaaaggtgcgcccgcgtaagctcggtttctctcatttcggaaacatcagaaagaaaaagtttgacgagtctacagattatatatgccctatggagccctccgacggggtgtccgattctcacagagtgtatagtggataccggggtctgtcccccctcgacgcacctgagctggatggccttgaccaggttggtcaaatctcctag

SEQ ID NO: 90963 - DNA, 654 bp, Artificial Sequence
  derived and/or modified sequence
atgctgcaatatctgaccgttaacgacctgctgtttcttaaggtcaccagccaactccatcatctttcaattaagtgtgcgatccacgtgcttcatgttaataaattcaatccgcattgtctccacaggaggccagccgacgagtcaaacctgagtcctagcgaggtggtccagtggagtaatcaccgcgttatggaatggttacgttcagtcgacttggcggagtatgcacccaatctgcgcggctccggcgttcacggaggattaatcatcctggagcctagatttacaggagatactctagcaatgctcctcaatattccacctcagaaaacccttctgaggcggcatctaaccactaagttcaatgcgcttataggacctgaggccgagcaggaaaagagagagaagatggcctcccccgcgtacacacccctgactacaacggcaaaggtgcggccacggaaactgggcttctctcacttcggcaatatccgtaagaagaagtttgatgaatcaacagattatatttgtccgatggaacctagtgatggagtaagcgactctcacagggtgtactcagggtaccgggggctgtccccactggatgctcccgagctagatggactggatcaggttgggcagataagctag

SEQ ID NO: 90964 - DNA, 2202 bp, Artificial Sequence
  derived and/or modified sequence
atgggcaagctgatcaccaggatgtggaagctgctgcggcggcgcagcgcccccaaggagctgctgagcaggaccagcctggagacccagaagctggacctgatgacagaggtgtctgagctgaagctgaagctggtgggcatggagaaggagcagcgggagcaggaggagaagcagaggaaggccgaggagctgctgcaggagctgcggcacctgaagatcaaggtggaggagctggagaatgaaagaaaccagtatgagtggaagctgaaggccaccaaggccgaggtggcccagctgcaggagcaggtggccctgaaggatgctgagattgagcggctgcacagccagctgagcaggacagctgccctgcacagcgagagccacacagagcgggaccaggagatccagaggctgaagatgggcatggagaccctgctgctggccaatgaagacaaggacagaagaattgaggagctgaccggcctgctgaaccagtacaggaaggtgaaggagatcgtgatggtgacccagggccccagcgagaggaccctgagcatcaatgaggaggagcctgagggcggcttcagcaagtggaatgccaccaacaaggaccctgaggagctgttcaagcaggagatgccaccccgctgcagcagccccaccgtgggccccccacccctgccccagaagagcctggagacccgggcccagaagaagctgagctgcagcctggaggacctgcggtctgagagcgtggacaagtgcatggatggcaaccagcccttccctgtgctggagcccaaggacagccccttcctggccgagcacaagtaccccaccctgcccgggaagctgagcggggccacccccaacggggaggccgccaagagcccccccaccatctgccagccagatgccaccggcagcagcctgctgcggctgcgggacacagagagcggctgggatgacacagctgtggtgaatgacctgagcagcaccagcagcggcacagagagcggcccccagagccccctgaccccagatggcaagaggaaccccaagggcatcaagaagttctggggcaagatccggaggacccagagcggcaacttctacacagacaccctgggcatggccgagttcagaagaggaggcctgcgggccacagctggcccccggctgagcaggacccgggacagcaagggccagaagagtgatgccaatgccccctttgcccagtggagcacagagcgggtgtgtgcctggctggaggactttggcctggcccagtatgtgatctttgcccggcagtgggtgagcagcggccacaccctgctgacagccaccccccaggacatggagaaggagctgggcatcaagcaccccctgcacaggaagaagctggtgctggccgtgaaggccatcaacaccaagcaggaggagaagagcgccctgctggaccacatctgggtgacccgctggctggatgacatcggcctgccccagtacaaggaccagttccacgagagccgggtggacaggaggatgctgcagtacctgactgtgaatgacctgctcttcctgaaggtgaccagccagctgcaccacctgagcatcaagtgtgccatccacgtgctgcacgtgaacaagttcaacccccactgcctgcacagaagaccagcagatgagagcaacctgagccccagcgaggtggtgcagtggagcaaccaccgggtgatggagtggctgcggtctgtggacctggccgagtatgcccccaacctgcggggcagcggcgtgcacggcggcctcatcatcctggagccccgcttcaccggggacaccctggccatgctgctgaacatccccccccagaagaccctgctgcggcggcacctgaccaccaagttcaatgccctgattggccctgaggccgagcaggagaagcgggagaagatggccagccctgcctacacccccctgaccaccacagccaaggtgcggcccaggaagctgggcttcagccacttcggcaacatcaggaagaagaagtttgatgagagcacagactacatctgccccatggagcccagtgatggagtgtctgacagccaccgggtgtacagcggctaccggggcctgagccccctggatgcccctgagctggatggcctggaccaggtgggccagatctcctag

SEQ ID NO: 90965 - DNA, 654 bp, Artificial Sequence
  derived and/or modified sequence
atgctgcagtacctgactgtgaatgacctgctcttcctgaaggtgaccagccagctgcaccacctgagcatcaagtgtgccatccacgtgctgcacgtgaacaagttcaacccccactgcctgcacagaagaccagcagatgagagcaacctgagccccagcgaggtggtgcagtggagcaaccaccgggtgatggagtggctgcggtctgtggacctggccgagtatgcccccaacctgcggggcagcggcgtgcacggcggcctcatcatcctggagccccgcttcaccggggacaccctggccatgctgctgaacatccccccccagaagaccctgctgcggcggcacctgaccaccaagttcaatgccctgattggccctgaggccgagcaggagaagcgggagaagatggccagccctgcctacacccccctgaccaccacagccaaggtgcggcccaggaagctgggcttcagccacttcggcaacatcaggaagaagaagtttgatgagagcacagactacatctgccccatggagcccagtgatggagtgtctgacagccaccgggtgtacagcggctaccggggcctgagccccctggatgcccctgagctggatggcctggaccaggtgggccagatctcctag

SEQ ID NO: 90966 - DNA, 2202 bp, Artificial Sequence
  derived and/or modified sequence
atgggcaagctgatcacccggatgtggaagctgctgcggcggcggagtgcacctaaggagctgttgtccaggacgtctctggagacccagaagcttgatcttatgaccgaggtgtccgaactgaagctgaagctggttgggatggagaaagaacagagagagcaggaggagaagcagaggaaagcagaggaactcctgcaggagctgcggcaccttaaaataaaagttgaggagctggaaaacgagcggaaccagtacgaatggaaactcaaggcaacaaaagctgaagttgctcaacttcaagagcaggttgctctcaaagacgccgaaatcgagcgcctgcactctcaactttcaaggaccgccgccttgcattcggaatcccacactgagagggaccaggagatccagcggctgaaaatggggatggagacgttactgctggctaatgaagacaaggatcggagaattgaggaactgaccggtctgctgaaccagtaccgaaaggtcaaggagatcgtaatggtgacccagggcccctctgagcgtaccttgagcattaatgaggaggagcccgaagggggatttagcaagtggaacgccactaataaagatcccgaggaactgtttaagcaggagatgccccctcgatgtagctctcccactgtcgggccccccccactccctcagaagtctctcgaaacacgtgcgcaaaaaaagctctcttgcagcttggaggacttaagatcagagagtgtggataagtgtatggacggcaatcagcccttccctgttttggaaccgaaagatagtcccttcctggcagagcataagtatcccactctgccaggtaagctgtccggagctactcccaatggcgaggccgccaaatcgcctcccacaatctgccagcccgacgccactggaagctcattactgagactcagagacaccgagagtgggtgggatgacacagcagttgtcaacgatctgtcctcaacatcaagcggtactgagtctggcccccaatcacctctgacaccagatggtaagaggaatcctaaaggcattaagaagttctgggggaaaatacggcgcactcagagcggtaacttttatacagacaccctgggcatggcggagttccggcgaggcgggttgcgtgcaacagctgggcctcgcctgagcagaacacgtgatagtaaaggccagaagagcgatgccaacgctccctttgcacaatggagtaccgaaagagtgtgcgcttggctggaagatttcggcttggcccagtacgtgattttcgcgcgacagtgggtttccagcgggcatactttgctcacggctacaccgcaggatatggagaaagagctcggcattaaacaccccctgcataggaagaaattggtgctcgccgtgaaggctattaatacaaagcaagaggagaagtccgctctgctcgatcacatctgggtgacgcgctggcttgacgatatcgggctgccgcaatacaaggaccagttccacgaatctcgtgtggaccggaggatgctgcagtacctcacagtcaacgacctcctgttcttgaaagtgacatctcagctgcatcacctgtcaataaagtgcgcaatccacgtattgcatgtgaacaagttcaacccacactgcttgcaccgacgtccagccgacgaatctaacctcagtccctccgaagtggtacaatggtcaaatcaccgagtaatggaatggcttagaagcgttgatcttgccgagtatgccccaaatctgcgtggttccggcgtacatgggggattgattattctcgagccccggtttacaggcgatactctggccatgttgttgaacatccccccacaaaaaacgttgctgagaagacatttaacaactaagttcaatgctttgattggcccagaagccgaacaagaaaaaagggagaaaatggcctctcccgcctacacacctctcactaccactgccaaggtgcggccaaggaaactaggcttctcacatttcggcaacattcgcaagaaaaaatttgatgaatcaaccgattacatctgcccaatggagccgtcagacggggtttcagactcccaccgcgtgtattccggatacagaggattaagcccactggatgccccagaactcgatgggttggaccaggtgggtcaaatttcatag

SEQ ID NO: 90967 - DNA, 654 bp, Artificial Sequence
  derived and/or modified sequence
atgctgcagtacctgaccgtgaacgacctgctgttcctgaaggtgaccagccaattacaccaccttagcatcaagtgcgcaatccacgtgttacacgtgaataagttcaatccacactgtctccaccggcggcccgccgacgagagcaacttgtctccttcagaggtagtacagtggagtaatcatcgcgtgatggaatggctgcgatctgttgatctggcagagtacgctccgaacctgcgtgggagtggtgtccatggaggccttattatcctggaaccccgcttcacgggagatacgctcgcaatgctgctgaatataccccctcagaaaacacttctgcgacggcatctgacgacgaagttcaacgctctgataggtcccgaggctgagcaggaaaaacgggaaaagatggccagtcccgcctacacccctctgactaccaccgccaaggtaaggccccgtaagctcggcttcagtcattttggaaacataagaaaaaagaagtttgacgaatcgacagactatatctgtcctatggagcctagcgacggcgtgtcggattctcacagagtgtatagcggttatagaggactgtctccactggatgctccagagctcgatggattggaccaagtcgggcaaatttcttag

SEQ ID NO: 90968 - DNA, 2202 bp, Artificial Sequence
  derived and/or modified sequence
atggggaaactaattacccgaatgtggaaattacttcggaggcggagcgccccaaaggagctactgtcccgcacatctcttgagacccaaaagcttgacctaatgactgaggtgtcagagttgaagttgaagctcgttgggatggagaaggagcagagagagcaggaggaaaagcagaggaaagcggaggaactcctccaggaattgcgtcacctcaagattaaggtggaggaattagagaacgagaggaatcagtatgagtggaagctgaaagctactaaggccgaagttgcccaacttcaggaacaggtcgctttgaaggacgctgaaatcgagagactgcattctcagctcagccgcactgccgctctccactctgagagccatacagaacgagaccaggagattcagcgcctgaagatgggtatggagactctgctgctcgccaacgaggataaggatcggcgaattgaagaattgacgggactgcttaaccagtatagaaaagtcaaagagatcgtgatggtcacacagggaccctcagagcgaaccctgtcaatcaacgaggaagagccagaaggagggtttagtaaatggaacgctactaacaaagaccccgaggagttattcaagcaggaaatgcccccacggtgcagttcacctacagtagggccacctccactaccacagaaatcactcgagacccgtgcccagaaaaagttatcatgtagcctggaggatctgaggtcagaaagcgttgataaatgcatggatgggaatcaacctttcccagtgcttgagccgaaagactcccctttcctcgctgagcataagtacccaaccttacccggaaaactaagcggagctacgcccaacggggaggccgctaagtcacccccaactatttgtcagcccgatgcaaccgggagcagtttgctccgcctacgagatactgaaagtggttgggacgatactgctgttgttaacgatctatcatctacatcaagcggcaccgaaagtgggcctcagtcccctctcacacccgacggaaagcgcaatcctaagggaataaaaaaattctgggggaagattcgccgaacgcagagcgggaatttttacacggatactctgggaatggctgagtttcgccgtggcggattgagagcaactgccggacctcgcctcagtcgcacacgggactctaaagggcagaaatcagacgctaatgcaccctttgctcaatggtccaccgagagggtgtgcgcctggttagaggatttcgggctggctcagtatgtcatcttcgcccgtcaatgggtttccagcggccatacactcctcactgccaccccacaggacatggagaaggagctcggcataaaacatcccctgcaccggaagaagctggtcctagcggtcaaggccatcaataccaagcaggaggaaaaaagtgcactgttagaccacatatgggtcacccggtggcttgatgacatcggattgcctcagtataaggatcaatttcacgaaagcagggttgacagacggatgctgcaatatctcactgtgaacgatctattgtttctcaaagtgacttcgcagttacatcacctgagcatcaaatgtgcaatacacgtattgcatgtaaacaagttcaatccccactgcctgcaccgccgacctgctgatgaatccaatctaagcccttctgaggtcgtgcagtggtccaatcatagagtaatggaatggcttcgttccgtagatctcgccgagtatgcccctaatttaagaggctcaggagtacacggcggactcattattctcgagcctcgattcactggagacaccctcgccatgttgttgaatattcctcctcaaaaaacacttcttagaaggcacttgaccacaaagtttaatgctctaatcggtccggaggcggaacaggaaaaacgagaaaagatggcttctcccgcatatacgcctctgacaaccacagcaaaggtgcggcctcggaagctgggttttagtcactttggaaatatcagaaaaaaaaaattcgacgaatcaacagactacatctgcccaatggagcccagcgacggagtcagcgacagccaccgggtatattctggttaccgcggactctctccgctggatgctcccgaactggatgggttagaccaggtggggcaaatcagctag

SEQ ID NO: 90969 - DNA, 654 bp, Artificial Sequence
  derived and/or modified sequence
atgctccagtacctgacagtcaatgacctgctctttctgaaggttacctcccaactacaccacctgtcgatcaagtgtgccattcatgtgttacatgtgaataaatttaatcctcattgtctgcacagaagacccgctgacgagtctaacctgagcccatccgaggtggtgcaatggtcaaaccatcgggtgatggaatggcttcgttccgtggacctggccgaatatgctcccaatttacgcggatccggagtccatggcggactgatcatccttgagcctcgcttcaccggagacaccctcgccatgctgttaaatataccaccccagaaaacacttctgaggcggcacctcactacaaagttcaatgcacttattggccctgaggctgagcaggagaagcgtgagaaaatggcatcccccgcttacactcccctgaccacaactgcgaaggtgcgcccaagaaaactgggcttctcgcatttcgggaacatcagaaagaagaagttcgatgagtccacagactatatttgcccaatggagccatccgacggggtttcagactcccatagggtctactcggggtacaggggcttatcaccactcgacgctcctgagctggatggcctagatcaagttggccagatctcttag

SEQ ID NO: 90970 - DNA, 2965 bp, Artificial Sequence
  derived and/or modified sequence
aagaaattagaggttgagtgagcaagtgggacagatgaaaggtcagaagattgtggccagaggagagaatttcagagctgaagattttagaagcaaagcaaacacattctggatacacgtgagatccaagtggtgactgtgctactgagaagctgaacgaaatggaaagcaaagcctgttggagctgaggtcaaagaatgtgaagccagagtggatactgaatgggaaagttaataacaaggatgtggaagctattgaggagacggagtgcgcctaaagagctgctaagccgcacatctcttgagacccagaagctcgatctgatgactgaagtgtctgagctgaagctcaagctggttggcatggagaaggagcagagagagcaggaggagaagcagagaaaagcagaggagttactgcaagagctcaggcacctcaaaatcaaagtggaagagttggaaaatgaaaggaatcagtatgaatggaagctaaaggccactaaggctgaagtcgcccagctgcaagaacaggtggccctgaaagatgcagaaattgagcgtctgcacagccagctctcccggacagcagctctccacagtgagagtcacacagagagagaccaagaaattcaacgtctgaaaatggggatggaaactttgctgcttgccaatgaagataaggaccgtcggatagaggagcttacggggctgttaaaccagtaccggaaggtaaaggagattgtgatggtcactcaagggccttcggagagaactctctcaatcaatgaagaagaaccggagggaggtttcagcaagtggaacgctacaaataaggaccctgaagaattatttaaacaagagatgcctccaagatgtagctctcctacagtggggccacctccattgccacagaaatcactggaaaccagggctcagaaaaagctctcttgtagtctagaagacttgagaagtgaatctgtggataagtgtatggatgggaaccagcccttcccggtgttagaacccaaggacagccctttcttggcggagcacaaatatcccactttacctgggaagctttcaggagccacgcccaatggagaggctgccaaatctcctcccaccatctgccagcctgacgccacggggagcagcctgctgaggctgagagacacagaaagtggctgggacgacactgctgtggtcaatgacctctcatccacatcatcgggcactgaatcaggtcctcagtctcctctgacaccagatggtaaacggaatcccaaaggcattaagaagttctggggaaaaatccgaagaactcagtcaggaaatttctacactgacacgctggggatggcagagtttcgacgaggtgggctccgggcaaccgcagggccaagactctctaggaccagggactccaagggacagaaaagtgacgccaatgccccctttgcccagtggagcacagagcgtgtgtgtgcatggctggaggactttggcctggctcagtatgtgatctttgccaggcagtgggtatcttctggccacaccttattgacagccacccctcaggacatggaaaaggagctaggaattaagcacccactccacaggaagaagcttgttttagcagtgaaagccatcaacaccaaacaggaggagaagtctgcactgctagaccacatttgggtgacaaggtggcttgatgatattggcttaccccagtacaaagaccagtttcatgaatctagagttgacagacgaatgctgcaatacctaactgtgaacgatttactcttcttaaaagtcaccagccaactacatcatctcagcatcaaatgtgccattcacgtgctgcatgtcaacaagttcaacccccactgcctgcaccggcggccagctgatgagagtaacctttctccttcagaagttgtacagtggtccaaccacagggtgatggagtggttacgatctgtggacctggcagagtatgcacccaatcttcgagggagtggagtccatggaggcctcattatcctggagccacgcttcactggggacaccctggctatgcttctcaacatccccccacaaaagacgctcctcaggcgccacctgaccaccaagttcaatgccttgattggtccggaggctgaacaggagaagcgagagaaaatggcctcaccagcttacacaccactgaccaccacagccaaagtccggccaaggaaactaggattttcacacttcggaaacataagaaaaaagaagttcgatgaatcgacggactacatttgcccaatggagcccagtgacggtgtcagtgatagtcacagggtctacagtggctaccggggcctcagcccccttgatgcccctgaactggatgggctggaccaggtgggacagattagctgatgcccttgtcacctgccctctgtgcaccctgagagctcacagtaacactgtgtgtgtcaccatataactgcacctcacccccgcacgtgtgcatgactcgcagagaatattccagcaattgtgtacccctgggccagtctctttgaaccctgagggtggccaggatctggagctgcatctctaaggggccaggctttggggaccattgccaaaggtggactcaggaggaaagacacttaaagacacttttacatgtctagtaattcttgatgttcatcttcagcaccagtggaaacacatgaacttcgatgcaggtccagagaccatggacactcccacgaggctcagctctcaggcaccccctacacttcagttgagggaaaagctcaagtgccttaggcccgtggaccacagtcttggctgagatcaaagggatgagcaacagggacttctgccacagtgacaatggaattgtgttgtgccttacttcagaggtggtctcttctttcttgtaataaaagcaatatttatgcggaaagcaa

SEQ ID NO: 90971 - DNA, 1488 bp, Artificial Sequence
  derived and/or modified sequence
agttggtcggtgggccagtggcccgtcgctcgcttctgggctctcatgtttgaaggtgggagggacacgggagcggcccgcacaccttattgacagccacccctcaggacatggaaaaggagctaggaattaagcacccactccacaggaagaagcttgttttagcagtgaaagccatcaacaccaaacaggaggagaagtctgcactgctagaccacatttgggtgacaaggtggcttgatgatattggcttaccccagtacaaagaccagtttcatgaatctagagttgacagacgaatgctgcaatacctaactgtgaacgatttactcttcttaaaagtcaccagccaactacatcatctcagcatcaaatgtgccattcacgtgctgcatgtcaacaagttcaacccccactgcctgcaccggcggccagctgatgagagtaacctttctccttcagaagttgtacagtggtccaaccacagggtgatggagtggttacgatctgtggacctggcagagtatgcacccaatcttcgagggagtggagtccatggaggcctcattatcctggagccacgcttcactggggacaccctggctatgcttctcaacatccccccacaaaagacgctcctcaggcgccacctgaccaccaagttcaatgccttgattggtccggaggctgaacaggagaagcgagagaaaatggcctcaccagcttacacaccactgaccaccacagccaaagtccggccaaggaaactaggattttcacacttcggaaacataagaaaaaagaagttcgatgaatcgacggactacatttgcccaatggagcccagtgacggtgtcagtgatagtcacagggtctacagtggctaccggggcctcagcccccttgatgcccctgaactggatgggctggaccaggtgggacagattagctgatgcccttgtcacctgccctctgtgcaccctgagagctcacagtaacactgtgtgtgtcaccatataactgcacctcacccccgcacgtgtgcatgactcgcagagaatattccagcaattgtgtacccctgggccagtctctttgaaccctgagggtggccaggatctggagctgcatctctaaggggccaggctttggggaccattgccaaaggtggactcaggaggaaagacacttaaagacacttttacatgtctagtaattcttgatgttcatcttcagcaccagtggaaacacatgaacttcgatgcaggtccagagaccatggacactcccacgaggctcagctctcaggcaccccctacacttcagttgagggaaaagctcaagtgccttaggcccgtggaccacagtcttggctgagatcaaagggatgagcaacagggacttctgccacagtgacaatggaattgtgttgtgccttacttcagaggtggtctcttctttcttgtaataaaagcaatatttatgcgg

SEQ ID NO: 90972 - DNA, 522 bp, Artificial Sequence
  derived and/or modified sequence
atgggcgatctgccctgggccccccctgaggcccaggctccatcgaccgcaggagcaggagacgttgccgagcaccaggtggctcctgcaagatttctgcagggtgcgtggaggcaagccgcaggatggctgtgccgcgagacaggcgccgcccccggcagtgctcaggctgggcctccagagacagcccacgcagctgaccctcagccgcggggcccgcaggcaccacctaggctcccaccttccctttcaccggaaagggtccatccagggcagcccgctgctcccgcagagcctgcccccggcgcaccggctctgagatccggcccttctcaacccagaggacttagactgccagtacccgtacctgcttgtgccggatcaagcgcccccggctccccagccgcactgcctgacagctacccatggcccccccccgcaagaaacagacctgctacgctgccacccacatccagggtgtctccgctcgccgcattcctcgcaagcgcacctcagcgttag

SEQ ID NO: 90973 - protein, 108 aa, Artificial Sequence
  derived and/or modified sequence
PKSRFCRGVPDAKIRIFDLGRKKAKVDEFPLCGHMVSDEYEQLSSEALEAARICANKYMVKSCGKDGFHIRVRLHPFHVIRINKMLSCAGADRPTLLCQCWETSRNTS

SEQ ID NO: 90974 - protein, 181 aa, Artificial Sequence
  derived and/or modified sequence
MGRRPARCYRYCKNKPYPKSRFCRGVPDAKIRIFDLGRKKAKVDEFPLCGHMVSDEYEQLSSEALEAARICANKYMVKSCGKDGFHIRVRLHPFHVIRINKMLSCAGADRSTSQRSGASPSSMLMNLKTWWLKSGSSQMAVGSSTSPIVALWTSGGPCTHEGFQCAAPLLILTNKFYFLST

SEQ ID NO: 90975 - DNA, 546 bp, Artificial Sequence
  derived and/or modified sequence
atgggtaggcggcctgccaggtgctacagatactgtaagaacaaaccttacccaaagtcgagattctgtcggggcgttccggatgccaaaatcaggatatttgacctgggacgtaagaaggcaaaggtggacgagtttcctttatgcggacacatggtgtcggacgaatacgaacagctgtcttcggaggcactagaagctgcgcgcatctgtgccaacaagtacatggtgaagagttgcggcaaggacggattccatattagggtgcgcctccatcctttccatgttatcagaatcaataagatgctctcctgtgcaggagccgatcggtcaaccagtcagcggtctggcgcctccccaagttctatgcttatgaaccttaagacttggtggctgaaatctgggtcatcccagatggctgttggttcatcgacttctccaattgtcgccctatggaccagcggtggcccctgtactcacgagggctttcagtgcgctgcacctctgctgatactgacgaacaagttctactttctctccacctag

SEQ ID NO: 90976 - DNA, 546 bp, Artificial Sequence
  derived and/or modified sequence
atgggcagaagacctgcccgctgctaccgctactgcaagaacaagccctaccccaagagccgcttctgccggggcgtgcctgatgccaagatccgcatctttgacctgggcaggaagaaggccaaggtggatgagttccccctgtgtggccacatggtgtctgatgaatatgagcagctgagcagcgaggccctggaggccgcccgcatctgtgccaacaagtacatggtgaagagctgtgggaaggatggcttccacatccgggtgcggctgcaccccttccacgtgatccgcatcaacaagatgctgagctgtgccggggctgacaggagcaccagccagaggtctggggccagccccagctccatgctgatgaacctgaagacctggtggctgaagagcggcagcagccagatggctgtgggcagcagcaccagccccatcgtggccctgtggaccagcggcggcccctgcacccatgagggcttccagtgtgccgcccccctgctgatcctgaccaacaagttctacttcctgagcacctag

SEQ ID NO: 90977 - DNA, 546 bp, Artificial Sequence
  derived and/or modified sequence
atgggccggcggcccgcccggtgctaccggtactgcaagaacaagccgtaccctaagagtcgattctgccggggagtccccgacgctaagattaggatttttgatctgggtcgaaagaaggcaaaggtggacgaattccccctctgcgggcacatggtctcggatgagtacgaacagctgtcatccgaagctctggaggctgccagaatttgtgcaaataagtatatggtcaagagttgcggcaaggatggattccatattagggtgcgtttgcacccattccatgtgatcaggatcaacaagatgctgagttgcgccggggctgatagaagcacttcacaaagatctggtgccagccctagttccatgttaatgaatttgaagacatggtggctgaagtcaggatcctcgcaaatggccgttggcagtagcaccagccctattgtggcgctgtggacctccggagggccatgtacacacgagggatttcagtgcgccgccccattgctgattctgaccaacaagttttactttcttagcacgtag

SEQ ID NO: 90978 - DNA, 546 bp, Artificial Sequence
  derived and/or modified sequence
atgggtcgcaggccagcgcgttgttaccgctactgtaagaacaagccataccctaagagcagattttgtcgtggcgtgcccgacgctaagatcagaattttcgatctgggcaggaaaaaggccaaggtagacgaattccctctgtgtggccatatggtgtctgacgagtatgaacagcttagtagcgaagcgctggaggcagccagaatctgtgctaataagtacatggtgaagtcctgtggaaaggatggctttcacataagagtgcgcctccatccatttcatgtcatcagaattaataagatgctcagctgcgcaggggctgatcggtccacatcgcagaggtcaggcgctagtccatcatcgatgctcatgaatctcaagacctggtggctgaagtccggctcaagccagatggcagtcggctcgagcaccagtcctatcgtggcactatggacgtcgggaggaccatgcacccatgaggggtttcagtgcgccgcaccgctactaattctgacaaacaagttttactttctgagcacatag

SEQ ID NO: 90979 - DNA, 585 bp, Artificial Sequence
  derived and/or modified sequence
tctttcccttcggtgtgccactgaagatcctggtgtcgccatgggccgccgccccgcccgttgttaccggtattgtaagaacaagccgtacccaaagtctcgcttctgccgaggtgtccctgatgccaagattcgcatttttgacctggggcggaaaaaggcaaaagtggatgagtttccgctttgtggccacatggtgtcagatgaatatgagcagctgtcctctgaagccctggaggctgcccgaatttgtgccaataagtacatggtaaaaagttgtggcaaagatggcttccatatccgggtgcggctccaccccttccacgtcatccgcatcaacaagatgttgtcctgtgctggggctgacagatccacatctcaaagaagtggggcttcaccaagttcaatgctgatgaatttgaagacatggtggctgaaaagcggctcatcccagatggctgtggggtcaagtacatccccaatcgtggccctctggacaagtggcgggccctgcactcatgagggcttccaatgtgctgcccccctcttaatactcaccaataaattctacttcctgtccaccta

SEQ ID NO: 90980 - DNA, 546 bp, Artificial Sequence
  derived and/or modified sequence
atgggcagaagacccgccagatgctacagatactgcaagaacaagccctaccccaagagcagattctgcagaggcgtgcccgacgccaagatcagaatcttcgacctgggcagaaagaaggccaaggtggacgagttccccctgtgcggccacatggtgagcgacgagtacgagcagctgagcagcgaggccctggaggccgccagaatctgcgccaacaagtacatggtgaagagctgcggcaaggacggcttccacatcagagtgagactgcaccccttccacgtgatcagaatcaacaagatgctgagctgcgccggcgccgacagaagcaccagccagagaagcggcgccagccccagcagcatgctgatgaacctgaagacctggtggctgaagagcggcagcagccagatggccgtgggcagcagcaccagccccatcgtggccctgtggaccagcggcggcccctgcacccacgagggcttccagtgcgccgcccccctgctgatcctgaccaacaagttctacttcctgagcacctag

SEQ ID NO: 90981 - protein, 107 aa, Artificial Sequence
  derived and/or modified sequence
MASASTTMHTTTIAEPDPGMSGWPDGRMETSTPTIMDIVVIAGVIAAVAIVLVSLLFVMLRYMYRHKGTYHTNEAKGTEFAESADAALQGDPALQDAGDSSRKEYFI

SEQ ID NO: 90982 - DNA, 324 bp, Artificial Sequence
  derived and/or modified sequence
atggcctccgcaagtacaacaatgcacactaccactattgcggaacctgatcctggaatgtcaggatggcctgatgggaggatggagacgtcaaccccaacaatcatggatatagtggtgatcgcgggagtgatcgcggccgtcgccatagtcctggtgtctctgctctttgtgatgctgagatacatgtacaggcacaaaggcacctaccacaccaatgaggcaaagggaaccgagttcgccgagagtgcagatgccgccctgcagggagacccagcattgcaagacgcaggagactcgtcgcgcaaagaatacttcatctag

SEQ ID NO: 90983 - DNA, 324 bp, Artificial Sequence
  derived and/or modified sequence
atggccagcgccagcaccaccatgcacaccaccaccatcgccgagccagaccccggcatgagcggctggccagatggccgcatggagaccagcacccccaccatcatggacatcgtggtgattgctggggtgattgctgctgtggccatcgtgctggtgtccctgctgtttgtgatgctgcgctacatgtaccgccacaagggcacctaccacaccaatgaggccaagggcacagaatttgctgagagcgcagatgctgccctgcagggcgaccctgccctgcaggatgctggggacagcagcaggaaggagtacttcatctag

SEQ ID NO: 90984 - DNA, 324 bp, Artificial Sequence
  derived and/or modified sequence
atggccagcgccagcaccaccatgcacaccaccaccatcgccgagcccgatccaggcatgtctggctggcccgatggccgtatggaaacatcaacaccaaccattatggacatcgtggtgatcgccggagtaatcgccgcagttgccattgtgctggtttctcttctgtttgttatgctgagatacatgtatagacacaaggggacttaccatacaaatgaagcgaagggcaccgagttcgctgaaagcgccgacgcagcgctgcagggcgatcctgctctacaagatgccggagactcttcccgcaaagaatactttatctag

SEQ ID NO: 90985 - DNA, 324 bp, Artificial Sequence
  derived and/or modified sequence
atggcttccgcatccactacaatgcacacgaccacgattgccgaaccagatcctggaatgagcggctggccagatgggcgtatggagaccagcaccccaacaatcatggatatagtggtcatcgccggtgtcattgccgctgtggcaattgtactagtgtcccttctatttgtaatgctaaggtacatgtacagacataaagggacatatcacactaatgaggcaaaggggacggagttcgctgagtccgccgacgcagccctccagggcgaccccgcactgcaggacgcaggagatagttctagaaaagaatattttatctag

SEQ ID NO: 90986 - DNA, 324 bp, Artificial Sequence
  derived and/or modified sequence
atggccagcgccagcaccaccatgcacaccaccaccatcgccgagcccgaccccggcatgagcggctggcccgacggcagaatggagaccagcacccccaccatcatggacatcgtggtgatcgccggcgtgatcgccgccgtggccatcgtgctggtgagcctgctgttcgtgatgctgagatacatgtacagacacaagggcacctaccacaccaacgaggccaagggcaccgagttcgccgagagcgccgacgccgccctgcagggcgaccccgccctgcaggacgccggcgacagcagcagaaaggagtacttcatctag

SEQ ID NO: 90987 - protein, 283 aa, Artificial Sequence
  derived and/or modified sequence
METGPEDPSSMPEESSPRRTPQSIPYQDLPHLVNADGQYLFCRYWKPTGTPKALIFVSHGAGEHSGRYEELARMLMGLDLLVFAHDHVGHGQSEGERMVVSDFHVFVRDVLQHVDSMQKDYPGLPVFLLGHSMGGAIAILTAAERPGHFAGMVLISPLVLANPESATTFKVDIYNSDPLICRAGLKVCFGIQLLNAVSRVERALPKLTVPFLLLQGSADRLCDSKGAYLLMELAKSQDKTLKIYEGAYHVLHKELPEVTNSVFHEINMWVSQRTATAGTASPP

SEQ ID NO: 90988 - DNA, 852 bp, Artificial Sequence
  derived and/or modified sequence
atggaaactggcccagaggaccccagctccatgcctgaggaatctagcccacggagaactccacagtccatcccatatcaggatctgcctcatttagtgaatgctgacgggcagtatctgttttgccggtactggaagcctactggcacacccaaagcactgatttttgtgtcccatggcgccggggagcacagcggacgctacgaggaacttgcgagaatgttaatggggctggacctccttgtttttgcccatgatcacgtcggacatggccagtccgaaggcgagcgcatggtggtgagcgatttccatgttttcgtaagggacgttcttcagcacgtcgatagcatgcagaaggactatcctggccttccagttttcctattaggtcacagtatgggtggagctatagccatccttacagcagcagaacgtcccggacactttgccggaatggtgttgatcagtccattggtactggcgaatcccgagagtgcaactacctttaaggtcgacatctataacagcgacccccttatctgccgggctggactcaaggtgtgttttggcattcagctgctgaacgctgtgagtcgcgttgagagggcgctcccgaaactgactgttcctttcctactgctccaagggagtgcagatcgcctttgcgacagtaagggcgcgtaccttctaatggaacttgctaaatcccaggataagacactgaaaatttacgaaggcgcctaccacgtacttcacaaggagcttcctgaggtcacaaatagtgttttccacgaaattaatatgtgggtaagccagcgaacagctactgccggtaccgcctctcccccctag

SEQ ID NO: 90989 - DNA, 234 bp, Artificial Sequence
  derived and/or modified sequence
atgcccgaggagtctagtccacgaaggacccctcagagcattccataccaagaccttcctcatctggtcaatgcagatggacaatacctattctgccgatactggaaaccaacgggcacccccaaagccctgatctttgtaagtcacggggccggagagcacagcgggcgctacgaggagctggcccgcatgttgatgggcctggatctgttggtcttcgcccacgaccactag

SEQ ID NO: 90990 - DNA, 852 bp, Artificial Sequence
  derived and/or modified sequence
atggagactggacctgaggaccccagctccatgcctgaggagagcagccccaggaggaccccccagagcatcccctaccaggacctgccccacctggtgaatgctgatggccagtacctgttctgccgctactggaagcccaccggcacccccaaggccctgatctttgtgtcccatggagctggggagcacagcggccgctatgaggagctggccaggatgctgatgggcctggacctgctggtgtttgcccatgaccacgtgggccacggccagagcgagggggagaggatggtggtgtctgacttccacgtgtttgtgagagatgtgctgcagcacgtggacagcatgcagaaggactacccaggcctgcctgtgttcctgctgggccacagcatgggcggggccatcgccatcctgacagctgctgagcggcccggccactttgctggcatggtgctgatcagccccctggtgctggccaaccctgagagcgccaccaccttcaaggtggacatctacaacagcgaccccctcatctgcagagctggcctgaaggtgtgcttcggcatccagctgctgaatgctgtgtcccgggtggagcgggccctgcccaagctgactgtgcccttcctgctgctgcagggcagcgctgaccggctgtgtgacagcaaaggagcctacctgctgatggagctggccaagagccaggacaagaccctgaagatctatgagggcgcctaccacgtgctgcacaaggagctgcctgaggtgaccaacagcgtcttccacgagatcaacatgtgggtgtcccagaggacagccacagctggaacagccagccccccatag

SEQ ID NO: 90991 - DNA, 234 bp, Artificial Sequence
  derived and/or modified sequence
atgcctgaggagagcagccccaggaggaccccccagagcatcccctaccaggacctgccccacctggtgaatgctgatggccagtacctgttctgccgctactggaagcccaccggcacccccaaggccctgatctttgtgtcccatggagctggggagcacagcggccgctatgaggagctggccaggatgctgatgggcctggacctgctggtgtttgcccatgaccactag

SEQ ID NO: 90992 - DNA, 966 bp, Artificial Sequence
  derived and/or modified sequence
gtcgtggttgtggaatgcaaacgccagcacataatggaaacaggacctgaagacccttccagcatgccagaggaaagttcccccaggcggaccccgcagagcattccctaccaggacctccctcacctggtcaatgcagacggacagtacctcttctgcaggtactggaaacccacaggcacacccaaggccctcatctttgtgtcccatggagccggagagcacagtggccgctatgaagagctggctcggatgctgatggggctggacctgctggtgttcgcccacgaccatgttggccacggacagagcgaaggggagaggatggtagtgtctgacttccacgttttcgtcagggatgtgttgcagcatgtggattccatgcagaaagactaccctgggcttcctgtcttccttctgggccactccatgggaggcgccatcgccatcctcacggccgcagagaggccgggccacttcgccggcatggtactcatttcgcctctggttcttgccaatcctgaatctgcaacaactttcaaggtcgacatttataactcagaccccctgatctgccgggcagggctgaaggtgtgcttcggcatccaactgctgaatgccgtctcacgggtggagcgcgccctccccaagctgactgtgcccttcctgctgctccagggctctgccgatcgcctatgtgacagcaaaggggcctacctgctcatggagttagccaagagccaggacaagactctcaagatttatgaaggtgcctaccatgttctccacaaggagcttcctgaagtcaccaactccgtcttccatgaaataaacatgtgggtctctcaaaggacagccacggcaggaactgcgtccccaccctgaatgcattggccggtgcccggctcatggtctgggggatgcaggcaggggaagggcagagatggcttctcagatatggcttgc

SEQ ID NO: 90993 - DNA, 410 bp, Artificial Sequence
  derived and/or modified sequence
acagctaaaatagtctttaagatgaagtttcctgaaatgatttaaaataaacacagatgggaagggggaaaaactgtaatgaggcacttaaaaaataaagtgagcattttcttaagaacaaatgggatttttcagtcttggagaggtttgcaagaaatgacctgaagacccttccagcatgccagaggaaagttcccccaggcggaccccgcagagcattccctaccaggacctccctcacctggtcaatgcagacggacagtacctcttctgcaggtactggaaacccacaggcacacccaaggccctcatctttgtgtcccatggagccggagagcacagtggccgctatgaagagctggctcggatgctgatggggctggacctgctggtgttcgcccacgaccatg

SEQ ID NO: 90994 - DNA, 852 bp, Artificial Sequence
  derived and/or modified sequence
atggagaccggccccgaggaccccagcagcatgcccgaggagagctcgccacggcgtacgcctcagtccattccttatcaagacctccctcacctggtgaatgctgatggccagtacctgttctgtcgctactggaagcctacaggaacccccaaggctctgattttcgtaagtcatggggcaggagagcacagcggtcgatatgaagaacttgctaggatgctcatggggctagacttgctggtttttgcccatgaccacgtcggccacgggcaaagtgagggagaaagaatggtggtctccgattttcacgttttcgtgcgagatgtgttgcagcacgtggacagcatgcaaaaagattatcctggactcccggtttttcttctgggtcacagcatggggggtgctattgccatcctgacggcagctgaaaggcccggacacttcgctggcatggtgttaatctcccctctggtgctagccaatccggaatccgctactaccttcaaagtagacatctataactcagaccctctaatctgccgtgcgggcttgaaggtgtgcttcggcattcagctgctcaatgcagtgtcacgagtagagcgagcactgccgaagctcaccgtgccgttcctgctgctccaaggttctgccgacagactctgcgatagcaaaggggcatacttgctaatggaattggccaaatctcaggataagactctaaaaatttacgaaggggcatatcacgtgcttcacaaggaactgcctgaggtgaccaatagcgtgttccacgagattaatatgtgggtcagtcagcggacagcgactgccggtaccgctagcccaccttag

SEQ ID NO: 90995 - DNA, 234 bp, Artificial Sequence
  derived and/or modified sequence
atgcccgaggagagcagcccccggcggaccccccagagcatcccctaccaagaccttccgcacctggtgaatgccgacggtcaatatctgttttgccgctattggaagcctactggaactccgaaagccttgatatttgtctcacatggggcaggcgaacatagtggaaggtatgaggagttggcccgcatgctgatggggctggatttgctcgtgttcgcccacgatcattag

SEQ ID NO: 90996 - DNA, 852 bp, Artificial Sequence
  derived and/or modified sequence
atggagacaggacctgaggaccctagctctatgccagaggagtcctctcccaggaggaccccccagtctatcccatatcaagacctccctcacctggtaaatgccgacggacaatacctgttttgtcgctattggaaacccaccggcactcccaaggcactcatatttgtgtctcatggcgctggggagcactctggtcggtacgaagagttggccagaatgctgatgggactggacctcctggtgtttgctcacgaccatgtcggccatggtcagagcgagggagaacggatggtggtttctgatttccacgtgttcgtgcgagacgttcttcagcacgtcgattccatgcaaaaggattaccctggtttgccagtattcctactaggacactccatggggggagccatcgctatcttaacagcagctgagcgccctggtcatttcgccggtatggtcctaatctctcctctcgttttggcaaatcccgagtccgccacaacctttaaggtggacatatacaactccgatcctctcatttgccgcgctggcctgaaagtgtgcttcggcatccagctcttgaatgctgtcagccgagtcgaacgggcattacccaagctaaccgtgcccttcctgctgctccaagggagtgccgacagactttgtgattctaagggggcatatcttctgatggagctggccaaatctcaggacaagacactgaaaatctacgaaggtgcctaccacgttctccacaaggagctgccggaagtcactaatagtgtctttcacgaaatcaatatgtgggtctctcagaggactgctactgccggaaccgcctccccaccttag

SEQ ID NO: 90997 - DNA, 234 bp, Artificial Sequence
  derived and/or modified sequence
atgcctgaagagtcatcacctaggaggaccccacaaagtattccttaccaggatctccctcacttagtcaacgccgacggtcagtatctcttctgccgatactggaagcccaccggcacaccaaaagcactgatcttcgtgagtcacggcgctggcgagcacagcggcaggtacgaggagctggccagaatgctcatgggacttgatttgcttgttttcgcgcatgaccattag

SEQ ID NO: 90998 - DNA, 852 bp, Artificial Sequence
  derived and/or modified sequence
atggagaccggccccgaggaccccagcagcatgcccgaggagagcagccccagaagaaccccccagagcatcccctaccaggacctgccccacctggtgaacgccgacggccagtacctgttctgcagatactggaagcccaccggcacccccaaggccctgatcttcgtgagccacggcgccggcgagcacagcggcagatacgaggagctggccagaatgctgatgggcctggacctgctggtgttcgcccacgaccacgtgggccacggccagagcgagggcgagagaatggtggtgagcgacttccacgtgttcgtgagagacgtgctgcagcacgtggacagcatgcagaaggactaccccggcctgcccgtgttcctgctgggccacagcatgggcggcgccatcgccatcctgaccgccgccgagagacccggccacttcgccggcatggtgctgatcagccccctggtgctggccaaccccgagagcgccaccaccttcaaggtggacatctacaacagcgaccccctgatctgcagagccggcctgaaggtgtgcttcggcatccagctgctgaacgccgtgagcagagtggagagagccctgcccaagctgaccgtgcccttcctgctgctgcagggcagcgccgacagactgtgcgacagcaagggcgcctacctgctgatggagctggccaagagccaggacaagaccctgaagatctacgagggcgcctaccacgtgctgcacaaggagctgcccgaggtgaccaacagcgtgttccacgagatcaacatgtgggtgagccagagaaccgccaccgccggcaccgccagccccccctag

SEQ ID NO: 90999 - DNA, 234 bp, Artificial Sequence
  derived and/or modified sequence
atgcccgaggagagcagccccagaagaaccccccagagcatcccctaccaggacctgccccacctggtgaacgccgacggccagtacctgttctgcagatactggaagcccaccggcacccccaaggccctgatcttcgtgagccacggcgccggcgagcacagcggcagatacgaggagctggccagaatgctgatgggcctggacctgctggtgttcgcccacgaccactag

SEQ ID NO: 91000 - protein, 456 aa, Artificial Sequence
  derived and/or modified sequence
MEGSWFHRKRFSFYLLLGFLLQGRGVTFTINCSGFGQHGADPTALNSVFNRKPFRPVTNISVPTQVNISFAMSAILDVNEQLHLLSSFLWLEMVWDNPFISWNPEECEGITKMSMAAKNLWLPDIFIIELMDVDKTPKGLTAYVSNEGRIRYKKPMKVDSICNLDIFYFPFDQQNCTLTFSSFLYTVDSMLLDMEKEVWEITDASRNILQTHGEWELLGLSKATAKLSRGGNLYDQIVFYVAIRRRPSLYVINLLVPSGFLVAIDALSFYLPVKSGNRVPFKITLLLGYNVFLLMMSDLLPTSGTPLIGVYFALCLSLMVGSLLETIFITHLLHVATTQPPPLPRWLHSLLLHCNSPGRCCPTAPQKENKGPGLTPTHLPGVKEPEVSAGQMPGPAEAELTGGSEWTRAQREHEAQKQHSVELWLQFSHAMDAMLFRLYLLFMASSIITVICLWNT

SEQ ID NO: 91001 - DNA, 1371 bp, Artificial Sequence
  derived and/or modified sequence
atggagggaagttggtttcaccgcaaacgtttttccttctatctcctcctgggctttctgctgcagggacgaggagtgacattcacaattaactgcagtggcttcgggcagcatggtgccgacccaaccgcccttaacagcgttttcaataggaagccatttcgtccggttacaaatatatcagttccaacgcaagtcaatatcagtttcgctatgagcgccattttagatgttaatgagcagctgcatctgctgtcgagctttttgtggctcgagatggtatgggataaccctttcatttcgtggaacccggaggagtgcgagggtattacaaagatgagcatggctgccaaaaacttatggctgcctgacatcttcatcattgagttgatggatgtcgataagacaccaaaaggcctcaccgcgtatgtttctaacgaagggcggatccgatataaaaagcccatgaaggtcgactccatctgcaatctggatatcttttacttccccttcgatcagcagaattgtacattgacctttagcagctttttgtacacagtagactccatgctgctggatatggaaaaggaagtttgggagataacggacgcaagtaggaacatccttcagacccacggcgagtgggagttgctgggattaagcaaagctacagcaaagctctcaaggggagggaatctgtatgaccagattgtgttctatgttgctattagaagacggcctagcctctacgtgattaatctgctggtgccctccggtttcctggtcgcaatcgatgccctgtcgttctacttgcctgtgaaaagtggaaaccgcgtgcctttcaagatcacattactgctggggtataacgtgttcctactgatgatgtctgatctgctgccgacgagcggaacacccctcattggagtgtacttcgcactgtgtctctctctcatggtaggctctctgctcgagactatcttcatcacccacctcttgcatgtggcaacgacccaacccccaccccttccacgatggctccattctttactgttgcattgcaactctcccggtcgctgctgccccaccgcaccacagaaggaaaacaaaggtccagggcttacacctacccacctgccaggcgtgaaggaacccgaagtcagcgccggccagatgcccggaccggctgaggcagaactcaccggggggagtgaatggacccgcgcccagagagagcacgaggcgcagaaacaacattcagttgaactctggttgcagttctcacatgctatggacgcaatgctcttccgcctgtacttgctgtttatggcttcttctattatcactgtgatatgcctgtggaatacctag

SEQ ID NO: 91002 - DNA, 1371 bp, Artificial Sequence
  derived and/or modified sequence
atggagggctcctggttccacaggaagcgcttctccttctacctgctgctgggcttcctgctgcagggccggggcgtgaccttcaccatcaactgcagcggcttcggccagcacggggctgaccccacagccctgaacagcgtcttcaacaggaagcccttccggcctgtgaccaacatctctgtgcccacccaggtgaacatcagctttgccatgtctgccatcctggatgtgaatgagcagctgcacctgctgagcagcttcctgtggctggagatggtgtgggacaaccccttcatctcctggaaccctgaggagtgtgagggcatcaccaagatgtccatggccgccaagaacctgtggctgcctgacatcttcatcatcgagctgatggatgtggacaagacccccaagggcctgacagcctacgtgtccaatgaaggccgcatccgctacaagaagcccatgaaggtggacagcatctgcaacctggacatcttctacttcccctttgaccagcagaactgcaccctgaccttcagcagcttcctgtacacagtggacagcatgctgctggacatggagaaggaggtgtgggagatcacagatgccagcaggaacatcctgcagacccacggggagtgggagctgctgggcctgagcaaggccacagccaagctgagccggggcggcaacctgtatgaccagatcgtgttctacgtggccatcagaagaagacccagcctgtatgtgatcaacctgctggtgcccagcggcttcctggtggccattgatgccctgtccttctacctgcctgtgaagagcggcaacagagtgcccttcaagatcaccctgctgctgggctacaacgtgttcctgctgatgatgtctgacctgctgcccaccagcggcacccccctcatcggcgtgtactttgccctgtgcctgagcctgatggtgggcagcctgctggagaccatcttcatcacccacctgctgcacgtggccaccacccagcccccacccctgccccgctggctgcacagcctgctgctgcactgcaacagccctggccgctgctgccccacagccccccagaaggagaacaagggccctggcctgacccccacccacctgcccggggtgaaggagcctgaggtgtctgctggccagatgcctggccctgctgaggccgagctgactggaggcagcgagtggacccgggcccagcgggagcacgaggcccagaagcagcacagcgtggagctgtggctgcagttcagccacgccatggatgccatgctgttccggctgtacctgctcttcatggccagcagcatcatcaccgtcatctgcctgtggaacacctag

SEQ ID NO: 91003 - DNA, 1371 bp, Artificial Sequence
  derived and/or modified sequence
atggagggcagctggttccaccggaagcggttcagcttctacctgctgctggggtttctgctccagggccggggtgtgaccttcaccataaattgctccggattcggtcagcatggcgcagaccccaccgctctgaattctgtgtttaaccgcaaaccatttaggcccgtcacaaatatatcagtccccactcaagtcaacatttctttcgccatgtctgctattctcgacgtgaacgaacagcttcacctgctgagctcttttctttggctggagatggtgtgggacaatccctttatttcgtggaatcctgaggaatgtgagggaatcactaagatgtccatggcggccaagaacttatggctgcccgacatcttcatcatcgaactgatggatgtcgacaaaacccctaagggcctgacagcttatgtgagcaatgagggaaggattaggtataagaaaccgatgaaagtggactcaatttgtaacctagacattttttatttcccttttgaccaacaaaactgtacccttacgttcagttcctttttgtataccgtggacagcatgctgctggacatggagaaggaggtttgggaaattaccgacgccagccgcaacattctgcagactcacggcgagtgggagctacttgggttaagcaaggctacggctaaactatctcgaggagggaacctatacgatcagattgttttctacgtagctatacggcggaggccgtccctctacgtgattaatctacttgtgcctagcggattcctggttgctatcgatgccttgagtttctacctgcccgtgaagtccgggaaccgggttcccttcaagatcaccctccttctgggatacaacgtttttctccttatgatgtcagaccttctccctacttccggtacaccacttattggcgtgtactttgccctgtgcctaagcctgatggtaggttcactgctcgaaactatatttatcacccatctgctgcacgtggctactactcaaccacccccactgccccggtggctacactccttgctattgcattgtaattcccccggtcgctgctgtcccaccgcaccacagaaggagaataaaggccctggactcacacccacacatttacccggggtcaaagaacctgaggtttcggccgggcagatgcctggccccgctgaggccgaactgactggcggatccgagtggacaagagcacagcgtgagcacgaggcacaaaagcagcatagcgtcgagctgtggctgcagttctctcatgctatggatgctatgctgttccgactttacttactcttcatggcatcttctattattacagtgatctgcctttggaatacctag

SEQ ID NO: 91004 - DNA, 1371 bp, Artificial Sequence
  derived and/or modified sequence
atggagggatcgtggtttcatcggaagcgattcagtttttatctgcttctgggatttttgttgcagggccgtggggtgactttcacaataaattgctccggtttcggccagcatggtgccgaccctactgctctcaattccgtgttcaatagaaagccattcaggcctgtgactaacatttcagttccaacacaggtaaatatatcctttgccatgtcagccatcttagatgtcaacgaacaacttcatctcctgtcatcctttctatggctggaaatggtctgggataacccattcatcagctggaaccccgaggaatgcgaaggcattaccaaaatgtctatggcagcgaagaacttgtggctgcctgacatctttatcatagaacttatggacgtggataagactcccaagggccttaccgcctacgtgagtaacgagggtcggatcaggtacaaaaaacctatgaaggtggattcgatctgtaatctcgatatcttctacttcccatttgaccagcaaaattgtaccctaaccttctcctccttcttatacaccgtcgacagcatgcttctggatatggagaaggaggtttgggaaatcactgacgcgtccaggaacattctgcagacgcatggagaatgggagctgctgggtttatccaaggccacggccaagctgtcccgcggaggcaatctctacgatcaaatcgtcttttatgtggcaattcggagaaggccctccctgtacgttattaatcttctggtgccctctgggtttctggtcgcgattgacgcattgtcattctatctgccagtcaagagcggtaaccgggtgccttttaagatcacattgctccttggatataacgtgtttctgcttatgatgtccgacctgctacctacatctggcacacctctaattggggtgtactttgccctgtgcctgtcgctaatggtaggaagcttgctcgagacgattttcattacccacctgcttcacgtggccactacacagccaccgcctctcccccgttggctgcactcgctgctgctacactgtaattccccaggacgttgttgcccaacggcaccccaaaaggaaaacaagggacctggcttgacgccgactcatctgcctggagtgaaggaacctgaggtgagcgccggacagatgccaggccctgcagaggctgaactgaccggaggttccgaatggaccagagcacagagagagcacgaagcccagaagcagcactccgtcgaactctggctccagttctctcacgccatggatgctatgctcttccgcttgtatttgttattcatggcctcctcaataatcacggttatttgtctgtggaatacttag

SEQ ID NO: 91005 - DNA, 2139 bp, Artificial Sequence
  derived and/or modified sequence
gtaaaataacaaattgtgtttatttaagccactgggtttgtgatttgttacaacagcaataaaaggcatgtaagatagaaggaaaccattcaacacatgtctaataagaaaaatagaggaagtgaaacatttataaatgtctgagaattttccaaaattgaagagatgagtcttcagaccaagggatctcaccaagatctgcaagttgatcacgtatgaactatctataaccatttacgttgcagtgaaatacctaagactaagataaagtcttaaaagcagactgaaccttaagcataggcaagaacaagacaaccagaacactctttgaaggaaggttacaaatgtcagtggtcaaccaatgctattagtattcaaagtcagactctaggtgtggcctgtgctgctttaatctgggcattcctgggtcccagtacatgttcagagaagaacttagacaaagaagatggaaggaagctggttccacaggaaaagattttccttctacctccttctcggttttctgcttcaaggaaggggcgttactttcaccatcaattgctcagggtttggccagcacggggcggatcccactgctctgaattcagtgtttaatagaaagcccttccgtccggtcaccaacatcagcgtccccacccaagtcaacatctccttcgcgatgtctgccatcctagatgtgaatgaacagctgcacctcttgtcatcattcctgtggctggaaatggtttgggataacccatttatcagctggaacccagaggaatgtgagggcatcacgaagatgagtatggcagccaagaacctgtggctcccagacattttcatcattgaactcatggatgtggataagaccccaaaaggcctcacagcatatgtaagtaatgaaggtcgcatcaggtataagaaacccatgaaggtggacagtatctgtaacctggacatcttctacttccccttcgaccagcagaactgcacactcaccttcagctcattcctctacacagtggacagcatgttgctggacatggagaaagaagtgtgggaaataacagacgcatcccggaacatccttcagacccatggagaatgggagctcctgggcctcagcaaggccaccgcaaagttgtccaggggaggcaacctgtatgatcagatcgtgttctatgtggccatcaggcgcaggcccagtctctatgtcataaaccttctcgtgcccagtggctttctggttgccatcgatgccctcagcttctacctgccagtgaaaagtgggaatcgtgtcccattcaagataacgctcctgctgggctacaacgtcttcctgctcatgatgagtgacttgctccccaccagtggcacccccctcatcggtgtctacttcgccctgtgcctgtccctgatggtgggcagcctgctggagaccatcttcatcacccacctgctgcacgtggccaccacccagcccccacccctgcctcggtggctccactccctgctgctccactgcaacagcccggggagatgctgtcccactgcgccccagaaggaaaataagggcccgggtctcacccccacccacctgcccggtgtgaaggagccagaggtatcagcagggcagatgccgggccctgcggaggcagagctgacagggggctcagaatggacaagggcccagcgggaacacgaggcccagaagcagcactcagtggagctgtggttgcagttcagccacgcgatggacgccatgctcttccgcctctacctgctcttcatggcctcctctatcatcaccgtcatatgcctctggaacacctaggcaggtgctcacctgccaacttcagtctggagcttctcttgcctccagggactggccaggtctcccccctttcctgagtaccaactatcatatccccaaagatgactgagtctctgctgtattccatgtatcccaatccggtcctgctgatcaattccaatcccagacatttctccctgttcctgcattttgttggcttccttcagtcctaccatatggttctaggtccctcttacgtcatctgcatagcagactatacctcttctgtccgctgacttgcccaataaataattctgcagaga

SEQ ID NO: 91006 - DNA, 1371 bp, Artificial Sequence
  derived and/or modified sequence
atggagggcagctggttccacagaaagagattcagcttctacctgctgctgggcttcctgctgcagggcagaggcgtgaccttcaccatcaactgcagcggcttcggccagcacggcgccgaccccaccgccctgaacagcgtgttcaacagaaagcccttcagacccgtgaccaacatcagcgtgcccacccaggtgaacatcagcttcgccatgagcgccatcctggacgtgaacgagcagctgcacctgctgagcagcttcctgtggctggagatggtgtgggacaaccccttcatcagctggaaccccgaggagtgcgagggcatcaccaagatgagcatggccgccaagaacctgtggctgcccgacatcttcatcatcgagctgatggacgtggacaagacccccaagggcctgaccgcctacgtgagcaacgagggcagaatcagatacaagaagcccatgaaggtggacagcatctgcaacctggacatcttctacttccccttcgaccagcagaactgcaccctgaccttcagcagcttcctgtacaccgtggacagcatgctgctggacatggagaaggaggtgtgggagatcaccgacgccagcagaaacatcctgcagacccacggcgagtgggagctgctgggcctgagcaaggccaccgccaagctgagcagaggcggcaacctgtacgaccagatcgtgttctacgtggccatcagaagaagacccagcctgtacgtgatcaacctgctggtgcccagcggcttcctggtggccatcgacgccctgagcttctacctgcccgtgaagagcggcaacagagtgcccttcaagatcaccctgctgctgggctacaacgtgttcctgctgatgatgagcgacctgctgcccaccagcggcacccccctgatcggcgtgtacttcgccctgtgcctgagcctgatggtgggcagcctgctggagaccatcttcatcacccacctgctgcacgtggccaccacccagcccccccccctgcccagatggctgcacagcctgctgctgcactgcaacagccccggcagatgctgccccaccgccccccagaaggagaacaagggccccggcctgacccccacccacctgcccggcgtgaaggagcccgaggtgagcgccggccagatgcccggccccgccgaggccgagctgaccggcggcagcgagtggaccagagcccagagagagcacgaggcccagaagcagcacagcgtggagctgtggctgcagttcagccacgccatggacgccatgctgttcagactgtacctgctgttcatggccagcagcatcatcaccgtgatctgcctgtggaacacctag

SEQ ID NO: 91007 - protein, 482 aa, Artificial Sequence
  derived and/or modified sequence
MLAFILSRATPRPALGPLSYREHRVALLHLTHSMSTTGRGVTFTINCSGFGQHGADPTALNSVFNRKPFRPVTNISVPTQVNISFAMSAILDVVWDNPFISWNPEECEGITKMSMAAKNLWLPDIFIIELCVSRAGQREVPSPGSHRDHSLPLGPLMDVDKTPKGLTAYVSNEGRIRYKKPMKVDSICNLDIFYFPFDQQNCTLTFSSFLYTVDSMLLDMEKEVWEITDASRNILQTHGEWELLGLSKATAKLSRGGNLYDQIVFYVAIRRRPSLYVINLLVPSGFLVAIDALSFYLPVKSGNRVPFKITLLLGYNVFLLMMSDLLPTSGTPLIGVYFALCLSLMVGSLLETIFITHLLHVATTQPPPLPRWLHSLLLHCNSPGRCCPTAPQKENKGPGLTPTHLPGVKEPEVSAGQMPGPAEAELTGGSEWTRAQREHEAQKQHSVELWLQFSHAMDAMLFRLYLLFMASSIITVICLWNT

SEQ ID NO: 91008 - DNA, 1449 bp, Artificial Sequence
  derived and/or modified sequence
atgctggcctttatactcagtagagccacacctcggcccgcactcgggccattgtcctatagggaacaccgggtggccctgttgcaccttacccactcaatgagtacaaccggcaggggcgtgacatttaccattaactgctcaggatttggccagcatggggccgatcctacagccctgaattccgtattcaatcgaaagcctttcagacccgttacaaacataagcgtcccaacccaggtcaacatctcttttgctatgtctgccatactcgacgtcgtatgggataacccttttatcagctggaatcccgaggagtgcgaaggcataaccaaaatgagcatggctgcaaagaacctgtggttgcctgatattttcattattgaactgtgtgtctccagagctgggcaacgagaagtgccatccccaggcagtcaccgggaccacagcctccctctcgggcctttgatggacgtggacaagactcctaaggggctgacggcttacgtgtccaacgagggcaggattagatacaagaaaccgatgaaagttgactcaatctgcaatctcgatatcttttatttcccctttgatcagcagaactgtacccttacattttcttcctttctctacactgttgactctatgctgcttgacatggagaaagaagtttgggaaatcacagacgccagccgcaatatcttgcaaacccacggcgagtgggagctgctgggcctaagcaaagcaacagcaaaattgagcaggggtgggaacctgtacgatcagatcgtcttttatgtggctatccgccggaggccttccctgtacgtgatcaatttgttggtaccctctggctttctcgtggctatcgatgcattgtcattctaccttcccgttaaaagtggcaatcgggttccttttaagataactctcctgctggggtataacgtgttcctgctgatgatgtcagatcttttaccgacgagcggcaccccactgatcggggtgtactttgctttgtgtctctctttaatggttggcagtcttcttgaaaccatctttatcacacatctgctccatgttgcaacgactcaaccacctcccctgcctcgctggctccactccttactgcttcactgtaactcaccgggacggtgctgccccacagctccacagaaggaaaataagggcccaggactgaccccaacgcacctgccgggagtaaaggaacctgaagtctctgccggacagatgccgggcccagctgaggcggaacttacaggaggctccgaatggacccgggcacagcgcgaacacgaggctcagaaacagcactcagtcgagttgtggttgcaattcagtcacgctatggacgctatgttgtttaggctttatctcctcttcatggcgtcctctattatcacagttatctgcttgtggaacacatag

SEQ ID NO: 91009 - DNA, 1449 bp, Artificial Sequence
  derived and/or modified sequence
atgctggccttcatcctgagccgggccacccccaggcctgccctgggccccctgagctaccgggagcaccgggtggccctgctgcacctgacccacagcatgagcaccaccggccggggcgtgaccttcaccatcaactgcagcggcttcggccagcacggggctgaccccacagccctgaacagcgtcttcaacaggaagcccttccggcctgtgaccaacatctctgtgcccacccaggtgaacatcagctttgccatgtctgccatcctggatgtggtgtgggacaaccccttcatctcctggaaccctgaggagtgtgagggcatcaccaagatgtccatggccgccaagaacctgtggctgcctgacatcttcatcatcgagctgtgtgtgtccagagctggccagcgggaggtgcccagccctggcagccaccgggaccacagcctgcccctgggccccctgatggatgtggacaagacccccaagggcctgacagcctacgtgtccaatgaaggccgcatccgctacaagaagcccatgaaggtggacagcatctgcaacctggacatcttctacttcccctttgaccagcagaactgcaccctgaccttcagcagcttcctgtacacagtggacagcatgctgctggacatggagaaggaggtgtgggagatcacagatgccagcaggaacatcctgcagacccacggggagtgggagctgctgggcctgagcaaggccacagccaagctgagccggggcggcaacctgtatgaccagatcgtgttctacgtggccatcagaagaagacccagcctgtatgtgatcaacctgctggtgcccagcggcttcctggtggccattgatgccctgtccttctacctgcctgtgaagagcggcaacagagtgcccttcaagatcaccctgctgctgggctacaacgtgttcctgctgatgatgtctgacctgctgcccaccagcggcacccccctcatcggcgtgtactttgccctgtgcctgagcctgatggtgggcagcctgctggagaccatcttcatcacccacctgctgcacgtggccaccacccagcccccacccctgccccgctggctgcacagcctgctgctgcactgcaacagccctggccgctgctgccccacagccccccagaaggagaacaagggccctggcctgacccccacccacctgcccggggtgaaggagcctgaggtgtctgctggccagatgcctggccctgctgaggccgagctgactggaggcagcgagtggacccgggcccagcgggagcacgaggcccagaagcagcacagcgtggagctgtggctgcagttcagccacgccatggatgccatgctgttccggctgtacctgctcttcatggccagcagcatcatcaccgtcatctgcctgtggaacacctag

SEQ ID NO: 91010 - DNA, 1449 bp, Artificial Sequence
  derived and/or modified sequence
atgctggccttcatcctgagccgggccaccccccggcccgccctgggccccctgtcctaccgcgaacaccgcgtggcattgctgcacctgactcatagtatgtcgacaacaggacgtggggtgactttcaccatcaattgttctggcttcggacaacacggggctgatccaactgctcttaatagcgtttttaaccgtaaacccttcaggccagtgaccaacattagcgttcccactcaggtcaacattagtttcgcaatgagtgccatactagacgtggtctgggataacccctttatttcttggaacccggaggaatgtgaagggataaccaaaatgagcatggccgcgaaaaatctttggttacctgatatctttattatcgagctgtgtgtgtcgagggccggacagcgggaggtacccagccccggcagccaccgtgaccactctctgcccctgggacccctgatggatgtggataagacccccaaaggcctgacagcctatgtgtctaacgaggggagaattcggtacaagaaaccaatgaaggtagactccatttgcaaccttgacattttttacttcccgttcgaccagcagaattgcactttgacgttctcctcgttcctgtacaccgttgactctatgttgttagatatggagaaagaagtgtgggaaattacggatgccagtaggaacatacttcagacccacggcgaatgggaactgcttggattgtctaaggccacagccaaactcagtagaggcggaaacttatatgaccagattgttttctacgtggcaattcggcggcgcccttccctgtacgtgatcaatctattggttcctagcgggttcctggtggcaattgatgcgttgtctttctaccttcccgttaaaagcggaaatcgcgttcccttcaaaattacactattgctcgggtacaatgtatttctgctgatgatgtctgatctcctgccaacatcaggaactccacttatcggagtttatttcgcactgtgtttgagtttgatggttggaagtctgttggaaaccattttcattacccatctgctgcatgttgccacaacacagccgccgccgttaccaaggtggctccactctctgctgctgcactgcaattcgccaggccgctgttgcccaacggctcctcaaaaggagaacaagggacccggattaacccctacccatctccctggggtgaaggaacctgaagtgtcagccggccaaatgccaggtcccgctgaggccgaattaactggcggcagcgagtggacgcgggcccagagggagcatgaggcacagaagcaacactctgtggaactctggctgcagttcagccatgcgatggatgcaatgctgttcagactgtacttattatttatggcctccagtataatcacagtgatctgcctctggaatacttag

SEQ ID NO: 91011 - DNA, 1449 bp, Artificial Sequence
  derived and/or modified sequence
atgctggcatttatattatctagggccaccccacgccctgcgctcggcccactttcctatagggaacatcgtgtggctctactgcatctgacgcattccatgtctactaccggccgtggcgttacctttactattaattgtagtggctttgggcagcacggcgcagatcccactgctctgaacagtgtgtttaataggaagccatttcgccctgttactaacataagcgtgccaactcaggtgaacatatcgttcgccatgagcgccatcctggacgttgtctgggacaatccattcattagttggaaccccgaggaatgcgagggcataactaagatgtctatggcggcaaaaaacttatggctccccgatatctttatcatcgaactatgtgtgtctcgcgcaggccaacgggaagtgccgagtccagggagccatagggatcactccctgccactgggtcccttgatggacgtggacaaaacacccaaagggctcactgcttacgtcagcaatgaagggcgtatccgctataaaaaacccatgaaagtggattctatatgcaacctcgacatattttattttcccttcgatcagcaaaattgcacgctaacattctcgagttttttatataccgtcgattcaatgcttctcgatatggagaaagaggtttgggaaattactgatgcctcccggaatatcctgcaaacgcacggtgaatgggagctgctcggactgagtaaggctactgcaaaactgagtcggggaggtaacctctacgatcagattgtgttctatgtcgcaatccgacgacgccctagcctgtatgtaatcaatctgctggtgccaagtggtttccttgttgccattgacgcactcagcttttatcttcccgtcaaatccgggaaccgcgtcccattcaagataaccctgctccttggctacaacgtcttcctgctcatgatgtccgacctgcttcctacctcaggaacccctctgataggtgtgtatttcgcactttgcctgtccctgatggttggaagcctgctggagaccatcttcattacgcatctgctccacgtggcgactacccagcctcctcctctgccgcgttggcttcattcacttctccttcactgcaattcacctggtagatgttgccctactgccccacagaaggagaacaagggacctggtttgacgcccactcatctccctggcgtgaaggaacccgaagtttccgccggacaaatgcctgggccagctgaagctgagctgacaggcggatcggaatggacgcgcgctcagagggagcacgaggcacaaaaacaacatagtgtagagctgtggcttcaatttagtcatgccatggatgcaatgctcttccggctctacctgcttttcatggcttcctcaatcatcacggtcatctgcttgtggaacacctag

SEQ ID NO: 91012 - DNA, 1449 bp, Artificial Sequence
  derived and/or modified sequence
atgttagctttcattttatcacgggcgaccccacgccctgccttggggcccctctcatatagggagcacagggttgctctccttcatctcacacattcgatgtccactacaggaaggggcgttactttcaccatcaattgctcagggtttggccagcacggggcggatcccactgctctgaattcagtgtttaatagaaagcccttccgtccggtcaccaacatcagcgtccccacccaagtcaacatctccttcgcgatgtctgccatcctagatgtggtttgggataacccatttatcagctggaacccagaggaatgtgagggcatcacgaagatgagtatggcagccaagaacctgtggctcccagacattttcatcattgaactgtgcgtatcaagggctggtcagagggaagtcccatctcctggtagccacagagatcacagtttaccattggggccactcatggatgtggataagaccccaaaaggcctcacagcatatgtaagtaatgaaggtcgcatcaggtataagaaacccatgaaggtggacagtatctgtaacctggacatcttctacttccccttcgaccagcagaactgcacactcaccttcagctcattcctctacacagtggacagcatgttgctggacatggagaaagaagtgtgggaaataacagacgcatcccggaacatccttcagacccatggagaatgggagctcctgggcctcagcaaggccaccgcaaagttgtccaggggaggcaacctgtatgatcagatcgtgttctatgtggccatcaggcgcaggcccagtctctatgtcataaaccttctcgtgcccagtggctttctggttgccatcgatgccctcagcttctacctgccagtgaaaagtgggaatcgtgtcccattcaagataacgctcctgctgggctacaacgtcttcctgctcatgatgagtgacttgctccccaccagtggcacccccctcatcggtgtctacttcgccctgtgcctgtccctgatggtgggcagcctgctggagaccatcttcatcacccacctgctgcacgtggccaccacccagcccccacccctgcctcggtggctccactccctgctgctccactgcaacagcccggggagatgctgtcccactgcgccccagaaggaaaataagggcccgggtctcacccccacccacctgcccggtgtgaaggagccagaggtatcagcagggcagatgccgggccctgcggaggcagagctgacagggggctcagaatggacaagggcccagcgggaacacgaggcccagaagcagcactcagtggagctgtggttgcagttcagccacgcgatggacgccatgctcttccgcctctacctgctcttcatggcctcctctatcatcaccgtcatatgcctctggaacacctag

SEQ ID NO: 91013 - DNA, 1449 bp, Artificial Sequence
  derived and/or modified sequence
atgctggccttcatcctgagcagagccacccccagacccgccctgggccccctgagctacagagagcacagagtggccctgctgcacctgacccacagcatgagcaccaccggcagaggcgtgaccttcaccatcaactgcagcggcttcggccagcacggcgccgaccccaccgccctgaacagcgtgttcaacagaaagcccttcagacccgtgaccaacatcagcgtgcccacccaggtgaacatcagcttcgccatgagcgccatcctggacgtggtgtgggacaaccccttcatcagctggaaccccgaggagtgcgagggcatcaccaagatgagcatggccgccaagaacctgtggctgcccgacatcttcatcatcgagctgtgcgtgagcagagccggccagagagaggtgcccagccccggcagccacagagaccacagcctgcccctgggccccctgatggacgtggacaagacccccaagggcctgaccgcctacgtgagcaacgagggcagaatcagatacaagaagcccatgaaggtggacagcatctgcaacctggacatcttctacttccccttcgaccagcagaactgcaccctgaccttcagcagcttcctgtacaccgtggacagcatgctgctggacatggagaaggaggtgtgggagatcaccgacgccagcagaaacatcctgcagacccacggcgagtgggagctgctgggcctgagcaaggccaccgccaagctgagcagaggcggcaacctgtacgaccagatcgtgttctacgtggccatcagaagaagacccagcctgtacgtgatcaacctgctggtgcccagcggcttcctggtggccatcgacgccctgagcttctacctgcccgtgaagagcggcaacagagtgcccttcaagatcaccctgctgctgggctacaacgtgttcctgctgatgatgagcgacctgctgcccaccagcggcacccccctgatcggcgtgtacttcgccctgtgcctgagcctgatggtgggcagcctgctggagaccatcttcatcacccacctgctgcacgtggccaccacccagcccccccccctgcccagatggctgcacagcctgctgctgcactgcaacagccccggcagatgctgccccaccgccccccagaaggagaacaagggccccggcctgacccccacccacctgcccggcgtgaaggagcccgaggtgagcgccggccagatgcccggccccgccgaggccgagctgaccggcggcagcgagtggaccagagcccagagagagcacgaggcccagaagcagcacagcgtggagctgtggctgcagttcagccacgccatggacgccatgctgttcagactgtacctgctgttcatggccagcagcatcatcaccgtgatctgcctgtggaacacctag

SEQ ID NO: 91014 - protein, 930 aa, Artificial Sequence
  derived and/or modified sequence
MSEFRIHHDVNELLSLLRVHGGDGAEVYIDLLQKNRTPYVTTTVSAHSAKVKIAEFSRTPEDFLKKYDELKSKNTRNLDPLVYLLSKLTEDKETLQYLQQNAKERAELAAAAVGSSTTSINVPAAASKISMQELEELRKQLGSVATGSTLQQSLELKRKMLRDKQNKKNSGQHLPIFPAWVYERPALIGDFLIGAGISTDTALPIVLLRWNLALSPRLKCSGVISAHCNLHLPGTLPLASQESAVVEDLLYVLVGVDGRYVSAQPLAGRQSRTFLVDPNLDLSIRELVHRILPVAASYSAVTRFIEEKSSFEYGQVNHALAAAMRTLVKEHLILVSQLEQLHRQGLLSLQKLWFYIQPAMRTMDILASLATSVDKGECLGGSTLSLLHDRSFSYTGDSQAQELCLYLTKAASAPYFEVLEKWIYRGIIHDPYSEFMVEEHELRKERIQEDYNDKYWDQRYTIVQQQIPSFLQKMADKILSTGKYLNVVRECGHDVTCPVAKEIIYTLKERAYVEQIEKAFNYASKVLLDFLMEEKELVAHLRSIKRYFLMDQGDFFVHFMDLAEEELRKPVEDITPPRLEALLELALRMSTANTDPFKDDLKIDLMPHDLITQLLRVLAIETKQEKAMAHADPTELALSGLEAFSFDYIVKWPLSLIINRKALTRYQMLFRHMFYCKHVERQLCSVWISNKTAKQHSLHSAQWFAGAFTLRQRMLNFVQNIQYYMMFEVMEPTWHILEKNLKSASNIDDVLGHHTGFLDTCLKDCMLTNPELLKVFSKLMSVCVMFTNCMQKFTQSMKLDGELGGQTLEHSTVLGLPAGAEERARKELARKHLAEHADTVQLVSGFEATINKFDKNFSAHLLDLLARLSIYSTSDCEHGMASVISRLDFNGFYTERLERLSAERSQKATPQVPVLRGPPAPAPRVAVTAQ

SEQ ID NO: 91015 - DNA, 2793 bp, Artificial Sequence
  derived and/or modified sequence
atgagcgagttcagaatccaccacgacgtgaacgagctgctgagcctgctgagagtgcacggcggcgacggcgccgaggtgtacatcgacctgctgcagaagaacagaaccccctacgtgaccaccaccgtgagcgcccacagcgccaaggtgaagatcgccgagttcagcagaacccccgaggacttcctgaagaagtacgacgagctgaagagcaagaacaccagaaacctggaccccctggtgtacctgctgagcaagctgaccgaggacaaggagaccctgcagtacctgcagcagaacgccaaggagagagccgagctggccgccgccgccgtgggcagcagcaccaccagcatcaacgtgcccgccgccgccagcaagatcagcatgcaggagctggaggagctgagaaagcagctgggcagcgtggccaccggcagcaccctgcagcagagcctggagctgaagagaaagatgctgagagacaagcagaacaagaagaacagcggccagcacctgcccatcttccccgcctgggtgtacgagagacccgccctgatcggcgacttcctgatcggcgccggcatcagcaccgacaccgccctgcccatcgtgctgctgagatggaacctggccctgagccccagactgaagtgcagcggcgtgatcagcgcccactgcaacctgcacctgcccggcaccctgcccctggccagccaggagagcgccgtggtggaggacctgctgtacgtgctggtgggcgtggacggcagatacgtgagcgcccagcccctggccggcagacagagcagaaccttcctggtggaccccaacctggacctgagcatcagagagctggtgcacagaatcctgcccgtggccgccagctacagcgccgtgaccagattcatcgaggagaagagcagcttcgagtacggccaggtgaaccacgccctggccgccgccatgagaaccctggtgaaggagcacctgatcctggtgagccagctggagcagctgcacagacagggcctgctgagcctgcagaagctgtggttctacatccagcccgccatgagaaccatggacatcctggccagcctggccaccagcgtggacaagggcgagtgcctgggcggcagcaccctgagcctgctgcacgacagaagcttcagctacaccggcgacagccaggcccaggagctgtgcctgtacctgaccaaggccgccagcgccccctacttcgaggtgctggagaagtggatctacagaggcatcatccacgacccctacagcgagttcatggtggaggagcacgagctgagaaaggagagaatccaggaggactacaacgacaagtactgggaccagagatacaccatcgtgcagcagcagatccccagcttcctgcagaagatggccgacaagatcctgagcaccggcaagtacctgaacgtggtgagagagtgcggccacgacgtgacctgccccgtggccaaggagatcatctacaccctgaaggagagagcctacgtggagcagatcgagaaggccttcaactacgccagcaaggtgctgctggacttcctgatggaggagaaggagctggtggcccacctgagaagcatcaagagatacttcctgatggaccagggcgacttcttcgtgcacttcatggacctggccgaggaggagctgagaaagcccgtggaggacatcaccccccccagactggaggccctgctggagctggccctgagaatgagcaccgccaacaccgaccccttcaaggacgacctgaagatcgacctgatgccccacgacctgatcacccagctgctgagagtgctggccatcgagaccaagcaggagaaggccatggcccacgccgaccccaccgagctggccctgagcggcctggaggccttcagcttcgactacatcgtgaagtggcccctgagcctgatcatcaacagaaaggccctgaccagataccagatgctgttcagacacatgttctactgcaagcacgtggagagacagctgtgcagcgtgtggatcagcaacaagaccgccaagcagcacagcctgcacagcgcccagtggttcgccggcgccttcaccctgagacagagaatgctgaacttcgtgcagaacatccagtactacatgatgttcgaggtgatggagcccacctggcacatcctggagaagaacctgaagagcgccagcaacatcgacgacgtgctgggccaccacaccggcttcctggacacctgcctgaaggactgcatgctgaccaaccccgagctgctgaaggtgttcagcaagctgatgagcgtgtgcgtgatgttcaccaactgcatgcagaagttcacccagagcatgaagctggacggcgagctgggcggccagaccctggagcacagcaccgtgctgggcctgcccgccggcgccgaggagagagccagaaaggagctggccagaaagcacctggccgagcacgccgacaccgtgcagctggtgagcggcttcgaggccaccatcaacaagttcgacaagaacttcagcgcccacctgctggacctgctggccagactgagcatctacagcaccagcgactgcgagcacggcatggccagcgtgatcagcagactggacttcaacggcttctacaccgagagactggagagactgagcgccgagagaagccagaaggccaccccccaggtgcccgtgctgagaggcccccccgcccccgcccccagagtggccgtgaccgcccagtag

SEQ ID NO: 91016 - DNA, 2793 bp, Artificial Sequence
  derived and/or modified sequence
atgtcagaatttagaattcaccatgatgtaaacgaacttctcagtctgctgagagtgcatggcggtgatggagccgaagtctacattgacttattgcagaagaaccgcacaccctatgttaccacaacagtctctgcccatagtgccaaggtgaagatagctgaattttctcgtacaccagaggacttcctaaagaaatatgatgagttgaagtctaaaaacactcgtaatttggacccacttgtgtaccttctcagtaagctcaccgaggacaaggagacactgcagtatttgcagcaaaatgccaaagagcgcgctgaactggctgccgccgctgttgggagtagcactacatctatcaatgttcctgcagcagcgtctaagatctctatgcaggagctggaagaactgcgtaagcaattaggttccgtcgcgacaggaagcaccttgcaacagagcttggaactaaaacgaaagatgctgcgcgataagcagaataagaagaatagcgggcagcaccttccaatttttcctgcctgggtttacgagagacccgcattgataggagacttcctgattggggccggcatctccacagataccgcactgcccattgtcttgctgcgatggaacttggctctgagcccccggctgaagtgtagcggagtcattagcgcccattgcaatctgcatctcccgggtacgttacccctggcctctcaagaatccgctgtagtcgaggatcttctctacgtacttgtcggagttgatggacggtatgtgagtgcccagccacttgctggaaggcagtccagaacttttcttgtggatcctaacttagacctgagtatccgagagcttgttcatcgcatccttcccgtggccgcgtcttatagcgcagtgaccaggtttattgaggaaaagagcagtttcgagtacggacaggtgaatcatgcactggcagcagctatgcggacactcgtcaaggagcacctgatcctggtgtcccaactggagcagttgcacaggcagggcttactctccctccagaagttatggttttatatacagccggctatgcgtaccatggatatccttgcttctttagcaactagtgtggataagggcgagtgtttaggaggctcgacgttgtctcttctgcacgaccgttccttctcctacactggtgatagtcaggcccaggaactgtgcctttacctgaccaaagcagcttctgcaccctacttcgaagtgttagaaaagtggatctatagaggaatcatacacgacccttactccgaattcatggtggaggagcatgagctcaggaaagagcgcatccaagaggactataatgacaagtactgggaccagaggtacactatagtgcaacagcagatcccatcattcctacagaaaatggccgataaaatcctgagtacaggcaaataccttaacgtggtcagggaatgtggccacgacgtgacctgtcccgtggccaaagagataatttacacattgaaggagcgggcctatgtggaacagatcgaaaaggccttcaactatgcctctaaggtactcctggactttctgatggaggagaaggagttagtcgcccacctcaggtccataaagagatactttttaatggaccagggagactttttcgtgcatttcatggatctcgctgaagaggaactgcgcaagcctgtggaggacattacacccccaaggctagaggccctcctcgagttggctctcagaatgagtacggccaatactgatccttttaaggacgacctgaaaatcgatttgatgccccacgacttgattactcaactgctgagggtgctcgccatcgaaactaagcaggagaaggcaatggcacacgccgatccaaccgaactcgccctctcgggtctcgaagcgtttagcttcgattacattgtgaagtggcccctgtccttaatcatcaatcgcaaggccctgacaagatatcaaatgttatttaggcacatgttctactgcaagcacgtagaacggcagctgtgtagcgtttggatctctaataaaaccgcgaagcagcattcactgcattccgcacaatggtttgccggggcattcactttgagacagagaatgctaaattttgtgcagaatattcaatattacatgatgtttgaagtaatggagcctacatggcacatcctggaaaagaatctgaagtctgcctccaacatcgatgatgtcctgggccaccacacaggctttttggacacatgcctgaaggactgcatgttgaccaaccccgagctgctgaaagttttttcaaaactgatgtcggtctgtgtgatgtttaccaactgtatgcagaagtttacccagtcaatgaagctggacggagagctcggggggcaaacccttgagcatagtacagtcctgggcctgcccgccggggccgaagaacgagcgcgcaaggagctggccagaaagcacctggctgagcacgctgataccgtgcagctagtatccggatttgaggccaccattaataaatttgacaagaattttagcgctcacctgcttgatctcctcgctcggcttagtatttattctacctctgattgtgagcacggtatggcgtccgtcatctcaaggttggacttcaacggcttttacacagagagactggaaagactgtccgccgagcggtcccagaaggctacacctcaggtgccagtcctccgcggcccccctgccccggcaccaagagtcgcagtaaccgctcagtag

SEQ ID NO: 91017 - DNA, 2793 bp, Artificial Sequence
  derived and/or modified sequence
atgtctgagttccgcatccaccatgatgtgaatgagctgctgagcctgctgcgggtgcacggcggagatggagctgaggtgtacatcgacctgctgcagaagaacagaacaccctacgtgaccaccaccgtgtctgcccacagcgccaaggtgaagattgctgagttcagcaggaccccagaggacttcctgaagaagtatgatgagctgaagagcaagaacaccaggaacctggaccccctggtgtacctgctgagcaagctgacagaggacaaggagaccctgcagtacctgcagcagaatgccaaggagcgggcagagctggccgctgctgctgtgggcagcagcaccaccagcatcaacgtgcctgctgctgccagcaagatctccatgcaggagctggaggagctgaggaagcagctgggctctgtggccaccggcagcaccctgcagcagagcctggagctgaagaggaagatgctgcgggacaagcagaacaagaagaacagcggccagcacctgcccatcttccctgcctgggtgtatgaaagacctgccctgattggagacttcctgattggagctggcatcagcacagacacagccctgcccatcgtgctgctgcgctggaacctggccctgagcccccggctgaagtgcagcggggtcatcagcgcccactgcaacctgcacctgcccggcaccctgcccctggccagccaggagagcgctgtggtggaggacctgctgtatgtgctggtgggcgtggatggccgctacgtgtctgcccagcccctggccggccggcagagcaggaccttcctggtggaccccaacctggacctgagcatccgggagctggtgcaccgcatcctgcctgtggccgccagctacagcgctgtgacccgcttcatcgaggagaagagcagctttgaatatggccaggtgaaccacgccctggccgccgccatgaggaccctggtgaaggagcacctgatcctggtgtcccagctggagcagctgcaccggcagggcctgctgagcctgcagaagctgtggttctacatccagcctgccatgaggaccatggacatcctggccagcctggccacctctgtggacaagggagaatgtctgggcggcagcaccctgagcctgctgcatgaccgctccttctcctacacaggagacagccaggcccaggagctgtgcctgtacctgaccaaggccgccagcgccccctactttgaggtgctggagaagtggatctaccggggcatcatccatgacccctacagcgagttcatggtggaggagcacgagctgaggaaggagcgcatccaggaggactacaatgacaagtactgggaccagcgctacaccatcgtgcagcagcagatccccagcttcctgcagaagatggctgacaagatcctgagcacaggcaagtacctgaatgtggtgcgggagtgtggccatgatgtgacctgccctgtggccaaggagatcatctacaccctgaaggagcgggcctacgtggagcagatcgagaaggccttcaactatgccagcaaggtgctgctggacttcctgatggaggagaaggagctggtggcccacctgcggagcatcaagcgctacttcctgatggaccagggcgacttctttgtgcacttcatggacctggccgaggaggagctgaggaagcctgtggaggacatcaccccaccccggctggaggccctgctggagctggccctgaggatgagcacagccaacacagaccccttcaaggatgacctgaagattgacctgatgcctcatgacctgatcacccagctgctgcgggtgctggccatcgagaccaagcaggagaaggccatggcccatgctgaccccacagagctggccctgagcggcctggaggccttctcctttgactacatcgtgaagtggcccctgagcctcatcatcaacaggaaggccctgacccgctaccagatgctgttccgccacatgttctactgcaagcacgtggagcggcagctgtgcagcgtgtggatcagcaacaagacagccaagcagcacagcctgcacagcgcccagtggtttgctggggccttcaccctgcggcagaggatgctgaactttgtgcagaacatccagtactacatgatgtttgaggtgatggagcccacctggcacatcctggagaagaacctgaagagcgccagcaacattgatgatgtgctgggccaccacacaggcttcctggacacctgcctgaaggactgcatgctgaccaaccctgagctgctgaaggtgttcagcaagctgatgtctgtgtgtgtgatgttcaccaactgcatgcagaagttcacccagagcatgaagctggatggagagctgggcggccagaccctggagcacagcacagtgctgggcctgcctgctggagctgaggagcgggccaggaaggagctggccaggaagcacctggccgagcacgccgacacagtgcagctggtgtctggctttgaggccaccatcaacaagtttgacaagaacttcagcgcccacctgctggacctgctggcccggctgagcatctacagcaccagtgactgtgagcacggcatggccagcgtcatcagccggctggacttcaacggcttctacacagagcggctggagcggctgtctgctgagaggagccagaaggccaccccccaggtgcctgtgctgcggggccccccagccccagccccccgggtggccgtgacagcccagtag

SEQ ID NO: 91018 - DNA, 2793 bp, Artificial Sequence
  derived and/or modified sequence
atgagcgagttccggatccaccacgacgtgaacgagctgctgagcctcctgagagtgcacgggggcgacggggcggaggtgtatatcgatctactgcagaaaaatcggactccttatgtgacgaccactgtctcagctcatagtgctaaagtgaaaatcgcagaattcagtagaactccagaagacttcctgaagaagtatgacgaactcaaatccaaaaatactagaaatctggaccctttagtatatttgctgtccaaattgaccgaagataaggaaaccctccaatacctgcagcaaaatgccaaggagcgggccgaattagccgctgccgcagttgggagctccacaacctcaatcaatgtgcctgccgccgcttctaagatctctatgcaggagcttgaagagctgcggaagcagctcggttccgttgccaccggtagcacgctccagcagagtctagagttgaaaaggaagatgctccgggataaacaaaacaaaaagaattccgggcagcatctaccgatctttcccgcctgggtgtatgagagaccagcccttatcggcgacttcctgattggagctggtatctctacggataccgccctacccatagttttgctgcgttggaacttggccctatcacccaggctaaaatgcagcggggtaatcagtgcacactgtaaccttcacttgcccgggactctgccccttgccagccaggaatctgccgtggttgaggacctgttgtacgtactggtgggtgtggatggccgatatgtgagcgctcaacctctggccggacgacagtccaggacatttctggtcgaccccaaccttgatttgtctattcgggagttagttcatcggatccttcccgtggcggcgtcatacagcgctgttactagatttatcgaggagaaatcgtcatttgaatatggccaagtgaaccatgcattggctgcagccatgaggacccttgttaaggaacacctgattctggtgagccagctggaacaactacataggcagggcctgctgtccctacagaagttgtggttctacatccagcccgcaatgcggactatggatatcttggcctccctggccacatctgttgataagggtgaatgcctcggcggatcaacgctaagcctgcttcacgatagatctttctcctatacaggtgattcacaggcacaagaactgtgcttgtacctcaccaaagctgcatccgcgccttacttcgaggtgttagagaagtggatttatcgcggtattatccacgacccttatagcgagtttatggtggaagaacacgaactgcgtaaagagagaatccaggaagactacaacgacaaatattgggaccagaggtacacaattgtgcagcaacagattccttctttcctgcagaaaatggcagataaaatcttgagcacaggcaagtatcttaatgtggtccgcgaatgtgggcacgatgtgacctgtccagtcgcaaaagagatcatctacacactaaaagagcgggcttatgtggagcagatcgaaaaagccttcaattatgcctctaaagtgctcctagatttcctaatggaagagaaagagctcgtggcacatcttcgttctatcaagaggtactttttgatggatcagggcgactttttcgtgcatttcatggacctcgccgaggaagagctgcgaaaaccggtagaagatatcactcctccacgcctggaggcacttctggaacttgcgctgcggatgagcactgccaacactgatccattcaaggatgaccttaagatagatttaatgcctcatgacttgattacacagctgctgagggtgctggccatcgagaccaaacaagagaaggctatggcacacgccgatcctacggaactcgccctctctggcctggaagctttttcatttgactatatagtgaagtggccgctatcactcatcattaacaggaaggctctcacccgctaccagatgttattccggcacatgttttattgcaagcatgttgaaaggcaactgtgctcagtctggatttccaacaagacagctaagcagcattcactccatagcgctcagtggtttgccggagccttcacgctgaggcagcggatgcttaattttgtacaaaatatccagtattatatgatgttcgaagtgatggagcctacttggcatatcctcgagaagaatcttaagtcagcttccaacatcgacgatgtcctgggacatcacaccggatttcttgacacgtgtttaaaggattgcatgcttacaaatcccgaattacttaaggttttttccaaattgatgagtgtgtgcgtgatgtttaccaactgcatgcaaaagttcacgcagagtatgaaactagatggtgagctaggtggtcagacattagagcactccaccgtgctgggacttcccgcgggcgctgaggaacgggctagaaaggaactagcccgcaagcaccttgccgagcacgcggacaccgtccaattagtgagcggattcgaggcaactattaacaagttcgacaaaaatttctccgcccacctgttagacttattagctagactgagcatttattctacgtcagactgcgagcacgggatggcctcagtgataagccgcctagacttcaatggtttttacaccgagcgcttagagcggctgtccgccgagagatctcaaaaggccaccccccaggtgcccgtccttcggggaccaccagctcccgctccacgagttgctgttaccgcacagtag

SEQ ID NO: 91019 - DNA, 2793 bp, Artificial Sequence
  derived and/or modified sequence
atgtctgaatttcgtatccatcacgacgtcaatgaactcctctccctgctcagagtacacgggggtgatggggcagaggtttacatcgatctcctgcagaagaaccggacgccgtacgtcacgactaccgtgtcagcacacagtgcaaaggtaaagatcgctgaattctcacgtacccccgaggacttcctcaaaaaatacgatgaacttaagtccaagaatacccgtaatctggatcccctcgtgtacttgcttagcaaattaactgaggacaaggagacgctccagtacctccaacaaaacgctaaggaaagggcagagctcgctgctgccgctgtgggtagcagtaccacttccattaacgtgcccgctgctgctagtaagatatccatgcaggaactggaagaactgcgcaagcaactcggttcagttgcaacaggcagtacactgcaacagtccctggagctgaaaagaaaaatgctgcgtgataaacaaaataaaaagaattctggtcagcatctgccaatatttcccgcttgggtttacgagagacccgcactaataggggacttcttgattggtgctggcatcagtaccgacacagcactgcctattgtgttgctgagatggaacctggcattgtccccccgacttaagtgttccggcgtgattagtgctcattgtaatctacacttaccaggaacgcttcccctcgctagtcaggagagcgccgtggtcgaggacctactctatgtcctggtgggagttgatgggaggtatgtcagcgcccaacctctcgccggacgacaaagccgcacgtttctggtcgacccaaatttagatctgagtatccgggagctggttcatcgaatcctccccgttgctgcctcatacagcgccgtcacaaggttcatcgaggagaaatcctccttcgaatacggacaggtcaaccatgctctggccgcagctatgaggactcttgtgaaggagcacctcatcctggtctctcagttagaacagctccataggcaaggcctcttaagtcttcagaaactgtggttctatattcagcctgcaatgaggacgatggacatcctcgcatccttggctacaagcgtggacaagggggagtgcctgggtggcagcacgctgtccctgctgcacgatcgatctttctcctacactggcgactctcaggcacaggaattatgtctgtacctgaccaaagccgcaagtgcgccatactttgaagttctagagaagtggatatacaggggtatcattcatgacccgtattcagagttcatggtggaagagcacgaactccgaaaagagcggattcaggaggattataacgacaaatactgggatcaaaggtataccattgttcagcaacaaatcccatcgttccttcagaaaatggctgataagatactgtccaccggcaagtacttaaatgtcgtgcgggaatgtggccatgatgttacatgcccagtcgccaaagaaatcatatacaccttaaaggaacgtgcatacgtagagcaaatcgagaaagcgttcaactacgcaagcaaggttctgctcgatttccttatggaagaaaaggagttagtggcacacctgaggtccattaagagatactttctgatggaccagggtgatttcttcgttcattttatggacctggcagaagaagagcttcggaagccggtggaggacatcacaccaccccgtctggaagctctcctggaactcgcgctcaggatgtcaacagcaaacaccgacccctttaaggacgacttgaagatcgatcttatgccacacgacctgataactcaactgctcagggtgttagcaattgagacaaaacaggaaaaggccatggcccacgcagatcccacggagcttgcactgtctggcctggaagccttctcttttgattatatcgttaaatggccgctgtccctcatcataaacaggaaggctttaactaggtaccagatgctctttagacacatgttctattgtaagcacgtggaacgccagctgtgcagtgtgtggattagcaacaaaaccgccaagcagcactccttacactccgcacaatggtttgctggggcttttacgcttcgccagagaatgctgaatttcgtgcagaatatccagtattatatgatgttcgaagtcatggagcctacttggcacatcctggaaaagaacttgaaatcagcaagcaatattgatgatgtcctaggccatcacactgggttcctggatacatgcctgaaagactgcatgttgaccaatcctgagttacttaaagtattttctaagttaatgtccgtctgcgtgatgtttacaaactgcatgcagaaatttactcagtcaatgaaattggacggcgagctgggcggtcagactttggagcactccaccgtcctgggactccccgcaggggctgaagagagggctcgcaaagaactcgccaggaagcacctggctgagcacgccgacaccgtgcagctggttagtggatttgaggctacaattaacaaattcgacaaaaacttctcagcccacctcttagacctgcttgccaggctgtcaatctactccacaagtgactgtgaacacggcatggcgagcgtaatctcccggttggactttaatggattttacaccgagcgtctggaacgattgtcggccgaacgcagccaaaaagccactccacaggtgccggttttacgcggaccgccagctccagcccctcgcgtagccgtgactgcccaatag

SEQ ID NO: 91020 - DNA, 2870 bp, Artificial Sequence
  derived and/or modified sequence
ggagaacatattgtgatgttcgtgcctcagagctaaaactatgagtgaatttcggattcaccatgacgtcaatgaactgcttagcctgctgcgtgtccacggaggagatggggctgaggtctacattgacctgcttcaaaagaacaggaccccgtacgtcactaccactgtctctgctcacagtgccaaggttaaaattgcagagttttctcgtactccagaagactttctaaagaaatatgatgaactgaaatctaaaaatacaaggaaccttgacccgctggtgtacctgttgtcaaagctcacggaagacaaagagactctgcagtacttacaacagaatgcaaaagaaagagctgagcttgcagccgctgctgtgggcagcagtaccaccagcatcaacgtccctgccgcggcctccaagatctccatgcaggagcttgaggaactgaggaagcagcttggcagcgtggccacaggctccacgctgcagcagtctctggaacttaaaagaaagatgcttcgagacaagcagaacaaaaaaaattcaggccagcacctccccatcttcccagcatgggtgtatgagagacctgccctgatcggggatttcctgattggtgctggcatcagcacagacaccgctttgccgatagttcttttgagatggaatctcgctctgtcgcccaggctgaagtgcagtggcgtgatctcggcacactgcaacctccacctcccaggcacgttgcccctggcctcgcaggagtcggccgtggtggaggacctgctgtacgtgctggtgggcgtggacgggaggtacgtcagtgctcagcccctggctgggaggcagagccggaccttcctcgtggaccccaacctggacctgtccatcagggagctggtgcacaggatcctcccagtggccgccagctactccgctgtgaccaggttcattgaagagaagtcttccttcgagtacgggcaggtgaaccacgccctggcggccgccatgcgcaccctggtgaaggagcacctgattctggtgtcacagctggagcagctgcacaggcagggcctcctttcgctgcagaagctctggttctacatccagccagccatgcgcaccatggacatcctggcctccctcgccacctcggtggacaaaggcgaatgtcttggggggtccacgctgagcctgctccacgacaggagcttcagctacacaggggacagccaggcgcaggagctatgcctgtacctaaccaaggcggccagtgctccctacttcgaggttctggagaagtggatctacaggggcatcatccacgacccatacagtgagtttatggtcgaggagcacgagctgcggaaggagaggatccaggaggattacaacgacaagtactgggaccagcggtacaccatcgtccagcagcagatcccgtccttcctgcagaaaatggcggacaagatcctcagcacaggaaaatatctaaatgtggtcagagagtgtggccatgacgtcacctgcccggtggctaaagagatcatctacacgttaaaagagcgggcgtatgtggagcagatcgagaaggcgtttaactacgccagcaaggtgctgctggacttcctgatggaggagaaggagctggtggctcacctcaggtccatcaagcgctacttcctcatggaccagggcgacttcttcgtgcacttcatggacctcgcggaggaggagctccggaagccggtggaggacatcacgccccctcgcctggaagcgctcctggagctggcgctgcgcatgagcacggccaacactgaccccttcaaggacgacctcaagatcgacctgatgccccatgacctcatcactcagctcttgcgcgtcctggccatcgagaccaagcaggagaaggcgatggcgcacgccgaccccacggagctggcgctgagcggcctggaggccttctctttcgactacatcgtcaagtggcccctttcgctcatcatcaacaggaaagccctcactcgctaccagatgctcttcaggcacatgttctactgcaagcacgtggagcggcagctctgcagcgtctggatcagcaacaaaaccgccaagcagcactcgctgcactccgcccagtggtttgctggggctttcactctgcggcagcgaatgctcaacttcgtccagaatattcaatactacatgatgtttgaagtgatggaaccgacctggcacatcctggagaaaaacctgaaatccgcctccaacattgacgacgtccttggccaccacacaggcttcctggacacctgcctgaaggactgcatgctcaccaaccccgagctgctgaaggtcttctccaagctcatgtctgtgtgcgtcatgttcaccaactgcatgcagaaatttacacagagcatgaaattagatggcgagctgggcgggcagacgctggagcacagcaccgtcctggggctgcccgcaggggccgaggagcgggcccggaaggagctcgccaggaagcacctggctgagcacgcagacactgtgcagctggtgtccggcttcgaggccaccatcaacaagtttgacaagaacttctcagcccacctgctggacctcctggcccggctgagcatctatagcaccagtgactgtgagcacggcatggccagcgtcatctccaggcttgacttcaatggtttctacacggagcgcctggagcgcctgtctgcagagaggagccagaaggccaccccccaagtgcctgtcctgcgggggcccccggctcctgcacccagggtcgcagtcaccgcacagtgagccctggctgtgacaggaaggaagggtgtggggtcag

SEQ ID NO: 91021 - protein, 327 aa, Artificial Sequence
  derived and/or modified sequence
MQQESERCRVRARRPDMALYVPKARRGAVLLKTGDEEESCGSPNSVVKEKQKESSLSQKEVFKDKPEARRLNINPDRKEHNCREEKKSSTKLRMDTCLQKTNRVCSKRGTTESKEVLSQGQQQGAPNAGVITNAPLQRHFKPKKVECLEVETTDVTGHERILLSQACLEISEAQVPSKPFQNVEFCDFSRHEPDGEAFEDKDLEGRIETDTKVLEILYEFPRVFSSVMKPENMIVPIKLSSDSEIVQQSMQTSDGILNPSSGGITTTSVPGSPDGVFDQTCVDFEVESVGGIANSTGFILDQKIQIPFLQLWVTSLCQRAQMTLLVQ

SEQ ID NO: 91022 - DNA, 984 bp, Artificial Sequence
  derived and/or modified sequence
atgcagcaggagagcgagagatgcagagtgagagccagaagacccgacatggccctgtacgtgcccaaggccagaagaggcgccgtgctgctgaagaccggcgacgaggaggagagctgcggcagccccaacagcgtggtgaaggagaagcagaaggagagcagcctgagccagaaggaggtgttcaaggacaagcccgaggccagaagactgaacatcaaccccgacagaaaggagcacaactgcagagaggagaagaagagcagcaccaagctgagaatggacacctgcctgcagaagaccaacagagtgtgcagcaagagaggcaccaccgagagcaaggaggtgctgagccagggccagcagcagggcgcccccaacgccggcgtgatcaccaacgcccccctgcagagacacttcaagcccaagaaggtggagtgcctggaggtggagaccaccgacgtgaccggccacgagagaatcctgctgagccaggcctgcctggagatcagcgaggcccaggtgcccagcaagcccttccagaacgtggagttctgcgacttcagcagacacgagcccgacggcgaggccttcgaggacaaggacctggagggcagaatcgagaccgacaccaaggtgctggagatcctgtacgagttccccagagtgttcagcagcgtgatgaagcccgagaacatgatcgtgcccatcaagctgagcagcgacagcgagatcgtgcagcagagcatgcagaccagcgacggcatcctgaaccccagcagcggcggcatcaccaccaccagcgtgcccggcagccccgacggcgtgttcgaccagacctgcgtggacttcgaggtggagagcgtgggcggcatcgccaacagcaccggcttcatcctggaccagaagatccagatccccttcctgcagctgtgggtgaccagcctgtgccagagagcccagatgaccctgctggtgcagtag

SEQ ID NO: 91023 - DNA, 984 bp, Artificial Sequence
  derived and/or modified sequence
atgcagcaggaaagcgaacgctgtcgcgtacgcgctaggcgcccagatatggcactctatgtgcctaaggccagacgcggggctgtgctgctcaagactggcgacgaggaagagtcctgcgggtctcccaacagtgttgtgaaggaaaaacagaaggagtcaagcctgagccagaaagaagtctttaaagacaaacccgaagcccgccggctcaatatcaatccagaccgaaaggaacataattgcagagaggagaagaagtccagcaccaaactgaggatggacacctgcctacagaagaccaaccgcgtgtgttcaaagcgaggtactaccgagagtaaagaagtactaagccaaggccaacaacagggcgcccctaacgcaggcgtaatcactaacgcacctcttcaaagacactttaagccgaagaaggtggagtgcctggaggtggaaacgacagatgttacaggccacgagagaatcttactctcccaggcttgcctggaaatctccgaagctcaggtcccctccaagccatttcagaacgtcgaattctgcgacttttcgcggcatgagcctgacggcgaggcattcgaagacaaggatctggaaggacgaatcgaaacagacacgaaagtgttagagattttgtacgaatttccacgagtgttttcctctgtgatgaaacccgagaacatgatcgtgcctatcaagttgagtagcgatagtgagatcgtccagcagagtatgcagacttccgatgggatcttaaatcctagctccggcgggattaccacaaccagcgttccaggtagtcccgacggcgttttcgaccagacgtgtgtggacttcgaagtcgagagtgtcggcggtattgcaaattccaccgggttcatcttagatcaaaaaattcaaattcccttcctgcagctttgggtgacgtccttgtgtcagcgggcacagatgaccctgctggtccaatag

SEQ ID NO: 91024 - DNA, 984 bp, Artificial Sequence
  derived and/or modified sequence
atgcagcaggagagcgagcgctgccgggtgcgggcccggcggccagacatggccctgtatgtgcccaaggccaggagaggagctgtgctgctgaagacaggagatgaggaggagagctgtggcagccccaacagcgtggtgaaggagaagcagaaggagagcagcctgagccagaaggaggtgttcaaggacaagccagaggcccggcggctgaacatcaacccagacaggaaggagcacaactgccgggaggagaagaagagcagcaccaagctgaggatggacacctgcctgcagaagaccaacagagtgtgcagcaagaggggcaccacagagagcaaggaggtgctgagccagggccagcagcagggcgccccaaatgctggggtcatcaccaatgcccccctgcagaggcacttcaagcccaagaaggtggagtgcctggaggtggagaccacagatgtgacaggccacgagcgcatcctgctgagccaggcctgcctggagatcagcgaggcccaggtgcccagcaagcccttccagaatgtggagttctgtgacttcagcagacatgagccagatggagaggcctttgaggacaaggacctggagggcagaattgaaacagacaccaaggtgctggagatcctgtatgagttccccagggtcttcagctctgtgatgaagccagagaacatgattgtgcccatcaagctgagcagtgacagcgagatcgtgcagcagagcatgcagaccagtgatggcatcctgaaccccagcagcggcggcatcaccaccacctctgtgcccggcagcccagatggagtgtttgaccagacctgtgtggactttgaggtggagagcgtgggcggcatcgccaacagcacaggcttcatcctggaccagaagatccagatccccttcctgcagctgtgggtgaccagcctgtgccagagggcccagatgaccctgctggtgcagtag

SEQ ID NO: 91025 - DNA, 984 bp, Artificial Sequence
  derived and/or modified sequence
atgcagcaggagagcgagcggtgccgggtgcgggcccggcggcccgatatggccttatacgtgcctaaggctcggcgtggcgcggtcttgctcaagaccggagatgaggaagagtcctgcgggtcccctaattcagtggtgaaagagaagcagaaggagagctcacttagtcagaaagaagtctttaaagataaaccggaagctaggcgcctgaatatcaatccagatcggaaggagcacaactgtcgcgaggagaagaaaagctcaaccaagctgcggatggatacgtgcctgcagaagacgaacagggtgtgtagtaaaagggggactaccgagtcaaaggaagtgttgtctcagggacaacagcaaggggcccctaacgccggcgttataaccaatgctccactgcagcggcacttcaaaccgaaaaaggtggaatgtctcgaagtggaaaccactgacgtgacaggccatgagaggatcctgctgagccaagcctgccttgaaatctctgaagcacaggtccctagtaaaccatttcaaaacgttgaattctgcgatttctctcgccacgaacccgacggggaggcgtttgaggacaaagatctggaggggagaatagagaccgacaccaaggttctggagattctgtatgaattcccaagagtcttttctagtgtgatgaagcccgagaatatgattgtcccaattaagttgtcaagcgactccgagattgttcagcagtctatgcagacatcggacggcattctcaatccatctagcgggggtatcacaaccacttccgtcccaggcagccctgacggcgtgttcgatcaaacttgcgtggactttgaagttgaaagcgttggagggattgccaattcaacaggcttcatactcgaccagaagattcagattccttttttgcagctatgggtgacatcgctgtgtcagcgggctcagatgacgttactagtgcaatag

SEQ ID NO: 91026 - DNA, 984 bp, Artificial Sequence
  derived and/or modified sequence
atgcagcaggagagtgagcggtgccgtgtacgggcacgtagacccgacatggcactatatgttcctaaagcacggagaggtgcagtgctgctaaagaccggcgacgaggaggaatcctgtggcagcccaaactcggtggttaaggaaaagcaaaaagaaagctctctgtcccagaaggaagtgttcaaggacaagccagaggcacgcagactgaacatcaatcctgataggaaagaacacaactgtcgcgaggagaaaaagtcgtccactaaactacgcatggatacctgcctccaaaaaaccaaccgcgtttgtagtaagagggggacaacagagtctaaggaggtgttgtcccagggtcagcagcagggcgcacctaacgcgggtgtgatcaccaacgccccactgcagaggcacttcaagccaaaaaaggtggagtgtctcgaagtggaaacaactgacgtcacaggccacgagagaattctcctaagccaagcatgtttggaaatctccgaagctcaggtgccgtccaagcccttccaaaacgttgaattctgtgacttcagccggcatgaacccgacggcgaagctttcgaggacaaggatctcgaaggacggatagagaccgataccaaagtgctggaaatcctttatgaattcccaagggtgttcagctctgtgatgaagccagaaaacatgattgtgccgattaagttatcctccgactctgagatcgtacaacagtctatgcagacgagtgacggcattctcaatccctcgtccggcggtatcacaactacatcagtgcccggatctccagatggagtattcgatcaaacttgtgtggattttgaagtggagagcgtgggaggaatcgcaaattccactggctttatactggatcaaaaaattcagatcccgttcttgcagctttgggtgacttccctttgtcagcgggctcagatgaccctgctcgtgcaatag

SEQ ID NO: 91027 - DNA, 1032 bp, Artificial Sequence
  derived and/or modified sequence
gcggagacggcggaagcggagagcaacagcgcgccgagacttccagtgtcctactattgaagcctgcacctgctgcattgctgttttcctgagacggagttttgccatgttgtccaggctggtgtcgaaatcctgagctcaagtggtctgcctgcctcggcttcccaaagtgctgggattacaggtgaggctgctgtcagaaaggaacttttacacagtttgccttcagagacagtctatcggcatgttgtagagttttattactaagaaaataaatgttacttacatgttatcagggaataccaagagcagagagagcatccaggaacctagatctgattactacaatcatgaagttcctgatattgacctcagtgattgtgaattcccacatgtcattgaaatttatgactttccccaagaatttcatactgaagaccttctacgggttttctgcagttatcaaaagaaaggatttgatattaaatgggtggatgatacacatgccctaggagtattctccagtccaattacagctcgtgatgcgttgggtattaaacacaccatggtgaagattcgtcccttgtcacaggccacaagagcagccaaggccaaagctagagcttatgctgagttcctccagccagcaaaggagcgtcctgagacttcagcagccctagccagaaggttagtcatcagtgcccttggggttcgaagtaagcagagcaaaaccgaacgagaagcagagctcaagaaactgcaagaagccagagagagaaagcggttggaagccaagcaacgggaagacatctgggaaggcagagaccagtctacagtttgaacatcactcaatgaaagggataattccatgaatcagaaaatgtttccatagccttcagataagatgatccttccagagctctatgtacatgcagatgtgcatgttaaagagataaagtgatcgagacaaggactgactgggtatagaaggaagacagactcctgtcttcactcctaaatgcagttctttgg

SEQ ID NO: 91028 - DNA, 1294 bp, Artificial Sequence
  derived and/or modified sequence
caaaaattatcagggaataccaagagcagagagagcatccaggaacctagatctgattactacaatcatgaagttcctgatattgacctcagtgattgtgaattcccacatgtcattgaaatttatgactttccccaagaatttcatactgaagaccttctacgggttttctgcagttatcaaaagaaaggatttgatattaaatgggtggatgatacacatgccctaggagtattctccagtccaattacagctcgtgatgcgttgggtattaaacacaccatggtgaagattcgtcccttgtcacaggccacaagagcagccaaggccaaagctagagcttatgctgagttcctccagccagcaaaggagcgtcctgagacttcagcagccctagccagaaggttagtcatcagtgcccttggggttcgaagtaagcagagcaaaaccgaacgagaagcagagctcaagaaactgcaagaagccagagagagaaagcggttggaagccaagcaacgggaagacatctgggaaggcagagaccagtctacagtttgaacatcactcaatgaaagggataattccatgaatcagaaaatgtttccatagccttcagataagatgatccttccagagctctatgtacatgcagatgtgcatgttaaagagataaagtgatcgagacaaggactgactgggtatagaaggaagacagactcctgtcttcactcctaaatgcagttctttggaatcaccctactgtggtgggcgtagtagggagccatcagctaggaagaaacgtgggagatgtgaattccaagagttgcctggacagggcaagtcatgttagcgtgggtcacacttccaagatatttaaagcaaatacaaaacagaacagaggattcaaaccgcaagtatgggagatttaggccctgcagaggcagaccattccttagtatctcacaaagcagagtaatactggaggcagagtagggggtggttggagagcagttagtacaaagaggcagaacagtgtctggtttacttggcatacacagaatctgcactgccggttccagaactgcaaagttggtgaactacaggagatgtgggtatttagactccaaagtttatactgagctcagtgcctgggaccgctccagctgcactgcagccaggggggataccagcttcattcctcagagtaaaccaaccttgggagctgtgtgccagttccagtgtaagcagtaataccatgttgtaagagggaacattaaagcccattttatgacat

SEQ ID NO: 91029 - DNA, 555 bp, Artificial Sequence
  derived and/or modified sequence
atgctgagcggcaacaccaagagcagagagagcatccaggagcccagaagcgactactacaaccacgaggtgcccgacatcgacctgagcgactgcgagttcccccacgtgatcgagatctacgacttcccccaggagttccacaccgaggacctgctgagagtgttctgcagctaccagaagaagggcttcgacatcaagtgggtggacgacacccacgccctgggcgtgttcagcagccccatcaccgccagagacgccctgggcatcaagcacaccatggtgaagatcagacccctgagccaggccaccagagccgccaaggccaaggccagagcctacgccgagttcctgcagcccgccaaggagagacccgagaccagcgccgccctggccagaagactggtgatcagcgccctgggcgtgagaagcaagcagagcaagaccgagagagaggccgagctgaagaagctgcaggaggccagagagagaaagagactggaggccaagcagagagaggacatctgggagggcagagaccagagcaccgtgtag

SEQ ID NO: 91030 - DNA, 558 bp, Artificial Sequence
  derived and/or modified sequence
cagaagctgagcggcaacaccaagagcagagagagcatccaggagcccagaagcgactactacaaccacgaggtgcccgacatcgacctgagcgactgcgagttcccccacgtgatcgagatctacgacttcccccaggagttccacaccgaggacctgctgagagtgttctgcagctaccagaagaagggcttcgacatcaagtgggtggacgacacccacgccctgggcgtgttcagcagccccatcaccgccagagacgccctgggcatcaagcacaccatggtgaagatcagacccctgagccaggccaccagagccgccaaggccaaggccagagcctacgccgagttcctgcagcccgccaaggagagacccgagaccagcgccgccctggccagaagactggtgatcagcgccctgggcgtgagaagcaagcagagcaagaccgagagagaggccgagctgaagaagctgcaggaggccagagagagaaagagactggaggccaagcagagagaggacatctgggagggcagagaccagagcaccgtgtag

SEQ ID NO: 91031 - DNA, 555 bp, Artificial Sequence
  derived and/or modified sequence
atgctttctggaaacacgaagagccgcgaatcgatccaggaaccacgttctgattattacaaccatgaggtccccgatatcgacctgagtgattgtgaattccctcatgtgattgagatttacgatttccctcaggaattccacactgaggacctccttcgcgtgttctgctcataccagaaaaaaggctttgatatcaagtgggttgacgacacacacgcactcggggtgtttagttccccgattactgccagagacgcattgggcattaagcacaccatggtaaagatccgaccccttagtcaggcgacccgagccgcgaaagccaaagcacgcgcctacgccgagtttttgcagcctgccaaagagagaccggagacaagtgccgcacttgcgaggcgcctcgtgatcagcgcactgggcgttcgctccaagcagtccaagactgagcgagaagccgagctcaaaaagctgcaggaagcccgagaacgcaaacgcttagaggccaaacaacgcgaggatatttgggagggacgggatcagtccacagtctag

SEQ ID NO: 91032 - DNA, 558 bp, Artificial Sequence
  derived and/or modified sequence
cagaaactgagtggcaataccaaaagccgggagtcaattcaggaaccacgctcagattattacaatcacgaagtaccagacatcgacttgagtgattgtgagttccctcacgtgatcgaaatttatgattttccccaggaattccacactgaagacctcttaagggtattctgtagttatcagaagaaaggattcgacatcaagtgggtcgacgatacgcacgctcttggagtgttcagttccccaataacagcaagagacgcactggggattaagcacaccatggtcaagatcaggccactatcccaggcaactcgcgcggccaaagccaaagcgagagcttatgccgaattcctgcagcccgccaaggagcggcccgaaacgtctgccgccttggcacgacgcttagtaatttccgctctcggcgtcagatctaagcagtctaaaaccgagcgggaggctgagttaaagaagctccaggaagcccgggagaggaaaagactggaagccaagcaaagagaggatatctgggaaggccgagaccagtccactgtgtag

SEQ ID NO: 91033 - DNA, 555 bp, Artificial Sequence
  derived and/or modified sequence
atgctgagcggcaacaccaagagccgggagagcatccaggagcccaggagtgactactacaaccacgaggtgcctgacatcgacctgagtgactgtgagttcccccacgtgattgagatctatgacttcccccaggagttccacacagaggacctgctgcgggtcttctgcagctaccagaagaagggctttgacatcaagtgggtggatgacacccacgccctgggcgtcttcagcagccccatcacagccagagatgccctgggcatcaagcacaccatggtgaagatccggcccctgagccaggccacccgggccgccaaggccaaggcccgggcctatgcagagttcctgcagcctgccaaggagaggcctgagaccagcgctgccctggcccggcggctggtgatcagcgccctgggcgtgcgcagcaagcagagcaagacagagcgggaggccgagctgaagaagctgcaggaggcccgggagaggaagaggctggaggccaagcagcgggaggacatctgggagggccgggaccagagcacagtgtag

SEQ ID NO: 91034 - DNA, 558 bp, Artificial Sequence
  derived and/or modified sequence
cagaagctgagcggcaacaccaagagccgggagagcatccaggagcccaggagtgactactacaaccacgaggtgcctgacatcgacctgagtgactgtgagttcccccacgtgattgagatctatgacttcccccaggagttccacacagaggacctgctgcgggtcttctgcagctaccagaagaagggctttgacatcaagtgggtggatgacacccacgccctgggcgtcttcagcagccccatcacagccagagatgccctgggcatcaagcacaccatggtgaagatccggcccctgagccaggccaccagggctgccaaggccaaggcccgggcctatgcagagttcctgcagcctgccaaggagaggcctgagaccagcgctgccctggcccggcggctggtgatcagcgccctgggcgtgcgcagcaagcagagcaagacagagcgggaggccgagctgaagaagctgcaggaggcccgggagaggaagaggctggaggccaagcagcgggaggacatctgggagggccgggaccagagcacagtgtag

SEQ ID NO: 91035 - DNA, 555 bp, Artificial Sequence
  derived and/or modified sequence
atgctgagcggcaacaccaagagccgggagagcatccaggagccccggagtgattattacaatcacgaggtacctgacatcgacctgtctgactgtgaattcccccatgtaatcgagatatacgacttcccacaggagtttcatacagaggacctcctgcgcgtgttttgctcctaccagaaaaaggggtttgatattaagtgggtcgatgacacgcacgcgcttggcgtgtttagttctccaattacagcccgtgatgctctggggatcaagcacaccatggtcaaaatccgacccctgtcgcaggctactcgcgctgccaaggcaaaggccagagcgtatgcagaattcctgcaacccgctaaggaaaggcctgagacatcagccgctctggcaaggcgcctggtgattagcgctttgggcgttagatccaagcagagtaaaaccgaacgtgaggctgagctgaagaaactgcaagaagctcgcgaacggaagagactggaggccaagcaaagggaagatatctgggaggggagagaccagtctaccgtctag

SEQ ID NO: 91036 - DNA, 558 bp, Artificial Sequence
  derived and/or modified sequence
cagaagctgagcggcaacaccaagagccgggagagcatccaggagccccgaagtgactactacaatcatgaggttcctgacatcgacctcagcgattgtgagtttcctcacgtgatagaaatttacgactttccccaggagtttcacacagaagacctccttcgcgtgttttgctcataccagaaaaaaggcttcgatatcaaatgggtggacgacacacatgcactcggcgtgttcagctcccccatcactgcgagagatgctttgggtattaaacacaccatggtaaaaatcagacccctctcgcaagctacaagggctgccaaagctaaagctcgggcatatgctgagttcctccagccggcaaaagaacgaccagaaacaagtgctgcgttggcacgccggctggttatctctgctctcggggtaaggtctaaacagtccaaaaccgagcgcgaggcggagctgaagaagttgcaggaagctcgtgagcgtaagagactcgaagcaaaacaacgggaagacatttgggaaggtcgggaccagagcactgtttag

SEQ ID NO: 91037 - DNA, 555 bp, Artificial Sequence
  derived and/or modified sequence
atgctgtctggaaataccaagagccgcgagtctatccaggagccgagatcagattactataatcatgaagtgcctgatatcgacttgagcgattgtgagttccctcacgtgattgaaatctatgacttccctcaggagttccatacagaggatttgcttagagtgttctgcagctatcagaaaaaaggttttgatattaaatgggtcgacgatacccacgccttgggcgttttcagctccccgataactgcgagggatgcattaggaatcaagcacacaatggttaagattcgcccactgtctcaggcaacacgagccgctaaagcaaaagccagagcctacgcggagtttttgcaaccagcaaaggagcggcctgagaccagcgccgctctggcacgcagactggttatttccgccttgggagtaagatctaaacagtccaagacagaaagggaggccgaacttaagaaactccaggaggctcgggagcgcaagagactggaagctaaacagagggaagatatttgggagggcagggatcagtccacggtgtag

SEQ ID NO: 91038 - DNA, 558 bp, Artificial Sequence
  derived and/or modified sequence
cagaagctaagcggcaacacaaaatctagggagagtattcaggaacctcgcagcgactactataatcacgaggtccccgacattgatctgtccgactgcgagtttcctcacgtgatagagatctatgatttcccccaagagttccataccgaggacctgctccgcgtcttttgttcttatcagaaaaagggctttgatataaaatgggtcgacgatactcacgctctgggtgtattctcaagtcctatcacggcacgggatgctctggggattaagcatacaatggtcaagattcgtccactcagccaggccacacgcgctgccaaggccaaagcaagggcgtacgccgaatttcttcagcccgcaaaagaacggccagagaccagtgccgcactggccaggaggttggtgatctcagccctaggcgtcagatccaaacagagcaagacagaacgggaagccgagttgaagaagctccaggaggccagggagagaaagagactggaggccaagcagcgagaggacatttgggaaggcagggaccaatccaccgtgtag

SEQ ID NO: 91039 - protein, 736 aa, Artificial Sequence
  derived and/or modified sequence
MTSTGKDGGAQHAQYVGPYRLEKTLGKGQTGLVKLGVHCVTCQKVAIKIVNREKLSESVLMKVEREIAILKLIEHPHVLKLHDVYENKKYLYLVLEHVSGGELFDYLVKKGRLTPKEARKFFRQIISALDFCHSHSICHRDLKPENLLLDEKNNIRIADFGMASLQVGDSLLETSCGSPHYACPEVIRGEKYDGRKADVWSCGVILFALLVGALPFDDDNLRQLLEKVKRGVFHMPHFIPPDCQSLLRGMIEVDAARRLTLEHIQKHIWYIGGKNEPEPEQPIPRKVQIRSLPSLEDIDPDVLDSMHSLGCFRDRNKLLQDLLSEEENQEKMIYFLLLDRKERYPSQEDEDLPPRNEIDPPRKRVDSPMLNRHGKRRPERKSMEVLSVTDGGSPVPARRAIEMAQHGQRSRSISGASSGLSTSPLSSPRVTPHPSPRGSPLPTPKGTPVHTPKESPAGTPNPTPPSSPSVGGVPWRARLNSIKNSFLGSPRFHRRKLQVPTPEEMSNLTPESSPELAKKSWFGNFISLEKEEQIFVVIKDKPLSSIKADIVHAFLSIPSLSHSVISQTSFRAEYKATGGPAVFQKPVKFQVDITYTEGGEAQKENGIYSVTFTLLSGPSRRFKRVVETIQAQLLSTHDPPAAQHLSDTTNCMEMMTGRLSKCGSPLSNFFDVIKQLFSDEKNGQAAQAPSTPAKRSAHGPLGDSAAAGPGPGGDAEYPTGKDTAKMGPPTARREQP

SEQ ID NO: 91040 - DNA, 2211 bp, Artificial Sequence
  derived and/or modified sequence
atgaccagcaccggcaaggacggcggcgcccagcacgcccagtacgtgggcccctacagactggagaagaccctgggcaagggccagaccggcctggtgaagctgggcgtgcactgcgtgacctgccagaaggtggccatcaagatcgtgaacagagagaagctgagcgagagcgtgctgatgaaggtggagagagagatcgccatcctgaagctgatcgagcacccccacgtgctgaagctgcacgacgtgtacgagaacaagaagtacctgtacctggtgctggagcacgtgagcggcggcgagctgttcgactacctggtgaagaagggcagactgacccccaaggaggccagaaagttcttcagacagatcatcagcgccctggacttctgccacagccacagcatctgccacagagacctgaagcccgagaacctgctgctggacgagaagaacaacatcagaatcgccgacttcggcatggccagcctgcaggtgggcgacagcctgctggagaccagctgcggcagcccccactacgcctgccccgaggtgatcagaggcgagaagtacgacggcagaaaggccgacgtgtggagctgcggcgtgatcctgttcgccctgctggtgggcgccctgcccttcgacgacgacaacctgagacagctgctggagaaggtgaagagaggcgtgttccacatgccccacttcatcccccccgactgccagagcctgctgagaggcatgatcgaggtggacgccgccagaagactgaccctggagcacatccagaagcacatctggtacatcggcggcaagaacgagcccgagcccgagcagcccatccccagaaaggtgcagatcagaagcctgcccagcctggaggacatcgaccccgacgtgctggacagcatgcacagcctgggctgcttcagagacagaaacaagctgctgcaggacctgctgagcgaggaggagaaccaggagaagatgatctacttcctgctgctggacagaaaggagagataccccagccaggaggacgaggacctgccccccagaaacgagatcgacccccccagaaagagagtggacagccccatgctgaacagacacggcaagagaagacccgagagaaagagcatggaggtgctgagcgtgaccgacggcggcagccccgtgcccgccagaagagccatcgagatggcccagcacggccagagaagcagaagcatcagcggcgccagcagcggcctgagcaccagccccctgagcagccccagagtgaccccccaccccagccccagaggcagccccctgcccacccccaagggcacccccgtgcacacccccaaggagagccccgccggcacccccaaccccaccccccccagcagccccagcgtgggcggcgtgccctggagagccagactgaacagcatcaagaacagcttcctgggcagccccagattccacagaagaaagctgcaggtgcccacccccgaggagatgagcaacctgacccccgagagcagccccgagctggccaagaagagctggttcggcaacttcatcagcctggagaaggaggagcagatcttcgtggtgatcaaggacaagcccctgagcagcatcaaggccgacatcgtgcacgccttcctgagcatccccagcctgagccacagcgtgatcagccagaccagcttcagagccgagtacaaggccaccggcggccccgccgtgttccagaagcccgtgaagttccaggtggacatcacctacaccgagggcggcgaggcccagaaggagaacggcatctacagcgtgaccttcaccctgctgagcggccccagcagaagattcaagagagtggtggagaccatccaggcccagctgctgagcacccacgacccccccgccgcccagcacctgagcgacaccaccaactgcatggagatgatgaccggcagactgagcaagtgcggcagccccctgagcaacttcttcgacgtgatcaagcagctgttcagcgacgagaagaacggccaggccgcccaggcccccagcacccccgccaagagaagcgcccacggccccctgggcgacagcgccgccgccggccccggccccggcggcgacgccgagtaccccaccggcaaggacaccgccaagatgggcccccccaccgccagaagagagcagccctag

SEQ ID NO: 91041 - DNA, 2211 bp, Artificial Sequence
  derived and/or modified sequence
atgacctcaacaggcaaggatggcggggcgcaacacgctcagtacgttggaccttatcgactcgagaagacccttggaaaggggcagacaggtctcgtcaaattaggagtgcattgtgtcacctgtcagaaggtcgcaattaagatcgtgaatagggaaaaactcagcgagagtgtcctaatgaaagtggaaagagagatagccatattaaagctgattgagcacccccacgttctgaaacttcatgacgtgtacgagaataaaaagtacctgtacctggttctggaacacgtcagcggaggggagctctttgactacctagtgaaaaagggccggctaactcctaaggaagcacgtaaattcttccgccagattatctccgccttggatttctgccattcccattcaatctgccatcgcgaccttaaacctgaaaacctgttgctcgacgagaagaataacattcgaatagctgacttcggcatggcctctcttcaggtgggagattctctcctggagacaagttgcggatctccgcattatgcctgcccggaagtgatcaggggggagaaatatgacggacggaaggccgatgtttggtcttgcggggttattctgttcgccctcctcgtcggggcattgccttttgacgatgacaatttgcgccagttactggagaaggtaaaacggggggtgttccacatgccccactttatcccccccgattgtcagtccctcttaagaggaatgattgaagtcgatgcggccagaaggttgacactagagcacattcagaaacacatctggtacattggcggaaagaacgagcctgaacctgaacagcctatacccaggaaggtccaaatacggagcctgccctctctggaggatatagacccagacgtgctcgactctatgcatagtctcggctgcttcagagatcgaaacaagctactgcaggacctgttgtcagaagaagagaaccaggagaaaatgatttatttcctgctgctggacagaaaagagcgttatccaagccaagaagacgaggatttgccccccaggaatgaaatagaccccccacggaaaagggtcgattctcccatgctcaacagacatgggaagaggcgcccagaaaggaagagcatggaggttctgtcagtgaccgacggaggcagccctgtacccgctcgcagggcaatagaaatggcacagcatggccagagaagccggagcatctcaggggcttccagcggactgagcacctctccattgagctctcccagagtcacccctcatccctcaccccggggcagccctttgcctacccctaaaggaacccccgtccacacaccaaaagaatctccagccgggacacctaatcccactccaccatctagtccgagcgttggaggagttccttggagagcacgcctgaatagtattaagaattccttcctcggaagccctcggtttcaccgccgcaaactgcaggtccccacccccgaggagatgagcaacctcacccctgagagctctccagagttagcaaaaaaatcatggttcgggaattttatcagtctcgagaaagaggagcaaatttttgtggtgatcaaagataaaccattgagctccatcaaggccgatatagtccatgccttcctctctatcccaagcctttcgcactctgttatttcccagactagtttcagagccgagtacaaggctactgggggacccgctgttttccagaaaccagttaagttccaggtcgatattacttataccgagggcggagaagcccagaaagaaaatggaatctacagtgtgacctttacccttctcagtgggccctctcgtcgcttcaaaagggtagtggagaccatacaggcgcagctcctcagcacccatgatcctcccgccgcccagcacctgtctgatacaactaactgcatggaaatgatgacggggaggctgtctaagtgcggttcaccgctgagtaatttctttgatgtcattaaacagctattcagcgatgagaaaaatggccaagcggcacaggcaccttctacgcccgcgaagcggtctgcacatgggcccctcggagacagcgcagccgctggtccagggccggggggcgacgcagaatacccgactgggaaagatacagcgaagatgggcccacccactgctaggagggagcagccgtag

SEQ ID NO: 91042 - DNA, 2211 bp, Artificial Sequence
  derived and/or modified sequence
atgaccagcacaggcaaggatggaggagcccagcacgcccagtatgtgggcccctaccgcctggagaagaccctgggcaagggccagacaggcctggtgaagctgggcgtgcactgtgtgacctgccagaaggtggccatcaagatcgtgaaccgggagaagctgtctgagagcgtgctgatgaaggtggagcgggagatcgccatcctgaagctgattgagcacccccacgtgctgaagctgcatgatgtgtatgagaacaagaagtacctgtacctggtgctggagcacgtgtctggaggagagctgtttgactacctggtgaagaagggccgcctgacccccaaggaggccaggaagttcttccggcagatcatcagcgccctggacttctgccacagccacagcatctgccaccgggacctgaagccagagaacctgctgctggatgagaagaacaacatcagaattgctgactttggcatggccagcctgcaggtgggggacagcctgctggagaccagctgtggcagcccccactacgcctgcccagaggtgatccggggggagaagtatgatggcaggaaggcagatgtgtggagctgtggggtcatcctgtttgccctgctggtgggcgccctgccctttgatgatgacaacctgcggcagctgctggagaaggtgaagaggggcgtcttccacatgccccacttcatccccccagactgccagagcctgctgcggggcatgattgaggtggatgctgcccggcggctgaccctggagcacatccagaagcacatctggtacatcggcggcaagaatgaacctgagcctgagcagcccatccccaggaaggtgcagatccgcagcctgcccagcctggaggacatcgaccctgatgtgctggacagcatgcacagcctgggctgcttccgggacaggaacaagctgctgcaggacctgctgtctgaggaggagaaccaggagaagatgatctacttcctgctgctggacaggaaggagcgctaccccagccaggaggatgaggacctgcccccaagaaatgaaattgacccccccaggaagagggtggacagccccatgctgaacagacatggcaagaggaggcctgagaggaagtccatggaggtgctgtctgtgacagatggcggcagccctgtgcctgcccggcgggccatcgagatggcccagcacggccagaggagccgcagcatcagcggggccagcagcggcctgagcaccagccccctgagcagcccccgggtgaccccccaccccagcccccggggcagccccctgcccacccccaagggcacccctgtgcacacccccaaggagagccctgctggcacccccaaccccaccccacccagcagccccagcgtgggcggcgtgccctggagggcccggctgaacagcatcaagaacagcttcctgggcagcccccgcttccacaggaggaagctgcaggtgcccaccccagaggagatgagcaacctgaccccagagagcagccctgagctggccaagaagtcctggtttggaaacttcatcagcctggagaaggaggagcagatctttgtggtgatcaaggacaagcccctgagcagcatcaaggctgacatcgtgcacgccttcctgagcatccccagcctgagccacagcgtcatcagccagaccagcttccgggcagagtacaaggccactggaggccctgctgtgttccagaagcctgtgaagttccaggtggacatcacctacacagagggcggggaggcccagaaggaaaatggcatctacagcgtgaccttcaccctgctgagcggccccagccgccgcttcaagagggtggtggagaccatccaggcccagctgctgagcacccatgaccccccagctgcccagcacctgagtgacaccaccaactgcatggagatgatgacaggccgcctgagcaaatgtggcagccccctgagcaacttctttgatgtgatcaagcagctgttcagtgatgagaagaatggccaggccgcccaggcccccagcaccccagccaagaggtctgcccacggccccctgggggacagcgctgctgctggccctggccctggaggagatgctgagtaccccaccgggaaggacacagccaagatgggccccccaacagcccggcgggagcagccctag

SEQ ID NO: 91043 - DNA, 2211 bp, Artificial Sequence
  derived and/or modified sequence
atgaccagcaccggcaaggacggcggcgcccagcacgcccagtacgtgggtccctacaggcttgagaaaacccttgggaagggacagaccggactggtcaagctgggcgtccactgcgtgacttgccaaaaggtggccattaaaatagtgaaccgggaaaaacttagcgagtcggtacttatgaaagtcgagcgggagatagccattctcaagctgattgagcacccacacgttttgaagctccacgacgtctatgagaataaaaagtacctgtaccttgtgctggagcacgtctccggtggggagcttttcgactatctcgtgaagaagggccggctaacacctaaggaggccaggaagttctttaggcagattatctcggccttggatttctgccactcccatagcatctgccatcgcgacttgaagcctgagaacttgctgcttgacgaaaaaaataacatccgaatagccgattttgggatggcctcactgcaggtgggcgacagtctgttggaaacatcctgcgggtctccgcattacgcttgtccagaagtgataagaggagagaagtacgacgggcgaaaagcagatgtgtggagttgcggagtaattctgttcgcacttctggttggcgctcttccttttgatgatgacaatctgcgccagctgctcgagaaggtcaaacggggagtatttcacatgccgcacttcatcccccccgactgccagagcctgctacgaggcatgatcgaggtagatgccgcccgacggctgacacttgagcacattcagaagcatatttggtatataggaggaaagaacgagcctgagccagaacagcctatcccccggaaagtccagattagatctctccccagccttgaagacatcgaccccgacgtgctggactcaatgcactctctgggatgctttcgtgatcgaaataaattgctgcaagacctactgagtgaagaggagaaccaagagaaaatgatatattttctgcttttggaccgaaaagaacgctatcctagccaggaagacgaggatcttccgccgagaaacgaaattgacccaccacgtaagcgagttgattctccgatgctgaatcgccatggaaagcgtcgcccagagcggaagtccatggaagttctttctgtgacggatggaggatcacctgtccccgcgaggagagctatcgaaatggcgcagcatggacagcgctctcgtagcatttctggagccagcagcgggctgtccacgagcccactgagcagtccccgggtaaccccccacccgagcccccgcggtagccctctgccgactcctaagggaacccctgtgcacacgccgaaagagtctccagccggtacccccaaccccaccccgcccagctcacctagtgtagggggggtcccgtggcgggcccggttaaactcgattaagaacagtttcttgggatctccccgattccacagaagaaaactgcaggttcctacccccgaagaaatgagtaatcttaccccagagagttctccagagctcgccaagaaatcttggttcggcaatttcatttctcttgagaaggaagaacagattttcgtggtgataaaggacaagccactctccagtataaaggccgacattgtgcacgcttttctctccatccctagcctctcccatagcgtaatttcccagacttccttcagagccgagtacaaggctaccggtggcccagccgtattccagaaaccagtgaagtttcaagtggatattacctacacggaaggaggcgaggcgcagaaagagaacggcatctacagtgtgacattcacccttctgtctgggccctctcggcgtttcaaacgagtggttgaaaccatccaggctcagctcctttctactcacgatccacctgctgcgcagcatctaagtgataccacaaactgtatggagatgatgactggccgactgtccaaatgcggatcacccctttccaacttcttcgacgtgatcaaacagctgttttccgatgagaaaaacggccaggctgctcaggccccaagtacacctgcgaagagatctgcgcacgggcccctgggagacagcgccgcggctggacctggacctgggggtgatgccgagtatcctaccgggaaggatactgctaagatggggccacccacagctagaagagagcagccatag

SEQ ID NO: 91044 - DNA, 2211 bp, Artificial Sequence
  derived and/or modified sequence
atgaccagcacgggcaaagacggcggtgcacaacatgcccagtacgtcggaccatacagactggagaagacattggggaagggccagactgggctggtcaaacttggagtgcattgcgttacctgccagaaggtagccattaagatcgttaatcgcgagaagctgtccgagtctgttcttatgaaggtggaacgcgaaattgcaatcctgaagttgattgagcacccacacgtgctaaagcttcacgacgtttatgaaaataagaagtatctatatctggtgcttgaacatgtatccgggggtgaactttttgattacttagtgaagaagggaagactgactcctaaggaagctaggaagttctttcgccaaataatctctgccctggatttctgtcattcccattctatttgtcacagggatctcaagcctgaaaacctgctgctcgacgaaaaaaacaatatccggatcgctgactttggaatggctagcctacaagtgggtgactctctccttgagaccagttgcggtagccctcactacgcctgtcccgaagttatccgtggcgagaagtatgacggccgaaaagctgatgtctggagctgcggcgtgatcctattcgccttgctagtgggagctctgccattcgacgatgacaatttgcggcaactgctcgaaaaggttaaacggggtgttttccatatgccacatttcatccctcccgactgccagtccttattaagaggcatgatcgaagtcgacgctgcaaggagactgacactggagcatattcagaaacacatctggtatatcgggggtaaaaacgagccggaacccgagcaacccatccctcgaaaggtgcagattaggtcattaccaagtctggaggacatagatccggacgtgttggattctatgcactctctgggttgctttcgggatagaaataaacttctgcaagacctccttagcgaggaggagaaccaggagaaaatgatatatttcctccttctcgaccgcaaggaacgatatccctcccaggaagacgaagacctgccccctcggaatgaaatcgacccgccacggaagcgtgtagactcccctatgctgaaccgtcatggcaagcggcgacccgaacgtaagtcaatggaagtgctttccgttacagatgggggaagccccgtacctgcccgtcgcgcaatcgagatggcgcagcacggacagcgttcccggtccatctctggagcctcaagtggactgtcaacaagtccactgagtagcccgagagttactccacacccctctccccgaggcagcccgctgccaactccaaagggtacgccagtgcacactcctaaagaaagtccagccggtacacctaacccgaccccaccttcttcaccctctgtggggggagtgccctggcgtgcgaggctgaattcgatcaaaaatagtttcctgggaagccccaggttccaccggagaaagttacaggtcccaacacccgaggaaatgtccaatctgacccctgagtcttcccccgagctggctaagaagtcatggtttggtaatttcatcagtctcgagaaggaggagcagatctttgtcgtcattaaagacaaaccgctgagttccatcaaggccgacattgtgcacgcatttctgagcatccccagcctttcccacagcgttataagccagacttcattcagagcggagtacaaagccactggaggccctgccgttttccagaaaccggtgaagttccaggtggatataacatacacggagggtggagaagcacagaaagaaaatggaatatactccgttacctttaccctcctgtccgggccatcccggagattcaagagggttgtggagacaatccaggcccagctgctaagtacccacgacccccctgctgcccagcatctgtccgatacaacaaattgcatggaaatgatgaccgggaggcttagcaagtgtggaagcccgctttctaattttttcgacgtgattaaacagctgtttagtgatgaaaaaaacggccaggcggctcaagcaccaagtacccctgctaagaggtccgcgcatgggccactgggcgacagtgcggcagcaggtccaggccctggcggagatgctgagtatcccacagggaaggatactgcaaaaatgggaccacctacagccagacgggaacaaccatag

SEQ ID NO: 91045 - DNA, 3586 bp, Artificial Sequence
  derived and/or modified sequence
tgttcggctcagctgcacggctcggctcggctcggctcggctcggctgcgcggccgctgacgggcgtgcgctgggggcgcggggcgcggggcgcgggcctcggcggcggcggcggcggcggcggcggaagccaggtgcccccgcccgccctgtcctctcgacgaggcggaggcgtcgccgcgggccaggcctcggactgccgcgtcggagtggacgcggggggcggcggcgcgggcggacgcgggcggcgcgaagcagcggggcccgcgggggcgccccggccgggtcggcgcggacggcactcggcggacgcgggcggacgctgggcggcccctccctgcccgcgcgcccgggcgcccctggccggcgccgggccccagagcgatgacatcgacggggaaggacggcggcgcgcagcacgcgcagtatgttgggccctaccggctggagaagacgctgggcaaggggcagacaggtctggtgaagctgggggttcactgcgtcacctgccagaaggtggccatcaagatcgtcaaccgtgagaagctcagcgagtcggtgctgatgaaggtggagcgggagatcgcgatcctgaagctcattgagcacccccacgtcctaaagctgcacgacgtttatgaaaacaaaaaatatttgtacctggtgctagaacacgtgtcaggtggtgagctcttcgactacctggtgaagaaggggaggctgacgcctaaggaggctcggaagttcttccggcagatcatctctgcgctggacttctgccacagccactccatatgccacagggatctgaaacctgaaaacctcctgctggacgagaagaacaacatccgcatcgcagactttggcatggcgtccctgcaggttggcgacagcctgttggagaccagctgtgggtccccccactacgcctgccccgaggtgatccggggggagaagtatgacggccggaaggcggacgtgtggagctgcggcgtcatcctgttcgccttgctggtgggggctctgcccttcgacgatgacaacttgcgacagctgctggagaaggtgaagcggggcgtgttccacatgccgcactttatcccgcccgactgccagagtctgctacggggcatgatcgaggtggacgccgcacgccgcctcacgctagagcacattcagaaacacatatggtatatagggggcaagaatgagcccgaaccagagcagcccattcctcgcaaggtgcagatccgctcgctgcccagcctggaggacatcgaccccgacgtgctggacagcatgcactcactgggctgcttccgagaccgcaacaagctgctgcaggacctgctgtccgaggaggagaaccaggagaagatgatttacttcctcctcctggaccggaaagaaaggtacccgagccaggaggatgaggacctgcccccccggaacgagatagaccctccccggaagcgtgtggactccccgatgctgaaccggcacggcaagcggcggccagaacgcaaatccatggaggtgctcagcgtgacggacggcggctccccggtgcctgcgcggcgggccattgagatggcccagcacggccagaggtctcggtccatcagcggtgcctcctcaggcctttccaccagcccactcagcagcccccgggtgacccctcacccctcaccaaggggcagtcccctccccacccccaaggggacacctgtccacacgccaaaggagagcccggctggcacgcccaaccccacgcccccgtccagccccagcgtcggaggggtgccctggagggcgcggctcaactccatcaagaacagctttctgggctcaccccgcttccaccgccggaaactgcaagttccgacgccggaggagatgtccaacctgacaccagagtcgtccccagagctggcgaagaagtcctggtttgggaacttcatcagcctggagaaggaggagcagatcttcgtggtcatcaaagacaaacctctgagctccatcaaggctgacatcgtgcacgccttcctgtcgattcccagtctcagccacagcgtcatctcccaaacgagcttccgggccgagtacaaggccacgggggggccagccgtgttccagaagccggtcaagttccaggttgatatcacctacacggagggtggggaggcgcagaaggagaacggcatctactccgtcaccttcaccctgctctcaggccccagccgtcgcttcaagagggtggtggagaccatccaggcccagctgctgagcacacacgacccgcctgcggcccagcacttgtcagacaccactaactgtatggaaatgatgacggggcggctttccaaatgtggcagcccattgagtaacttctttgacgtaattaaacaacttttttcagacgagaagaacgggcaggcggcccaggcccccagcacgcccgccaagcggagtgcccacggcccactcggtgactccgcggccgctggccctggccccggaggggacgccgagtacccaacgggcaaggacacggccaagatgggcccgcccaccgcccgccgcgagcagccttagacacactagcccccccccccagcacagcactgacagcggctgcctcgccgcccgccgcccgccctgccccgagtggacccgcggccgcgccgcccgtccgtccagactgttctcagagcctgggaggaaaggaaaggggcgttggggccggcctgtgggctgcgccacccgcgcccgctctcttttctctctgtctctgcctctgcctgtctctgacagcatcgcttgtttccactctgataccaggaattatcccgaaaagttaacatgtcacctccacgaggccatcctctgtgaccgaaggcagctgctgcggacccgccctccctccgctcctgctgttgctgccgggcagtgaggcccagcccagcgccccgtccaccccgcggcagctcctcgcctcagctccgcacggcccgtgggaggaaggccaggctcgggggagcctcctccagcccggccgacccggactcccggtcacctgacccctcagcaagaacagcctgcctggtggccttctggggccaggacccctggtgggcaacgtagccacaggaacaggccccgtccaccgcctccacgccgcacctggaggcctcctcgcaggcccgtgccccgcctccctggctgcgccgcctccgtgtagtcttggcctcctcaggctgcctcccgtcctctcgtctcacccgcgcctcccttgcctcatctggggcggctgtgggctctggcgctcctctctggctgaggtggaaacagagacaccctgcggcaccagagccttcccagcaggccaggccgctgggctgggatcagtgttatttatttgccgttttaatttatggattctccgcacctctgttcagggaagggcggcggccacatcccctgccgtctgcgtgtctcaggcagtgggggggctggggccagggcgccctctgaggacagagctggtggggcgcgggggggctggcgagctactgtaaactttaaa

SEQ ID NO: 91046 - protein, 674 aa, Artificial Sequence
  derived and/or modified sequence
MTSTGKDGGAQHAQYVGPYRLEKTLGKGQTGLVKLGVHCVTCQKVAIKIVNREKLSESVLMKVEREIAILKLIEHPHVLKLHDVYENKKYLYLVLEHVSGGELFDYLVKKGRLTPKEARKFFRQIISALDFCHSHSICHRDLKPENLLLDEKNNIRIADFGMASLQVGDSLLETSCGSPHYACPEVIRGEKYDGRKADVWSCGVILFALLVGALPFDDDNLRQLLEKVKRGVFHMPHFIPPDCQSLLRGMIEVDAARRLTLEHIQKHIWYIGGKNEPEPEQPIPRKVQIRSLPSLEDIDPDVLDSMHSLGCFRDRNKLLQDLLSEEENQEKMIYFLLLDRKERYPSQEDEDLPPRNEIDPPRKRVDSPMLNRHGKRRPERKSMEVLSVTDGGSPVPARRAIEMAQHGQRSRSISGASSGLSTSPLSSPRVTPHPSPRGSPLPTPKGTPVHTPKESPAGTPNPTPPSSPSVGGVPWRARLNSIKNSFLGSPRFHRRKLQVPTPEEMSNLTPESSPELAKKSWFGNFISLEKEEQIFVVIKDKPLSSIKADIVHAFLSIPSLSHSVISQTSFRAEYKATGGPAVFQKPVKFQVDITYTEGGEAQKENGIYSVTFTLLSGPSRRFKRVVETIQAQLLSTHDPPAAQHLSEPPPPAPGLSWGAGLKGQKVATSYESSL

SEQ ID NO: 91047 - protein, 369 aa, Artificial Sequence
  derived and/or modified sequence
MHSLGCFRDRNKLLQDLLSEEENQEKMIYFLLLDRKERYPSQEDEDLPPRNEIDPPRKRVDSPMLNRHGKRRPERKSMEVLSVTDGGSPVPARRAIEMAQHGQRSRSISGASSGLSTSPLSSPRVTPHPSPRGSPLPTPKGTPVHTPKESPAGTPNPTPPSSPSVGGVPWRARLNSIKNSFLGSPRFHRRKLQVPTPEEMSNLTPESSPELAKKSWFGNFISLEKEEQIFVVIKDKPLSSIKADIVHAFLSIPSLSHSVISQTSFRAEYKATGGPAVFQKPVKFQVDITYTEGGEAQKENGIYSVTFTLLSGPSRRFKRVVETIQAQLLSTHDPPAAQHLSEPPPPAPGLSWGAGLKGQKVATSYESSL

SEQ ID NO: 91048 - DNA, 2091 bp, Artificial Sequence
  derived and/or modified sequence
atgaccagcaccggcaaggacggcggcgcccagcacgcccagtacgtgggcccctacagactggagaagaccctgggcaagggccagaccggcctggtgaagctgggcgtgcactgcgtgacctgccagaaggtggccatcaagatcgtgaacagagagaagctgagcgagagcgtgctgatgaaggtggagagagagatcgccatcctgaagctgatcgagcacccccacgtgctgaagctgcacgacgtgtacgagaacaagaagtacctgtacctggtgctggagcacgtgagcggcggcgagctgttcgactacctggtgaagaagggcagactgacccccaaggaggccagaaagttcttcagacagatcatcagcgccctggacttctgccacagccacagcatctgccacagagacctgaagcccgagaacctgctgctggacgagaagaacaacatcagaatcgccgacttcggcatggccagcctgcaggtgggcgacagcctgctggagaccagctgcggcagcccccactacgcctgccccgaggtgatcagaggcgagaagtacgacggcagaaaggccgacgtgtggagctgcggcgtgatcctgttcgccctgctggtgggcgccctgcccttcgacgacgacaacctgagacagctgctggagaaggtgaagagaggcgtgttccacatgccccacttcatcccccccgactgccagagcctgctgagaggcatgatcgaggtggacgccgccagaagactgaccctggagcacatccagaagcacatctggtacatcggcggcaagaacgagcccgagcccgagcagcccatccccagaaaggtgcagatcagaagcctgcccagcctggaggacatcgaccccgacgtgctggacagcatgcacagcctgggctgcttcagagacagaaacaagctgctgcaggacctgctgagcgaggaggagaaccaggagaagatgatctacttcctgctgctggacagaaaggagagataccccagccaggaggacgaggacctgccccccagaaacgagatcgacccccccagaaagagagtggacagccccatgctgaacagacacggcaagagaagacccgagagaaagagcatggaggtgctgagcgtgaccgacggcggcagccccgtgcccgccagaagagccatcgagatggcccagcacggccagagcaaggccatgttcagcaagagcctggacatcgccgaggcccacccccagttcagcaaggaggacagaagcagaagcatcagcggcgccagcagcggcctgagcaccagccccctgagcagccccagagtgaccccccaccccagccccagaggcagccccctgcccacccccaagggcacccccgtgcacacccccaaggagagccccgccggcacccccaaccccaccccccccagcagccccagcgtgggcggcgtgccctggagagccagactgaacagcatcaagaacagcttcctgggcagccccagattccacagaagaaagctgcaggtgcccacccccgaggagatgagcaacctgacccccgagagcagccccgagctggccaagaagagctggttcggcaacttcatcagcctggagaaggaggagcagatcttcgtggtgatcaaggacaagcccctgagcagcatcaaggccgacatcgtgcacgccttcctgagcatccccagcctgagccacagcgtgatcagccagaccagcttcagagccgagtacaaggccaccggcggccccgccgtgttccagaagcccgtgaagttccaggtggacatcacctacaccgagggcggcgaggcccagaaggagaacggcatctacagcgtgaccttcaccctgctgagcggccccagcagaagattcaagagagtggtggagaccatccaggcccagctgctgagcacccacgacccccccgccgcccagcacctgagcgagccccccccccccgcccccggcctgagctggggcgccggcctgaagggccagaaggtggccaccagctacgagagcagcctgtag

SEQ ID NO: 91049 - DNA, 2025 bp, Artificial Sequence
  derived and/or modified sequence
atgaccagcaccggcaaggacggcggcgcccagcacgcccagtacgtgggcccctacagactggagaagaccctgggcaagggccagaccggcctggtgaagctgggcgtgcactgcgtgacctgccagaaggtggccatcaagatcgtgaacagagagaagctgagcgagagcgtgctgatgaaggtggagagagagatcgccatcctgaagctgatcgagcacccccacgtgctgaagctgcacgacgtgtacgagaacaagaagtacctgtacctggtgctggagcacgtgagcggcggcgagctgttcgactacctggtgaagaagggcagactgacccccaaggaggccagaaagttcttcagacagatcatcagcgccctggacttctgccacagccacagcatctgccacagagacctgaagcccgagaacctgctgctggacgagaagaacaacatcagaatcgccgacttcggcatggccagcctgcaggtgggcgacagcctgctggagaccagctgcggcagcccccactacgcctgccccgaggtgatcagaggcgagaagtacgacggcagaaaggccgacgtgtggagctgcggcgtgatcctgttcgccctgctggtgggcgccctgcccttcgacgacgacaacctgagacagctgctggagaaggtgaagagaggcgtgttccacatgccccacttcatcccccccgactgccagagcctgctgagaggcatgatcgaggtggacgccgccagaagactgaccctggagcacatccagaagcacatctggtacatcggcggcaagaacgagcccgagcccgagcagcccatccccagaaaggtgcagatcagaagcctgcccagcctggaggacatcgaccccgacgtgctggacagcatgcacagcctgggctgcttcagagacagaaacaagctgctgcaggacctgctgagcgaggaggagaaccaggagaagatgatctacttcctgctgctggacagaaaggagagataccccagccaggaggacgaggacctgccccccagaaacgagatcgacccccccagaaagagagtggacagccccatgctgaacagacacggcaagagaagacccgagagaaagagcatggaggtgctgagcgtgaccgacggcggcagccccgtgcccgccagaagagccatcgagatggcccagcacggccagagaagcagaagcatcagcggcgccagcagcggcctgagcaccagccccctgagcagccccagagtgaccccccaccccagccccagaggcagccccctgcccacccccaagggcacccccgtgcacacccccaaggagagccccgccggcacccccaaccccaccccccccagcagccccagcgtgggcggcgtgccctggagagccagactgaacagcatcaagaacagcttcctgggcagccccagattccacagaagaaagctgcaggtgcccacccccgaggagatgagcaacctgacccccgagagcagccccgagctggccaagaagagctggttcggcaacttcatcagcctggagaaggaggagcagatcttcgtggtgatcaaggacaagcccctgagcagcatcaaggccgacatcgtgcacgccttcctgagcatccccagcctgagccacagcgtgatcagccagaccagcttcagagccgagtacaaggccaccggcggccccgccgtgttccagaagcccgtgaagttccaggtggacatcacctacaccgagggcggcgaggcccagaaggagaacggcatctacagcgtgaccttcaccctgctgagcggccccagcagaagattcaagagagtggtggagaccatccaggcccagctgctgagcacccacgacccccccgccgcccagcacctgagcgagccccccccccccgcccccggcctgagctggggcgccggcctgaagggccagaaggtggccaccagctacgagagcagcctgtag

SEQ ID NO: 91050 - DNA, 2091 bp, Artificial Sequence
  derived and/or modified sequence
atgacatccactggaaaggacggaggagctcagcacgcccagtacgtgggtccctaccggttagaaaagactttgggtaaaggccaaactggtcttgtgaagctgggcgtgcattgtgttacatgccagaaggtcgccatcaagattgtcaacagagaaaagctgtctgaatcggtgctgatgaaagtggaaagggagattgctattcttaagttgatcgaacatcctcacgtcctgaagttgcacgacgtctatgaaaacaagaaatatttgtacctagtgttggagcatgtgtctgggggagaactctttgactacctggtgaagaaggggaggctgaccccaaaagaagcacgaaaattcttcagacaaatcatttccgctctggatttttgccactcccattctatatgtcaccgggacctgaagccagagaacttgctcttagacgagaaaaataacattcgcatagctgattttggaatggcatcattacaggtgggcgactctctgctggagacctcttgcggatcacctcactacgcctgccccgaagtgatccgaggggaaaaatatgacggcagaaaggctgatgtgtggtcatgtggcgtcatcttgttcgcgttgttggtgggagccctcccctttgatgacgacaacttgcggcagctgctcgaaaaggttaagaggggtgtattccacatgcctcatttcataccacccgactgtcaatcactgctgcgcggtatgattgaagtggatgcggcgcgccggctgaccttggaacatattcagaaacatatttggtacatcggcggtaagaatgagcctgagccagaacaaccgatacctaggaaggtccaaatccgctcgctgcctagcctggaagacatcgacccagatgtgctcgactccatgcacagcctggggtgcttcagagatagaaacaagctcctgcaggaccttttgtctgaagaagagaatcaggagaaaatgatatactttctgctgcttgaccgcaaggagcggtacccatcgcaagaagacgaggatctccccccacgcaacgaaattgatccaccacggaaaagggttgactcacctatgctgaacagacacggtaagcgtcgacctgagcggaaatctatggaggtgctgtctgtcaccgatgggggcagtccagtccccgctcgccgcgctatagagatggctcaacatggacagagtaaggccatgttcagcaagagcctggacatcgctgaagcgcatcctcagttcagcaaagaagatcgatctcggtcaatctcaggggccagctctggcttgtccacatctcccttatctagtcctagggtcactcctcatccatcgccacgaggctctccactgccaactcccaagggaacgcccgtgcacacccccaaagaatccccggcgggaacacctaatccaacaccacctagttcgcccagtgttggcggggttccctggagagctaggttgaatagcataaagaattctttcttgggttcaccaaggtttcaccggcgtaaactgcaggtgcctacacccgaagagatgagtaacctgacgccagagagttcccccgagcttgccaaaaagtcttggttcgggaactttatcagcctggaaaaggaagagcagatttttgtagtgatcaaggacaaacctctgtcgagcatcaaagccgatattgtccatgcgtttctgagtatcccgtcgctgagccactccgtgattagccaaactagcttcagagccgaatataaagccaccggtggacccgctgtcttccagaagcccgtgaaattccaggttgacatcacttacaccgagggcggcgaagctcaaaaggaaaatggaatctactccgtgacattcaccctcctgtcaggcccaagtaggcggttcaaaagagttgtcgagacaattcaggcacaattactctctactcatgaccctcccgctgctcagcacttgtccgagcccccccccccagctccaggcttatcctggggagcgggcctaaaaggacagaaggtcgcgacctcctacgagtcctccttatag

SEQ ID NO: 91051 - DNA, 2091 bp, Artificial Sequence
  derived and/or modified sequence
atgacatcgaccggcaaagacggcggtgcccagcacgcgcagtatgtgggtccttaccgactggagaagaccctgggcaaaggacaaaccggcctggtcaagctgggggtgcactgcgtgacttgccagaaagtagctatcaagatagtcaatagagaaaagctgtccgaatccgtccttatgaaggttgaaagagaaattgccattctgaaactcatcgagcaccctcatgttctcaagttacacgacgtctatgagaacaagaagtacctgtacttggtattggagcacgttagcggaggcgagctctttgactacctggtgaagaaagggagacttacccccaaagaggctcggaagttcttccggcaaatcatttcggcccttgacttctgtcactcacactcaatttgccacagagatctgaagccagagaacctcttgctcgacgaaaaaaataacatcagaattgcagattttgggatggcatcattgcaggtgggagatagtcttctggaaacatcctgtggaagcccccattatgcttgtcccgaagtgatcagaggtgagaaatacgacggccggaaggctgatgtgtggagctgtggcgtgattctgtttgcgttgcttgtcggagccctccctttcgatgacgataatctgagacagctcctggagaaggtcaaacggggagtgttccatatgccccacttcattccaccagactgtcaaagtctgctgcggggcatgattgaagtcgacgccgccagacgactgactctggagcacatacagaagcacatctggtatatcggcggtaagaatgagccggagccggagcagcctatcccaaggaaagttcaaatacgttctctgccttctctggaagatatcgacccagacgtgctcgattcaatgcactcactgggctgtttcagggaccgcaataaattgcttcaggacctgttgtcggaggaagaaaaccaggagaaaatgatatacttcctcctgttagatagaaaagaaaggtaccccagtcaggaagacgaggacctgcccccccgaaacgaaatcgaccctccacgcaaacgtgtggactctccaatgctcaataggcacggaaagcgtcgaccagaacggaagtctatggaagtgttgtccgtaacagatggaggctcacccgtgcccgcacgccgcgcaattgaaatggcccaacacggtcaatccaaagcgatgtttagcaagtccttagacatcgctgaggctcacccgcagtttagtaaggaggacagatccagaagcatcagcggagcttccagtggactatcaacaagcccactttcctcaccccgggtcacgccccaccccagccctcgcgggtcccctctgccgacacccaagggcactccagtccacacgcctaaggaaagtcctgccggcactcctaatcccacacctccctcgagtccgtcagtggggggcgtgccttggcgcgctagactgaattcaattaaaaatagctttctaggatcaccacgtttccatcgtagaaaactgcaagtgccgacacctgaggaaatgtccaacctgacacccgagagcagtcctgaactcgctaagaaatcgtggttcgggaactttatctctcttgaaaaagaggagcagatctttgtggtgatcaaggataaacctttatcctcaattaaagctgatatcgtacatgccttcctatcaataccatcactgagccactccgtcatctcccagacgtccttccgcgccgagtacaaggcaacagggggcccagccgtctttcaaaaacctgtaaaatttcaggtggacattacttatacagaaggaggagaggcacagaaggaaaatggcatttatagcgtcactttcaccctactttccggaccctctaggagattcaaacgggttgtggagaccatccaggctcagctgctgagcacccacgacccccctgccgcccagcacctgtccgaaccacctccaccagcccctgggctgagttggggggccggcctaaaaggacagaaagttgccacctcttatgagagcagtctctag

SEQ ID NO: 91052 - DNA, 2025 bp, Artificial Sequence
  derived and/or modified sequence
atgacatcaacaggcaaagatggcggggcacagcacgctcagtatgtgggcccttaccggctagaaaagacattgggaaagggacagacaggactcgtgaaactcggagtgcattgtgttacttgccaaaaggttgccattaagattgttaatcgtgagaagctaagcgaatctgttctgatgaaagttgaaagagagatagctatactcaagttaattgaacacccacacgtcctcaaacttcacgatgtctatgagaacaaaaagtacttgtatttggtcctggaacatgttagcgggggtgaactcttcgattatctggtaaagaaagggcgactcaccccaaaggaagcacggaagtttttccggcaaattatatcggccctggatttttgccactcccactcgatttgtcacagagatttaaaacctgaaaacttattactcgacgagaaaaacaacatccggattgctgatttcggcatggcatcattacaggttggagactccctactagagacctcttgcggaagtccccattatgcttgtcccgaagtcatacgaggggagaaatacgacggcaggaaggcagacgtctggtcttgtggcgtcattctttttgcactactggttggggcgcttcccttcgacgatgataatctccgacaactccttgaaaaggtgaagagaggcgttttccacatgcctcactttatccccccagactgtcagtccctgctccgggggatgattgaggtcgacgccgcccgccgactgaccctggaacacatccagaaacatatctggtacatcgggggtaaaaatgagcctgagcccgaacagccgattcccaggaaggttcagatacgcagcttgccatctttagaggacatagatcctgacgtgctggactcaatgcacagcctgggatgcttcagagaccggaacaagctgctgcaggacttgctgagcgaggaggagaaccaggaaaagatgatatactttctcctgctggatagaaaggaaaggtaccctagccaggaagacgaagatttgcccccccgcaatgagatcgaccccccaagaaagcgggtggatagcccaatgttgaaccgacatgggaaacgtcgaccagagaggaaaagcatggaggtgcttagcgtgacagacggaggatctccggttcctgccagacgggctatcgaaatggcgcagcacgggcagcgtagcagaagcatctcgggcgcatctagtgggctgtccacctcccccctatctagtccgcgtgtgaccccacacccctctccgcgcgggagccccctaccaactcctaaaggtacccctgtccacacacctaaagaatcacccgccggaactcccaaccctaccccaccttcctcccctagtgtcggcggagtgccctggcgcgctagattaaactccataaaaaatagcttcctcggctcccctcgttttcaccgtcgtaagctgcaggtacctacaccagaggaaatgtccaacttgacaccagagtcctcacctgagctcgccaagaaatcttggttcggaaacttcatctccctggagaaggaggagcaaatcttcgtggtgattaaggacaagcccctgtccagcataaaggcggacatagtccacgcattcctgagcataccttccctgagccattcagtgatatctcagacgtctttccgagctgagtacaaagccactgggggtcctgcagtgttccaaaagccagtgaagttccaggttgacataacatacaccgaaggaggagaggctcaaaaggaaaatgggatctactccgtgacattcactctactgtcaggcccaagtcgcaggtttaaaagagtagtcgagacaatacaggctcagcttctgagcacacatgacccccctgcagctcaacatctcagcgaaccacctcctcctgcccccgggctgtcttggggggccggcctcaaggggcagaaggtggctacatcttatgaaagcagcctgtag

SEQ ID NO: 91053 - DNA, 2091 bp, Artificial Sequence
  derived and/or modified sequence
atgaccagcacaggcaaggatggaggagcccagcacgcccagtatgtgggcccctaccgcctggagaagaccctgggcaagggccagacaggcctggtgaagctgggcgtgcactgtgtgacctgccagaaggtggccatcaagatcgtgaaccgggagaagctgtctgagagcgtgctgatgaaggtggagcgggagatcgccatcctgaagctgattgagcacccccacgtgctgaagctgcatgatgtgtatgagaacaagaagtacctgtacctggtgctggagcacgtgtctggaggagagctgtttgactacctggtgaagaagggccgcctgacccccaaggaggccaggaagttcttccggcagatcatcagcgccctggacttctgccacagccacagcatctgccaccgggacctgaagccagagaacctgctgctggatgagaagaacaacatcagaattgctgactttggcatggccagcctgcaggtgggggacagcctgctggagaccagctgtggcagcccccactacgcctgcccagaggtgatccggggggagaagtatgatggcaggaaggcagatgtgtggagctgtggggtcatcctgtttgccctgctggtgggcgccctgccctttgatgatgacaacctgcggcagctgctggagaaggtgaagaggggcgtcttccacatgccccacttcatccccccagactgccagagcctgctgcggggcatgattgaggtggatgctgcccggcggctgaccctggagcacatccagaagcacatctggtacatcggcggcaagaatgaacctgagcctgagcagcccatccccaggaaggtgcagatccgcagcctgcccagcctggaggacatcgaccctgatgtgctggacagcatgcacagcctgggctgcttccgggacaggaacaagctgctgcaggacctgctgtctgaggaggagaaccaggagaagatgatctacttcctgctgctggacaggaaggagcgctaccccagccaggaggatgaggacctgcccccaagaaatgaaattgacccccccaggaagagggtggacagccccatgctgaacagacatggcaagaggaggcctgagaggaagtccatggaggtgctgtctgtgacagatggcggcagccctgtgcctgcccggcgggccatcgagatggcccagcacggccagagcaaggccatgttcagcaagagcctggacattgctgaggcccacccccagttcagcaaagaagatagaagccgcagcatcagcggggccagcagcggcctgagcaccagccccctgagcagcccccgggtgaccccccaccccagcccccggggcagccccctgcccacccccaagggcacccctgtgcacacccccaaggagagccctgctggcacccccaaccccaccccacccagcagccccagcgtgggcggcgtgccctggagggcccggctgaacagcatcaagaacagcttcctgggcagcccccgcttccacaggaggaagctgcaggtgcccaccccagaggagatgagcaacctgaccccagagagcagccctgagctggccaagaagtcctggtttggaaacttcatcagcctggagaaggaggagcagatctttgtggtgatcaaggacaagcccctgagcagcatcaaggctgacatcgtgcacgccttcctgagcatccccagcctgagccacagcgtcatcagccagaccagcttccgggcagagtacaaggccactggaggccctgctgtgttccagaagcctgtgaagttccaggtggacatcacctacacagagggcggggaggcccagaaggaaaatggcatctacagcgtgaccttcaccctgctgagcggccccagccgccgcttcaagagggtggtggagaccatccaggcccagctgctgagcacccatgaccccccagctgcccagcacctgtctgagcccccacctccagcccctggcctgtcctggggcgccggcctgaagggccagaaggtggccaccagctatgagagcagcctgtag

SEQ ID NO: 91054 - DNA, 2025 bp, Artificial Sequence
  derived and/or modified sequence
atgaccagcacaggcaaggatggaggagcccagcacgcccagtatgtgggcccctaccgcctggagaagaccctgggcaagggccagacaggcctggtgaagctgggcgtgcactgtgtgacctgccagaaggtggccatcaagatcgtgaaccgggagaagctgtctgagagcgtgctgatgaaggtggagcgggagatcgccatcctgaagctgattgagcacccccacgtgctgaagctgcatgatgtgtatgagaacaagaagtacctgtacctggtgctggagcacgtgtctggaggagagctgtttgactacctggtgaagaagggccgcctgacccccaaggaggccaggaagttcttccggcagatcatcagcgccctggacttctgccacagccacagcatctgccaccgggacctgaagccagagaacctgctgctggatgagaagaacaacatcagaattgctgactttggcatggccagcctgcaggtgggggacagcctgctggagaccagctgtggcagcccccactacgcctgcccagaggtgatccggggggagaagtatgatggcaggaaggcagatgtgtggagctgtggggtcatcctgtttgccctgctggtgggcgccctgccctttgatgatgacaacctgcggcagctgctggagaaggtgaagaggggcgtcttccacatgccccacttcatccccccagactgccagagcctgctgcggggcatgattgaggtggatgctgcccggcggctgaccctggagcacatccagaagcacatctggtacatcggcggcaagaatgaacctgagcctgagcagcccatccccaggaaggtgcagatccgcagcctgcccagcctggaggacatcgaccctgatgtgctggacagcatgcacagcctgggctgcttccgggacaggaacaagctgctgcaggacctgctgtctgaggaggagaaccaggagaagatgatctacttcctgctgctggacaggaaggagcgctaccccagccaggaggatgaggacctgcccccaagaaatgaaattgacccccccaggaagagggtggacagccccatgctgaacagacatggcaagaggaggcctgagaggaagtccatggaggtgctgtctgtgacagatggcggcagccctgtgcctgcccggcgggccatcgagatggcccagcacggccagaggagccgcagcatcagcggggccagcagcggcctgagcaccagccccctgagcagcccccgggtgaccccccaccccagcccccggggcagccccctgcccacccccaagggcacccctgtgcacacccccaaggagagccctgctggcacccccaaccccaccccacccagcagccccagcgtgggcggcgtgccctggagggcccggctgaacagcatcaagaacagcttcctgggcagcccccgcttccacaggaggaagctgcaggtgcccaccccagaggagatgagcaacctgaccccagagagcagccctgagctggccaagaagtcctggtttggaaacttcatcagcctggagaaggaggagcagatctttgtggtgatcaaggacaagcccctgagcagcatcaaggctgacatcgtgcacgccttcctgagcatccccagcctgagccacagcgtcatcagccagaccagcttccgggcagagtacaaggccactggaggccctgctgtgttccagaagcctgtgaagttccaggtggacatcacctacacagagggcggggaggcccagaaggaaaatggcatctacagcgtgaccttcaccctgctgagcggccccagccgccgcttcaagagggtggtggagaccatccaggcccagctgctgagcacccatgaccccccagctgcccagcacctgtctgagcccccacctccagcccctggcctgtcctggggcgccggcctgaagggccagaaggtggccaccagctatgagagcagcctgtag

SEQ ID NO: 91055 - DNA, 2091 bp, Artificial Sequence
  derived and/or modified sequence
atgaccagcaccggcaaggacggcggcgcccagcacgcccagtacgtcggcccataccggctagaaaagacgctgggtaagggccagactggactggtaaagctcggtgtgcattgtgtgacctgccagaaggtcgctattaaaatcgtcaacagggagaagctgtctgagagtgtgttaatgaaggtggagcgtgaaatcgctattctgaagctcattgaacacccccatgtgctaaagttgcatgacgtctacgagaacaaaaaatacctgtatctggtgttagaacatgtgagcggtggggaactgttcgactacttagtcaagaaaggacgtttgacacccaaggaagcccgaaaattttttcgccagattatttctgcacttgacttctgtcattcacacagtatctgtcatcgtgatctgaaaccagaaaatctgttactcgacgaaaaaaataacatacgtatagccgatttcgggatggctagcctgcaggttggagacagcctcctagagaccagctgcggctcaccgcactacgcatgcccagaggttatcaggggggagaagtatgacggacgcaaagctgacgtgtggagttgtggggtgatcctgtttgcccttctggtcggggccctcccttttgacgacgataatttgcgacagttgctggagaaagtgaagcggggcgtcttccacatgcctcattttattccacccgactgtcagtcgttgctgaggggcatgattgaagtggacgcagctcgaagactcaccctcgaacacatccagaagcacatatggtatatcggaggcaagaacgaacccgaacctgaacaaccaatcccaagaaaggtgcaaatccggagcctccccagtctagaagatatcgacccggatgtcttagattctatgcattcactgggctgcttccgcgaccgcaacaaacttctacaggatctgctgtccgaggaagagaaccaggaaaagatgatttattttttgctgctcgacaggaaagagcgatatccttctcaggaggacgaggaccttccccctcggaacgaaatcgacccccctaggaaacgggtcgattctcctatgctcaataggcacggaaagaggaggccagaaagaaagagcatggaggtgttgagtgtaactgatggcggatctccagtgcctgcccgtcgggcaattgagatggcccagcacggacaatcaaaggctatgttctctaaatccctcgacatcgcggaagctcaccctcaattcagtaaggaagatcggtctcggtcaatctccggtgcatcatccgggctgagcacttctcccctctcttctccaagggtgacaccacatccttcccctcgtggatcccccctgccaacacccaaaggaaccccagttcacacacctaaggaatcaccagctggaaccccgaaccctacacctccaagcagcccctcggtggggggtgtgccttggcgggctaggctcaatagcatcaagaacagctttctgggatctccaaggttccacagacggaagttacaggtgcctactcccgaagaaatgagcaatcttacaccggagtcttctcctgagctggccaagaagtcctggtttggaaactttatcagccttgagaaggaggaacagattttcgtagtgattaaagacaagcctctcagctcaattaaggccgatattgtgcatgcatttttgtctataccgtcactgtcacactccgtaatcagccaaacctcattccgggccgagtacaaagccacaggaggcccggcagtctttcagaagccagtgaaatttcaagttgacatcacttacacagagggcggggaggcgcagaaagagaacgggatctactccgttacttttaccctcttaagtggtcctagccggagattcaaacgggtggttgaaacgattcaggctcagttgctttctacacacgatccaccggcagcacagcatcttagcgaaccgcctccccccgcccccgggttaagttggggggcagggctgaagggtcagaaagtggccacctcatacgagagttctttgtag

SEQ ID NO: 91056 - DNA, 2091 bp, Artificial Sequence
  derived and/or modified sequence
atgaccagcaccggcaaggacggcggcgcccagcacgcccagtacgtgggcccctacagattggagaaaacgctcggtaaagggcaaaccggcctggtgaaactaggggttcattgcgtgacctgccagaaagtcgccatcaaaatagtgaatcgcgagaagctgtctgagagcgtgttgatgaaagtagaacgcgagatagcgatcctgaaattaatcgagcatccccatgtgcttaaactgcatgacgtatatgaaaataaaaagtatttatatctggtgctggaacacgttagcgggggcgagcttttcgactatttggtaaaaaaaggaaggctgacacccaaagaagctagaaagttcttccgccagatcatatctgccttggatttctgtcattcacattcgatttgtcacagagatctgaagcctgaaaatctgttactggatgagaagaataacatcaggatcgccgattttggcatggctagcctgcaagtgggagattccttgttagaaacttcgtgtggatcaccccattacgcctgcccagaagttatcaggggagagaagtatgacggaaggaaggcagatgtgtggtcttgcggcgttattctattcgctctcctggtaggggctctgcccttcgatgacgacaacttaagacaactcctcgaaaaggtcaaaaggggtgtgtttcatatgccccacttcatcccaccagactgccagtcactgctgcgaggcatgattgaagttgatgccgctcggcgattaacgctggagcatatccagaagcacatttggtacatagggggtaaaaacgagcctgagccagagcaacctattcccagaaaggtccaaatccggtcactacctagccttgaggacatagaccccgacgtgctggactctatgcatagcctggggtgcttccgggacaggaataagcttctacaggacctgctgtctgaagaagagaatcaagaaaaaatgatatacttcctccttttagaccggaaggaacgatacccatctcaggaggatgaagacctgccacctaggaacgagatagatccaccccgcaagagagtcgacagtcccatgttaaaccgacatggaaaaaggcgccctgaaagaaagagcatggaagttttatccgtcacagatggcggttctcctgtcccagcccggcgtgcaattgaaatggcacaacatggacagtccaaagctatgttcagtaaaagccttgacatcgcagaggcccacccccagttctccaaagaagaccggtcccgcagtatctccggcgcctcctccggattgtcgacaagccccttatccagtccacgagtgacgccccacccttcgccaaggggcagcccactacccacgccaaaaggtaccccagtgcatacacctaaggagagccccgccggcactccgaaccctaccccaccatcatccccatcggtgggcggggtgccttggcgcgccagattaaatagcataaagaatagtttccttgggtcaccccgcttccaccggcgcaagctccaggtacccactcccgaggagatgtctaaccttactcctgaatcgtctcccgagctagccaaaaagagctggtttggtaattttatctctctcgagaaggaagaacaaatcttcgtcgtcattaaggataaacccctgtctagcataaaagccgacattgtgcacgcattccttagcattccctctctcagccactccgtaatctcacagaccagtttcagagctgagtacaaagcaaccggaggccctgccgtctttcagaagccagtcaaattccaggtggatatcacttacacggagggcggggaagcacaaaaggagaatggtatatattcggttacctttactcttctctcagggcctagtaggaggttcaagcgtgtggtggaaacaattcaggcacagttactgtccacgcacgaccccccagccgcacaacatctttccgagccacctccgcctgcacccgggttgagctggggcgcagggttgaaagggcagaaggtggcaacctcttatgagtcaagtctgtag

SEQ ID NO: 91057 - DNA, 2025 bp, Artificial Sequence
  derived and/or modified sequence
atgaccagcaccggcaaggacggcggcgcccagcacgcccagtacgtgggcccttaccgactcgagaagactctgggcaaagggcagaccggtctggtgaaattgggggtgcattgtgtcacctgtcagaaggtggcaatcaagatagtaaatcgcgagaaactctctgagagcgtcctcatgaaggttgagcgggagatcgcaatactgaagctcattgaacacccgcatgtgcttaaattgcacgacgtctatgaaaacaagaagtacctctacctggtgcttgagcatgtgagtggcggagaactgtttgactatctggtcaaaaagggacggctgactccaaaggaggctaggaagtttttcaggcaaattatcagcgccctcgacttttgtcactctcacagtatttgtcaccgggatttaaagccagaaaacttactgctggacgaaaagaataatattagaatagccgattttggcatggcctcactccaggtgggagactctctgttagaaactagctgcgggagtccgcactacgcctgccccgaggtgattagaggcgagaagtatgatggccgcaaggccgacgtatggagctgcggcgtaatattgttcgcgcttttggtgggggcattacccttcgatgatgacaatctccgacagctgctggaaaaagtgaagagaggagtgtttcatatgccacattttatccctcccgattgtcaaagccttctccgcggcatgatcgaagtggacgccgctcgccggcttactctggagcacatccagaagcacatttggtatatcggcgggaagaatgagcctgagcccgaacagccaattccgagaaaggtgcagatccggtcactcccaagtctcgaggatatcgatccggacgtgttagactcgatgcattcattgggttgcttccgcgacagaaataaactgttacaagacctgctaagtgaggaggaaaaccaagaaaaaatgatttatttcctacttctagatcgtaaagaacgatatcctagtcaggaagacgaggacctccctcctcgaaatgaaatagacccaccaaggaagcgggtggactctcctatgctcaatcgccatggcaagcgaaggcctgagcgtaaatctatggaagtcttatcggtgaccgacggaggaagccctgtcccagcgagacgggccattgaaatggcccaacacgggcagcgtagtagaagtattagcggggcatcaagcggactaagtactagtcccctgagctcacccagggtaactcctcacccctcacctaggggctcgccactgccaactcccaaagggaccccagtgcatacgcctaaggagtctcctgccggcactccaaaccctactcccccatcatctccaagcgtcggtggtgtaccatggcgcgcacgcctcaatagcattaaaaatagtttcctgggatccccccggtttcaccgtaggaaattacaggtccccaccccggaggagatgtctaatctgactcccgaatcatctcccgagctggcaaagaagtcttggtttggcaactttattagcctggagaaagaggaacagattttcgttgtaattaaggacaagcctttatcatctatcaaagcagacattgtacacgcctttctttccatcccgtccctgtcgcattccgtcatctcacagacgtcgttcagggccgaatataaagcaacgggaggacccgccgtcttccagaaacccgttaagttccaggtggatataacttatactgagggaggcgaggcccagaaggagaacggtatttattccgtcacatttaccctgctctccgggccctcccggcgcttcaagcgcgttgtggagacaatccaggcccagctgctaagcacccacgatcccccagctgcccagcatctcagtgaaccccctccacctgcacccggattgagctggggcgccggattgaaaggccaaaaagtagctacatcctacgagtccagcttatag

SEQ ID NO: 91058 - DNA, 2091 bp, Artificial Sequence
  derived and/or modified sequence
atgacatcaaccggtaaggatggaggcgcacagcatgctcaatatgtgggcccttaccgcctcgaaaagacactgggcaagggacagaccggcctggtaaaattgggtgtgcactgtgtgacatgtcagaaagtagccatcaagatcgttaaccgggaaaagctgtctgagtccgtccttatgaaggtggaaagggaaattgcgatccttaagctgattgagcacccgcatgtcttgaagctccatgacgtttacgagaacaagaagtatctctacctcgtgctcgagcatgtctctggaggcgagctgttcgactaccttgtgaaaaaaggacgcctgaccccaaaggaagcacgcaaattctttcgtcaaattatctcagcgctggatttttgtcactcccattcaatttgccacagagacttgaaacccgaaaatctactgttggacgagaaaaataatatcagaatcgccgacttcgggatggcctctctgcaggtgggagactccctactggagacttcttgtggatcaccccattacgcctgtccagaggtgatccggggtgaaaagtacgatgggagaaaggctgacgtttggagctgcggcgtcatcctttttgccctccttgtcggcgctctaccgttcgacgatgataatctgcgtcagttactggagaaggtcaaacgaggagtttttcatatgccccacttcattcctccggattgccagtcgctgctgcgagggatgatagaggtggacgccgctaggaggcttacactggagcacatccagaaacacatttggtatatcggtgggaagaacgagcctgagccagaacagcctataccacgcaaggtacagatccgaagtctcccctccctggaagatattgatccggatgtcctggattctatgcacagcctcgggtgctttcgcgaccggaataagctgctccaggacctcttaagcgaggaggagaaccaagaaaagatgatctactttctgctgcttgatagaaaggaaagatatccgtcacaggaggatgaggacctgcctcccaggaacgagatcgaccctcccaggaaacgggtcgactcccccatgctcaacagacacggcaaaagaaggccagagcggaaaagcatggaggtgctgagtgtaaccgacgggggaagccctgtgcctgctcgccgtgccattgaaatggcccagcatggccagtcaaaagctatgttcagtaaatcactggatattgcagaggcacatccgcagttttctaaggaagatagaagcaggagtatttccggtgcctcatctggcctctccacttcaccactgtccagtcctcgtgtcacaccccacccatcccctcgtggcagccccctcccgacaccaaaaggaacgcccgtgcacactcctaaggaaagcccagctggtacgcctaatcccaccccaccctcctccccttccgttggcggtgtcccttggcgggctcgtctaaactccatcaagaattcatttctgggatctccccgatttcacagacgcaaactccaagtgcccaccccggaagagatgtccaatttgacccctgaaagcagccccgagctcgctaagaagtcctggtttggcaactttatatcccttgagaaggaagaacaaatttttgtcgtgatcaaagataaacctttgtccagtatcaaggcggacatcgtccacgcatttctgtcaattccttcgctcagtcactccgtgatctctcagactagcttcagagccgaatacaaggctaccggaggccctgccgtgtttcaaaagccagtgaaatttcaggtcgacattacgtacacagaggggggagaggctcagaaagagaacggaatttactccgtgacctttactcttctgagcggcccttcccgcagatttaagagggtggtagagacaatacaggcccagctgctgagcacacacgatccacccgcagcacagcacttgagtgagcctcccccaccagcccctggactgtcctggggtgccggactgaagggacagaaggtcgctaccagctacgagagttccctctag

SEQ ID NO: 91059 - DNA, 2091 bp, Artificial Sequence
  derived and/or modified sequence
atgacatctactgggaaggacgggggtgcccaacatgcccagtatgtcgggccatatcgactagagaaaacactaggcaaaggtcagacaggcctagtgaaactcggagtgcactgcgtgacctgccaaaaagtcgctataaagattgtcaacagagagaaactcagcgaatccgtactgatgaaggtggaacgggagatcgcaatcctgaagctgattgagcatccacacgttctgaaactgcacgatgtgtacgaaaataaaaagtacttgtatctggttctagagcatgtttctggaggcgagcttttcgattatcttgtgaaaaagggaaggctgaccccaaaagaggcccgaaagtttttccgccagattatctcggcactcgacttctgccactctcatagcatatgtcaccgggacctgaagcccgagaatctgctgctggatgagaaaaacaacattcgcatagcagacttcggcatggcctcgctgcaggttggagatagcctgctagaaacatcatgcgggagtccccattacgcatgccctgaagtcatccgaggagaaaagtacgacggacgtaaggccgatgtctggtcctgtggcgtgatcttgttcgctctcttggtaggagcacttccctttgacgatgacaatctccgtcagctgctagaaaaagttaagagaggcgtctttcacatgccgcattttattccgcctgattgccagagtctgctaaggggtatgattgaagtggacgccgctagacgcctcacactggagcacattcagaaacacatctggtacatcggtggaaagaatgagcccgaacctgagcaaccaatcccgaggaaggtgcaaatccgttcactgccttccttggaggatatcgatcctgacgttttagactcaatgcatagcctcggctgctttcgagaccggaataagctgttgcaggatctccttagcgaggaggagaaccaagaaaagatgatttacttcctactcctggatcgcaaagagagatacccaagccaggaggacgaggacttacccccacgcaatgagatcgacccaccgcgtaagcgggttgacagccctatgctaaacagacatggtaaacgtcggccagagcggaaatcaatggaagtcctgtctgtgactgacgggggatcacctgtacctgcgagacgcgctatcgagatggcccaacacggccagtccaaggccatgttttctaaatcactcgatatagccgaggcgcacccccagtttagtaaggaggaccgaagtcgcagcatttctggcgcttcttccggactgtccacaagtcccctgagttcaccaagggtcacaccacacccgagcccgaggggatcacccctgccaactcctaaaggcacgcctgttcacacacccaaggaaagtcctgcaggcacacccaacccaacgcctccgtcttcacccagcgtaggtggcgtgccctggcgagctcgactgaactccataaaaaacagctttctgggatcacctcgtttccaccggcgaaaactgcaggtcccaacccccgaggaaatgagtaaccttacacctgaaagcagccccgagttagccaagaaaagttggttcggcaacttcatctccctcgagaaagaggagcagatttttgttgtaataaaggacaagcctttgtcatccattaaagccgacattgtgcatgccttcctctcaatcccttcgctaagccattctgttatatcacagacctcttttcgggctgaatataaggcgaccggaggtccagctgtgtttcagaagccagtgaagtttcaggttgatattacatacacagagggaggcgaggctcagaaggagaatggaatatactctgtcacgtttaccttgttaagcggaccatctagaaggtttaagcgtgtcgttgaaaccattcaggcccagctgctgtccactcatgatccccctgctgcgcagcacctctccgagccacccccaccagcaccaggtttatcttggggtgccggtctaaagggtcagaaggtagccacctcttatgaaagttccctgtag

SEQ ID NO: 91060 - DNA, 2025 bp, Artificial Sequence
  derived and/or modified sequence
atgacttctaccggtaaagacggcggagcccagcatgcccagtacgtcgggccatatcggctggagaagacactcgggaaaggtcagactggcctcgtgaagcttggagtgcactgtgtcacgtgtcagaaggtggcaatcaagatagtgaatcgggagaagttaagcgagtcagtgctaatgaaagttgaaagagaaatagccattctaaaactgattgaacacccacacgtcctgaaattgcatgacgtatatgaaaataaaaaatacctctacttggtgctggagcatgtgtctggaggagagcttttcgattacctcgttaagaaaggacgtctcactcccaaggaagctagaaaattcttcagacagattatctccgccttggatttctgtcactcccactccatttgtcatagagatctcaaacccgaaaacctgctgctggatgaaaagaataacattcgcatagctgactttggcatggccagtctgcaagtaggcgatagtttactggagacaagttgtggctccccacattacgcctgccctgaagttatcaggggcgagaaatacgacgggaggaaggcggatgtctggtcctgtggcgtcatactattcgccttgcttgtcggggcactccctttcgacgatgacaatttgcgccaactgctggagaaggtcaagcgcggagttttccacatgccgcattttatacctcctgactgccagtccctactgcggggtatgatagaggttgacgcggctcgtagactcacgctcgagcacatccagaaacacatttggtatattgggggaaaaaacgaacccgagcccgagcaacccatcccacgcaaagtccagatccgttctctgcccagtctggaagacatagatccagacgtgctggatagcatgcattccttgggatgcttcagagacaggaacaagctcctgcaggatttattgagcgaggaggagaaccaggagaagatgatctactttttgctactcgaccggaaagagaggtacccgtctcaagaggatgaggatctacctccacgcaatgagattgacccccctcgaaagcgagtagatagcccgatgcttaacagacacgggaagcggaggcccgaaagaaaatcaatggaggtgttatctgtgaccgatggagggtctcctgtacccgctcgcagagcaatcgaaatggcccagcacggccagcgaagtcgatctatctccggcgcttccagcggacttagcacctccccactgtcttcgccacgcgtaactccacatcctagcccacgcggaagtcctctcccaactcccaagggcactcctgtacacacacccaaggaaagcccagctggtaccccaaatccaactcccccaagtagccccagcgtcgggggagtgccctggagggccaggttaaattcaattaagaattcttttctcggcagcccaaggtttcataggcgaaagctccaggtgccgacgcccgaggaaatgtcaaatctgactcccgagagttcacctgagttggccaagaaatcatggtttggtaattttattagtttggagaaggaggaacagatcttcgtcgttattaaggataagcctctctcttcaattaaggccgacattgtgcacgccttcctgtccattccaagtctgagccacagtgttatttcacagacaagctttcgcgctgagtacaaagccaccggagggcctgccgtctttcagaaacccgtgaagttccaggtggacatcacatatacggagggtggcgaagctcagaaagagaatggaatctattcagtcacctttactctgttgagtggcccttctcgccgatttaagcgcgtcgtggagacaatccaggctcagttactctccactcatgatccacctgccgctcagcacctctcagagccgcctccacctgcaccgggattgtcctggggggcaggactgaaaggtcaaaaggtagccacttcatacgagtccagtttatag

SEQ ID NO: 91061 - DNA, 3277 bp, Artificial Sequence
  derived and/or modified sequence
tgttcggctcagctgcacggctcggctcggctcggctcggctcggctgcgcggccgctgacgggcgtgcgctgggggcgcggggcgcggggcgcgggcctcggcggcggcggcggcggcggcggcggaagccaggtgcccccgcccgccctgtcctctcgacgaggcggaggcgtcgccgcgggccaggcctcggactgccgcgtcggagtggacgcggggggcggcggcgcgggcggacgcgggcggcgcgaagcagcggggcccgcgggggcgccccggccgggtcggcgcggacggcactcggcggacgcgggcggacgctgggcggcccctccctgcccgcgcgcccgggcgcccctggccggcgccgggccccagagcgatgacatcgacggggaaggacggcggcgcgcagcacgcgcagtatgttgggccctaccggctggagaagacgctgggcaaggggcagacaggtctggtgaagctgggggttcactgcgtcacctgccagaaggtggccatcaagatcgtcaaccgtgagaagctcagcgagtcggtgctgatgaaggtggagcgggagatcgcgatcctgaagctcattgagcacccccacgtcctaaagctgcacgacgtttatgaaaacaaaaaatatttgtacctggtgctagaacacgtgtcaggtggtgagctcttcgactacctggtgaagaaggggaggctgacgcctaaggaggctcggaagttcttccggcagatcatctctgcgctggacttctgccacagccactccatatgccacagggatctgaaacctgaaaacctcctgctggacgagaagaacaacatccgcatcgcagactttggcatggcgtccctgcaggttggcgacagcctgttggagaccagctgtgggtccccccactacgcctgccccgaggtgatccggggggagaagtatgacggccggaaggcggacgtgtggagctgcggcgtcatcctgttcgccttgctggtgggggctctgcccttcgacgatgacaacttgcgacagctgctggagaaggtgaagcggggcgtgttccacatgccgcactttatcccgcccgactgccagagtctgctacggggcatgatcgaggtggacgccgcacgccgcctcacgctagagcacattcagaaacacatatggtatatagggggcaagaatgagcccgaaccagagcagcccattcctcgcaaggtgcagatccgctcgctgcccagcctggaggacatcgaccccgacgtgctggacagcatgcactcactgggctgcttccgagaccgcaacaagctgctgcaggacctgctgtccgaggaggagaaccaggagaagatgatttacttcctcctcctggaccggaaagaaaggtacccgagccaggaggatgaggacctgcccccccggaacgagatagaccctccccggaagcgtgtggactccccgatgctgaaccggcacggcaagcggcggccagaacgcaaatccatggaggtgctcagcgtgacggacggcggctccccggtgcctgcgcggcgggccattgagatggcccagcacggccagagtaaagcaatgttcagtaaaagcctggatatcgctgaggcccatccccaattcagcaaagaagacaggtctcggtccatcagcggtgcctcctcaggcctttccaccagcccactcagcagcccccgggtgacccctcacccctcaccaaggggcagtcccctccccacccccaaggggacacctgtccacacgccaaaggagagcccggctggcacgcccaaccccacgcccccgtccagccccagcgtcggaggggtgccctggagggcgcggctcaactccatcaagaacagctttctgggctcaccccgcttccaccgccggaaactgcaagttccgacgccggaggagatgtccaacctgacaccagagtcgtccccagagctggcgaagaagtcctggtttgggaacttcatcagcctggagaaggaggagcagatcttcgtggtcatcaaagacaaacctctgagctccatcaaggctgacatcgtgcacgccttcctgtcgattcccagtctcagccacagcgtcatctcccaaacgagcttccgggccgagtacaaggccacgggggggccagccgtgttccagaagccggtcaagttccaggttgatatcacctacacggagggtggggaggcgcagaaggagaacggcatctactccgtcaccttcaccctgctctcaggccccagccgtcgcttcaagagggtggtggagaccatccaggcccagctgctgagcacacacgacccgcctgcggcccagcacttgtcagaaccccccccaccagcgccaggactaagctggggtgctgggcttaagggccagaaggtggccaccagctacgagagtagcctctgacgctggcagacaccactaactgtatggaaatgatgacggggcggctttccaaatgtggaattatcccgaaaagttaacatgtcacctccacgaggccatcctctgtgaccgaaggcagctgctgcggacccgccctccctccgctcctgctgttgctgccgggcagtgaggcccagcccagcgccccgtccaccccgcggcagctcctcgcctcagctccgcacggcccgtgggaggaaggccaggctcgggggagcctcctccagcccggccgacccggactcccggtcacctgacccctcagcaagaacagcctgcctggtggccttctggggccaggacccctggtgggcaacgtagccacaggaacaggccccgtccaccgcctccacgccgcacctggaggcctcctcgcaggcccgtgccccgcctccctggctgcgccgcctccgtgtagtcttggcctcctcaggctgcctcccgtcctctcgtctcacccgcgcctcccttgcctcatctggggcggctgtgggctctggcgctcctctctggctgaggtggaaacagagacaccctgcggcaccagagccttcccagcaggccaggccgctgggctgggatcagtgttatttatttgccgttttaatttatggattctccgcacctctgttcagggaagggcggcggccacatcccctgccgtctgcgtgtctcaggcagtgggggggctggggccagggcgccctctgaggacagagctggtggggcgcgggggggctggcgagctactgtaaactttaaa

SEQ ID NO: 91062 - DNA, 2091 bp, Artificial Sequence
  derived and/or modified sequence
atgacatcgacggggaaggacggcggcgcgcagcacgcgcagtatgttgggccctaccggctggagaagacgctgggcaaggggcagacaggtctggtgaagctgggggttcactgcgtcacctgccagaaggtggccatcaagatcgtcaaccgtgagaagctcagcgagtcggtgctgatgaaggtggagcgggagatcgcgatcctgaagctcattgagcacccccacgtcctaaagctgcacgacgtttatgaaaacaaaaaatatttgtacctggtgctagaacacgtgtcaggtggtgagctcttcgactacctggtgaagaaggggaggctgacgcctaaggaggctcggaagttcttccggcagatcatctctgcgctggacttctgccacagccactccatatgccacagggatctgaaacctgaaaacctcctgctggacgagaagaacaacatccgcatcgcagactttggcatggcgtccctgcaggttggcgacagcctgttggagaccagctgtgggtccccccactacgcctgccccgaggtgatccggggggagaagtatgacggccggaaggcggacgtgtggagctgcggcgtcatcctgttcgccttgctggtgggggctctgcccttcgacgatgacaacttgcgacagctgctggagaaggtgaagcggggcgtgttccacatgccgcactttatcccgcccgactgccagagtctgctacggggcatgatcgaggtggacgccgcacgccgcctcacgctagagcacattcagaaacacatatggtatatagggggcaagaatgagcccgaaccagagcagcccattcctcgcaaggtgcagatccgctcgctgcccagcctggaggacatcgaccccgacgtgctggacagcatgcactcactgggctgcttccgagaccgcaacaagctgctgcaggacctgctgtccgaggaggagaaccaggagaagatgatttacttcctcctcctggaccggaaagaaaggtacccgagccaggaggatgaggacctgcccccccggaacgagatagaccctccccggaagcgtgtggactccccgatgctgaaccggcacggcaagcggcggccagaacgcaaatccatggaggtgctcagcgtgacggacggcggctccccggtgcctgcgcggcgggccattgagatggcccagcacggccagagtaaagcaatgttcagtaaaagcctggatatcgctgaggcccatccccaattcagcaaagaagacaggtctcggtccatcagcggtgcctcctcaggcctttccaccagcccactcagcagcccccgggtgacccctcacccctcaccaaggggcagtcccctccccacccccaaggggacacctgtccacacgccaaaggagagcccggctggcacgcccaaccccacgcccccgtccagccccagcgtcggaggggtgccctggagggcgcggctcaactccatcaagaacagctttctgggctcaccccgcttccaccgccggaaactgcaagttccgacgccggaggagatgtccaacctgacaccagagtcgtccccagagctggcgaagaagtcctggtttgggaacttcatcagcctggagaaggaggagcagatcttcgtggtcatcaaagacaaacctctgagctccatcaaggctgacatcgtgcacgccttcctgtcgattcccagtctcagccacagcgtcatctcccaaacgagcttccgggccgagtacaaggccacgggggggccagccgtgttccagaagccggtcaagttccaggttgatatcacctacacggagggtggggaggcgcagaaggagaacggcatctactccgtcaccttcaccctgctctcaggccccagccgtcgcttcaagagggtggtggagaccatccaggcccagctgctgagcacacacgacccgcctgcggcccagcacttgtcagaaccccccccaccagcgccaggactaagctggggtgctgggcttaagggccagaaggtggccaccagctacgagagtagcctctga

SEQ ID NO: 91063 - DNA, 3163 bp, Artificial Sequence
  derived and/or modified sequence
tgttcggctcagctgcacggctcggctcggctcggctcggctcggctgcgcggccgctgacgggcgtgcgctgggggcgcggggcgcggggcgcgggcctcggcggcggcggcggcggcggcggcggaagccaggtgcccccgcccgccctgtcctctcgacgaggcggaggcgtcgccgcgggccaggcctcggactgccgcgtcggagtggacgcggggggcggcggcgcgggcggacgcgggcggcgcgaagcagcggggcccgcgggggcgccccggccgggtcggcgcggacggcactcggcggacgcgggcggacgctgggcggcccctccctgcccgcgcgcccgggcgcccctggccggcgccgggccccagagcgatgacatcgacggggaaggacggcggcgcgcagcacgcgcagtatgttgggccctaccggctggagaagacgctgggcaaggggcagacaggtctggtgaagctgggggttcactgcgtcacctgccagaaggtggccatcaagatcgtcaaccgtgagaagctcagcgagtcggtgctgatgaaggtggagcgggagatcgcgatcctgaagctcattgagcacccccacgtcctaaagctgcacgacgtttatgaaaacaaaaaatatttgtacctggtgctagaacacgtgtcaggtggtgagctcttcgactacctggtgaagaaggggaggctgacgcctaaggaggctcggaagttcttccggcagatcatctctgcgctggacttctgccacagccactccatatgccacagggatctgaaacctgaaaacctcctgctggacgagaagaacaacatccgcatcgcagactttggcatggcgtccctgcaggttggcgacagcctgttggagaccagctgtgggtccccccactacgcctgccccgaggtgatccggggggagaagtatgacggccggaaggcggacgtgtggagctgcggcgtcatcctgttcgccttgctggtgggggctctgcccttcgacgatgacaacttgcgacagctgctggagaaggtgaagcggggcgtgttccacatgccgcactttatcccgcccgactgccagagtctgctacggggcatgatcgaggtggacgccgcacgccgcctcacgctagagcacattcagaaacacatatggtatatagggggcaagaatgagcccgaaccagagcagcccattcctcgcaaggtgcagatccgctcgctgcccagcctggaggacatcgaccccgacgtgctggacagcatgcactcactgggctgcttccgagaccgcaacaagctgctgcaggacctgctgtccgaggaggagaaccaggagaagatgatttacttcctcctcctggaccggaaagaaaggtacccgagccaggaggatgaggacctgcccccccggaacgagatagaccctccccggaagcgtgtggactccccgatgctgaaccggcacggcaagcggcggccagaacgcaaatccatggaggtgctcagcgtgacggacggcggctccccggtgcctgcgcggcgggccattgagatggcccagcacggccagaggtctcggtccatcagcggtgcctcctcaggcctttccaccagcccactcagcagcccccgggtgacccctcacccctcaccaaggggcagtcccctccccacccccaaggggacacctgtccacacgccaaaggagagcccggctggcacgcccaaccccacgcccccgtccagccccagcgtcggaggggtgccctggagggcgcggctcaactccatcaagaacagctttctgggctcaccccgcttccaccgccggaaactgcaagttccgacgccggaggagatgtccaacctgacaccagagtcgtccccagagctggcgaagaagtcctggtttgggaacttcatcagcctggagaaggaggagcagatcttcgtggtcatcaaagacaaacctctgagctccatcaaggctgacatcgtgcacgccttcctgtcgattcccagtctcagccacagcgtcatctcccaaacgagcttccgggccgagtacaaggccacgggggggccagccgtgttccagaagccggtcaagttccaggttgatatcacctacacggagggtggggaggcgcagaaggagaacggcatctactccgtcaccttcaccctgctctcaggccccagccgtcgcttcaagagggtggtggagaccatccaggcccagctgctgagcacacacgacccgcctgcggcccagcacttgtcagaaccccccccaccagcgccaggactaagctggggtgctgggcttaagggccagaaggtggccaccagctacgagagtagcctctgacgctggcaggaattatcccgaaaagttaacatgtcacctccacgaggccatcctctgtgaccgaaggcagctgctgcggacccgccctccctccgctcctgctgttgctgccgggcagtgaggcccagcccagcgccccgtccaccccgcggcagctcctcgcctcagctccgcacggcccgtgggaggaaggccaggctcgggggagcctcctccagcccggccgacccggactcccggtcacctgacccctcagcaagaacagcctgcctggtggccttctggggccaggacccctggtgggcaacgtagccacaggaacaggccccgtccaccgcctccacgccgcacctggaggcctcctcgcaggcccgtgccccgcctccctggctgcgccgcctccgtgtagtcttggcctcctcaggctgcctcccgtcctctcgtctcacccgcgcctcccttgcctcatctggggcggctgtgggctctggcgctcctctctggctgaggtggaaacagagacaccctgcggcaccagagccttcccagcaggccaggccgctgggctgggatcagtgttatttatttgccgttttaatttatggattctccgcacctctgttcagggaagggcggcggccacatcccctgccgtctgcgtgtctcaggcagtgggggggctggggccagggcgccctctgaggacagagctggtggggcgcgggggggctggcgagctactgtaaactttaaa

SEQ ID NO: 91064 - DNA, 1764 bp, Artificial Sequence
  derived and/or modified sequence
aagaacaacatccgcatcgcagactttggcatggcgtccctgcaggttggcgacagcctgttggagaccagctgtgggtccccccactacgcctgccccgaggtgatccggggggagaagtatgacggccggaaggcggacgtgtggagctgcggcgtcatcctgttcgccttgctggtgggggctctgcccttcgacgatgacaacttgcgacagctgctggagaaggtgaagcggggcgtgttccacatgccgcactttatcccgcccgactgccagagtctgctacggggcatgatcgaggtggacgccgcacgccgcctcacgagggggcaagaatgagcccgaaccagagcagcccattcctcgcaaggtgcagatccgctcgctgcccagcctggaggacatcgaccccgacgtgctggacagcatgcactcactgggctgcttccgagaccgcaacaagctgctgcaggacctgctgtccgaggaggagaaccaggagaagatgatttacttcctcctcctggaccggaaagaaaggtacccgagccaggaggatgaggacctgcccccccggaacgagatagaccctccccggaagcgtgtggactccccgatgctgaaccggcacggcaagcggcggccagaacgcaaatccatggaggtgctcagcgtgacggacggcggctccccggtgcctgcgcggcgggccattgagatggcccagcacggccagaggtctcggtccatcagcggtgcctcctcaggcctttccaccagcccactcagcagcccccgggtgacccctcacccctcaccaaggggcagtcccctccccacccccaaggggacacctgtccacacgccaaaggagagcccggctggcacgcccaaccccacgcccccgtccagccccagcgtcggaggggtgccctggagggcgcggctcaactccatcaagaacagctttctgggctcaccccgcttccaccgccggaaactgcaagttccgacgccggaggagatgtccaacctgacaccagagtcgtccccagagctggcgaagaagtcctggtttgggaacttcatcagcctggagaaggaggagcagatcttcgtggtcatcaaagacaaacctctgagctccatcaaggctgacatcgtgcacgccttcctgtcgattcccagtctcagccacagcgtcatctcccaaacgagcttccgggccgagtacaaggccacgggggggccagccgtgttccagaagccggtcaagttccaggttgatatcacctacacggagggtggggaggcgcagaaggagaacggcatctactccgtcaccttcaccctgctctcaggccccagccgtcgcttcaagagggtggtggagaccatccaggcccagctgctgagcacacacgacccgcctgcggcccagcacttgtcagaaccccccccaccagcgccaggactaagctggggtgctgggcttaagggccagaaggtggccaccagctacgagagtagcctctgacgctggcagacaccactaactgtatggaaatgatgacggggcggctttccaaatgtggaattatcccgaaaagttaacatgtcacctccacgaggccatcctctgtgaccgaaggcagctgctgcggacccgccctccctccgctcctgctgttgctgccgggcagtgaggcccagcccagcgccccgtccaccccgcggcagctcctcgcctcagctccgcac

SEQ ID NO: 91065 - protein, 766 aa, Artificial Sequence
  derived and/or modified sequence
MSPEGHPSRWARPRRPCICPSSLCSPREPRSGPAVGRGGAAHHRVPAGHTPGPQLLQPHLHLPQGQTWLCLQPSPAGLVKLGVHCVTCQKVAIKIVNREKLSESVLMKVEREIAILKLIEHPHVLKLHDVYENKKYLYLVLEHVSGGELFDYLVKKGRLTPKEARKFFRQIISALDFCHSHSICHRDLKPENLLLDEKNNIRIADFGMASLQVGDSLLETSCGSPHYACPEVIRGEKYDGRKADVWSCGVILFALLVGALPFDDDNLRQLLEKVKRGVFHMPHFIPPDCQSLLRGMIEVDAARRLTLEHIQKHIWYIGGKNEPEPEQPIPRKVQIRSLPSLEDIDPDVLDSMHSLGCFRDRNKLLQDLLSEEENQEKMIYFLLLDRKERYPSQEDEDLPPRNEIDPPRKRVDSPMLNRHGKRRPERKSMEVLSVTDGGSPVPARRAIEMAQHGQRSRSISGASSGLSTSPLSSPRVTPHPSPRGSPLPTPKGTPVHTPKESPAGTPNPTPPSSPSVGGVPWRARLNSIKNSFLGSPRFHRRKLQVPTPEEMSNLTPESSPELAKKSWFGNFISLEKEEQIFVVIKDKPLSSIKADIVHAFLSIPSLSHSVISQTSFRAEYKATGGPAVFQKPVKFQVDITYTEGGEAQKENGIYSVTFTLLSGPSRRFKRVVETIQAQLLSTHDPPAAQHLSDTTNCMEMMTGRLSKCDEKNGQAAQAPSTPAKRSAHGPLGDSAAAGPGPGGDAEYPTGKDTAKMGPPTARREQP

SEQ ID NO: 91066 - DNA, 2301 bp, Artificial Sequence
  derived and/or modified sequence
atgagccccgagggccaccccagcagatgggccagacccagaagaccctgcatctgccccagcagcctgtgcagccccagagagcccagaagcggccccgccgtgggcagaggcggcgccgcccaccacagagtgcccgccggccacacccccggcccccagctgctgcagccccacctgcacctgccccagggccagacctggctgtgcctgcagcccagccccgccggcctggtgaagctgggcgtgcactgcgtgacctgccagaaggtggccatcaagatcgtgaacagagagaagctgagcgagagcgtgctgatgaaggtggagagagagatcgccatcctgaagctgatcgagcacccccacgtgctgaagctgcacgacgtgtacgagaacaagaagtacctgtacctggtgctggagcacgtgagcggcggcgagctgttcgactacctggtgaagaagggcagactgacccccaaggaggccagaaagttcttcagacagatcatcagcgccctggacttctgccacagccacagcatctgccacagagacctgaagcccgagaacctgctgctggacgagaagaacaacatcagaatcgccgacttcggcatggccagcctgcaggtgggcgacagcctgctggagaccagctgcggcagcccccactacgcctgccccgaggtgatcagaggcgagaagtacgacggcagaaaggccgacgtgtggagctgcggcgtgatcctgttcgccctgctggtgggcgccctgcccttcgacgacgacaacctgagacagctgctggagaaggtgaagagaggcgtgttccacatgccccacttcatcccccccgactgccagagcctgctgagaggcatgatcgaggtggacgccgccagaagactgaccctggagcacatccagaagcacatctggtacatcggcggcaagaacgagcccgagcccgagcagcccatccccagaaaggtgcagatcagaagcctgcccagcctggaggacatcgaccccgacgtgctggacagcatgcacagcctgggctgcttcagagacagaaacaagctgctgcaggacctgctgagcgaggaggagaaccaggagaagatgatctacttcctgctgctggacagaaaggagagataccccagccaggaggacgaggacctgccccccagaaacgagatcgacccccccagaaagagagtggacagccccatgctgaacagacacggcaagagaagacccgagagaaagagcatggaggtgctgagcgtgaccgacggcggcagccccgtgcccgccagaagagccatcgagatggcccagcacggccagagaagcagaagcatcagcggcgccagcagcggcctgagcaccagccccctgagcagccccagagtgaccccccaccccagccccagaggcagccccctgcccacccccaagggcacccccgtgcacacccccaaggagagccccgccggcacccccaaccccaccccccccagcagccccagcgtgggcggcgtgccctggagagccagactgaacagcatcaagaacagcttcctgggcagccccagattccacagaagaaagctgcaggtgcccacccccgaggagatgagcaacctgacccccgagagcagccccgagctggccaagaagagctggttcggcaacttcatcagcctggagaaggaggagcagatcttcgtggtgatcaaggacaagcccctgagcagcatcaaggccgacatcgtgcacgccttcctgagcatccccagcctgagccacagcgtgatcagccagaccagcttcagagccgagtacaaggccaccggcggccccgccgtgttccagaagcccgtgaagttccaggtggacatcacctacaccgagggcggcgaggcccagaaggagaacggcatctacagcgtgaccttcaccctgctgagcggccccagcagaagattcaagagagtggtggagaccatccaggcccagctgctgagcacccacgacccccccgccgcccagcacctgagcgacaccaccaactgcatggagatgatgaccggcagactgagcaagtgcgacgagaagaacggccaggccgcccaggcccccagcacccccgccaagagaagcgcccacggccccctgggcgacagcgccgccgccggccccggccccggcggcgacgccgagtaccccaccggcaaggacaccgccaagatgggcccccccaccgccagaagagagcagccctag

SEQ ID NO: 91067 - DNA, 2301 bp, Artificial Sequence
  derived and/or modified sequence
atgagccctgagggccatcccagccggtgggcaagaccccggcggccgtgtatctgcccgtcatctctctgctcgcccagggaacccagatctggcccggctgtaggcaggggaggagccgcacaccaccgggtaccagccggacatacgccaggtccgcagctgctgcagcctcacttgcatcttccgcagggtcagacatggctgtgcctccaaccttcacctgccgggttggttaagcttggagtgcattgtgtgacgtgtcaaaaggtagccatcaagatcgtgaatcgtgagaagctgtccgaaagcgttcttatgaaggtcgagcgtgagattgcgatcctaaagctcattgagcacccccatgtgctcaagttacacgacgtgtatgagaacaagaaatatttgtacctggtgttagaacatgtctctggcggagagctctttgactatctggtgaagaaaggaagacttacccccaaggaggcccgcaagttctttaggcagatcatctcggccttggatttttgccactctcactctatctgccatcgagaccttaagcctgagaatctgctgttagacgagaagaataacattaggatcgccgacttcggtatggccagtcttcaggtgggagactctctgctcgagaccagctgcggctcgccacactacgcttgcccggaggtgatcaggggcgaaaaatacgacggaaggaaggcagacgtgtggtcttgtggcgtgattctgtttgccctgctggttggcgcccttcctttcgacgatgacaacttgcggcagctgctggagaaagtgaagcgcggggtctttcacatgccacactttatcccaccggactgccagagcctgttgcgagggatgatagaggttgatgccgcccgacgcctgacacttgagcacatccagaagcacatatggtatatagggggcaaaaatgagccagagccggagcaaccaattccccgcaaggtacagatcagatctctgccttcactagaagacattgaccccgatgtgctcgacagtatgcacagtctggggtgtttcagggaccgcaataagctgttgcaggatctcctctctgaagaggaaaatcaagaaaaaatgatctacttcctcctgctcgatcgtaaagagcgatacccatcccaggaagacgaggacctgccgcctcggaacgaaattgaccccccgagaaaaagggtggacagccccatgctaaataggcacggcaagaggagaccggaaagaaagtcgatggaggtgttgtccgtaaccgatggaggctccccagtgccagcccgaagggctattgaaatggcccaacacggccagcgctcaaggtccatttcaggggcctcatccggcttgtccacctctccattatcctcaccgagagtaaccccccatccttctccgcgtggctctcctctgcccactcccaagggcacccctgtgcacaccccaaaagaatcacccgccggaactccgaatcctaccccaccgagttctccttcagtcggtggagttccctggcgtgcgagactcaattctataaaaaactccttcctgggtagtccccggttccacaggcgcaagctccaggtgcctacccctgaagaaatgagtaacctgaccccagaatcaagtccagagctcgccaagaaaagttggttcggaaatttcatttcactagagaaagaggagcagatttttgtagtcatcaaggacaagcccttgagctccattaaggcagacatcgtgcacgcattcctgtccattcctagcctgagtcattctgtgatcagccagactagctttagagccgaatataaggccaccggtgggccagcagtctttcagaaaccagtcaagttccaggtggatattacatatacagaaggcggcgaggcacagaaagaaaatggcatttactccgtcacatttactcttctgtccggcccctccaggaggttcaaaagagtggtagagacaatacaggctcagctgctctccactcatgacccaccggctgcgcaacacctcagcgacaccacaaactgcatggagatgatgacaggaaggctttccaagtgcgacgagaaaaacggccaggctgctcaggcaccgtctactcccgctaagagaagcgcccacggccccttgggtgattccgccgccgcgggcccggggcccggtggtgatgctgagtacccaaccgggaaggatacggccaaaatggggccgccaacggctaggcgcgagcagccatag

SEQ ID NO: 91068 - DNA, 2301 bp, Artificial Sequence
  derived and/or modified sequence
atgagccctgagggccaccccagccgctgggcccggccccggcggccctgcatctgccccagcagcctgtgcagcccccgggagcccaggagcggccctgctgtgggccggggcggggccgcccaccaccgggtgcctgctggccacaccccaggcccccagctgctgcagccccacctgcacctgccccagggccagacctggctgtgcctgcagcccagccctgctggcctggtgaagctgggcgtgcactgtgtgacctgccagaaggtggccatcaagatcgtgaaccgggagaagctgtctgagagcgtgctgatgaaggtggagcgggagatcgccatcctgaagctgattgagcacccccacgtgctgaagctgcatgatgtgtatgagaacaagaagtacctgtacctggtgctggagcacgtgtctggaggagagctgtttgactacctggtgaagaagggccgcctgacccccaaggaggccaggaagttcttccggcagatcatcagcgccctggacttctgccacagccacagcatctgccaccgggacctgaagccagagaacctgctgctggatgagaagaacaacatcagaattgctgactttggcatggccagcctgcaggtgggggacagcctgctggagaccagctgtggcagcccccactacgcctgcccagaggtgatccggggggagaagtatgatggcaggaaggcagatgtgtggagctgtggggtcatcctgtttgccctgctggtgggcgccctgccctttgatgatgacaacctgcggcagctgctggagaaggtgaagaggggcgtcttccacatgccccacttcatccccccagactgccagagcctgctgcggggcatgattgaggtggatgctgcccggcggctgaccctggagcacatccagaagcacatctggtacatcggcggcaagaatgaacctgagcctgagcagcccatccccaggaaggtgcagatccgcagcctgcccagcctggaggacatcgaccctgatgtgctggacagcatgcacagcctgggctgcttccgggacaggaacaagctgctgcaggacctgctgtctgaggaggagaaccaggagaagatgatctacttcctgctgctggacaggaaggagcgctaccccagccaggaggatgaggacctgcccccaagaaatgaaattgacccccccaggaagagggtggacagccccatgctgaacagacatggcaagaggaggcctgagaggaagtccatggaggtgctgtctgtgacagatggcggcagccctgtgcctgcccggcgggccatcgagatggcccagcacggccagaggagccgcagcatcagcggggccagcagcggcctgagcaccagccccctgagcagcccccgggtgaccccccaccccagcccccggggcagccccctgcccacccccaagggcacccctgtgcacacccccaaggagagccctgctggcacccccaaccccaccccacccagcagccccagcgtgggcggcgtgccctggagggcccggctgaacagcatcaagaacagcttcctgggcagcccccgcttccacaggaggaagctgcaggtgcccaccccagaggagatgagcaacctgaccccagagagcagccctgagctggccaagaagtcctggtttggaaacttcatcagcctggagaaggaggagcagatctttgtggtgatcaaggacaagcccctgagcagcatcaaggctgacatcgtgcacgccttcctgagcatccccagcctgagccacagcgtcatcagccagaccagcttccgggcagagtacaaggccactggaggccctgctgtgttccagaagcctgtgaagttccaggtggacatcacctacacagagggcggggaggcccagaaggaaaatggcatctacagcgtgaccttcaccctgctgagcggccccagccgccgcttcaagagggtggtggagaccatccaggcccagctgctgagcacccatgaccccccagctgcccagcacctgagtgacaccaccaactgcatggagatgatgacaggccgcctgagcaaatgtgatgagaagaatggccaggccgcccaggcccccagcaccccagccaagaggtctgcccacggccccctgggggacagcgctgctgctggccctggccctggaggagatgctgagtaccccaccgggaaggacacagccaagatgggccccccaacagcccggcgggagcagccctag

SEQ ID NO: 91069 - DNA, 2301 bp, Artificial Sequence
  derived and/or modified sequence
atgagccccgagggccaccccagccggtgggcccggccccggcggccctgcatctgcccgagcagcctgtgtagcccccgggaacctcggtcaggccctgcagtgggtcgtggtggagccgcacatcatcgcgtcccagccggtcatactcctggcccccagctactgcaaccacatctacacctgccgcagggccaaacatggctgtgcctccagccgtcgccagccggcctggtcaagctgggcgtccattgcgtcacctgccagaaggtcgcaattaaaatcgtgaacagagagaagttgtcggagtctgtgctcatgaaagtggagcgagagatagctatcctgaagttgattgagcacccacatgtactaaagctgcatgacgtctacgagaacaaaaaatacctatacctggtcctcgagcacgtgtctggcggcgagctgttcgactatctagtgaagaaggggcgacttacccccaaggaggccagaaaattctttcgtcagatcatcagtgctctcgatttttgccactctcattccatttgtcatcgcgaccttaagcctgagaatttgcttctggacgaaaagaataacatcaggatcgcggatttcggcatggcctcacttcaggtgggcgacagtctgctcgaaacttcttgtgggagtccgcattatgcgtgccctgaggtgattaggggcgagaaatacgatggtagaaaggccgatgtgtggagctgcggagtgattctcttcgcgctgcttgtgggtgctcttccttttgacgatgataacctcaggcagctgctagaaaaagtgaaacgaggtgtgtttcatatgcctcatttcatcccacccgattgtcaatctcttcttcgcggtatgattgaggtggacgcagctcgacgcctcaccttagaacacattcagaaacacatttggtacatcgggggtaagaacgagccggagcccgagcagccaattccaagaaaagtccagatcaggagccttccctccttggaagacatcgatccagatgtcctggacagcatgcacagcttgggatgtttcagggacaggaataagctgcttcaggacttgctctccgaagaggagaaccaagagaaaatgatatacttcctcctgctggacagaaaggaacgctatccctctcaggaggacgaggatctgcctcctagaaacgagattgacccgccgaggaaaagagttgactccccaatgctcaacaggcatggaaagaggagacctgaaaggaagtccatggaagtgctgtccgttacagatggaggtagtcccgtgcctgctagaagggccatcgagatggcccaacatgggcagaggtctcggtccatcagcggggcgagctccggcctgtctacctccccactgagtagccctagggtcacccctcatccatccccccgcggcagccccctgccaacacctaaaggaacgcccgtgcacacacccaaggaatcccctgctgggactcctaaccctactcccccctcctctccctccgttggtggagtgccttggcgcgctcggctcaacagtatcaaaaactcttttctcggatcaccccggttccatcggcggaaactacaggtaccaacacctgaggagatgagcaatctcacgccagaatcctctcccgagttagctaagaaaagttggttcggaaattttatttcgctggagaaggaggagcaaatttttgtggtgataaaagacaagccgctgtcctctataaaggcagacatagtgcacgccttcctgagcattccgagccttagccattcagtgatctcccaaacctcgttcagggccgagtataaagctactggcggccctgccgtatttcagaagcccgtgaagttccaggtcgatatcacttataccgaggggggggaggcacaaaaggaaaatggaatttattccgtcaccttcactcttctgtcaggaccttccagaagatttaagcgcgtcgtggaaacaattcaggcgcagcttctcagtacgcacgacccgccggctgctcagcatctatcagataccacaaactgtatggagatgatgaccgggcggctctctaaatgtgatgaaaaaaatggccaggccgcacaggctcccagcactccagctaaaaggtccgctcatggcccactcggggatagcgcagccgcaggcccaggacctggtggagatgccgaatacccgacggggaaagatacagccaaaatgggcccccccacagctagaagagagcagccctag

SEQ ID NO: 91070 - DNA, 2301 bp, Artificial Sequence
  derived and/or modified sequence
atgagccccgaaggccatccctcaaggtgggccagaccacgtcggccttgtatctgtcccagctctctgtgctcgcccagagaaccacgctctggcccagctgtagggagaggaggtgcagcgcaccacagagtgcctgccggacataccccgggtccccaactgctccagcctcatcttcatttgccccagggtcagacctggctctgtctccagccaagccctgcagggctggtaaagcttggtgtccactgcgttacctgccaaaaagtcgctatcaagattgtgaaccgggagaaactctccgagagcgtgctgatgaaggtagaacgggagatagccatactgaaattaatcgagcacccgcatgtgctgaaactgcatgatgtgtacgaaaataagaaatacctttatttagtgctggaacacgtatcaggcggtgaattgttcgactacttagtgaaaaagggaagattgactcctaaggaggctaggaagttctttcgacagattatctcggcattggatttctgtcacagccattcaatatgccacagagaccttaagccagagaaccttctgcttgacgagaaaaataacattcggatcgccgacttcggcatggcctctcttcaagtgggtgactccttattggagacatcctgtggtagtcctcactacgcttgccctgaggttattaggggcgaaaaatacgacggacgaaaggctgatgtgtggtcatgcggagtgatcttgttcgctctcttggtgggcgctctgcctttcgacgatgacaatctccgacagctcctagaaaaggtgaaacgaggcgtgttccacatgccccatttcattcctcctgattgccagagcctgcttcggggaatgattgaagtggacgccgctagacggcttactctcgagcatatccaaaaacatatctggtatattggcggaaaaaatgagccagagcccgaacagcccattcccaggaaagtgcaaatccgttcccttcccagcctggaagacatcgatccagacgtcctggacagtatgcactccctcgggtgcttccgcgacaggaataagcttttacaggaccttctcagcgaagaagagaaccaggagaagatgatttatttcttactgctggatcgcaaagagcgatatccctcgcaggaagacgaggatctgccgccacgaaacgaaatcgacccacctagaaagcgggtcgacagtccaatgctgaatagacatggaaagcgccgacccgagcgcaagtccatggaggtcctgtcagtgaccgacgggggatccccagtccctgccagacgggcaatcgaaatggcccagcacgggcagaggagccgctcaatcagcggtgctagctctggcctctccacctctcctctgagttcgccacgagtcacacctcatccgagcccaaggggcagcccactgcccacccccaaagggaccccagtgcacactcctaaagagagcccagcagggacccctaatccgactcccccttcttctcctagcgtaggaggggtgccctggcgagccagactgaattccattaaaaatagtttcttggggagtcccaggtttcaccgaagaaagttgcaggttccgaccccggaagagatgtctaatctcacacctgagagctcacccgagctcgcaaagaagtcttggtttggcaattttatcagcctggaaaaggaagaacagatctttgtcgtgattaaggataagcccctgtcttccatcaaagccgatattgttcatgcatttctgtcaattccttcactgtcccactctgtgattagccagacctcctttcgcgcagagtataaggccactggaggccctgctgtgttccagaagcctgtgaaatttcaggttgacatcacttacaccgaaggcggagaagctcagaaggagaacgggatttacagcgtgacttttacccttctatctggcccttcccgccgattcaagcgcgttgtagaaaccatccaggcgcagctcctaagtactcatgaccctccagccgctcaacacctttctgataccacaaattgcatggagatgatgaccgggcgtttgtccaagtgcgacgaaaagaacggccaggcagcccaggcaccatccacccctgccaaacgatcagcgcatggcccactgggagactctgccgctgccggaccgggtccaggtggagatgctgagtaccctactggaaaggataccgcaaagatggggcctccgaccgctcgtcgggagcaaccatag

SEQ ID NO: 91071 - DNA, 3576 bp, Artificial Sequence
  derived and/or modified sequence
agtctcaggctggctagttcctccttcctggtcactgagccagccttgctgaggggagagcgggttctggacgtgctctgagcttccttcctcacagccttgctcctgggccagatcagcaggaaagcagccagtgccccgccatggcctgcccgggtggggtcctgaagctggggccggagcagggggcacagttctgccccatctggccctagtttggggagggagcctggtagggcaccagcctcaccccatgagccctgagggccaccccagccgatgggcacgtccccgccggccctgcatctgtccttcctccctctgctccccaagagagcccaggtctggcccagcggtgggcaggggaggggccgcacatcacagagtgccagctggccacactcccggcccacagctgctccagccgcacctccaccttcctcaaggccagacctggctctgcctgcagcccagcccagcaggtctggtgaagctgggggttcactgcgtcacctgccagaaggtggccatcaagatcgtcaaccgtgagaagctcagcgagtcggtgctgatgaaggtggagcgggagatcgcgatcctgaagctcattgagcacccccacgtcctaaagctgcacgacgtttatgaaaacaaaaaatatttgtacctggtgctagaacacgtgtcaggtggtgagctcttcgactacctggtgaagaaggggaggctgacgcctaaggaggctcggaagttcttccggcagatcatctctgcgctggacttctgccacagccactccatatgccacagggatctgaaacctgaaaacctcctgctggacgagaagaacaacatccgcatcgcagactttggcatggcgtccctgcaggttggcgacagcctgttggagaccagctgtgggtccccccactacgcctgccccgaggtgatccggggggagaagtatgacggccggaaggcggacgtgtggagctgcggcgtcatcctgttcgccttgctggtgggggctctgcccttcgacgatgacaacttgcgacagctgctggagaaggtgaagcggggcgtgttccacatgccgcactttatcccgcccgactgccagagtctgctacggggcatgatcgaggtggacgccgcacgccgcctcacgctagagcacattcagaaacacatatggtatatagggggcaagaatgagcccgaaccagagcagcccattcctcgcaaggtgcagatccgctcgctgcccagcctggaggacatcgaccccgacgtgctggacagcatgcactcactgggctgcttccgagaccgcaacaagctgctgcaggacctgctgtccgaggaggagaaccaggagaagatgatttacttcctcctcctggaccggaaagaaaggtacccgagccaggaggatgaggacctgcccccccggaacgagatagaccctccccggaagcgtgtggactccccgatgctgaaccggcacggcaagcggcggccagaacgcaaatccatggaggtgctcagcgtgacggacggcggctccccggtgcctgcgcggcgggccattgagatggcccagcacggccagaggtctcggtccatcagcggtgcctcctcaggcctttccaccagcccactcagcagcccccgggtgacccctcacccctcaccaaggggcagtcccctccccacccccaaggggacacctgtccacacgccaaaggagagcccggctggcacgcccaaccccacgcccccgtccagccccagcgtcggaggggtgccctggagggcgcggctcaactccatcaagaacagctttctgggctcaccccgcttccaccgccggaaactgcaagttccgacgccggaggagatgtccaacctgacaccagagtcgtccccagagctggcgaagaagtcctggtttgggaacttcatcagcctggagaaggaggagcagatcttcgtggtcatcaaagacaaacctctgagctccatcaaggctgacatcgtgcacgccttcctgtcgattcccagtctcagccacagcgtcatctcccaaacgagcttccgggccgagtacaaggccacgggggggccagccgtgttccagaagccggtcaagttccaggttgatatcacctacacggagggtggggaggcgcagaaggagaacggcatctactccgtcaccttcaccctgctctcaggccccagccgtcgcttcaagagggtggtggagaccatccaggcccagctgctgagcacacacgacccgcctgcggcccagcacttgtcagacaccactaactgtatggaaatgatgacggggcggctttccaaatgtgacgagaagaacgggcaggcggcccaggcccccagcacgcccgccaagcggagtgcccacggcccactcggtgactccgcggccgctggccctggccccggaggggacgccgagtacccaacgggcaaggacacggccaagatgggcccgcccaccgcccgccgcgagcagccttagacacactagcccccccccccagcacagcactgacagcggctgcctcgccgcccgccgcccgccctgccccgagtggacccgcggccgcgccgcccgtccgtccagactgttctcagagcctgggaggaaaggaaaggggcgttggggccggcctgtgggctgcgccacccgcgcccgctctcttttctctctgtctctgcctctgcctgtctctgacagcatcgcttgtttccactctgataccaggaattatcccgaaaagttaacatgtcacctccacgaggccatcctctgtgaccgaaggcagctgctgcggacccgccctccctccgctcctgctgttgctgccgggcagtgaggcccagcccagcgccccgtccaccccgcggcagctcctcgcctcagctccgcacggcccgtgggaggaaggccaggctcgggggagcctcctccagcccggccgacccggactcccggtcacctgacccctcagcaagaacagcctgcctggtggccttctggggccaggacccctggtgggcaacgtagccacaggaacaggccccgtccaccgcctccacgccgcacctggaggcctcctcgcaggcccgtgccccgcctccctggctgcgccgcctccgtgtagtcttggcctcctcaggctgcctcccgtcctctcgtctcacccgcgcctcccttgcctcatctggggcggctgtgggctctggcgctcctctctggctgaggtggaaacagagacaccctgcggcaccagagccttcccagcaggccaggccgctgggctgggatcagtgttatttatttgccgttttaatttatggattctccgcacctctgttcagggaagggcggcggccacatcccctgccgtctgcgtgtctcaggcagtgggggggctggggccagggcgccctctgaggacagagctggtggggcgcgggggggctggcgagctactgtaaactttaaagaattcctgcaagatatttttataaactttt

SEQ ID NO: 91072 - protein, 587 aa, Artificial Sequence
  derived and/or modified sequence
MLPQRNLSKRQVPTMHIPVKTRRLLAALKVLDTKDLTIEKVVINGQEVKYALGERQSYKGSPMEISLPIALSKNQEIVIEISFETSPKSSALQWLTPEQTSGKEHPYLFSQCQAIHCRAILPCQDTPSVKLTYTAEVSVPKELVALMSAIRDGETPDPEDPSRKIYKFIQKVPIPCYLIALVVGALESRQIGPRTLVWSEKEQVEKSAYEFSETESMLKIAEDLGGPYVWGQYDLLVLPPSFPYGGMENPCLTFVTPTLLAGDKSLSNVIAHEISHSWTGNLVTNKTWDHFWLNEGHTVYLERHICGRLFGEKFRHFNALGGWGELQNSVKTFGETHPFTKLVVDLTDIDPDVAYSSVPYEKGFALLFYLEQLLGGPEIFLGFLKAYVEKFSYKSITTDDWKDFLYSYFKDKVDVLNQVDWNAWLYSPGLPPIKPNYDMTLTNACIALSQRWITAKEDDLNSFNATDLKDLSSHQLNEFLAQTLQRAPLPLGHIKRMQEVYNFNAINNSEIRFRWLRLCIQSKWEDAIPLALKMATEQGRMKFTRPLFKDLAAFDKSHDQAVRTYQEHKASMHPVTAMLVGKDLKVD

SEQ ID NO: 91073 - DNA, 1764 bp, Artificial Sequence
  derived and/or modified sequence
atgctcccccagcgcaatcttagcaaaaggcaggtcccaactatgcacattcctgtgaagacgcgacggcttctcgcagctctcaaggtactggacactaaggacctaactatcgagaaggtcgtcatcaatgggcaagaagttaaatacgctttaggcgagcgtcagtcttataagggaagtccgatggagatctcgcttccaattgctttaagcaaaaaccaggaaatcgttattgagatctcatttgagacctcacccaagagcagcgcgctgcagtggctcactccggaacaaaccagcggcaaggagcacccctacctgtttagtcaatgccaagctattcactgcagggccattctgccctgccaggacaccccaagcgttaagctgacttatacagccgaagtgagcgttccaaaagagcttgtggccctgatgagcgccatccgggatggcgagaccccagaccccgaggacccttcaaggaaaatttacaaattcattcagaaagtgcccataccttgctacttgatcgctttagtcgttggagccctcgagtccagacagattggccctaggaccctcgtttggagcgagaaggagcaggtcgagaagtccgcttacgaattctcagaaacagagtccatgctgaaaatcgcggaggacctgggcggcccatacgtgtggggacaatatgatttgctggtgttacccccgagcttcccctatggcggtatggaaaacccctgcctcaccttcgtgactccgacactgttggcaggggacaagagccttagcaacgtgatcgcgcatgagatctcacactcttggactgggaatctcgtgactaacaagacttgggaccatttctggctcaacgaggggcacacagtctatctggagcgccatatttgtggtcggctgttcggggaaaaattccgtcattttaatgcccttggcgggtggggcgaacttcagaattcagtgaaaactttcggggaaacccacccatttaccaagctggtggtggacctgaccgatatcgacccggatgtggcctattcaagcgtcccatatgagaagggttttgccctccttttctatctggaacagctcttgggcggcccagaaattttcctcggttttctaaaagcctatgttgaaaagttctcttataagagcattaccactgatgactggaaggatttcttgtactcatatttcaaggacaaggtggacgtgctaaaccaggtggattggaatgcttggttatacagtccaggattaccgcccattaagcccaattacgatatgactctcaccaacgcctgtatcgccctcagccagaggtggataacagcgaaggaggacgatcttaactccttcaacgccacggacctcaaagatttgtcttcccaccagctcaacgaattcctggcgcagaccctgcagcgggccccgcttcctctggggcatattaaacggatgcaagaggtgtacaattttaatgcaattaataattctgaaattaggtttagatggctgcggctgtgtatccagagcaagtgggaagacgcaatacccctggccctcaagatggctaccgagcaggggaggatgaaattcactagacccctttttaaagatctcgccgcatttgataagagtcacgatcaggccgtccggacgtaccaggaacataaagcatcgatgcaccctgtaaccgctatgctcgtggggaaagacttgaaagtggattag

SEQ ID NO: 91074 - DNA, 1764 bp, Artificial Sequence
  derived and/or modified sequence
atgctgccccagaggaacctgagcaagaggcaggtgcccaccatgcacatccctgtgaagacccggcggctgctggccgccctgaaggtgctggacaccaaggacctgaccatcgagaaggtggtgatcaatggccaggaggtgaagtatgccctgggggagcggcagagctacaagggcagccccatggagatcagcctgcccatcgccctgagcaagaaccaggagatcgtgattgagatcagctttgagaccagccccaagagcagcgccctgcagtggctgaccccagagcagaccagcggcaaggagcacccctacctgttcagccagtgccaggccatccactgccgggccatcctgccctgccaggacacccccagcgtgaagctgacctacacagctgaggtgtctgtgcccaaggagctggtggccctgatgtctgccatcagagatggagagaccccagaccctgaggaccccagcaggaagatctacaagttcatccagaaggtgcccatcccctgctacctgattgccctggtggtgggcgccctggagagccggcagatcggccccaggaccctggtgtggagcgagaaggagcaggtggagaagagcgcctatgagttcagcgagacagagagcatgctgaagattgctgaggacctgggcggcccctacgtgtggggccagtatgacctgctggtgctgcccccatccttcccctacggcggcatggagaacccctgcctgacctttgtgacccccaccctgctggccggggacaagagcctgagcaatgtcatcgcccacgagatcagccacagctggacaggcaacctggtgaccaacaagacctgggaccacttctggctgaatgaaggccacacagtgtacctggagcggcacatctgtggccgcctgtttggagagaagttccgccacttcaatgccctgggcggctggggcgagctgcagaacagcgtgaagacctttggagagacccaccccttcaccaagctggtggtggacctgacagacattgatcctgatgtggcctacagctctgtgccctatgagaagggctttgccctgctcttctacctggagcagctgctgggcggccctgagatcttcctgggcttcctgaaggcctacgtggagaagttctcctacaagagcatcaccacagatgactggaaggacttcctgtacagctacttcaaggacaaggtggatgtgctgaaccaggtggactggaatgcctggctgtacagccctggcctgccccccatcaagcccaactatgacatgaccctgaccaatgcctgcatcgccctgagccagcgctggatcacagccaaggaggatgacctgaacagcttcaatgccacagacctgaaggacctgagcagccaccagctgaatgagttcctggcccagaccctgcagagggcccccctgcccctgggccacatcaagaggatgcaggaggtgtacaacttcaatgccatcaacaacagcgagatccgcttccgctggctgcggctgtgcatccagagcaagtgggaggatgccatccccctggccctgaagatggccacagagcagggccgcatgaagttcacccggcccctcttcaaggacctggccgcctttgacaagagccatgaccaggccgtgaggacctaccaggagcacaaggcctccatgcaccctgtgacagccatgctggtgggcaaggacctgaaggtggactag

SEQ ID NO: 91075 - DNA, 2025 bp, Artificial Sequence
  derived and/or modified sequence
atgtttgtcttttaaagcaacaagggaagagggcaagaggatgcatgggcttgggagtttattttctctcctcctgtctacacctcctctaatctgtctcccatgctgccacagagaaatctttctaaaagacaagtaccgaccatgcatatcccagttaagactcgtcgacttcttgcagccttaaaggttttggatacaaaggaccttacaatagaaaaagtagtgatcaatggacaagaagtcaaatatgctcttggagaaagacaaagttacaagggatcgccaatggaaatctctcttcctatcgctttgagcaaaaatcaagaaattgttatagaaatttcttttgagacctctccaaaatcttctgctctccagtggctcactcctgaacagacttctgggaaggaacacccatatctctttagtcagtgccaggccatccactgcagagcaatccttccttgtcaggacactccttctgtgaaattaacctatactgcagaggtgtctgtccctaaagaactggtggcacttatgagtgctattcgtgatggagaaacacctgacccagaagacccaagcaggaaaatatacaaattcatccaaaaagttccaataccctgctacctgattgctttagttgttggagctttagaaagcaggcaaattggcccaagaactttggtgtggtctgagaaagagcaggtggaaaagtctgcttatgagttttctgagactgaatctatgcttaaaatagcagaagatctgggaggaccgtatgtatggggacagtatgacctattggtcctgccaccatccttcccttatggtggcatggagaatccttgccttacttttgtaactcctactctactggcaggcgacaagtcactctccaatgtcattgcacatgaaatatctcatagctggacagggaatctagtgaccaacaaaacttgggatcacttttggttaaatgagggacatactgtgtacttggaacgccacatttgcggacgattgtttggtgaaaagttcagacattttaatgctctgggaggatggggagaactacagaattcggtaaagacatttggggagacacatcctttcaccaaacttgtggttgatctgacagatatagaccctgatgtagcttattcttcagttccctatgagaagggctttgctttacttttttaccttgaacaactgcttggaggaccagagattttcctaggattcttaaaagcttatgttgagaagttttcctataagagcataactactgatgactggaaggatttcctgtattcctattttaaagataaggttgatgttctcaatcaagttgattggaatgcctggctctactctcctggactgcctcccataaagcccaattatgatatgactctgacaaatgcttgtattgccttaagtcaaagatggattactgccaaagaagatgatttaaattcattcaatgccacagacctgaaggatctctcttctcatcaattgaatgagtttttagcacagacgctccagagggcacctcttccattggggcacataaagcgaatgcaagaggtgtacaacttcaatgccattaacaattctgaaatacgattcagatggctgcggctctgcattcaatccaagtgggaggacgcaattcctttggcgctaaagatggcaactgaacaaggaagaatgaagtttacccggcccttattcaaggatcttgctgcctttgacaaatcccatgatcaagctgtccgaacctaccaagagcacaaagcaagcatgcatcccgtgactgcaatgctggtggggaaagacttaaaagtggattaaagacctgcgtattgatgattttagagatttctcttttttaaatggaattcgtaaagaaatataaaacttcagctcacaattaaaactgtctttttagttttggctttttattgttttgttggtgattttactgaaataaagttgagctacttcttctta

SEQ ID NO: 91076 - DNA, 1764 bp, Artificial Sequence
  derived and/or modified sequence
atgctgccccagcggaacctgagcaagcggcaggtgcccaccatgcacatcccagttaagacccgccgtctcttggcggcgctcaaggtcttggacacaaaagatctcactatagagaaggtggtgatcaatggccaggaagtcaaatatgccctgggagagcgtcagtcttacaagggatcacccatggagatcagcctccctatcgccctctcaaaaaaccaggaaattgtgattgaaatatcttttgagacatcaccaaaatccagcgccctgcagtggttaactccggagcagactagtggcaaagaacatccctacttattcagccagtgccaggccattcactgccgggccattctcccatgtcaagatacgcctagcgtgaagctgacctatacagccgaagtgagcgttcccaaggaactcgtagccctaatgagtgctattagagatggcgagacacccgatcccgaagaccccagtaggaagatctataaatttatccagaaggtccctatcccatgctatctgatcgccctagtcgtgggcgcactggaatctcggcagatcggccccaggacactagtgtggagcgaaaaagagcaggttgaaaagtcggcctacgagttcagcgagactgagtccatgttgaagatcgcggaagatctgggaggcccttatgtgtggggtcagtacgacctcttggttcttccacccagttttccctacggcggcatggaaaacccatgtctgactttcgtcacccctacattgctggcgggggataagtccctgtcaaatgttatagcccatgagatctctcactcctggacagggaacctcgtgactaacaagacttgggatcacttttggctgaacgaaggccacaccgtgtacctcgagcggcatatctgcggccggctgttcggagagaagttcagacactttaatgccttaggagggtggggcgaactccagaactctgttaagaccttcggtgagacccacccgttcactaaattggtggtcgatctgactgatattgatccggacgtggcttactccagcgtgccatacgagaaaggttttgccctcctgttttacctggagcagctgctggggggcccagaaatctttttgggatttcttaaagcttatgtggaaaagttcagctacaaatccattacgacagatgactggaaggacttcctttacagctattttaaagataaggtcgacgtcctgaatcaggtggactggaacgcatggctgtactccccaggactccctccaatcaaacccaattacgatatgactcttactaacgcctgcatcgccctctcccagagatggatcacggccaaggaagacgatctgaatagtttcaacgccactgacctgaaagacctgagtagccaccagctcaacgagtttctggcacaaacacttcaacgcgcccctcttccactggggcacattaaacgaatgcaggaggtctacaatttcaacgctattaataacagcgagattcggtttcggtggctgaggttatgtattcagagcaaatgggaagatgccattcccctcgcgctcaaaatggcaactgaacaagggcgcatgaaattcaccagaccccttttcaaggacctagctgcattcgacaagtcacacgaccaggccgttagaacctaccaggaacataaggcctccatgcaccccgtcactgcgatgctggtgggcaaagatttaaaggtggattag

SEQ ID NO: 91077 - DNA, 1764 bp, Artificial Sequence
  derived and/or modified sequence
atgctgcctcagaggaatctaagcaagagacaggtcccaaccatgcacataccagtgaagacacgcagattactcgccgcactcaaggtgctggataccaaggaccttaccatagagaaggtcgtgataaacggtcaagaggtgaagtacgcacttggagagcgacagtcctataaaggctcaccaatggaaattagtctcccgattgccctgtctaaaaaccaggaaatagtgatcgagatttcctttgagacctctcccaaaagtagtgctctgcagtggttgactcccgaacagacaagcgggaaagaacatccgtacttattctcgcagtgtcaggccattcactgccgcgctatactgccttgtcaagataccccttctgttaaactcacctatacagctgaagtatccgtgcctaaggaactcgttgctcttatgagtgcgatcagggacggcgagactccagacccagaggatccatccaggaaaatctacaaattcattcaaaaggtgcccatcccctgttatctaatcgcgctcgtcgtaggggctcttgaatcacgacagatcggcccacggacattagtctggtcagagaaggagcaagtggaaaagtctgcttatgagtttagtgaaacagaatcaatgctgaagatcgccgaggacctgggcggaccctatgtgtggggacaatacgatctcctggtgctgccccctagtttcccatatgggggaatggaaaacccctgcctcaccttcgtgaccccaacattacttgcaggtgacaaaagtctatcaaacgtgattgcgcatgaaatttcgcattcctggacagggaacctggtcaccaacaaaacatgggatcatttctggctgaatgaaggacacaccgtatatctagagcggcatatctgtggacgtctgttcggcgagaagtttcgccatttcaacgctctggggggttggggggagctgcagaactcggtgaaaacgtttggggagacccacccttttactaagctggtggtcgacctcaccgacatagacccagacgtagcttacagtagcgtcccttatgagaaagggtttgcgctcctattctacctggagcagttgctcggcggaccagagatatttctgggtttcttgaaggcgtacgtggaaaaattcagttataagtctattaccactgacgattggaaggatttcttgtatagctattttaaggataaggtggacgtactcaatcaagtcgactggaatgcttggctgtactctcctgggcttcctcccattaaacctaactacgatatgacactcaccaatgcttgcatcgcactgtctcaacgatggattactgccaaagaggacgacttgaattccttcaatgccacggacctaaaagatctctcctcccatcagctcaatgagtttctggcccagacactgcagagggccccactaccgttaggccatatcaaaagaatgcaggaggtgtataactttaacgctattaacaattctgagatccgatttcgctggctcaggctctgtatacagtccaaatgggaggacgctatccccctggccctgaaaatggccaccgaacagggcaggatgaagtttacacgtcctttgtttaaggatcttgcagcttttgacaaatcacacgaccaggctgtcaggacctatcaggagcataaggcctccatgcaccctgtcacagcaatgctcgtgggaaaagacctaaaggtcgactag

SEQ ID NO: 91078 - DNA, 1764 bp, Artificial Sequence
  derived and/or modified sequence
atgctgccccagagaaacctgagcaagagacaggtgcccaccatgcacatccccgtgaagaccagaagactgctggccgccctgaaggtgctggacaccaaggacctgaccatcgagaaggtggtgatcaacggccaggaggtgaagtacgccctgggcgagagacagagctacaagggcagccccatggagatcagcctgcccatcgccctgagcaagaaccaggagatcgtgatcgagatcagcttcgagaccagccccaagagcagcgccctgcagtggctgacccccgagcagaccagcggcaaggagcacccctacctgttcagccagtgccaggccatccactgcagagccatcctgccctgccaggacacccccagcgtgaagctgacctacaccgccgaggtgagcgtgcccaaggagctggtggccctgatgagcgccatcagagacggcgagacccccgaccccgaggaccccagcagaaagatctacaagttcatccagaaggtgcccatcccctgctacctgatcgccctggtggtgggcgccctggagagcagacagatcggccccagaaccctggtgtggagcgagaaggagcaggtggagaagagcgcctacgagttcagcgagaccgagagcatgctgaagatcgccgaggacctgggcggcccctacgtgtggggccagtacgacctgctggtgctgccccccagcttcccctacggcggcatggagaacccctgcctgaccttcgtgacccccaccctgctggccggcgacaagagcctgagcaacgtgatcgcccacgagatcagccacagctggaccggcaacctggtgaccaacaagacctgggaccacttctggctgaacgagggccacaccgtgtacctggagagacacatctgcggcagactgttcggcgagaagttcagacacttcaacgccctgggcggctggggcgagctgcagaacagcgtgaagaccttcggcgagacccaccccttcaccaagctggtggtggacctgaccgacatcgaccccgacgtggcctacagcagcgtgccctacgagaagggcttcgccctgctgttctacctggagcagctgctgggcggccccgagatcttcctgggcttcctgaaggcctacgtggagaagttcagctacaagagcatcaccaccgacgactggaaggacttcctgtacagctacttcaaggacaaggtggacgtgctgaaccaggtggactggaacgcctggctgtacagccccggcctgccccccatcaagcccaactacgacatgaccctgaccaacgcctgcatcgccctgagccagagatggatcaccgccaaggaggacgacctgaacagcttcaacgccaccgacctgaaggacctgagcagccaccagctgaacgagttcctggcccagaccctgcagagagcccccctgcccctgggccacatcaagagaatgcaggaggtgtacaacttcaacgccatcaacaacagcgagatcagattcagatggctgagactgtgcatccagagcaagtgggaggacgccatccccctggccctgaagatggccaccgagcagggcagaatgaagttcaccagacccctgttcaaggacctggccgccttcgacaagagccacgaccaggccgtgagaacctaccaggagcacaaggccagcatgcaccccgtgaccgccatgctggtgggcaaggacctgaaggtggactag

SEQ ID NO: 91079 - protein, 508 aa, Artificial Sequence
  derived and/or modified sequence
MLPQRNLSKRQVPTMHIPVKTRRLLAALKVLDTKDLTIEKVVINGQEVKYALGERQSYKGSPMEISLPIALSKNQEIVIEISFETSPKSSALQWLTPEQTSGKEHPYLFSQCQAIHCRAILPCQDTPSVKLTYTAEVSVPKELVALMSAIRDGETPDPEDPSRKIYKFIQKVPIPCYLIALVVGALESRQIGPRTLVWSEKEQVEKSAYEFSETESMLKIAEDLGGPYVWGQYDLLVLPPSFPYGGMENPCLTFVTPTLLAGDKSLSNVIAHEISHSWTGNLVTNKTWDHFWLNEGHTVYLERHICGRLFGEKFRHFNALGGWGELQNSVKTFGETHPFTKLVVDLTDIDPDVAYSSVPYEKGFALLFYLEQLLGGPEIFLGFLKAYVEKFSYKSITTDDWKDFLYSYFKDKVDVLNQVDWNAWLYSPGLPPIKPNYDMTLTNACIALSQRWITAKEDDLNSFNATDLKDLSSHQLNEFLAQTLQRMAAALHSIQVGGRNSFGAKDGN

SEQ ID NO: 91080 - DNA, 1527 bp, Artificial Sequence
  derived and/or modified sequence
atgttgccgcagcgaaatctgtctaagcgtcaggttcctactatgcatatcccagtaaaaaccaggcgtctgctcgccgcgttaaaagtgcttgacacaaaggatctgacaattgaaaaagtagtcataaatggtcaggaggtgaagtatgctctgggtgagcgccagtcctataagggcagccctatggagattagtctgccaattgccctgagcaagaatcaggagattgtgattgaaatatcattcgagaccagtcccaaatcttccgcgttgcagtggctgaccccagaacagaccagcgggaaggaacatccttatctgttctcccagtgccaagccattcactgtcgcgcaatcctcccctgccaggacacaccatctgtaaaactcacttatactgcggaagtctctgtgccaaaggaattagttgccctcatgagtgctatcagggatggggagacgcctgatccagaggatccatctcgtaagatttataaatttatccagaaggtacctatcccctgctacctgattgccctggtggttggcgctctcgagtctcgacagatcggcccaagaactctggtgtggtccgaaaaagagcaggtggagaagtctgcctatgaattctctgagacggaaagcatgctcaagatagccgaggatctgggcggcccttacgtatggggacagtacgacctcctggtgctccctccctcgttcccctacgggggcatggagaatccatgcctgacattcgtgactcccaccctactggccggagacaagagtctgagtaacgtgatcgcacacgagatcagtcattcctggacgggcaatctggtgacaaataagacatgggatcacttctggctgaatgaagggcacacagtgtatttggagcggcacatatgtgggcgtctgttcggcgaaaagtttcggcattttaacgcgctggggggttggggggagttacagaactctgtgaagacttttggagagacacatccattcacgaagctcgttgtggatctgactgatattgacccagacgtagcctatagtagtgtgccctacgaaaagggtttcgctttgctattttacttggagcagcttctgggcggacctgagatttttctcggcttcctgaaggcatatgtcgaaaaattttcatacaagagtatcacaactgatgactggaaggactttctgtattcttactttaaagacaaagttgatgtgctgaatcaggtggactggaacgcatggctctattcacccgggctgccccctatcaaacccaactacgacatgacccttaccaacgcgtgcatcgccctgtcccagaggtggattactgcaaaagaagatgatctaaatagctttaatgcgacagacctaaaggacctctcatcacaccagctgaatgagtttcttgcccagacactgcagcgtatggctgccgccctgcatagtattcaggtgggggggcggaacagctttggcgccaaggatgggaactag

SEQ ID NO: 91081 - DNA, 1527 bp, Artificial Sequence
  derived and/or modified sequence
atgctgccccagaggaacctgagcaagaggcaggtgcccaccatgcacatccctgtgaagacccggcggctgctggccgccctgaaggtgctggacaccaaggacctgaccatcgagaaggtggtgatcaatggccaggaggtgaagtatgccctgggggagcggcagagctacaagggcagccccatggagatcagcctgcccatcgccctgagcaagaaccaggagatcgtgattgagatcagctttgagaccagccccaagagcagcgccctgcagtggctgaccccagagcagaccagcggcaaggagcacccctacctgttcagccagtgccaggccatccactgccgggccatcctgccctgccaggacacccccagcgtgaagctgacctacacagctgaggtgtctgtgcccaaggagctggtggccctgatgtctgccatcagagatggagagaccccagaccctgaggaccccagcaggaagatctacaagttcatccagaaggtgcccatcccctgctacctgattgccctggtggtgggcgccctggagagccggcagatcggccccaggaccctggtgtggagcgagaaggagcaggtggagaagagcgcctatgagttcagcgagacagagagcatgctgaagattgctgaggacctgggcggcccctacgtgtggggccagtatgacctgctggtgctgcccccatccttcccctacggcggcatggagaacccctgcctgacctttgtgacccccaccctgctggccggggacaagagcctgagcaatgtcatcgcccacgagatcagccacagctggacaggcaacctggtgaccaacaagacctgggaccacttctggctgaatgaaggccacacagtgtacctggagcggcacatctgtggccgcctgtttggagagaagttccgccacttcaatgccctgggcggctggggcgagctgcagaacagcgtgaagacctttggagagacccaccccttcaccaagctggtggtggacctgacagacattgatcctgatgtggcctacagctctgtgccctatgagaagggctttgccctgctcttctacctggagcagctgctgggcggccctgagatcttcctgggcttcctgaaggcctacgtggagaagttctcctacaagagcatcaccacagatgactggaaggacttcctgtacagctacttcaaggacaaggtggatgtgctgaaccaggtggactggaatgcctggctgtacagccctggcctgccccccatcaagcccaactatgacatgaccctgaccaatgcctgcatcgccctgagccagcgctggatcacagccaaggaggatgacctgaacagcttcaatgccacagacctgaaggacctgagcagccaccagctgaatgagttcctggcccagaccctgcagaggatggctgctgccctgcacagcatccaggtgggcggcagaaattcctttggagccaaggatggcaactag

SEQ ID NO: 91082 - DNA, 1908 bp, Artificial Sequence
  derived and/or modified sequence
attctcctgcctcagcctcccgagtagctgggactacaggcgcatgtttgtcttttaaagcaacaagggaagagggcaagaggatgcatgggcttgggagtttattttctctcctcctgtctacacctcctctaatctgtctcccatgctgccacagagaaatctttctaaaagacaagtaccgaccatgcatatcccagttaagactcgtcgacttcttgcagccttaaaggttttggatacaaaggaccttacaatagaaaaagtagtgatcaatggacaagaagtcaaatatgctcttggagaaagacaaagttacaagggatcgccaatggaaatctctcttcctatcgctttgagcaaaaatcaagaaattgttatagaaatttcttttgagacctctccaaaatcttctgctctccagtggctcactcctgaacagacttctgggaaggaacacccatatctctttagtcagtgccaggccatccactgcagagcaatccttccttgtcaggacactccttctgtgaaattaacctatactgcagaggtgtctgtccctaaagaactggtggcacttatgagtgctattcgtgatggagaaacacctgacccagaagacccaagcaggaaaatatacaaattcatccaaaaagttccaataccctgctacctgattgctttagttgttggagctttagaaagcaggcaaattggcccaagaactttggtgtggtctgagaaagagcaggtggaaaagtctgcttatgagttttctgagactgaatctatgcttaaaatagcagaagatctgggaggaccgtatgtatggggacagtatgacctattggtcctgccaccatccttcccttatggtggcatggagaatccttgccttacttttgtaactcctactctactggcaggcgacaagtcactctccaatgtcattgcacatgaaatatctcatagctggacagggaatctagtgaccaacaaaacttgggatcacttttggttaaatgagggacatactgtgtacttggaacgccacatttgcggacgattgtttggtgaaaagttcagacattttaatgctctgggaggatggggagaactacagaattcggtaaagacatttggggagacacatcctttcaccaaacttgtggttgatctgacagatatagaccctgatgtagcttattcttcagttccctatgagaagggctttgctttacttttttaccttgaacaactgcttggaggaccagagattttcctaggattcttaaaagcttatgttgagaagttttcctataagagcataactactgatgactggaaggatttcctgtattcctattttaaagataaggttgatgttctcaatcaagttgattggaatgcctggctctactctcctggactgcctcccataaagcccaattatgatatgactctgacaaatgcttgtattgccttaagtcaaagatggattactgccaaagaagatgatttaaattcattcaatgccacagacctgaaggatctctcttctcatcaattgaatgagtttttagcacagacgctccagaggatggctgcggctctgcattcaatccaagtgggaggacgcaattcctttggcgctaaagatggcaactgaacaaggaagaatgaagtttacccggcccttattcaaggatcttgctgcctttgacaaatcccatgatcaagctgtccgaacctaccaagagcacaaagcaagcatgcatcccgtgactgcaatgctggtggggaaagacttaaaagtggattaaagacctgcgtattgatgattttagagatttctcttttttaaatggaattcgtaaagaaatataaaacttcagctcacaatta

SEQ ID NO: 91083 - DNA, 1527 bp, Artificial Sequence
  derived and/or modified sequence
atgctgccccagcggaacctgagcaagcggcaggtgcccaccatgcatattcctgtcaaaacgagacgactgttggctgctctgaaagtgttagacaccaaagacttaactattgagaaagtcgtcatcaacggacaggaggtcaaatatgcccttggggagcgtcagtcctataaaggctcacctatggagatttcgctccctatcgcgttgtccaagaatcaggagatagtgatcgagatctctttcgagaccagccccaaatcatcggctctgcaatggctgacacccgagcagacatctggaaaggagcacccatacctcttctcacagtgccaggctatccactgccgcgctatcctcccttgccaggatactcccagcgttaagttgacgtataccgccgaggtaagcgttccaaaggagctggtggccctgatgagcgcaatccgagatggagagactcctgaccctgaggatccatctcgcaagatttacaaattcatccagaaagtgcccatcccgtgttacttaatcgcgttagtggttggcgctttagagtctcggcaaataggaccccggactcttgtttggtctgaaaaagaacaagtcgaaaagtctgcctacgagttcagtgagaccgaatcgatgctgaaaatcgctgaggatttgggcggcccttatgtgtggggccaatacgatctgcttgttttgcccccaagcttcccatatggggggatggagaatccatgtttgaccttcgttacgcccacactgctggctggtgacaagagcctctccaatgtaattgcccatgaaatcagtcactcatggaccggcaatctggtcacaaacaagacttgggatcatttttggttgaacgaaggtcacaccgtatacttagagcggcacatctgtggacggctgtttggggagaagttccgccacttcaacgcattaggcggatggggagagttacagaactccgttaaaacattcggagagacccacccgtttacaaagctcgtcgttgacctgactgacattgacccagacgtggcctactctagtgtcccttatgagaagggctttgccttgctgttctacctcgagcaactgctcggcggacctgaaatctttcttggatttcttaaggcctacgtggagaagtttagctacaagtcaataaccacggacgattggaaagattttctttatagttactttaaagacaaggtagacgtgctgaaccaggtagactggaacgcttggctctatagccctggattgccacccattaaacccaattacgatatgacgctgactaacgcttgtatcgcattgtctcagcgctggattactgcgaaggaggacgatctcaactccttcaatgctaccgacttaaaggacctttcgtcacaccagctgaacgaattcctggcccagactcttcagaggatggcggctgcacttcactcgatacaggtcggtggacgaaactcctttggggccaaggacggaaactag

SEQ ID NO: 91084 - DNA, 1527 bp, Artificial Sequence
  derived and/or modified sequence
atgcttccccaacgaaacttatctaaacgacaggtgcctaccatgcatataccagtcaaaacacggaggctgttagccgcactcaaggtccttgacacaaaggatctgaccatagaaaaggtggtcataaatggtcaggaagtcaagtacgcccttggggagcgacagagttataagggatctcccatggaaatctctctacctatcgcactcagtaagaaccaggagatcgtcatcgaaatctcttttgaaacgtctccgaaatccagcgctctgcaatggctgacccccgaacaaacgtctggcaaggagcacccctaccttttctcacagtgtcaggcaattcactgcagggctatcctgccttgtcaggacacaccgagcgtgaagttgacatacacagccgaggtgtccgttcctaaagaactggtcgccctcatgagcgcgattcgggacggcgaaacacctgacccagaagacccatcccggaagatctacaagtttattcagaaagtcccaataccctgttatctaatagcactggttgtgggcgcattagagtcacgtcagatcggccctcgcacgctggtctggtcagaaaaagaacaggttgagaaatcggcctacgagttttcagagaccgagtcgatgctgaagatcgcagaggatttgggcggaccatacgtgtgggggcagtacgatctgctggtgttgcccccatctttcccatacgggggaatggagaacccctgtctgacctttgtgacgccaaccttactggccggtgacaaatccctgtccaacgtgatcgcccacgaaatatcacactcgtggactggcaacctcgtaacaaacaaaacatgggaccacttttggctcaatgaaggacacaccgtgtatctcgaaaggcatatttgcggtcgattattcggcgagaagttcaggcactttaatgcgctcggaggatggggggagctgcagaattcggtgaagacctttggcgagacacacccctttaccaagcttgttgtggatctgacggatatcgaccccgatgtggcctacagttctgttccctacgaaaagggtttcgccctgcttttttacctggaacagctgctcggcggaccagagatctttctcggctttctcaaggcctacgtggagaagttctcctataaatccatcactacagacgactggaaggatttcttgtacagctacttcaaagacaaagtggatgtactgaaccaggttgactggaacgcgtggttgtacagtccaggcctgcctcccatcaaacccaattatgacatgacactcacgaacgcatgtatcgcgcttagccagcgctggattacggctaaagaggatgatctgaactcatttaatgccacggacctcaaagacctctcaagccaccaactcaatgagttcctggcccagacactccagcggatggcagcagcccttcacagtatccaggtgggcggaaggaactctttcggggcaaaggacggcaactag

SEQ ID NO: 91085 - DNA, 1527 bp, Artificial Sequence
  derived and/or modified sequence
atgctgccccagagaaacctgagcaagagacaggtgcccaccatgcacatccccgtgaagaccagaagactgctggccgccctgaaggtgctggacaccaaggacctgaccatcgagaaggtggtgatcaacggccaggaggtgaagtacgccctgggcgagagacagagctacaagggcagccccatggagatcagcctgcccatcgccctgagcaagaaccaggagatcgtgatcgagatcagcttcgagaccagccccaagagcagcgccctgcagtggctgacccccgagcagaccagcggcaaggagcacccctacctgttcagccagtgccaggccatccactgcagagccatcctgccctgccaggacacccccagcgtgaagctgacctacaccgccgaggtgagcgtgcccaaggagctggtggccctgatgagcgccatcagagacggcgagacccccgaccccgaggaccccagcagaaagatctacaagttcatccagaaggtgcccatcccctgctacctgatcgccctggtggtgggcgccctggagagcagacagatcggccccagaaccctggtgtggagcgagaaggagcaggtggagaagagcgcctacgagttcagcgagaccgagagcatgctgaagatcgccgaggacctgggcggcccctacgtgtggggccagtacgacctgctggtgctgccccccagcttcccctacggcggcatggagaacccctgcctgaccttcgtgacccccaccctgctggccggcgacaagagcctgagcaacgtgatcgcccacgagatcagccacagctggaccggcaacctggtgaccaacaagacctgggaccacttctggctgaacgagggccacaccgtgtacctggagagacacatctgcggcagactgttcggcgagaagttcagacacttcaacgccctgggcggctggggcgagctgcagaacagcgtgaagaccttcggcgagacccaccccttcaccaagctggtggtggacctgaccgacatcgaccccgacgtggcctacagcagcgtgccctacgagaagggcttcgccctgctgttctacctggagcagctgctgggcggccccgagatcttcctgggcttcctgaaggcctacgtggagaagttcagctacaagagcatcaccaccgacgactggaaggacttcctgtacagctacttcaaggacaaggtggacgtgctgaaccaggtggactggaacgcctggctgtacagccccggcctgccccccatcaagcccaactacgacatgaccctgaccaacgcctgcatcgccctgagccagagatggatcaccgccaaggaggacgacctgaacagcttcaacgccaccgacctgaaggacctgagcagccaccagctgaacgagttcctggcccagaccctgcagagaatggccgccgccctgcacagcatccaggtgggcggcagaaacagcttcggcgccaaggacggcaactag

SEQ ID NO: 91086 - protein, 363 aa, Artificial Sequence
  derived and/or modified sequence
MSSPTTSSLDTPLPGNGPPQPGAPSSSPTVKEEGPEPWPGGPDPDVPGTDEASSACSTDWGVLSEEQIRKKKIRKQQQESQSQSQSPVGPQGSSSSASGPGASPGGSEAGSQGSGEGEGVQLTAAQELMIQQLVAAQLQCNKRSFSDQPKVTPWPLGADPQSRDARQQRFAHFTELAIISVQEIVDFAKQVPGFLQLGREDQIALLKASTIEIMLLETARRYNHETECITFLKDFTYSKDDFHRAGLQVEFINPIFEFSRAMRRLGLDDAEYALLIAINIFSADRPNVQEPGRVEALQQPYVEALLSYTRIKRPQDQLRFPRMLMKLVSLRTLSSVHSEQVFALRLQDKKLPPLLSEIWDVHE

SEQ ID NO: 91087 - protein, 191 aa, Artificial Sequence
  derived and/or modified sequence
MIQQLVAAQLQCNKRSFSDQPKVTLGREDQIALLKASTIEIMLLETARRYNHETECITFLKDFTYSKDDFHRAGLQVEFINPIFEFSRAMRRLGLDDAEYALLIAINIFSADRPNVQEPGRVEALQQPYVEALLSYTRIKRPQDQLRFPRMLMKLVSLRTLSSVHSEQVFALRLQDKKLPPLLSEIWDVHE

SEQ ID NO: 91088 - DNA, 1092 bp, Artificial Sequence
  derived and/or modified sequence
atgtccagtcctaccacctcctccttggacacaccactacctgggaacggtccaccccagccaggcgctccgagtagtagccctaccgtgaaggaggaagggcctgagccatggccaggcgggcccgatcctgacgtacctggtaccgatgaagctagcagtgcatgttcaaccgattggggtgttctatccgaagagcaaatccgaaaaaaaaagattaggaaacaacagcaggagagccagtctcagtcacaaagtcccgtaggcccgcaagggtcctcttcttctgcttccgggcctggggcaagcccgggcggctcggaagccggatcacagggctccggcgaaggagagggagtccaattaacagccgcccaagaactgatgatccagcaattggtggctgcacagctgcagtgcaacaagagaagcttctccgaccagccaaaggtgacaccctggcccctaggtgctgacccgcaaagtcgggacgcacgccagcaacggtttgcacactttactgaattagccataatctctgtgcaggaaatcgtggattttgcaaagcaggtgccgggatttttgcagctcggtcgggaggaccagattgcccttttaaaagcatcgacgatcgaaatcatgctcctggaaacggcaagacgatacaatcatgagacagagtgcattacctttctgaaggacttcacctacagtaaagacgattttcaccgggctggtctgcaagtggaatttataaacccaattttcgaattttctcgggccatgaggaggctcggcctggatgacgccgaatatgctctcctcatagccatcaacatttttagcgcagaccggccgaatgtccaggagcccggtagagttgaggcgctgcagcagccctacgtggaggccctcctgtcatacacccggatcaaacgaccacaggaccagctcaggtttcccagaatgttaatgaagctggtgtccctccggacactttcatctgtgcactctgagcaagtctttgcgctcaggttgcaggacaagaaactcccgcccctgctgagtgagatatgggatgtacacgagtag

SEQ ID NO: 91089 - DNA, 576 bp, Artificial Sequence
  derived and/or modified sequence
atgatacaacagctcgtggcagcccagctgcagtgcaacaagcgaagcttttcagatcaacctaaagtcaccttgggcagggaagatcagatcgcactgcttaaggccagcaccatcgagatcatgctgctggaaaccgccagaagatacaaccacgagactgaatgtattaccttccttaaggattttacctatagcaaagacgatttccacagagccggccttcaggtcgagtttattaaccccatctttgaatttagtagggccatgcgtagactgggtctcgacgacgctgagtatgcgttgctcatcgccatcaacatcttctcggccgatcggcctaacgtccaggagccagggcgggtggaagctctccagcagccctacgtggaggcactgctcagctacaccaggatcaagcgcccccaggatcagttgaggttcccccgaatgctgatgaagcttgtgtctttaagaactctgtcaagtgttcactccgagcaagtgtttgcactgcgcctgcaagacaaaaagctgcccccacttctgagcgaaatctgggacgtgcacgagtag

SEQ ID NO: 91090 - DNA, 1092 bp, Artificial Sequence
  derived and/or modified sequence
atgagcagccccaccaccagcagcctggacacccccctgcctggaaatggccccccccagcccggggcccccagcagcagccccaccgtgaaggaggagggccctgagccctggccaggcggccctgaccctgatgtgcctggaacagatgaggccagcagcgcctgcagcacagactggggcgtgctgtctgaggagcagatcaggaagaagaagatcaggaagcagcagcaggagagccagagccagagccagagccctgtgggcccccagggcagcagcagcagcgccagcggccctggggccagccctgggggcagcgaggccggcagccagggcagcggggagggggagggcgtgcagctgacagctgcccaggagctgatgatccagcagctggtggccgcccagctgcagtgcaacaagaggagcttcagtgaccagcccaaggtgaccccctggcccctgggcgctgacccccagagcagagatgcccggcagcagagatttgcccacttcacagagctggccatcatctctgtgcaggagatcgtggactttgccaagcaggtgcccggcttcctgcagctgggccgggaggaccagatcgccctgctgaaggccagcaccatcgagatcatgctgctggagacagcccggcgctacaaccacgagacagagtgcatcaccttcctgaaggacttcacctacagcaaggatgacttccacagagctggcctgcaggtggagttcatcaaccccatctttgagttcagccgggccatgaggcggctgggcctggatgatgctgaatatgccctgctgattgccatcaacatcttctctgctgaccggcccaacgtgcaggagcccggccgggtggaggccctgcagcagccctacgtggaggccctgctgagctacacccgcatcaagaggccccaggaccagctgcgcttccccaggatgctgatgaagctggtgtccctgcggaccctgagctctgtgcacagcgagcaggtgtttgccctgcggctgcaggacaagaagctgccccccctgctgtctgagatctgggatgtgcatgaatag

SEQ ID NO: 91091 - DNA, 576 bp, Artificial Sequence
  derived and/or modified sequence
atgatccagcagctggtggccgcccagctgcagtgcaacaagaggagcttcagtgaccagcccaaggtgaccctgggccgggaggaccagatcgccctgctgaaggccagcaccatcgagatcatgctgctggagacagcccggcgctacaaccacgagacagagtgcatcaccttcctgaaggacttcacctacagcaaggatgacttccacagagctggcctgcaggtggagttcatcaaccccatctttgagttcagccgggccatgaggcggctgggcctggatgatgctgaatatgccctgctgattgccatcaacatcttctctgctgaccggcccaacgtgcaggagcccggccgggtggaggccctgcagcagccctacgtggaggccctgctgagctacacccgcatcaagaggccccaggaccagctgcgcttccccaggatgctgatgaagctggtgtccctgcggaccctgagctctgtgcacagcgagcaggtgtttgccctgcggctgcaggacaagaagctgccccccctgctgtctgagatctgggatgtgcatgaatag

SEQ ID NO: 91092 - DNA, 1092 bp, Artificial Sequence
  derived and/or modified sequence
atgagcagccccaccaccagcagcctggacacccccctgcccggcaacgggcctccacagccgggtgctcccagcagctcaccaaccgttaaagaggagggtccagaaccatggccaggtggcccggatccggatgtccctggaacggatgaggcctctagcgcctgcagcacagactggggcgttctttctgaggagcagattcggaaaaaaaagattcgaaagcagcagcaggaaagccagtctcagtcccaatccccagtaggacctcaagggtcatcatcctcagcatcgggccctggcgctagccctggcgggagcgaggccggcagccagggtagcggtgagggggagggggtgcaactcacagccgcacaagaattgatgattcaacagttggtcgccgcccaattgcagtgcaataaaaggagttttagtgatcaacctaaagtcacaccctggcctctcggcgccgatcctcagtcaagagacgcaagacagcagaggttcgcacatttcactgaactggctatcatttccgttcaggaaatcgtggattttgccaagcaggtcccaggctttctacagttgggtcgggaggaccaaattgccctgctgaaggctagcacaattgagatcatgttattagaaactgccaggaggtacaaccacgagacagaatgcattacgttcctgaaagattttacttactcaaaggatgattttcatagggccggtctgcaggtggagttcatcaatcctattttcgaatttagtcgtgcaatgagacgtctgggcctcgacgacgccgagtacgccctcctgatagcaatcaatattttcagtgccgaccgacctaatgtacaagagcctgggagggtggaagcgctgcagcagccctacgtggaggccctcttatcatacaccagaatcaagcgtcctcaggatcagttgcgattcccgagaatgcttatgaagctagtctcactccgaactctgtcaagcgtgcactccgaacaagtgttcgccttacggctccaggacaaaaagctgccaccactgcttagcgagatctgggatgtccatgagtag

SEQ ID NO: 91093 - DNA, 576 bp, Artificial Sequence
  derived and/or modified sequence
atgatccagcagctggtggccgcccagctgcagtgcaacaagcggtctttctccgatcaacctaaggtgacacttggccgcgaggatcaaatcgctctgctgaaggcttccacaatagaaattatgttactggaaactgcaagacgctacaatcacgagaccgaatgcattacgttcttgaaggacttcacctacagtaaagatgatttccatagagccggactccaggtcgagttcataaaccccatttttgagttttcccgggccatgagaagactcgggctggacgatgcggaatatgctctgctaatcgccatcaacatcttttccgctgatcgcccgaatgtgcaggagcctgggagagtcgaagcgctgcaacaaccctatgtggaggccctgctgtcgtatactaggattaagagaccccaggatcaactgcgatttcctagaatgctgatgaagctcgtgagtttgaggaccttgagctctgtccactcagagcaggttttcgcgctgcgtctgcaggacaaaaagctcccacccctgctctcagaaatctgggatgttcacgaatag

SEQ ID NO: 91094 - DNA, 1466 bp, Artificial Sequence
  derived and/or modified sequence
gacgcaagggcggggttgccggaagaagtggcgaagttacttttgagggtatttgagtagcggcggtgtgtcaggggctaaagaggaggacgaagaaaagcagagcaagggaacccagggcaacaggagtagttcactccgcgagaggccgtccacgagacccccgcgcgcagccatgagccccgccccccgctgttgcttggagaggggcgggacctggagagaggctgctccgtgaccccaccatgtcctctcctaccacgagttccctggatacccccctgcctggaaatggcccccctcagcctggcgccccttcttcttcacccactgtaaaggaggagggtccggagccgtggcccgggggtccggaccctgatgtcccaggcactgatgaggccagctcagcctgcagcacagactggggcgtcctttctgaagaacagatccggaagaagaagattcggaaacagcagcaggagtcacagtcacagtcgcagtcacctgtggggccgcagggcagcagcagctcagcctctgggcctggggcttcccctggtggatctgaggcaggcagccagggctccggggaaggcgagggtgtccagctaacagcggctcaagaactaatgatccagcagttggtggcggcccaactgcagtgcaacaaacgctccttctccgaccagcccaaagtcacgccctggcccctgggcgcagacccccagtcccgagatgcccgccagcaacgctttgcccacttcacggagctggccatcatctcagtccaggagatcgtggacttcgctaagcaagtgcctggtttcctgcagctgggccgggaggaccagatcgccctcctgaaggcatccactatcgagatcatgctgctagagacagccaggcgctacaaccacgagacagagtgtatcaccttcttgaaggacttcacctacagcaaggacgacttccaccgtgcaggcctgcaggtggagttcatcaaccccatcttcgagttctcgcgggccatgcggcggctgggcctggacgacgctgagtacgccctgctcatcgccatcaacatcttctcggccgaccggcccaacgtgcaggagccgggccgcgtggaggcgttgcagcagccctacgtggaggcgctgctgtcctacacgcgcatcaagaggccgcaggaccagctgcgcttcccgcgcatgctcatgaagctggtgagcctgcgcacgctgagctctgtgcactcggagcaggtcttcgccttgcggctccaggacaagaagctgccgcctctgctgtcggagatctgggacgtccacgagtgaggggctggccacccagccccacagccttgcctgaccaccctccagcagatagacgccggcaccccttcctcttcctagggtggaaggggccctgggccgagcctgtagacctatcggctctcatccctt

SEQ ID NO: 91095 - DNA, 2362 bp, Artificial Sequence
  derived and/or modified sequence
agatgagactgcatggggcgggaactagagatggaggactttcccgcgcaagggggacaggctggactgaaagaggacacgggaagaacaaagacttagactcgaagccctcggatggtggcccttgcatgcttcagttcatgatgttggagactatttccccacccttgcggaaaaaccttctctctgtgccatgcagctactgccagggatggaggatggcgggaattggcaactaaagactgtcctcctaccctcttcagtgtgtccttcagcaatatgaagttaaaaccagtcttgctctgtccccaggctggagtgcagtggcacgatcttggctcactgcaacctccgcctcacgggttccagcgattctcctgcctcagtctcctgagtagctgggactacaggctcagagaagcgcatgaatgagctaaagccacaaagcgcggggctggaggtttggctcccaagaagcgaggaaatgggttcggaactcttctgccaagtcccagtagatctacccggtaaacttccggtgagtttccaacttccgtgcggggcagcagcttcggctggtcctaagcggaccggaagttcgtcaagtttcacgctccgcccctcttccggacgtgacgcaagggcggggttgccggaagaagtggcgaagttacttttgagggtatttgagtagcggcggtgtgtcaggggctaaagaggaggacgaagaaaagcagagcaagggaacccagggcaacaggagtagttcactccgcgagaggccgtccacgagacccccgcgcgcagccatgagccccgccccccgctgttgcttggagaggggcgggacctggagagaggctgctccgtgaccccaccatgtcctctcctaccacgagttccctggatacccccctgcctggaaatggcccccctcagcctggcgccccttcttcttcacccactgtaaaggaggagggtccggagccgtggcccgggggtccggaccctgatgtcccaggcactgatgaggccagctcagcctgcagcacagactgggtcatcccagatcccgaagaggaaccagagcgcaagcgaaagaagggcccagccccgaagatgctgggccacgagctttgccgtgtctgtggggacaaggcctccggcttccactacaacgtgctcagctgcgaaggctgcaagggcttcttccggcgcagtgtggcgtcctttctgaagaacagatccggaagaagaagattcggaaacagcagcaggagtcacagtcacagtcgcagtcacctgtggggccgcagggcagcagcagctcagcctctgggcctggggcttcccctggtggatctgaggcaggcagccagggctccggggaaggcgagggtgtccagctaacagcggctcaagaactaatgatccagcagttggtggcggcccaactgcagtgcaacaaacgctccttctccgaccagcccaaagtcacgctgggccgggaggaccagatcgccctcctgaaggcatccactatcgagatcatgctgctagagacagccaggcgctacaaccacgagacagagtgtatcaccttcttgaaggacttcacctacagcaaggacgacttccaccgtgcaggcctgcaggtggagttcatcaaccccatcttcgagttctcgcgggccatgcggcggctgggcctggacgacgctgagtacgccctgctcatcgccatcaacatcttctcggccgaccggcccaacgtgcaggagccgggccgcgtggaggcgttgcagcagccctacgtggaggcgctgctgtcctacacgcgcatcaagaggccgcaggaccagctgcgcttcccgcgcatgctcatgaagctggtgagcctgcgcacgctgagctctgtgcactcggagcaggtcttcgccttgcggctccaggacaagaagctgccgcctctgctgtcggagatctgggacgtccacgagtgaggggctggccacccagccccacagccttgcctgaccaccctccagcagatagacgccggcaccccttcctcttcctagggtggaaggggccctgggccgagcctgtagacctatcggctctcatcccttgggataagccccagtccaggtccaggaggctccctccctgcccagcgagtcttccagaaggggtgaaagggttgcaggtcccgaccactgacccttcccggctgccctccctccccagcttacacctcaagcccagcacgcagtgcaccttgaacagagggaggggaggacccatggctctcccccctagcccgggagaccagggccttcctcttcctctgcttttattt

SEQ ID NO: 91096 - DNA, 1092 bp, Artificial Sequence
  derived and/or modified sequence
atgagctcaccaacaacttcctcactggacaccccactaccaggaaacgggccacctcagccaggtgcgccttcaagttctccaaccgtgaaggaagaaggcccagagccgtggccaggcggtcccgatcccgatgtcccaggcaccgacgaggcaagttctgcctgcagcactgattggggggtgctttcagaagagcagatcaggaagaaaaagattagaaaacagcagcaggaatcccagtcccagagtcagtcacctgtgggccctcagggcagcagttcttcagcgtctggtccaggagcctcccctggaggcagcgaggcaggttctcagggcagtggagagggagagggggttcagctgacagccgcacaggaactgatgatccagcagttagtagcagcacagcttcagtgtaacaaacgatccttctccgaccaaccaaaggttactccatggcccttgggagccgaccctcaatcacgtgacgcacggcagcagcgttttgcacactttactgagctggccattatctccgtgcaagaaatcgtcgactttgcaaagcaggtcccaggctttcttcagttggggagagaggaccagatcgccttacttaaagcatccacaatcgaaatcatgcttctggaaactgcaaggaggtataaccacgagactgaatgcataaccttcctgaaagatttcacttatagtaaagacgatttccatcgagctgggttgcaggtcgagttcattaaccccattttcgagttctcaagagctatgcgcaggctcggattggatgacgcagagtacgcccttcttattgctattaacatttttagtgctgatcgtccaaacgtccaggagccgggtagggtggaggcattgcagcagccgtacgtcgaggcactcctgtcttatacccggattaaaaggccccaggaccaactgaggtttcctcgaatgctcatgaaactggtctccctgcgaactctgagctctgtgcactcagagcaagtgttcgcactgcggctgcaagacaagaagctgccaccacttctctccgagatctgggatgttcatgagtag

SEQ ID NO: 91097 - DNA, 576 bp, Artificial Sequence
  derived and/or modified sequence
atgattcagcagctggtggccgctcagctgcaatgcaacaagcgcagtttcagcgaccagcctaaagtcaccttgggtagggaagatcagatagctctgttgaaggcttctacaatcgagataatgctcttggaaaccgcacggaggtataatcacgaaacggaatgtataacattcctgaaggactttacttattccaaggacgacttccaccgggcaggcctccaggtagaattcattaatccgatatttgagttctccagggcaatgcgtaggctgggccttgatgatgcagaatacgccctgctgattgcgatcaatatcttttccgccgaccggccaaacgtgcaggaacccggaagagtcgaggcactgcaacagccttatgtagaagcacttcttagctacacgagaatcaaacgtccccaggaccagctcaggttccctaggatgctcatgaaattggttagccttcgaaccctgtcttcagtgcactcagaacaggtgttcgcattgcgactgcaagacaaaaagctccctccccttctgtctgagatctgggatgttcacgagtag

SEQ ID NO: 91098 - DNA, 1092 bp, Artificial Sequence
  derived and/or modified sequence
atgagcagccccaccaccagcagcctggacacccccctgcccggcaacggccccccccagcccggcgcccccagcagcagccccaccgtgaaggaggagggccccgagccctggcccggcggccccgaccccgacgtgcccggcaccgacgaggccagcagcgcctgcagcaccgactggggcgtgctgagcgaggagcagatcagaaagaagaagatcagaaagcagcagcaggagagccagagccagagccagagccccgtgggcccccagggcagcagcagcagcgccagcggccccggcgccagccccggcggcagcgaggccggcagccagggcagcggcgagggcgagggcgtgcagctgaccgccgcccaggagctgatgatccagcagctggtggccgcccagctgcagtgcaacaagagaagcttcagcgaccagcccaaggtgaccccctggcccctgggcgccgacccccagagcagagacgccagacagcagagattcgcccacttcaccgagctggccatcatcagcgtgcaggagatcgtggacttcgccaagcaggtgcccggcttcctgcagctgggcagagaggaccagatcgccctgctgaaggccagcaccatcgagatcatgctgctggagaccgccagaagatacaaccacgagaccgagtgcatcaccttcctgaaggacttcacctacagcaaggacgacttccacagagccggcctgcaggtggagttcatcaaccccatcttcgagttcagcagagccatgagaagactgggcctggacgacgccgagtacgccctgctgatcgccatcaacatcttcagcgccgacagacccaacgtgcaggagcccggcagagtggaggccctgcagcagccctacgtggaggccctgctgagctacaccagaatcaagagaccccaggaccagctgagattccccagaatgctgatgaagctggtgagcctgagaaccctgagcagcgtgcacagcgagcaggtgttcgccctgagactgcaggacaagaagctgccccccctgctgagcgagatctgggacgtgcacgagtag

SEQ ID NO: 91099 - DNA, 576 bp, Artificial Sequence
  derived and/or modified sequence
atgatccagcagctggtggccgcccagctgcagtgcaacaagagaagcttcagcgaccagcccaaggtgaccctgggcagagaggaccagatcgccctgctgaaggccagcaccatcgagatcatgctgctggagaccgccagaagatacaaccacgagaccgagtgcatcaccttcctgaaggacttcacctacagcaaggacgacttccacagagccggcctgcaggtggagttcatcaaccccatcttcgagttcagcagagccatgagaagactgggcctggacgacgccgagtacgccctgctgatcgccatcaacatcttcagcgccgacagacccaacgtgcaggagcccggcagagtggaggccctgcagcagccctacgtggaggccctgctgagctacaccagaatcaagagaccccaggaccagctgagattccccagaatgctgatgaagctggtgagcctgagaaccctgagcagcgtgcacagcgagcaggtgttcgccctgagactgcaggacaagaagctgccccccctgctgagcgagatctgggacgtgcacgagtag

SEQ ID NO: 91100 - protein, 502 aa, Artificial Sequence
  derived and/or modified sequence
MEGPVLTLGLLAALAVCGSWGLNEEERLIRHLFQEKGYNKELRPVAHKEESVDVALALTLSNLISLGWTDNRLKWNAEEFGNISVLRLPPDMVWLPEIVLENNNDGSFQISYSCNVLVYHYGFVYWLPPAIFRSSCPISVTYFPFDWQNCSLKFSSLKYTAKEITLSLKQDAKENRTYPVEWIIIDPEGFTENGEWEIVHRPARVNVDPRAPLDSPSRQDITFYLIIRRKPLFYIINILVPCVLISFMVNLVFYLPADSGEKTSVAISVLLAQSVFLLLISKRLPATSMAIPLIGKFLLFGMVLVTMVVVICVIVLNIHFRTPSTHVLSEGVKKLFLETLPELLHMSRPAEDGPSPGALVRRSSSLGYISKAEEYFLLKSRSDLMFEKQSERHGLARRLTTARRPPASSEQAQQELFNELKPAVDGANFIVNHMRDQNNYNEEKDSWNRVARTVDRLCLFVVTPVMVVGTAWIFLQGVYNQPPPQPFPGDPYSYNVQDKRFI

SEQ ID NO: 91101 - DNA, 1509 bp, Artificial Sequence
  derived and/or modified sequence
atggaaggcccagtgctgaccctcgggttgctcgcagccctggctgtctgcgggtcatggggattgaatgaggaggagagattgatccgtcatttattccaggagaagggttataataaggaattgaggcctgtggcccataaagaagaatcagtggacgtggcactcgcattgacccttagcaatctgatctcacttggatggacagacaacaggttaaaatggaacgccgaggagtttggaaatatcagcgtactcaggctgccacccgacatggtatggttacccgagatagtactagaaaacaataatgatggatcctttcagatttcttatagttgcaatgtcctggtctatcactacggatttgtctactggctgcctcctgcaatcttcaggtcctcgtgccccatctccgtgacatatttcccatttgattggcagaattgtagcctgaaattcagtagtctgaaatacacagctaaagagattactcttagccttaaacaggacgcaaaggaaaacagaacgtaccctgttgagtggatcatcatcgaccctgagggatttaccgaaaatggcgaatgggagatcgtgcatcggccagcccgcgtgaatgtggatccccgcgcccctctggattcccccagccggcaggatatcactttctacctcattattaggcggaaaccacttttctatattatcaatattctggtgccatgtgtgctcatttcctttatggtcaatcttgtgttttacctaccggcagactccggcgagaagacctccgttgcgataagcgtgcttctggcccagtctgtgtttttgctgctgatttccaagcggctgcccgctacttcaatggccatcccactcataggtaaattcctcttattcggaatggtgcttgtgacaatggttgtggtgatctgtgttattgtcctgaatatccacttcagaactccttcaacccatgtgctcagcgagggggtcaagaagctgttcctggagacccttcctgaactgctgcatatgtcgcgacccgccgaggacgggccaagccctggcgccctggtgcgtaggtcctccagcctgggctacatttccaaagcggaagagtattttctgttaaagtctaggtccgatctcatgttcgaaaagcagtctgaacgccatgggttagcaagacgcctgaccaccgcccgtaggccccccgccagttcagagcaagcccagcaagaactctttaacgagcttaagccagccgtggacggcgctaattttatcgtgaatcacatgcgcgaccaaaataattataacgaggaaaaggactcctggaatagggtagccaggacagtggaccggttgtgcttatttgtagtgacacccgtcatggtggtgggcacagcttggatttttctgcaaggggtctacaatcagccccctcctcaaccatttcccggcgatccatatagctacaatgtccaggacaaacgcttcatatag

SEQ ID NO: 91102 - DNA, 1509 bp, Artificial Sequence
  derived and/or modified sequence
atggagggccctgtgctgaccctgggcctgctggccgccctggccgtgtgtggctcctggggcctgaatgaggaggagcggctcatccgccacctgttccaggagaagggctacaacaaggagctgcggcctgtggcccacaaggaggagagcgtggatgtggccctggccctgaccctgagcaacctgatcagcctgggctggacagacaaccggctgaagtggaatgctgaggagtttggaaacatctctgtgctgcggctgcccccagacatggtgtggctgcctgagatcgtgctggagaacaacaatgatggcagcttccagatctcctacagctgcaatgtgctggtgtaccactacggctttgtgtactggctgcccccagccatcttccgcagcagctgccccatctctgtgacctacttcccctttgactggcagaactgcagcctgaagttcagcagcctgaagtacacagccaaggagatcaccctgagcctgaagcaggatgccaaggagaacagaacctaccctgtggagtggatcatcattgatcctgagggcttcacagaaaatggagagtgggagatcgtgcacaggcctgcccgggtgaatgtggacccccgggcccccctggacagccccagccggcaggacatcaccttctacctgatcatccggaggaagcccctcttctacatcatcaacatcctggtgccctgtgtgctgatctccttcatggtgaacctggtgttctacctgcctgctgacagcggggagaagacctctgtggccatctctgtgctgctggcccagagcgtcttcctgctgctgatcagcaagaggctgcctgccacctccatggccatccccctcatcggcaagttcctgctgtttggcatggtgctggtgaccatggtggtggtgatctgtgtgattgtgctgaacatccacttccgcacccccagcacccacgtgctgtctgaaggagtgaagaagctgttcctggagaccctgcctgagctgctgcacatgagcaggcctgcagaagatggccccagccctggggccctggtgagaagaagcagcagcctgggctacatcagcaaggccgaggagtacttcctgctgaagagcagaagtgacctgatgtttgagaagcagagcgagagacatggcctggcccggcggctgaccacagcccggcggcccccagccagcagcgagcaggcccagcaggagctgttcaatgagctgaagccagctgtggatggagccaacttcatcgtgaaccacatgagggaccagaacaactacaatgaggagaaggacagctggaacagagtggccaggacagtggaccggctgtgcctgtttgtggtgacccctgtgatggtggtgggcacagcctggatcttcctgcagggcgtgtacaaccagcccccaccccagcccttccctggggacccctacagctacaacgtgcaggacaagcgcttcatctag

SEQ ID NO: 91103 - DNA, 1509 bp, Artificial Sequence
  derived and/or modified sequence
atggagggccccgtgctgaccctgggcctgctggccgccctggccgtgtgcggatcttggggccttaatgaggaggaacgactgatcaggcacttgtttcaggaaaaaggctacaataaggaactgcgcccagtcgcccacaaggaagaaagcgtggacgtcgccctcgctctcaccctgagtaacctcatttcccttgggtggaccgataacagacttaagtggaacgcagaggagtttgggaacatatcagtgcttagactacccccggacatggtgtggctgcccgaaatcgtcctggaaaacaataacgacggatccttccagatttcatactcatgtaacgttctggtctatcactatggatttgtctactggctgccgccagctatctttagatcatcttgccctatttctgtgacctatttcccctttgactggcagaactgctcacttaagtttagcagcttgaaatacactgccaaggaaattactcttagcctaaagcaggatgctaaggagaatcgcacttacccggttgagtggattattatcgacccggaaggcttcacagaaaatggcgaatgggagattgtccaccgacctgcgcgggtgaatgtggatccaagggcccctctcgactcacctagtcgccaggacattactttctatctgattatcaggcggaagccactgttctatatcattaatatccttgttccctgcgtactgatttcttttatggtaaacctcgtgttctacctgccggctgacagtggtgagaagacgtccgtggccatcagcgtgttactggctcagtccgtattcctgctgctgatttccaagaggttacccgccacgagcatggcaataccactcattggcaaattcctgctgttcgggatggtgttagtgacaatggtcgtggtgatctgcgtcatcgttctgaatattcactttcggactccatcgacacatgtcctgtccgagggggtgaagaagctgttcctggaaactctcccagaacttcttcacatgagcagaccagcggaggacgggccttcccctggcgctttggtgagaaggagcagtagcctcggctacatttccaaggcggaagagtacttccttctgaagtcccgatctgacctcatgttcgaaaagcagtctgaacgccatggccttgccagacgcctgactaccgcaagacgccctcccgcctcttctgaacaggctcagcaggagttgttcaatgagttaaaaccggccgtcgatggagctaacttcatcgtgaaccacatgcgcgaccagaacaattataatgaagagaaggattcttggaaccgggtggctcggactgtggatagactctgcttattcgttgttacacctgttatggtagtggggacggcttggatttttttacaaggcgtgtataaccagccaccacctcaacctttccctggtgatccttattcttataacgtgcaggacaaacgatttatctag

SEQ ID NO: 91104 - DNA, 1509 bp, Artificial Sequence
  derived and/or modified sequence
atggaggggcctgtgctcacgctgggcctcctcgctgcactggctgtctgcggatcatggggcctcaacgaagaggagaggctgatacgtcatttgttccaggaaaagggctataataaggaactgcggcctgtggctcataaggaagagtcggtggacgttgccctggcccttacactgtcaaacctcatatctctcggatggactgataaccggctgaaatggaatgcggaagagtttggcaacatatcagttctgcgtctgccacccgatatggtgtggctaccggaaatcgtgttagagaataacaacgatgggtcctttcagatctcctacagttgcaacgttcttgtttaccattacggctttgtgtactggcttcctccggcaattttccgcagctcctgccccatttcggtcacttacttcccgtttgattggcagaattgctccctcaagttctcatctctgaaatacactgccaaggaaatcaccctaagtctcaagcaagatgccaaggagaataggacttaccctgtggagtggatcattattgaccccgaaggattcacagaaaacggggagtgggaaattgttcatcggcctgctcgtgtcaacgtggacccgagggcacctctcgactccccctcccggcaagacattaccttttatctcattattagacgtaagccactgttctatatcattaacattttagttccctgtgtgctcatttcttttatggtgaatctggtcttttatctgcccgctgactccggcgaaaagacctcagttgctatctctgtgttgcttgcacaatccgttttcttgctgctcatttccaagaggctccccgctacatccatggctatcccactgatagggaaattcctgctgttcggaatggtactggtgaccatggtggtggtaatatgtgttatcgttttaaatatccatttcaggaccccatcaactcatgtactctcagaaggcgtcaagaagctcttcctggagaccttgccagaactgctacacatgtcgcgtcctgctgaagacggaccgagccctggggcactcgtcaggaggagttcaagcttgggatatatctcaaaggctgaggagtactttctgctgaaatcacggagcgatcttatgtttgagaagcagtccgagcgccacggccttgccaggagacttaccactgctcgtcggccacccgcttccagcgaacaggctcagcaggaactattcaatgagcttaaacctgctgtggatggtgcaaattttattgttaaccacatgagggaccagaacaactataacgaagagaaagactcttggaatcgggtagcaagaacagtggataggctttgcttgttcgtagttacccccgtcatggtggtggggactgcttggatctttcttcagggagtgtacaaccaacctccccctcagccctttccaggcgacccatatagttacaatgtccaggacaagaggtttatctag

SEQ ID NO: 91105 - DNA, 1828 bp, Artificial Sequence
  derived and/or modified sequence
attccacagccctgtagacaggaggggcagatgcacgtcccagtcagagggatgggatggaggggccagtgctgacactggggctgctggctgccctggcggtgtgtggcagctgggggctgaacgaggaggagcggctgatccggcacctgtttcaagagaagggctacaacaaggagctccggcccgtggcacacaaagaggagagtgtggacgttgccctggccctcacactctccaacctcatctccctgggctggacagacaaccggctgaagtggaatgctgaagaatttggaaacatcagtgtcctgcgcctccccccggacatggtgtggctcccagagattgtgctggagaacaacaatgacggctccttccagatctcctactcctgcaacgtgcttgtctaccactacggcttcgtgtactggctgccacctgccatcttccgctcctcctgccccatctctgtcacctatttccccttcgactggcagaactgctccctcaagttcagttccctcaagtatacggccaaagagatcaccctgagcctgaaacaggatgccaaggagaaccgcacctaccccgtggagtggatcatcattgatcctgaaggcttcacagagaacggggagtgggagatagtccaccggccggccagggtcaacgtggaccccagagcccctctggacagccccagccgccaggacatcaccttctacctcatcatccgccgcaagcccctcttctacatcatcaacatcctggtgccctgcgtgctcatctccttcatggtcaacctggtcttctacctaccggctgacagtggtgagaagacatcagtggccatctcggtgctcctggctcagtctgtcttcctgctgctcatctccaagcgtctgcctgccacatccatggccatcccccttatcggcaagttcctgctcttcggcatggtgctggtcaccatggttgtggtgatctgtgtcatcgtgctcaacatccacttccgaacacccagcacccatgtgctgtctgagggggtcaagaagctcttcctggagaccctgccggagctcctgcacatgtcccgcccagcagaggatggacccagccctggggccctggtgcggaggagcagctccctgggatacatctccaaggccgaggagtacttcctgctcaagtcccgcagtgacctcatgttcgagaagcagtcagagcggcatgggctggccaggcgcctcaccactgcacgccggcccccagcaagctctgagcaggcccagcaggaactcttcaatgagctgaagccagctgtggatggggcaaacttcattgttaaccacatgagggaccagaacaattacaatgaggagaaagacagctggaaccgagtggcccgcacagtggaccgcctctgcctgtttgtggtgacgcctgtcatggtggtgggcacagcctggatcttcctgcagggcgtttacaaccagccaccaccccagccttttcctggggacccctactcctacaacgtgcaggacaagcgcttcatctagggtgggcctgttggggagccaggagacagcagggtctgagagaggagccacagtccctaatgacacccactcctagccctgaggctcgtgcccctcagactggggaagagtccaaggaagggagggagcagccactcctcaatgctcaatggctcccctgaaatcaagacaggggccacccgagatggtctgagggtggacatcggctacagtgggtgggcaggacgatttggggggaggcccgaggctggctcaggggccag

SEQ ID NO: 91106 - DNA, 1509 bp, Artificial Sequence
  derived and/or modified sequence
atggagggccccgtgctgaccctgggcctgctggccgccctggccgtgtgcggcagctggggcctgaacgaggaggagagactgatcagacacctgttccaggagaagggctacaacaaggagctgagacccgtggcccacaaggaggagagcgtggacgtggccctggccctgaccctgagcaacctgatcagcctgggctggaccgacaacagactgaagtggaacgccgaggagttcggcaacatcagcgtgctgagactgccccccgacatggtgtggctgcccgagatcgtgctggagaacaacaacgacggcagcttccagatcagctacagctgcaacgtgctggtgtaccactacggcttcgtgtactggctgccccccgccatcttcagaagcagctgccccatcagcgtgacctacttccccttcgactggcagaactgcagcctgaagttcagcagcctgaagtacaccgccaaggagatcaccctgagcctgaagcaggacgccaaggagaacagaacctaccccgtggagtggatcatcatcgaccccgagggcttcaccgagaacggcgagtgggagatcgtgcacagacccgccagagtgaacgtggaccccagagcccccctggacagccccagcagacaggacatcaccttctacctgatcatcagaagaaagcccctgttctacatcatcaacatcctggtgccctgcgtgctgatcagcttcatggtgaacctggtgttctacctgcccgccgacagcggcgagaagaccagcgtggccatcagcgtgctgctggcccagagcgtgttcctgctgctgatcagcaagagactgcccgccaccagcatggccatccccctgatcggcaagttcctgctgttcggcatggtgctggtgaccatggtggtggtgatctgcgtgatcgtgctgaacatccacttcagaacccccagcacccacgtgctgagcgagggcgtgaagaagctgttcctggagaccctgcccgagctgctgcacatgagcagacccgccgaggacggccccagccccggcgccctggtgagaagaagcagcagcctgggctacatcagcaaggccgaggagtacttcctgctgaagagcagaagcgacctgatgttcgagaagcagagcgagagacacggcctggccagaagactgaccaccgccagaagaccccccgccagcagcgagcaggcccagcaggagctgttcaacgagctgaagcccgccgtggacggcgccaacttcatcgtgaaccacatgagagaccagaacaactacaacgaggagaaggacagctggaacagagtggccagaaccgtggacagactgtgcctgttcgtggtgacccccgtgatggtggtgggcaccgcctggatcttcctgcagggcgtgtacaaccagccccccccccagcccttccccggcgacccctacagctacaacgtgcaggacaagagattcatctag

SEQ ID NO: 91107 - protein, 450 aa, Artificial Sequence
  derived and/or modified sequence
MGEPRAGAALDDGSGWTGSEEGSEEGTGGSEGAGGDGGPDAEGVWSPDIEQSFQEALAIYPPCGRRKIILSDEGKMYGRNELIARYIKLRTGKTRTRKQVSSHIQVLARRKSREIQSKLKDQVSKDKAFQTMATMSSAQLISAPSLQAKLGPTGPQVVQASELFQFWSGGSGPPWNVPDVKPFSQTPFTLSLTPPSTDLPGYEPPQALSPLPPPTPSPPAWQARGLGTARLQLVEFSAFVEPPDAVDSYQRHLFVHISQHCPSPGAPPLESVDVRQIYDKFPEKKGGLRELYDRGPPHAFFLVKFWADLNWGPSGEEAGAGGSISSGGFYGVSSQYESLEHMTLTCSSKVCSFGKQVVEKVETERAQLEDGRFVYRLLRSPMCEYLVNFLHKLRQLPERYMMNSVLENFTILQVVTNRDTQELLLCTAYVFEVSTSERGAQHHIYRLVRD

SEQ ID NO: 91108 - DNA, 1353 bp, Artificial Sequence
  derived and/or modified sequence
atgggcgagcccagagccggcgccgccctggacgacggcagcggctggaccggcagcgaggagggcagcgaggagggcaccggcggcagcgagggcgccggcggcgacggcggccccgacgccgagggcgtgtggagccccgacatcgagcagagcttccaggaggccctggccatctaccccccctgcggcagaagaaagatcatcctgagcgacgagggcaagatgtacggcagaaacgagctgatcgccagatacatcaagctgagaaccggcaagaccagaaccagaaagcaggtgagcagccacatccaggtgctggccagaagaaagagcagagagatccagagcaagctgaaggaccaggtgagcaaggacaaggccttccagaccatggccaccatgagcagcgcccagctgatcagcgcccccagcctgcaggccaagctgggccccaccggcccccaggtggtgcaggccagcgagctgttccagttctggagcggcggcagcggccccccctggaacgtgcccgacgtgaagcccttcagccagacccccttcaccctgagcctgaccccccccagcaccgacctgcccggctacgagcccccccaggccctgagccccctgcccccccccacccccagcccccccgcctggcaggccagaggcctgggcaccgccagactgcagctggtggagttcagcgccttcgtggagccccccgacgccgtggacagctaccagagacacctgttcgtgcacatcagccagcactgccccagccccggcgccccccccctggagagcgtggacgtgagacagatctacgacaagttccccgagaagaagggcggcctgagagagctgtacgacagaggccccccccacgccttcttcctggtgaagttctgggccgacctgaactggggccccagcggcgaggaggccggcgccggcggcagcatcagcagcggcggcttctacggcgtgagcagccagtacgagagcctggagcacatgaccctgacctgcagcagcaaggtgtgcagcttcggcaagcaggtggtggagaaggtggagaccgagagagcccagctggaggacggcagattcgtgtacagactgctgagaagccccatgtgcgagtacctggtgaacttcctgcacaagctgagacagctgcccgagagatacatgatgaacagcgtgctggagaacttcaccatcctgcaggtggtgaccaacagagacacccaggagctgctgctgtgcaccgcctacgtgttcgaggtgagcaccagcgagagaggcgcccagcaccacatctacagactggtgagagactag

SEQ ID NO: 91109 - DNA, 1353 bp, Artificial Sequence
  derived and/or modified sequence
atgggagagccaagagcgggcgcagctctggatgacgggtccgggtggacgggctccgaggaaggtagtgaggagggtaccggcggatcagaaggtgctgggggggacggcggcccggatgcagagggggtttggagtccagacatcgagcagtctttccaggaagctttggctatctacccaccctgtggccgaagaaaaataatcttgagcgacgagggcaaaatgtacgggaggaatgagttaatcgcgcggtatatcaagttgcggacaggcaaaacccggacccgtaaacaggtctcgtcacacatccaagtgctagctcggcggaaaagcagagagatccagagtaaactgaaagatcaggtttcaaaggataaggctttccagactatggctaccatgtccagcgcccagctaattagcgccccctctctccaggcaaaactcggcccaacgggaccccaagtggtgcaggccagtgagctcttccagttctggagtggcggctcgggccccccttggaatgtaccagacgtgaagccgttctcgcagactccctttaccctgtctttgacccccccctccacagacttgccagggtatgagcccccccaagctctctccccccttccacctccaaccccctctccaccggcgtggcaggcacggggcctagggaccgcccgattgcagctggttgagttttccgctttcgtggaaccgcccgacgccgtggatagctaccagcggcacctcttcgtccacatttcacagcattgccccagccccggagcaccccccctggagagcgtggacgtccgtcagatttacgataagttccctgagaagaaaggcgggctccgcgaactgtatgatagaggacctcctcatgctttcttcctggttaaattctgggcagatttgaattggggcccgtccggggaagaagctggcgccggaggttctatctcttccggtgggttctacggtgttagctctcagtatgagtcactggaacacatgaccctgacctgcagcagcaaggtatgtagcttcgggaagcaagtggtggaaaaagtcgagacggagagggcccagttggaggacgggaggttcgtctaccgtttgttgcggtccccgatgtgtgaatacctcgtcaactttttgcataaactgaggcagctccccgaaagatacatgatgaatagcgtactcgaaaactttactatcctgcaagtggtgacaaatcgggacacgcaggagctgctcctttgcactgcttacgtctttgaagtgagcactagcgaaaggggcgcacagcatcacatttatcgcctggtgagggattag

SEQ ID NO: 91110 - DNA, 1353 bp, Artificial Sequence
  derived and/or modified sequence
atgggggagcctcgagcaggcgctgccttggatgacggttcaggatggacgggaagtgaagaaggatctgaggagggaacaggaggatcagagggggctgggggggacggaggacccgacgccgagggtgtgtggtcccccgacatcgaacagagcttccaagaggctttagctatttaccccccctgcggccgcagaaaaatcattttgtccgacgaaggtaaaatgtacggacgcaacgagctgattgcccggtatataaaattgcggactggtaaaacacgtacaagaaagcaggtgtcttctcacatacaggtgttggccagacgaaagtctcgggagatacagagcaaacttaaggatcaagtgagcaaagacaaggccttccagaccatggccaccatgtcttcagcacagctgatcagcgccccttctctccaggcgaagctggggcctaccggaccccaagttgtccaagcgtccgagctcttccagttctggtccggaggctctgggcccccgtggaatgtacccgacgtgaagcccttcagtcaaactccctttaccctttcactcactcccccaagcaccgacctacctggctatgagccccctcaggccctatcacctctcccaccacccaccccaagtcctcccgcttggcaggcccggggattaggcaccgcgcgactgcaactcgtcgaattttctgcgtttgtggagcccccagatgctgtcgactcctaccagcggcacctcttcgtccacatttctcagcactgtcccagcccaggcgcccccccactcgagtcagtcgatgtcagacaaatatatgacaaatttcccgaaaaaaagggcgggctaagggaactctatgatcgagggccgccccacgcattcttcctcgttaaattttgggccgacctcaattggggtccctccggcgaagaagccggggccggtggatctatttcctcgggcggcttttatggagttagctcacagtacgagtctttggaacacatgaccctgacttgtagctccaaggtctgctcctttgggaaacaagtagtggagaaggtcgaaaccgagcgggctcaactcgaagacggccgatttgtctatcgcctgctgaggtctcccatgtgcgagtatctggtaaacttcctccataaacttcgtcagttgcccgaacgttatatgatgaactctgtcctggaaaactttactatcctgcaggtggtcacgaatagggacacacaggaactccttttgtgcacagcttatgtgttcgaagtcagcacctcagagcggggcgctcaacaccatatctacagacttgtccgggattag

SEQ ID NO: 91111 - DNA, 1353 bp, Artificial Sequence
  derived and/or modified sequence
atgggagagccccgggccggggccgccctggatgatggcagcggctggacaggcagcgaggagggcagcgaggagggcactggaggcagcgagggcgctggaggagatggcggcccagatgctgagggcgtgtggagcccagacatcgagcagagcttccaggaggccctggccatctacccaccctgtggccgcaggaagatcatcctgagtgatgagggcaagatgtatggaagaaatgagctgattgcccgctacatcaagctgaggacaggcaagaccaggaccaggaagcaggtgagcagccacatccaggtgctggcccggaggaagagccgggagatccagagcaagctgaaggaccaggtgtccaaggacaaggccttccagaccatggccaccatgagcagcgcccagctgatcagcgcccccagcctgcaggccaagctgggccccaccggcccccaggtggtgcaggccagcgagctgttccagttctggagcggcggcagcggccccccctggaatgtgcctgatgtgaagcccttcagccagacccccttcaccctgagcctgaccccacccagcacagacctgcccggctatgagcccccccaggccctgagccccctgcccccacccacccccagccccccagcctggcaggcccggggcctgggcacagcccggctgcagctggtggagttcagcgcctttgtggagcccccagatgctgtggacagctaccagaggcacctgtttgtgcacatcagccagcactgccccagccctggggccccacccctggagagcgtggatgtgcggcagatctatgacaagtttcctgagaagaagggcggcctgcgggagctgtatgaccggggccccccccacgccttcttcctggtgaagttctgggccgacctgaactggggccccagcggggaggaggccggggccggcggcagcatcagcagcggcggcttctacggcgtgagcagccagtatgagagcctggagcacatgaccctgacctgcagcagcaaggtgtgcagctttgggaagcaggtggtggagaaggtggagacagagcgggcccagctggaggatggccgctttgtgtaccgcctgctgcggagccccatgtgtgagtacctggtgaacttcctgcacaagctgcggcagctgcctgagcgctacatgatgaacagcgtgctggagaacttcaccatcctgcaggtggtgaccaacagagacacccaggagctgctgctgtgcacagcctacgtgtttgaggtgtccaccagcgagcggggggcccagcaccacatctaccgcctggtgcgggactag

SEQ ID NO: 91112 - DNA, 1353 bp, Artificial Sequence
  derived and/or modified sequence
atgggcgagccccgggccggcgccgccctggacgacggcagcggctggaccgggtccgaggaaggctccgaggaaggaactggagggagcgaaggggcaggaggtgacgggggacccgatgccgagggtgtatggtccccagatatcgaacaatctttccaggaagccctggcgatttatcccccttgcgggcgcagaaagattattctgagcgacgagggcaagatgtacggacgtaatgagctgatcgcacgctatattaagcttcgaacaggaaagacacgaactaggaagcaggtgagcagccacatccaggtccttgctagacgcaaatcacgcgagatccagtccaaactcaaagaccaagtgtcgaaggataaagcattccaaactatggctacaatgtctagcgcacaactaattagtgctcctagtcttcaggcaaagctggggcctacgggccctcaggtcgtacaagcttctgaacttttccagttctggagcggcggctctggccctccctggaacgtccctgatgtgaagcccttttctcagacaccttttacattgtcactgactccgccttccacggacttacccggctatgagcctccccaggccttatcccctcttcctcccccaactccatccccgccggcttggcaagcccgaggcctaggcaccgccagattacagctagttgagttttccgctttcgtggagccacctgatgctgttgatagttatcagcggcacctgttcgttcacatttcccagcactgcccgagcccaggggcacccccactggagtccgtcgacgtgagacagatttacgacaaatttcccgaaaagaagggcggtctgagggaactgtatgaccgcggccctccacacgccttttttctagtcaagttttgggcagacctgaattggggtccaagcggcgaagaagcaggggctggcggttcgatttcctcaggcggattctatggagtgtcctcgcagtacgagtcgctggaacacatgactttgacgtgttctagcaaagtatgtagtttcggaaagcaggttgtggagaaagtggagactgagagagcccagcttgaagatggccggtttgtatatagactattaagaagtcccatgtgcgagtacctggtaaactttttgcacaagttacggcagttgccggaacgatatatgatgaactccgtgctggaaaacttcaccatactccaggttgttacgaatcgtgatacccaggaactccttctctgcaccgcctacgtttttgaggtgtcgactagcgaacgtggcgctcaacatcatatatatcggttagtccgggattag

SEQ ID NO: 91113 - DNA, 1353 bp, Artificial Sequence
  derived and/or modified sequence
atgggcgagccccgggccggcgccgccctggacgacggcagcggctggacagggtccgaggaaggcagtgaggaggggactggcggctcagaaggcgccgggggagatggcggacctgatgccgagggcgtatggagccccgacatagaacagtcctttcaagaggctctggcaatttaccccccatgtggtcgtcgcaaaatcatactttctgacgaaggaaagatgtacggccgcaatgagcttattgcacgatatatcaagttgagaactggcaagaccagaactcgcaaacaggtttcttctcatatccaggtcctggcccggcggaaatctagggagattcagtccaaattgaaagaccaggtatccaaggacaaggccttccagacgatggcaacgatgagctcagctcaactcatatccgctcccagcctacaggcaaagttgggccctacaggaccacaggtggtccaggccagtgagctcttccagttctggtccggtggcagtgggcctccctggaacgtccccgatgtgaagcctttctctcagactcccttcactctctcactgacacctccatccaccgatcttcctggatacgagccccctcaggctctgagcccattgccaccccccactccttctcctcctgcctggcaggctcggggcctgggaactgcccggctgcaactcgtcgagttttcagccttcgtggagccgcccgatgcagtggacagctatcagagacatctcttcgtgcatatctcgcagcattgcccttctccaggcgcacctcctctcgaatcggtggacgtgcggcagatttacgacaaattcccggagaaaaaagggggattaagagaattatatgaccggggccctccacacgcgttcttcctggtgaagttttgggcagaccttaattggggcccatctggagaggaggccggagccggaggcagtatcagcagtggaggattctacggagtgtcctctcagtacgagagtttggaacatatgacacttacctgcagttctaaggtctgttctttcggtaagcaagttgttgaaaaggtggaaacagaaagggctcagctagaagacgggcggttcgtgtatagactactgcggtcaccaatgtgcgaataccttgttaacttcctgcacaaactcagacagctacccgagcgttacatgatgaactctgtattagagaattttactattctccaagtcgtgactaatcgggacacgcaggagctcctcctttgcactgcctacgtgttcgaggtctccactagcgagcgcggcgcccaacatcacatttatagactcgtgcgtgattag

SEQ ID NO: 91114 - DNA, 1353 bp, Artificial Sequence
  derived and/or modified sequence
atgggggagcccagagctggtgcagccttggatgatggatctggctggaccggaagcgaagagggcagcgaagagggcacagggggaagcgagggagctggaggcgatggaggaccagacgctgaaggtgtttggagcccagacattgaacagagttttcaggaagccctggccatctaccccccatgcgggaggcgcaaaataattctgagtgacgagggcaagatgtatggtaggaacgaactgatagccagatatatcaagctcaggacaggaaaaactcgcacacgcaaacaagttagttcacatatccaggttctagctcgcagaaaaagtcgcgagattcagagcaaactaaaagatcaggtttccaaggacaaggcctttcagactatggcgactatgagcagtgctcaactgatttcagccccaagcctgcaggctaaattgggtcccacagggccacaagtggttcaggcaagcgagctttttcaattctggtctggtggcagcggaccaccctggaacgttcctgacgttaaaccgttcagtcagactccttttactctgagtctcacgcccccttccactgatctgccaggatatgagcctccacaagccttatctccactgcctccacctacaccttcgccgccagcttggcaggctcggggactgggcacagccagactgcagttggtggaattctccgcttttgtcgaacctccagacgcggtggattcctaccagcggcacctgttcgttcatatctcacagcactgtccctcccccggagctcctcccctggagtccgttgacgtcagacagatttacgacaaattcccagaaaaaaagggaggcctgcgtgagctgtacgaccgaggacctccccatgccttctttctggtcaagttctgggccgacctcaactggggtcccagcggggaagaagcaggcgcaggaggaagcatatcctcaggaggcttttatggagtatcctcccaatacgagtcgctcgaacatatgacactaacctgtagtagcaaggtttgctcctttggaaagcaggtggtggagaaggttgagactgagagagcccagctggaagacggacgctttgtgtatagactcctgcgtagccctatgtgtgaatacctggtcaatttcctccataaactaaggcagcttcctgagcggtatatgatgaactctgtcctggaaaacttcacaattcttcaagttgtaacaaatcgagacacccaagagctgctgctgtgcactgcttatgtgtttgaggtgtctacttccgaaaggggcgcacagcaccacatctaccggctggtgagggactag

SEQ ID NO: 91115 - DNA, 1353 bp, Artificial Sequence
  derived and/or modified sequence
atgggggagcccagggcaggcgctgcgctggacgacggctccgggtggactggcagcgaagaaggaagtgaggaggggaccggagggagtgagggggctggtggcgatggcggtcccgatgccgagggcgtgtggtccccagacattgaacagagcttccaggaagctctcgcaatctacccaccatgtggcaggaggaagattatcctctccgatgagggcaagatgtacggcaggaatgaactgattgcacggtacatcaaactgcgcacggggaagacccggacccggaagcaggtttccagccatattcaggtgctcgcaaggcgtaagtcccgagaaatccaaagtaagttgaaagatcaggtcagcaaagataaggccttccagacaatggccaccatgtccagcgcccagctgatctcagctcctagtttacaagccaagctagggcctacaggccctcaggtagtgcaggcctcagagttgtttcaattctggtccggcggtagtggacctccttggaatgtgccagatgtgaaacctttttctcagacaccattcaccttatccctcacaccaccttctactgatctaccagggtatgaaccacctcaagcactgagccccctgccaccaccgacacccagccctcccgcttggcaggctcggggtctgggaactgccaggcttcagctcgtagagttctctgcctttgtagagccccctgacgccgtggatagttatcaacggcacctgttcgtgcatatatcccagcattgtccttcccctggagcacctcccctggaatcggttgacgtacgccagatttacgataaattccctgaaaagaaagggggtctgcgcgagttgtatgatcggggacctccccatgccttttttctggtaaagttctgggcagatctaaactgggggcctagcggagaagaagctggagccggtgggagcatatctagcggcggtttttatggggtgtcatctcaatacgaatcgctggaacacatgacactgacttgttcatctaaagtgtgcagcttcgggaagcaggtggttgagaaagtggaaaccgaaagggctcagctcgaggacgggagatttgtctatcgtctcctacggagtccaatgtgtgaatacctcgtgaacttcctgcacaagttaagacagttgcccgaaagatatatgatgaactccgtgctcgagaacttcactatactccaggtagtcaccaatcgcgatactcaggagttgctgttgtgtactgcctacgtgttcgaggtgtcaactagcgaaagaggcgcacagcatcacatctaccgcctggtgcgagactag

SEQ ID NO: 91116 - DNA, 2440 bp, Artificial Sequence
  derived and/or modified sequence
cttctcctccctcagactcaggagtccagaccccagccccttctccctcacacccaggagtccaggcctccagcccccgctccctcagacccaggagtccaggccccagatcctcctccctcagtcctaggagtccgggccccagcccctcctccctcagactcaggagttcaggccccagatcctcctccctcagacccaggaataccccccagctcctcttccctcagacccaggagtccaggtccccagcccctcctccctcagacccagtggtccagagtcccagccctctcagcttcaagtcccttgagggtggggtttgggggaagcttgctgagttctgtgttcctccaggcccagatgggggaaccccgggctggggccgccctggacgatggcagcggctggacgggcagtgaggaaggcagtgaggagggtaccggcggcagtgagggggctgggggtgacgggggcccggatgcagagggggtgtggagcccagacattgagcagagcttccaggaggccctggccatctatccaccctgcggccgccggaaaataattttgtctgatgaaggcaagatgtatggtcggaatgaactgatcgcccgctacatcaagctgagaacggggaagacccgaactcgaaaacaggtttctagtcacatccaggttttggcccgaaggaaatcaagggaaatccagtccaagttgaaggaccaggtttccaaggacaaggctttccagacaatggcaaccatgtcctctgcccagctcatctccgcgccttctctgcaggccaaactgggtcccactggtcctcaggtggtccaggcctctgagcttttccagttttggtctggaggatctgggcccccctggaatgttccagatgtgaagccattctcacagacaccgttcaccttgtcactgactcccccatctactgacctcccagggtacgagcccccccaagccctctcacccctgcccccacctaccccatcgcccccagcctggcaggctcggggcctgggcaccgcccggttgcagctggtagagttctcagccttcgtggaaccgccagatgcagttgattcttaccagaggcacctgttcgtgcacatcagccagcactgccccagccccggagcgccgccgctcgagagtgtggacgtccggcagatctacgacaaattccctgagaaaaagggtggcctccgagagctatatgatcgtggccccccccatgccttcttcctggtcaagttctgggcggacctgaactggggcccaagtggtgaggaggcaggggccggtggcagcatcagcagtggtggcttctacggagtgagcagccagtatgagagcctggaacacatgaccctcacctgttcctccaaggtctgctcttttggcaagcaggtggtggagaaggtggagacggaacgggcccagctggaggacggcagatttgtgtaccgcctgctgcgctcgcccatgtgcgagtacctggtgaatttcttgcacaagttgcggcagctgcctgagcgatacatgatgaacagcgtcctggaaaacttcaccatcctccaggtggtgacaaacagagacacccaggaactgctgctctgcaccgcctatgtcttcgaggtctccaccagcgagcgtggggcccagcatcacatttaccgcctggtcagggactgaagggggaccccaaaactggctcaccccccagaacaccctcctcccagggagggtcctccagctcacctcatgcttcttatttggggagagggctgtgatgtaaaggggttgacctcagaggcctaagcaactggggccatcccccccattagaggggcccccaaaacttggttggagagctgaacaggctgggactgaggaaaggataaaccccgatattgggacctcacagtgggtgtctgaaaggacagatcactccggagtatcagggattgtggggacaggagtgagacaaccccccaggtacagcactggcttttcttttcagcccctgacaggccacccccactcctctgcatgtcttggagagcgctagttacacattggcttgtcccctttactttttcccagccacccctccccctgaaatttctgcccctctctaccaccctcactccatgacctgtgagatcacaaagtgaagatgaaccctttctgtgcaggagcagagccaggtgggccctggacattttttttttttttaatataacgagatatttataagtgggtgctagggtcttgactttatctccgctgcacaagcagtgtgttgaactttctaatctcatccctctcctaagtgagccctgagctagacggtttccttcctcccctctcaaagtttgtttgtttgtgttctgacagaggataaagctattttacc

SEQ ID NO: 91117 - DNA, 2167 bp, Artificial Sequence
  derived and/or modified sequence
cgcccgcccgcggctccccagccccaggccgggaggtaggaaggcgccggcgggagtcggggatcctgctttggggtgtgcccagatgggggaaccccgggctggggccgccctggacgatggcagcggctggacgggcagtgaggaaggcagtgaggagggtaccggcggcagtgagggggctgggggtgacgggggcccggatgcagagggggtgtggagcccagacattgagcagagcttccaggaggccctggccatctatccaccctgcggccgccggaaaataattttgtctgatgaaggcaagatgtatggtcggaatgaactgatcgcccgctacatcaagctgagaacggggaagacccgaactcgaaaacaggtttctagtcacatccaggttttggcccgaaggaaatcaagggaaatccagtccaagttgaaggaccaggtttccaaggacaaggctttccagacaatggcaaccatgtcctctgcccagctcatctccgcgccttctctgcaggccaaactgggtcccactggtcctcaggtggtccaggcctctgagcttttccagttttggtctggaggatctgggcccccctggaatgttccagatgtgaagccattctcacagacaccgttcaccttgtcactgactcccccatctactgacctcccagggtacgagcccccccaagccctctcacccctgcccccacctaccccatcgcccccagcctggcaggctcggggcctgggcaccgcccggttgcagctggtagagttctcagccttcgtggaaccgccagatgcagttgattcttaccagaggcacctgttcgtgcacatcagccagcactgccccagccccggagcgccgccgctcgagagtgtggacgtccggcagatctacgacaaattccctgagaaaaagggtggcctccgagagctatatgatcgtggccccccccatgccttcttcctggtcaagttctgggcggacctgaactggggcccaagtggtgaggaggcaggggccggtggcagcatcagcagtggtggcttctacggagtgagcagccagtatgagagcctggaacacatgaccctcacctgttcctccaaggtctgctcttttggcaagcaggtggtggagaaggtggagacggaacgggcccagctggaggacggcagatttgtgtaccgcctgctgcgctcgcccatgtgcgagtacctggtgaatttcttgcacaagttgcggcagctgcctgagcgatacatgatgaacagcgtcctggaaaacttcaccatcctccaggtggtgacaaacagagacacccaggaactgctgctctgcaccgcctatgtcttcgaggtctccaccagcgagcgtggggcccagcatcacatttaccgcctggtcagggactgaagggggaccccaaaactggctcaccccccagaacaccctcctcccagggagggtcctccagctcacctcatgcttcttatttggggagagggctgtgatgtaaaggggttgacctcagaggcctaagcaactggggccatcccccccattagaggggcccccaaaacttggttggagagctgaacaggctgggactgaggaaaggataaaccccgatattgggacctcacagtgggtgtctgaaaggacagatcactccggagtatcagggattgtggggacaggagtgagacaaccccccaggtacagcactggcttttcttttcagcccctgacaggccacccccactcctctgcatgtcttggagagcgctagttacacattggcttgtcccctttactttttcccagccacccctccccctgaaatttctgcccctctctaccaccctcactccatgacctgtgagatcacaaagtgaagatgaaccctttctgtgcaggagcagagccaggtgggccctggacattttttttttttttaatataacgagatatttataagtgggtgctagggtcttgactttatctccgctgcacaagcagtgtgttgaactttctaatctcatccctctcctaagtgagccctgagctagacggtttccttcctcccctctcaaagtttgtttgtttgtgttctgacagaggataaagctattttaccaaaaa

SEQ ID NO: 91118 - protein, 451 aa, Artificial Sequence
  derived and/or modified sequence
MGEPRAGAALDDGSGWTGSEEGSEEGTGGSEGAGGDGGPDAEGVWSPDIEQSFQEALAIYPPCGRRKIILSDEGKMYGRNELIARYIKLRTGKTRTRKQVSSHIQVLARRKSREIQSKLKALNVDQVSKDKAFQTMATMSSAQLISAPSLQAKLGPTGPQASELFQFWSGGSGPPWNVPDVKPFSQTPFTLSLTPPSTDLPGYEPPQALSPLPPPTPSPPAWQARGLGTARLQLVEFSAFVEPPDAVDSYQRHLFVHISQHCPSPGAPPLESVDVRQIYDKFPEKKGGLRELYDRGPPHAFFLVKFWADLNWGPSGEEAGAGGSISSGGFYGVSSQYESLEHMTLTCSSKVCSFGKQVVEKVETERAQLEDGRFVYRLLRSPMCEYLVNFLHKLRQLPERYMMNSVLENFTILQVVTNRDTQELLLCTAYVFEVSTSERGAQHHIYRLVRD

SEQ ID NO: 91119 - DNA, 1356 bp, Artificial Sequence
  derived and/or modified sequence
atgggcgagcccagagccggcgccgccctggacgacggcagcggctggaccggcagcgaggagggcagcgaggagggcaccggcggcagcgagggcgccggcggcgacggcggccccgacgccgagggcgtgtggagccccgacatcgagcagagcttccaggaggccctggccatctaccccccctgcggcagaagaaagatcatcctgagcgacgagggcaagatgtacggcagaaacgagctgatcgccagatacatcaagctgagaaccggcaagaccagaaccagaaagcaggtgagcagccacatccaggtgctggccagaagaaagagcagagagatccagagcaagctgaaggccctgaacgtggaccaggtgagcaaggacaaggccttccagaccatggccaccatgagcagcgcccagctgatcagcgcccccagcctgcaggccaagctgggccccaccggcccccaggccagcgagctgttccagttctggagcggcggcagcggccccccctggaacgtgcccgacgtgaagcccttcagccagacccccttcaccctgagcctgaccccccccagcaccgacctgcccggctacgagcccccccaggccctgagccccctgcccccccccacccccagcccccccgcctggcaggccagaggcctgggcaccgccagactgcagctggtggagttcagcgccttcgtggagccccccgacgccgtggacagctaccagagacacctgttcgtgcacatcagccagcactgccccagccccggcgccccccccctggagagcgtggacgtgagacagatctacgacaagttccccgagaagaagggcggcctgagagagctgtacgacagaggccccccccacgccttcttcctggtgaagttctgggccgacctgaactggggccccagcggcgaggaggccggcgccggcggcagcatcagcagcggcggcttctacggcgtgagcagccagtacgagagcctggagcacatgaccctgacctgcagcagcaaggtgtgcagcttcggcaagcaggtggtggagaaggtggagaccgagagagcccagctggaggacggcagattcgtgtacagactgctgagaagccccatgtgcgagtacctggtgaacttcctgcacaagctgagacagctgcccgagagatacatgatgaacagcgtgctggagaacttcaccatcctgcaggtggtgaccaacagagacacccaggagctgctgctgtgcaccgcctacgtgttcgaggtgagcaccagcgagagaggcgcccagcaccacatctacagactggtgagagactag

SEQ ID NO: 91120 - DNA, 1356 bp, Artificial Sequence
  derived and/or modified sequence
atgggcgagccacgggcgggagccgccctggatgatgggtctgggtggaccggtagcgaagaggggtcggaggaaggaacgggcggatctgaaggcgctggcggagatggaggcccggatgcagagggtgtgtggtctcccgatattgagcagtcctttcaagaggcactagccatttaccccccatgtggtcgccgtaaaattattttgagcgacgaggggaagatgtatgggcggaacgaactgattgctcgttacattaagctgaggacgggcaaaacaaggacaagaaagcaggtaagtagtcacatccaggttcttgcgcgccgcaagtctcgggagattcagtcgaagctgaaggccctcaatgtggaccaagtcagcaaagacaaggcctttcagaccatggcaactatgtcatcagcccagctgatttccgcaccttctctccaggccaaactcggcccgactggacctcaggcttccgaactgttccagttttggtctggaggctcgggcccaccttggaacgtcccagatgttaaacccttctcccagacccctttcaccctctctcttacaccaccctcaacggatttaccaggttacgagccaccccaggccctctccccattgccacccccaaccccaagtccccctgcttggcaggctcgggggctaggaacagctcgcctccagctggtcgaattctccgcctttgttgagcctccagacgcagtcgactcataccaacgccacctgttcgttcatatcagccagcactgcccatcccctggagctcctccactggagtccgttgacgttcgacagatctacgacaagttcccagaaaaaaaaggagggctccgggagctgtacgatagaggacctccccacgctttcttcctggtaaagttttgggccgacctgaattggggccccagcggggaggaagctggtgctggaggctccatttcgtccggcggcttttacggagtgagcagtcaatatgagtctcttgaacacatgacactcacctgctcaagtaaggtgtgcagcttcggcaaacaggtggtcgagaaggtggaaactgaaagggcccagctagaggatgggagatttgtgtacagactactgcgcagcccaatgtgtgagtaccttgtgaatttcctgcacaaactgcggcagctccccgagcggtatatgatgaacagtgtcctggaaaattttacgatcctgcaggtggtgactaaccgtgacactcaggaattgctgctctgtacggcttacgtgttcgaagtgtctacttcagaaagaggggcgcagcaccacatctaccgtctggtaagagactag

SEQ ID NO: 91121 - DNA, 1356 bp, Artificial Sequence
  derived and/or modified sequence
atgggagagccccgagctggagccgctctggatgacggctcgggctggaccggaagcgaagaggggagtgaagaagggaccggagggtccgagggggccggcggagacggcggtccagacgcagaaggcgtgtggtcacccgatatcgaacagagctttcaggaagccctggcaatttatcctccatgtggtagacgtaagattatactttctgatgagggaaaaatgtacggcaggaacgagctgatcgcacgttatattaaactgcggactgggaagacgaggacgaggaaacaggtgtcctcccacatccaggtgttggctcgtagaaaaagccgggaaattcaaagtaagctgaaggctctgaatgtagaccaggtgagtaaggacaaagccttccaaaccatggccacaatgagctccgcacagttaatttccgcccccagccttcaagctaagctcggtcctacagggccccaagcgtctgagcttttccagttctggagcggaggctcgggccctccatggaacgtccctgacgttaagccgttttcccagacccccttcacgcttagcctgactccaccttctaccgacttgccaggttatgaacctccacaagccctcagccctttaccccctccgacgcccagtccgcctgcctggcaggcccgtggactcggtaccgcacgattacagcttgttgaattctccgcttttgtagaacctcccgacgccgtggactcttatcaacgccatctgttcgttcatatctcccagcattgtcctagccccggcgcacccccactagaatctgtcgacgtccgtcagatctacgataagtttcccgagaagaagggcggactgagggagttgtacgacagaggtcccccacacgcattttttctagtgaagttttgggctgatctgaattgggggcccagcggcgaagaggcaggggcgggaggatccatcagcagtggcgggttctatggcgtctcttcccaatacgagtcactcgaacatatgactttaacctgttcatccaaggtttgctcattcggcaagcaagtggtggaaaaggtggagacagagcgcgcacagctggaggacggaaggtttgtctatagactgctgcggtcgcctatgtgtgagtacctggtgaactttctacacaaactcaggcagctccccgaaagatatatgatgaacagtgtgcttgaaaacttcactatccttcaggtggtgacaaaccgggacacccaggagcttttactttgcacagcttatgtgttcgaagtgagcacctccgagaggggagcccagcatcatatttatagacttgttcgagactag

SEQ ID NO: 91122 - DNA, 1356 bp, Artificial Sequence
  derived and/or modified sequence
atgggagagccccgggccggggccgccctggatgatggcagcggctggacaggcagcgaggagggcagcgaggagggcactggaggcagcgagggcgctggaggagatggcggcccagatgctgagggcgtgtggagcccagacatcgagcagagcttccaggaggccctggccatctacccaccctgtggccgcaggaagatcatcctgagtgatgagggcaagatgtatggaagaaatgagctgattgcccgctacatcaagctgaggacaggcaagaccaggaccaggaagcaggtgagcagccacatccaggtgctggcccggaggaagagccgggagatccagagcaagctgaaggccctgaatgtggaccaggtgtccaaggacaaggccttccagaccatggccaccatgagcagcgcccagctgatcagcgcccccagcctgcaggccaagctgggccccaccggcccccaggccagcgagctgttccagttctggagcggcggcagcggccccccctggaatgtgcctgatgtgaagcccttcagccagacccccttcaccctgagcctgaccccacccagcacagacctgcccggctatgagcccccccaggccctgagccccctgcccccacccacccccagccccccagcctggcaggcccggggcctgggcacagcccggctgcagctggtggagttcagcgcctttgtggagcccccagatgctgtggacagctaccagaggcacctgtttgtgcacatcagccagcactgccccagccctggggccccacccctggagagcgtggatgtgcggcagatctatgacaagtttcctgagaagaagggcggcctgcgggagctgtatgaccggggcccccctcatgccttcttcctggtgaagttctgggccgacctgaactggggccccagcggggaggaggccggggccggcggcagcatcagcagcggcggcttctatggagtgagcagccagtatgagagcctggagcacatgaccctgacctgcagcagcaaggtgtgcagctttgggaagcaggtggtggagaaggtggagacagagcgggcccagctggaggatggccgctttgtgtaccgcctgctgcggagccccatgtgtgagtacctggtgaacttcctgcacaagctgcggcagctgcctgagcgctacatgatgaacagcgtgctggagaacttcaccatcctgcaggtggtgaccaacagagacacccaggagctgctgctgtgcacagcctacgtgtttgaggtgtccaccagcgagcggggggcccagcaccacatctaccgcctggtgcgggactag

SEQ ID NO: 91123 - DNA, 1356 bp, Artificial Sequence
  derived and/or modified sequence
atgggcgagccccgggccggcgccgccctggacgacggcagcggctggactgggtccgaggaaggatctgaagaagggaccggcggttccgaaggcgcgggcggcgacggcggacctgatgcagaaggtgtgtggtcaccagacattgagcagtcattccaggaggcgctggccatctacccaccatgtggtcgcaggaagatcatcctctctgatgaaggtaagatgtatggtcgtaacgaattaatcgctcggtatatcaagctgcgcaccggcaaaacacggaccagaaagcaggtgtcatcccatatccaagtgcttgctcggcgaaaatcccgggagatccagagcaagttaaaggctctgaacgtggatcaggtgagtaaggacaaagcctttcagactatggcgacgatgtcttccgcacagcttatttccgcccctagcctgcaggcaaagctgggcccgacaggccctcaggcctccgagctctttcagttttggagcggggggagcgggccaccatggaatgttcccgatgtaaaaccctttagtcagactccttttactctgtcgcttaccccgcctagtacagacctgcctggctatgagccgccacaggccctctcaccattgccaccccctacaccctccccacccgcttggcaagctcgggggctggggaccgcacgattgcaactggtggagttctccgcctttgtggagcctcccgacgccgtggattcataccagcgccatttgttcgtgcatataagtcagcattgtcctagccccggtgctccacccctggagagcgtggacgtaaggcagatctatgacaaattccctgagaaaaagggcggcctgagagagttgtatgatcgtgggcccccccatgcatttttcctcgtcaaattctgggctgaccttaattggggaccgtctggagaggaggcaggggctggtggttctatctccagcgggggattctatggcgtcagctcacagtacgagtccttggagcatatgactctcacatgcagttcaaaggtctgttcatttggtaagcaggtggtggaaaaagttgagacagagcgggcacagcttgaagatggacggtttgtataccgattgctgagatcaccaatgtgcgagtatctggtaaactttttgcataagttacgtcagctgccagaaaggtacatgatgaactctgtgctggagaactttacaattttacaagtggtgaccaatcgcgacacccaggaactgttgttatgtaccgcttatgtttttgaagtgagcacttcggagagaggggcccagcaccacatatatagacttgtccgagactag

SEQ ID NO: 91124 - DNA, 1356 bp, Artificial Sequence
  derived and/or modified sequence
atgggcgagccccgggccggcgccgccctggacgacggcagcggctggacaggatctgaagagggcagtgaggaagggaccggtggaagtgagggagcgggaggggacggcggaccagacgccgagggcgtatggtcgccggacattgaacaaagttttcaggaggccctggcaatctatcccccctgtggccggcgcaagatcatcctttcggacgaggggaagatgtacggccggaacgagcttattgcaaggtacattaagttgagaacaggaaaaacccgaactcgtaagcaggtaagctctcatattcaagttctggctcgaagaaaatctagagagatccagtcaaagctgaaggcattaaacgtcgaccaggtcagtaaagacaaggctttccaaactatggcgacgatgtccagtgcccagcttatttctgctcctagcctgcaggctaagctgggacccaccggcccacaggcatctgaacttttccagttctggtctggggggtcaggcccaccatggaatgtgcccgacgtaaagccctttagtcagactccattcaccttatccctgacaccaccatctactgacttgccaggctacgaaccaccacaggccctgtcaccattgcctcctccgaccccaagccctcctgcctggcaggcccgaggactgggaactgctcgtctacaacttgtggaattctctgcctttgtcgagccccctgacgcggtggattcttatcagaggcatttgtttgtccacatctcccagcactgtccctcgcccggtgctcctccactagaaagtgtggacgtgcgacaaatctatgacaaatttcccgagaagaagggagggctgcgagagctgtatgatagaggcccaccccacgctttcttcctggtgaagttttgggctgatttgaactggggcccctcgggggaagaagccggagccgggggctctatatcctcaggagggttctacggcgtatcaagccagtacgaatctctggaacacatgaccctgacatgtagctctaaggtgtgcagctttgggaagcaagtggttgaaaaggtcgagactgaacgcgctcaattggaggatggtcgcttcgtctaccggctgttgagatccccgatgtgtgagtacttggtcaatttcctgcacaagctgcgccagcttcccgagaggtatatgatgaattcagttctcgaaaattttacaatattgcaggtcgttactaatcgcgatactcaagaactactactgtgtactgcctacgtgttcgaggtgtccacctccgaaaggggggcacagcaccacatttatcgactcgtcagggactag

SEQ ID NO: 91125 - DNA, 1356 bp, Artificial Sequence
  derived and/or modified sequence
atgggcgaaccccgtgcaggcgctgctctagatgatgggtcagggtggacaggatccgaggagggctcagaggagggcaccggcggatctgaaggggcaggcggtgacggaggcccagacgctgaaggcgtgtggtcgccggatatagagcagtccttccaagaggccctcgcaatttatccaccgtgtggtagaagaaagatcatcctcagcgatgaaggtaaaatgtacgggagaaatgaactcatcgcaaggtatatcaaactgcgcacagggaaaacccgaacacgaaagcaggttagttcacatatccaagtactagcgcgtagaaaatccagagaaatccagtctaaactgaaggccctaaacgtggatcaagttagcaaggacaaggcctttcagacaatggccaccatgagctctgcacaactgattagcgccccttctttgcaggctaagcttggcccaactggaccccaggcatccgagctgtttcaattctggagtgggggaagcggacctccttggaatgtgccagacgtgaaacccttttcacaaacaccatttactctctcccttaccccccctagtacagacttacccggatatgagcctccccaggccctatcccctctccccccaccaaccccatcacctcccgcatggcaggcacgtggcctagggacggccaggttgcagctcgtggagtttagcgcctttgtggaaccccctgatgctgttgattcttatcagcgccacctgttcgttcacatatctcagcattgtccttctccgggtgcccctcccctagagtccgtcgacgtgcgccagatctatgacaaatttccggagaagaagggcggactccgcgaattatatgacagaggaccaccgcatgcgttctttctcgttaaattctgggccgacctcaactggggcccaagcggagaagaagcaggggcaggcggatccatctctagcggaggcttttacggggtctcatctcaatacgaatcgctagagcacatgaccctgacttgctctagcaaggtgtgctccttcgggaagcaagtggtggagaaagttgaaaccgagcgagcacagctcgaagatggcagattcgtgtaccgactcctaagaagccctatgtgcgaatatttggttaacttcctgcataaactgcggcaattacctgagaggtatatgatgaacagcgtgttggaaaatttcacaatcctgcaggtggtcacaaatagggacactcaggagctcctgctgtgcactgcatatgtttttgaagtgagcacctctgagcgaggcgctcagcatcatatctatcgactagtgcgcgactag

SEQ ID NO: 91126 - DNA, 1356 bp, Artificial Sequence
  derived and/or modified sequence
atgggcgagccgagggcaggcgctgctctggacgacggctccggttggacggggtctgaagagggaagcgaagagggcaccggagggagtgaaggcgcaggcggtgacggtggacctgacgccgagggagtttggtcaccagatattgagcagtcttttcaggaggccttggcaatataccctccatgcgggcgtagaaaaatcatcctgtccgatgagggtaaaatgtacgggaggaatgagctcatcgccagatatatcaagctgaggaccggaaagactaggacccgaaagcaggtatcctcacacattcaagtgctagctcgcaggaaaagtagagagatccaaagtaaactgaaggctctcaacgttgatcaagtgtcaaaggataaggcctttcaaaccatggccaccatgtctagcgcccagcttatctcagccccttctctgcaggctaagctaggccctacagggccacaggcatctgagctgtttcagttctggtctggtgggtcaggcccaccctggaatgttcccgacgtaaaacccttttctcagaccccatttacactttcactgacacctccatccacagacctgccgggttacgagccacctcaggccctgagtcctctgccccctcccaccccctctccacctgcatggcaagcacgtggtctcggaacggctagactgcagctggttgaattttctgcctttgtagaaccacctgacgccgtggattcctaccagcgccacctgtttgtgcatatctcccagcactgcccctctcctggggcacctccccttgaaagtgttgacgtcaggcaaatctacgataaatttcctgagaagaaggggggactcagagaactgtatgaccgcggaccaccgcatgccttttttttggtgaagttctgggccgacctgaactggggtcctagcggcgaagaagccggagcgggaggctctatctcttctggcggtttctacggggtctccagccagtacgaaagcttggaacacatgaccttaacttgttcttcaaaggtttgttcctttgggaagcaagtagtggaaaaagtggaaaccgaacgagcccaactggaagatggcaggtttgtatatcgcttgttgcgctctcctatgtgcgagtatctggttaatttcctgcacaagctacggcagctacctgaacggtatatgatgaactctgtgttggaaaattttactattctacaagtggtgaccaaccgggatactcaggaattactactttgtactgcgtatgtcttcgaagtgtccactagtgaacgaggcgcacagcatcacatctacagacttgtccgtgattag

SEQ ID NO: 91127 - DNA, 2141 bp, Artificial Sequence
  derived and/or modified sequence
aggccgggaggtaggaaggcgccggcgggagtcggggatcctgctttggggcccagatgggggaaccccgggctggggccgccctggacgatggcagcggctggacgggcagtgaggaaggcagtgaggagggtaccggcggcagtgagggggctgggggtgacgggggcccggatgcagagggggtgtggagcccagacattgagcagagcttccaggaggccctggccatctatccaccctgcggccgccggaaaataattttgtctgatgaaggcaagatgtatggtcggaatgaactgatcgcccgctacatcaagctgagaacggggaagacccgaactcgaaaacaggtttctagtcacatccaggttttggcccgaaggaaatcaagggaaatccagtccaagttgaaggctctgaacgtggaccaggtttccaaggacaaggctttccagacaatggcaaccatgtcctctgcccagctcatctccgcgccttctctgcaggccaaactgggtcccactggtcctcaggcctctgagcttttccagttttggtctggaggatctgggcccccctggaatgttccagatgtgaagccattctcacagacaccgttcaccttgtcactgactcccccatctactgacctcccagggtacgagcccccccaagccctctcacccctgcccccacctaccccatcgcccccagcctggcaggctcggggcctgggcaccgcccggttgcagctggtagagttctcagccttcgtggaaccgccagatgcagttgattcttaccagaggcacctgttcgtgcacatcagccagcactgccccagccccggagcgccgccgctcgagagtgtggacgtccggcagatctacgacaaattccctgagaaaaagggtggcctccgagagctatatgatcgtggccccccccatgccttcttcctggtcaagttctgggcggacctgaactggggcccaagtggtgaggaggcaggggccggtggcagcatcagcagtggtggcttctacggagtgagcagccagtatgagagcctggaacacatgaccctcacctgttcctccaaggtctgctcttttggcaagcaggtggtggagaaggtggagacggaacgggcccagctggaggacggcagatttgtgtaccgcctgctgcgctcgcccatgtgcgagtacctggtgaatttcttgcacaagttgcggcagctgcctgagcgatacatgatgaacagcgtcctggaaaacttcaccatcctccaggtggtgacaaacagagacacccaggaactgctgctctgcaccgcctatgtcttcgaggtctccaccagcgagcgtggggcccagcatcacatttaccgcctggtcagggactgaagggggaccccaaaactggctcaccccccagaacaccctcctcccagggagggtcctccagctcacctcatgcttcttatttggggagagggctgtgatgtaaaggggttgacctcagaggcctaagcaactggggccatcccccccattagaggggcccccaaaacttggttggagagctgaacaggctgggactgaggaaaggataaaccccgatattgggacctcacagtgggtgtctgaaaggacagatcactccggagtatcagggattgtggggacaggagtgagacaaccccccaggtacagcactggcttttcttttcagcccctgacaggccacccccactcctctgcatgtcttggagagcgctagttacacattggcttgtcccctttactttttcccagccacccctccccctgaaatttctgcccctctctaccaccctcactccatgacctgtgagatcacaaagtgaagatgaaccctttctgtgcaggagcagagccaggtgggccctggacattttttttttttttaatataacgagatatttataagtgggtgctagggtcttgactttatctccgctgcacaagcagtgtgttgaactttctaatctcatccctctcctaagtgagccctgagctagacggtttccttcctcccctctcaaagtttgtttgtttgtgttctgacagaggataaagctattttaccaaaaa

SEQ ID NO: 91128 - DNA, 2191 bp, Artificial Sequence
  derived and/or modified sequence
tgatggcagggcgcccctgtcccccagcttgtggttctgtgggtctctcctggtctcggcctcagctgctgccctgagtctctgtccctgccctttctaggcccagatgggggaaccccgggctggggccgccctggacgatggcagcggctggacgggcagtgaggaaggcagtgaggagggtaccggcggcagtgagggggctgggggtgacgggggcccggatgcagagggggtgtggagcccagacattgagcagagcttccaggaggccctggccatctatccaccctgcggccgccggaaaataattttgtctgatgaaggcaagatgtatggtcggaatgaactgatcgcccgctacatcaagctgagaacggggaagacccgaactcgaaaacaggtttctagtcacatccaggttttggcccgaaggaaatcaagggaaatccagtccaagttgaaggctctgaacgtggaccaggtttccaaggacaaggctttccagacaatggcaaccatgtcctctgcccagctcatctccgcgccttctctgcaggccaaactgggtcccactggtcctcaggcctctgagcttttccagttttggtctggaggatctgggcccccctggaatgttccagatgtgaagccattctcacagacaccgttcaccttgtcactgactcccccatctactgacctcccagggtacgagcccccccaagccctctcacccctgcccccacctaccccatcgcccccagcctggcaggctcggggcctgggcaccgcccggttgcagctggtagagttctcagccttcgtggaaccgccagatgcagttgattcttaccagaggcacctgttcgtgcacatcagccagcactgccccagccccggagcgccgccgctcgagagtgtggacgtccggcagatctacgacaaattccctgagaaaaagggtggcctccgagagctatatgatcgtggccccccccatgccttcttcctggtcaagttctgggcggacctgaactggggcccaagtggtgaggaggcaggggccggtggcagcatcagcagtggtggcttctacggagtgagcagccagtatgagagcctggaacacatgaccctcacctgttcctccaaggtctgctcttttggcaagcaggtggtggagaaggtggagacggaacgggcccagctggaggacggcagatttgtgtaccgcctgctgcgctcgcccatgtgcgagtacctggtgaatttcttgcacaagttgcggcagctgcctgagcgatacatgatgaacagcgtcctggaaaacttcaccatcctccaggtggtgacaaacagagacacccaggaactgctgctctgcaccgcctatgtcttcgaggtctccaccagcgagcgtggggcccagcatcacatttaccgcctggtcagggactgaagggggaccccaaaactggctcaccccccagaacaccctcctcccagggagggtcctccagctcacctcatgcttcttatttggggagagggctgtgatgtaaaggggttgacctcagaggcctaagcaactggggccatcccccccattagaggggcccccaaaacttggttggagagctgaacaggctgggactgaggaaaggataaaccccgatattgggacctcacagtgggtgtctgaaaggacagatcactccggagtatcagggattgtggggacaggagtgagacaaccccccaggtacagcactggcttttcttttcagcccctgacaggccacccccactcctctgcatgtcttggagagcgctagttacacattggcttgtcccctttactttttcccagccacccctccccctgaaatttctgcccctctctaccaccctcactccatgacctgtgagatcacaaagtgaagatgaaccctttctgtgcaggagcagagccaggtgggccctggacattttttttttttttaatataacgagatatttataagtgggtgctagggtcttgactttatctccgctgcacaagcagtgtgttgaactttctaatctcatccctctcctaagtgagccctgagctagacggtttccttcctcccctctcaaagtttgtttgtttgtgttctgacagaggataaagctattttaccaaaaa

SEQ ID NO: 91129 - DNA, 960 bp, Artificial Sequence
  derived and/or modified sequence
atggccaccatgagcagcgcccagctgatcagcgcccccagcctgcaggccaagctgggccccaccggcccccaggtggtgcaggccagcgagctgttccagttctggagcggcggcagcggccccccctggaacgtgcccgacgtgaagcccttcagccagacccccttcaccctgagcctgaccccccccagcaccgacctgcccggctacgagcccccccaggccctgagccccctgcccccccccacccccagcccccccgcctggcaggccagaggcctgggcaccgccagactgcagctggtggagttcagcgccttcgtggagccccccgacgccgtggacagctaccagagacacctgttcgtgcacatcagccagcactgccccagccccggcgccccccccctggagagcgtggacgtgagacagatctacgacaagttccccgagaagaagggcggcctgagagagctgtacgacagaggccccccccacgccttcttcctggtgaagttctgggccgacctgaactggggccccagcggcgaggaggccggcgccggcggcagcatcagcagcggcggcttctacggcgtgagcagccagtacgagagcctggagcacatgaccctgacctgcagcagcaaggtgtgcagcttcggcaagcaggtggtggagaaggtggagaccgagagagcccagctggaggacggcagattcgtgtacagactgctgagaagccccatgtgcgagtacctggtgaacttcctgcacaagctgagacagctgcccgagagatacatgatgaacagcgtgctggagaacttcaccatcctgcaggtggtgaccaacagagacacccaggagctgctgctgtgcaccgcctacgtgttcgaggtgagcaccagcgagagaggcgcccagcaccacatctacagactggtgagagactag

SEQ ID NO: 91130 - DNA, 960 bp, Artificial Sequence
  derived and/or modified sequence
atggctacaatgtccagtgcccagcttatctctgcaccatctctgcaggctaagctggggcccactgggccccaagtggtgcaggcaagtgaactgtttcagttttggagcggggggtccggccctccctggaatgttcctgatgtgaaaccgttcagtcagaccccctttactttgtctctgacgccaccctctactgacctgccgggatatgaacccccacaggcgctgtctccactgccacctcctacaccatccccccctgcatggcaagccaggggtctcggcaccgccaggctgcagcttgtagaatttagtgctttcgtggagccccccgatgctgtggatagctaccaacggcatctgtttgtacacatctcccagcattgcccaagccctggggcgccccctctggagagcgtagatgtgaggcaaatctatgataaattccctgagaaaaaaggcggattgagggaattatacgataggggaccacctcacgctttttttctggtcaagttttgggccgacttgaactggggaccgtcaggggaagaggcaggagctggcggctcgataagtagcggaggcttttacggcgtgagctcacagtatgaatcactggagcatatgacacttacatgctcttcaaaggtctgctcattcgggaagcaggtggtggaaaaggttgaaacagagagagctcagctagaggacggacggttcgtgtataggctgctcaggtcacccatgtgtgagtacctggtaaacttcctgcacaagctgcggcaactacccgagcgatacatgatgaatagtgtcctggaaaacttcaccattctccaggtggttaccaaccgcgatactcaggagctgctcctctgcaccgcttatgtgtttgaggtgagcaccagcgaacgtggagcacagcatcatatctacaggctggtccgggattag

SEQ ID NO: 91131 - DNA, 960 bp, Artificial Sequence
  derived and/or modified sequence
atggccaccatgagcagcgcccagctgatcagcgcccccagcctgcaggccaagctgggccccaccggcccccaggtggtgcaggccagcgagctgttccagttctggagcggcggcagcggccccccctggaatgtgcctgatgtgaagcccttcagccagacccccttcaccctgagcctgaccccacccagcacagacctgcccggctatgagcccccccaggccctgagccccctgcccccacccacccccagccccccagcctggcaggcccggggcctgggcacagcccggctgcagctggtggagttcagcgcctttgtggagcccccagatgctgtggacagctaccagaggcacctgtttgtgcacatcagccagcactgccccagccctggggccccacccctggagagcgtggatgtgcggcagatctatgacaagtttcctgagaagaagggcggcctgcgggagctgtatgaccggggcccccctcatgccttcttcctggtgaagttctgggccgacctgaactggggccccagcggggaggaggccggggccggcggcagcatcagcagcggcggcttctatggagtgagcagccagtatgagagcctggagcacatgaccctgacctgcagcagcaaggtgtgcagctttgggaagcaggtggtggagaaggtggagacagagcgggcccagctggaggatggccgctttgtgtaccgcctgctgcggagccccatgtgtgagtacctggtgaacttcctgcacaagctgcggcagctgcctgagcgctacatgatgaacagcgtgctggagaacttcaccatcctgcaggtggtgaccaacagagacacccaggagctgctgctgtgcacagcctacgtgtttgaggtgtccaccagcgagcggggggcccagcaccacatctaccgcctggtgcgggactag

SEQ ID NO: 91132 - DNA, 960 bp, Artificial Sequence
  derived and/or modified sequence
atggccaccatgagcagcgcccagctgatcagcgcccccagcctgcaggcaaagttggggccaacggggccccaagtcgtgcaggcctctgagctctttcagttctggtccggtggcagtggtccgccttggaacgtgccggatgtaaagcctttttcccaaacaccctttacgctcagtctcacacctcctagcacagatctgcccggatatgagcccccccaggcccttagtcctctacccccaccgacaccttcccccccggcctggcaggctcgggggttgggcactgcgcgactacagctggtggagttttcggccttcgtggagcctccagacgccgtcgattcctaccaaagacatctgttcgtacacattagccaacattgtccctctcctggagcgcccccactcgaaagcgtggatgtgcgtcaaatttacgataaattcccagaaaagaaggggggcctcagagaactgtacgataggggcccccctcatgcatttttcttagtcaagttctgggcagatttgaactggggcccctcaggagaagaggccggcgcaggcgggtctatcagttctgggggtttctatggagtgtcgagccagtatgaatccctggagcatatgacactgacgtgttcaagcaaggtttgctcgttcggaaaacaggttgttgagaaagttgagactgagagggcacagctggaggatggccggtttgtgtaccggctcctccggagtcctatgtgcgaatatctggtgaactttctgcataagctcaggcagcttccggagaggtacatgatgaactccgtattggaaaattttaccatattgcaggttgtgaccaatcgcgacactcaggaactgcttctgtgcactgcctatgttttcgaggtgtccacttctgaacgtggtgcccagcatcatatttacagacttgtcagggattag

SEQ ID NO: 91133 - DNA, 960 bp, Artificial Sequence
  derived and/or modified sequence
atggctacgatgtcgtctgctcaactcatctccgccccttcattgcaggctaaactgggacccaccggtccccaggtcgtgcaggcttcagaactgtttcagttttggagtgggggttctggccctccctggaacgttccggacgttaaacccttctcccagacccccttcaccctaagcctcaccccacccagcacagatttgcccggttacgagccccctcaggcactctccccattgccccctcctaccccaagcccccctgcctggcaagctagagggttaggaaccgctagacttcagttggtcgaatttagtgcctttgtggaaccccctgacgcggtcgactcatatcagcggcacctcttcgtgcacatatcccagcattgccccagccctggggcaccacccctggagtcagtagatgtgcgtcaaatctatgataagttcccagaaaaaaagggagggttgagagagctctatgacaggggcccaccccatgcctttttcctggtgaagttttgggccgacctaaattggggccctagcggggaggaggccggagccggaggctcaatcagctccgggggattttatggggtaagctctcagtacgagtctctggagcacatgaccctcacatgttcttccaaggtgtgtagcttcgggaagcaggtggtcgagaaggtggagactgagagggcccagttagaggacgggagattcgtgtaccgactgctacgtagccccatgtgcgagtacctggtcaacttcctccacaagctgcgtcagctgccggagaggtacatgatgaactctgtcctcgaaaatttcaccattctgcaagttgtgactaatcgcgatactcaggaactcttgttgtgcaccgcgtatgtgtttgaggtgtctacatcggaacgaggcgcacaacatcatatttatcgcctggtcagggactag

SEQ ID NO: 91134 - DNA, 273 bp, Artificial Sequence
  derived and/or modified sequence
atggccgacacacagtacattctgcctaatgatattggggtgagttctttggattgccgtgaggctttccgactgctgagccctaccgagcgactatacgcctatcaccttagtcgcgcagcctggtatgggggattggccgtattgctccagaccagccctgaagctccttatatatacgctctactgtctcggctcttccgtgcccaagatcccgatcagctcagacagcacgctctggctgaggggctcactgaagaggaatatcagtag

SEQ ID NO: 91135 - DNA, 273 bp, Artificial Sequence
  derived and/or modified sequence
atggctgacacccagtacatcctgcccaatgacatcggcgtgagcagcctggactgccgggaggccttccggctgctgagccccacagagcggctgtatgcctaccacctgagccgggccgcctggtatggaggcctggccgtgctgctgcagaccagccctgaggccccctacatctatgccctgctgagccgcctcttccgggcccaggaccctgaccagctgcggcagcacgccctggccgagggcctgacagaggaggagtaccagtag

SEQ ID NO: 91136 - DNA, 273 bp, Artificial Sequence
  derived and/or modified sequence
atggccgacacccagtacatcctgcccaacgacatcggcgtgagctcccttgattgccgggaggcatttcgattgctgtctccaacggaacggctgtatgcctaccatctgtccagggccgcctggtatggtggactcgccgtacttttacagaccagcccagaggcaccatacatatatgccttgctgtcgcgcctgttccgtgctcaggaccctgatcaactgcgccaacacgccctggccgaaggcctcactgaggaagaataccagtag

SEQ ID NO: 91137 - DNA, 273 bp, Artificial Sequence
  derived and/or modified sequence
atggcggacactcaatacatcttgcccaacgacatcggagttagcagcctggattgtagggaggcgttccgcctcttaagccctaccgaacggctttacgcctaccatctgtcacgtgcagcctggtatgggggactggcagttttattacagacatctcccgaggccccttatatctacgcactacttagcaggcttttcagggcacaggaccctgaccaactgcgacagcatgctttggcagagggcctgacagaggaagaatatcagtag

SEQ ID NO: 91138 - DNA, 273 bp, Artificial Sequence
  derived and/or modified sequence
atggccgacacccagtacatcctgcccaacgacatcggcgtgagcagcctggactgcagagaggccttcagactgctgagccccaccgagagactgtacgcctaccacctgagcagagccgcctggtacggcggcctggccgtgctgctgcagaccagccccgaggccccctacatctacgccctgctgagcagactgttcagagcccaggaccccgaccagctgagacagcacgccctggccgagggcctgaccgaggaggagtaccagtag

SEQ ID NO: 91139 - DNA, 563 bp, Artificial Sequence
  derived and/or modified sequence
gagaatgccccgggttggggaatccccgggttccaacggggctgtcagaccttcagtaaattgttgccctttccaagcctcagtttccctatctgtaaaatgggctttcttctggttgtgaacttctgtggcttccctggtggagcacagggagcgagcaggagaatggagggccaaggaaaaggcatttagagggatgagaatgggacagtttcaagcaaaatcatttattgctgtggatactttccgtccagggcgacttcatctgattagcgcacccacctgcagggcccatggcggacacccagtacatcctgcccaatgacatcggcgtgtctagcctggactgccgtgaggccttccgcctgctgtcacccacagagcgcctctatgcctaccacctgtcccgtgccgcctggtacggaggcctggctgtgctgcttcagacctcccctgaggccccctacatctatgctctgctcagccgcctcttccgcgcccaggaccccgaccagctgcgccaacatgccctggctgaaggccttaccgaggaggagtatcag

SEQ ID NO: 91140 - protein, 348 aa, Artificial Sequence
  derived and/or modified sequence
MLGRSGYRALPLGDFDRFQQSSFGFLGSQKGCLSPERGGVGTGADVPQSWPSCLCHGLISFLGFLLLLVTFPISGWFALKLASKDGAVLSVGADVQFRIWDPVLSVMTVKDLNTATRMTAQNAMTKALLKRPLREIQMEKLKISDQLLLEINDVTRAWGLEVDRVELAVEAVLQPPQDSPAGPNLDSTLQQLALHFLGGSMNSMAGGAPSPGPADTVEMVSEVEPPAPQVGARSSPKQPLAEGLLTALQPFLSEALVSQVGACYQFNVVLPSGTQSAYFLDLTTGRGRVGHGVPDGIPDVVVEMAEADLRALLCRELRPLGAYMSGRLKVKGDLAMAMKLEAVLRALK

SEQ ID NO: 91141 - DNA, 1047 bp, Artificial Sequence
  derived and/or modified sequence
atgctgggcagaagcggctacagagccctgcccctgggcgacttcgacagattccagcagagcagcttcggcttcctgggcagccagaagggctgcctgagccccgagagaggcggcgtgggcaccggcgccgacgtgccccagagctggcccagctgcctgtgccacggcctgatcagcttcctgggcttcctgctgctgctggtgaccttccccatcagcggctggttcgccctgaagctggccagcaaggacggcgccgtgctgagcgtgggcgccgacgtgcagttcagaatctgggaccccgtgctgagcgtgatgaccgtgaaggacctgaacaccgccaccagaatgaccgcccagaacgccatgaccaaggccctgctgaagagacccctgagagagatccagatggagaagctgaagatcagcgaccagctgctgctggagatcaacgacgtgaccagagcctggggcctggaggtggacagagtggagctggccgtggaggccgtgctgcagcccccccaggacagccccgccggccccaacctggacagcaccctgcagcagctggccctgcacttcctgggcggcagcatgaacagcatggccggcggcgcccccagccccggccccgccgacaccgtggagatggtgagcgaggtggagccccccgccccccaggtgggcgccagaagcagccccaagcagcccctggccgagggcctgctgaccgccctgcagcccttcctgagcgaggccctggtgagccaggtgggcgcctgctaccagttcaacgtggtgctgcccagcggcacccagagcgcctacttcctggacctgaccaccggcagaggcagagtgggccacggcgtgcccgacggcatccccgacgtggtggtggagatggccgaggccgacctgagagccctgctgtgcagagagctgagacccctgggcgcctacatgagcggcagactgaaggtgaagggcgacctggccatggccatgaagctggaggccgtgctgagagccctgaagtag

SEQ ID NO: 91142 - DNA, 1047 bp, Artificial Sequence
  derived and/or modified sequence
atgcttggcagaagcggttatcgggcactccccctcggcgattttgacagatttcagcagtcctcctttggcttcctaggttcacagaaaggctgtctcagtccggaaaggggcggggtggggactggggccgatgtgcctcaatcgtggccctcttgcttatgccacgggttgatctcctttctgggcttcctgttgctgctcgtgacctttcccatctctggttggtttgccctgaagctggcttctaaagatggcgcggtgctgtcggtcggagccgacgttcagtttaggatctgggacccggttctgagcgtgatgaccgtcaaggatttaaatacagcaactcggatgacggcgcagaacgccatgacgaaagctttgttgaaacgtccacttcgcgagatccagatggagaagctgaaaatttctgatcagctgctactcgaaatcaacgacgtgacaagagcatggggtctggaggttgatcgagtagagctggctgtagaagccgtgttgcagccgccacaagactctcctgcaggaccgaaccttgattcaaccctccaacaattagccctacacttcctaggaggatcgatgaattccatggccggaggcgcgccctctcctgggcctgcagatactgtggagatggtgagcgaagtcgagccgcctgcaccacaagtcggcgccagaagctccccaaagcagcctctggctgagggcctcttgacagccctgcagccattcctgtctgaggcactggtctcccaagtcggcgcatgctaccagtttaacgtggtacttcccagcgggacccaaagcgcctactttctcgatctcacaaccggcagaggacgggtagggcatggagtcccagatggtatcccggacgtcgtggtggagatggccgaagccgatctcagggcccttttatgccgggaattgaggccccttggtgcctacatgagcggtcgcttgaaagtgaagggagatcttgccatggcgatgaagttggaagccgttctccgtgctctaaagtag

SEQ ID NO: 91143 - DNA, 1047 bp, Artificial Sequence
  derived and/or modified sequence
atgctgggccgcagcggctaccgggccctgcccctgggggactttgaccgcttccagcagagcagctttggcttcctgggcagccagaagggctgcctgagccctgagcggggcggcgtgggcaccggggctgatgtgccccagagctggcccagctgcctgtgccacggcctcatctccttcctgggcttcctgctgctgctggtgaccttccccatcagcggctggtttgccctgaagctggccagcaaggatggagctgtgctgtctgtgggcgcagatgtgcagttccgcatctgggaccctgtgctgtctgtgatgacagtgaaggacctgaacacagccaccaggatgacagcccagaatgccatgaccaaggccctgctgaagaggcccctgcgggagatccagatggagaagctgaagatcagtgaccagctgctgctggagatcaatgatgtgacccgggcctggggcctggaggtggacagagtggagctggccgtggaggccgtgctgcagcccccccaggacagccctgctggccccaacctggacagcaccctgcagcagctggccctgcacttcctgggcggctccatgaacagcatggccggcggggcccccagccctggccctgctgacacagtggagatggtgtctgaggtggagcccccagccccccaggtgggcgcccggagcagccccaagcagcccctggccgagggcctgctgacagccctgcagcccttcctgtctgaggccctggtgtcccaggtgggcgcctgctaccagttcaacgtggtgctgcccagcggcacccagagcgcctacttcctggacctgaccaccggccggggccgggtgggccatggagtgcctgatggcatcccagatgtggtggtggagatggccgaggccgacctgcgggccctgctgtgccgggagctgcggcccctgggcgcctacatgagcggccgcctgaaggtgaagggggacctggccatggccatgaagctggaggccgtgctgcgggccctgaagtag

SEQ ID NO: 91144 - DNA, 1047 bp, Artificial Sequence
  derived and/or modified sequence
atgctgggccggagcggctaccgggccctgcccctgggcgacttcgatcgcttccagcagtcctcgttcggatttttgggcagccagaagggatgccttagtcctgaaagagggggggtggggacaggcgccgacgttccccaatcgtggccaagctgcctctgtcacggcctcatttccttcctgggttttctccttttgctcgtgacctttcccatatctggatggttcgcactgaaactagcgagcaaggatggtgcagtgctcagcgttggcgctgacgtccaattccggatttgggaccccgtgctgtccgtaatgaccgttaaagatctgaatactgccactaggatgacagcccagaacgccatgaccaaagccctgttaaaaagacctctcagggagattcagatggaaaagttgaagatatccgaccaactcctgcttgaaattaatgacgtgacaagggcctggggcctggaggtggacagggtcgagctagccgttgaggcggtgctacagcctccgcaagactcacctgcaggccccaacttggatagtacacttcaacagctcgccttgcactttctcggaggaagcatgaattccatggctggaggagccccaagcccaggtccagcggataccgtggagatggtcagtgaggtggagccccctgcccctcaggtgggcgcccgatcttcccctaaacaacccttggctgaagggcttctgaccgccctacaaccatttctgtccgaggccttggtgtctcaagtcggcgcctgctatcagtttaacgtggtgcttccatccggcactcagtcagcttacttcctagacctcaccactggccgaggtcgcgtcgggcatggcgtccctgatggtatccctgacgtggtggtagagatggctgaggcggacctcagagccttgctgtgtagagagctgagaccgctcggtgcatacatgtcaggcaggctcaaggtgaagggcgatctcgctatggcaatgaagcttgaagccgtgttgagagctctaaagtag

SEQ ID NO: 91145 - DNA, 1047 bp, Artificial Sequence
  derived and/or modified sequence
atgctgggaagatctggctacagagctctcccgcttggtgacttcgaccggttccaacagtcaagcttcggattcctgggctcccagaaaggatgcctgtcccccgaacggggaggcgtgggcaccggcgcagatgttccccagtcttggcccagctgtctttgtcatggcttgatctcgttcctgggtttcttgctgctcctggtgacctttcctatatctgggtggtttgctttgaaacttgcctcgaaggacggtgctgtcttgagtgttggcgcagacgtgcagttcagaatttgggaccccgtgttgtccgtgatgaccgtcaaagatctgaacaccgcaacccgcatgacagcacagaatgccatgaccaaggccctgctgaagagacctctgagagagatccagatggaaaaacttaaaatttctgatcagctgctgttggaaatcaacgatgttactagagcatggggacttgaggtggaccgggtcgagctggctgtagaagctgtgttacaaccaccgcaagacagcccagccggacccaacctggacagcactctacagcagctggctttacattttctgggcggttcgatgaacagcatggccggaggcgcaccaagcccgggacccgcagacaccgtggaaatggtcagcgaagtggagcccccagctcctcaggtcggcgcacgctcttctcctaaacagcccttagccgaaggcctgctaactgccctccaaccgttcctctccgaggcccttgtgagtcaggtgggcgcttgttaccaattcaacgtggtactgccttcaggaacacagtcagcctacttcctagacctcacaacgggacgtgggagggtcggacacggagtgccagacggaattccagatgtggtagtggagatggccgaagctgatctgagagccctgctttgcagagaactgaggcctcttggagcctatatgtccggcaggttaaaggtcaagggggatctggccatggcaatgaagctagaagccgtactccgcgctttgaaatag

SEQ ID NO: 91146 - DNA, 1835 bp, Artificial Sequence
  derived and/or modified sequence
gggccgcgtagggcccactggccagggagggcgccgcgcggaggcgcggggcgtgtctcctgtcaaaagccatgctcggcaggtctgggtaccgggcgctgcccctgggtgattttgaccgcttccagcagtcgagcttcggctttctgggctcgcagaagggctgcttgtccccggagcggggcggcgtggggacaggggccgatgtaccccagagctggccctcctgcctctgtcatggcctcatcagtttcctggggttcttgctgctgttggtcaccttccccatttctggctggtttgccctgaagctggcctctaaggacggggctgtgctgtccgtgggagccgatgtccagtttcgcatctgggacccggtgctgtcggtgatgactgtgaaagacctgaacacagccacacgcatgacagcccagaacgccatgaccaaggccctgctcaagaggccgctgcgggagatccagatggagaagctcaagatcagcgaccagcttctgctggagatcaacgatgtgaccagggcctgggggctggaggtagaccgcgtggagctggcagtggaggccgtgctccagccgccccaggacagcccagctgggcccaacctggacagcaccctccagcagctggccctgcacttcctgggaggaagcatgaactcaatggcaggaggtgccccgtccccggggccagcagacaccgtggagatggtgagtgaagttgagccacctgcccctcaagttggtgccaggtccagtccgaagcagcctctggcggaggggctactgactgctctacagcccttcctgtctgaggccctggtcagccaagtcggggcctgctaccagttcaatgtcgtcctgcccagcggcacccaaagcgcctacttcctggacctcactacaggacgaggaagagtgggacacggggtgcctgatggcatccctgatgtggtggtggagatggccgaggcagacctgcgggccctgctatgcagagagctgcggcccctgggggcctacatgagtggacggctgaaggtgaagggcgacctggctatggccatgaagctggaggctgtcctcagggccttgaagtagcagccttggctgactttccagagcccagtcccaagcctggcaccaagcctgaggggcctcttggaggaggaggtgttcatctgcaccacagagagttgaggccctaacaaatttcaggcccagccaagagcccatgaatggaggctgcaggaggctgagtccggctgccatgcacgtctcccctacagtggttctctggacaaggctttgtccatcccggtccccagctgagtgcccagcgctgagctgggtgcacggtgtgattccaggaggagagccaggcctgccctgccctgctggcttcctgactggagagacaggacccacagaaacagcctgacagcagctggtttggtccttgtgtgagggaccaagcatgtggcccaggctctaagctctgcggggattggagagggatggggagggaagggaaggcagctccaagaagaggtccctgtggcgaagttacctggggatcctggctggcccaccttcctggctgcagtccaggcccgtgctggcgggattgggcatgggaaggagcagggcctgctgcttccctggcgctgctcccaaagatttctgactcatctgccagctctgtcctgcatgcctggcgagctggggcccagggcagcatgaaggagagccctgcgttctgtgcttcttaccagaggtttgcaagcctcagacaaataaatgtggtgtttacaatgt

SEQ ID NO: 91147 - protein, 347 aa, Artificial Sequence
  derived and/or modified sequence
MLGRSGYRALPLGDFDRFQQSSFGFLGSQKGCLSPERGGVGTGADVPQSWPSCLCHGLISFLGFLLLLVTFPISGWFALKLASKDGAVLSVGADVQFRIWDPVLSVMTVKDLNTATRMTAQNAMTKALLKRPLREIQMEKLKISDQLLLEINDVTRAWGLEVDRVELAVEAVLQPPQDSPAGPNLDSTLQQLALHFLGGSMNSMAGGAPSPGPDTVEMVSEVEPPAPQVGARSSPKQPLAEGLLTALQPFLSEALVSQVGACYQFNVVLPSGTQSAYFLDLTTGRGRVGHGVPDGIPDVVVEMAEADLRALLCRELRPLGAYMSGRLKVKGDLAMAMKLEAVLRALK

SEQ ID NO: 91148 - DNA, 1044 bp, Artificial Sequence
  derived and/or modified sequence
atgctgggcagaagcggctacagagccctgcccctgggcgacttcgacagattccagcagagcagcttcggcttcctgggcagccagaagggctgcctgagccccgagagaggcggcgtgggcaccggcgccgacgtgccccagagctggcccagctgcctgtgccacggcctgatcagcttcctgggcttcctgctgctgctggtgaccttccccatcagcggctggttcgccctgaagctggccagcaaggacggcgccgtgctgagcgtgggcgccgacgtgcagttcagaatctgggaccccgtgctgagcgtgatgaccgtgaaggacctgaacaccgccaccagaatgaccgcccagaacgccatgaccaaggccctgctgaagagacccctgagagagatccagatggagaagctgaagatcagcgaccagctgctgctggagatcaacgacgtgaccagagcctggggcctggaggtggacagagtggagctggccgtggaggccgtgctgcagcccccccaggacagccccgccggccccaacctggacagcaccctgcagcagctggccctgcacttcctgggcggcagcatgaacagcatggccggcggcgcccccagccccggccccgacaccgtggagatggtgagcgaggtggagccccccgccccccaggtgggcgccagaagcagccccaagcagcccctggccgagggcctgctgaccgccctgcagcccttcctgagcgaggccctggtgagccaggtgggcgcctgctaccagttcaacgtggtgctgcccagcggcacccagagcgcctacttcctggacctgaccaccggcagaggcagagtgggccacggcgtgcccgacggcatccccgacgtggtggtggagatggccgaggccgacctgagagccctgctgtgcagagagctgagacccctgggcgcctacatgagcggcagactgaaggtgaagggcgacctggccatggccatgaagctggaggccgtgctgagagccctgaagtag

SEQ ID NO: 91149 - DNA, 1044 bp, Artificial Sequence
  derived and/or modified sequence
atgctaggcaggagcggctaccgggctctcccactgggcgacttcgacaggtttcagcaatccagcttcggattcctgggatcccagaagggctgcctctcaccagaacgagggggtgtgggcaccggcgccgacgtgcctcagtcctggcctagttgcctgtgccatggactgataagtttcctgggctttctgctgcttctggtgactttccccattagcggatggttcgcccttaaactcgcatcaaaggatggcgcagtgctgtccgttggagccgatgtgcaatttaggatatgggatcctgttttgtccgtgatgacagttaaggaccttaacaccgctacaagaatgaccgcacagaacgccatgactaaggcactcttgaagcgtccactgcgcgagatccagatggagaaacttaagatttctgatcagctgctgctggaaataaatgacgtcacgagggcttgggggctggaggtggaccgcgtggagctcgccgtggaagccgtgctccaaccgcctcaggattccccagccggaccaaatttggattccaccctgcagcagctcgcgctgcattttctgggagggtccatgaactccatggccggtggggctcctagccctggaccagacactgtcgagatggtcagcgaggtggaacctcctgcccctcaggtgggagctcggtcaagtcccaagcagccattggctgaaggccttctcaccgcattgcagcccttcctatccgaagcacttgtgtcccaggtcggggcgtgctaccaatttaatgtggtcctgccatcggggacacagtcagcttacttcctcgaccttacgacagggagaggccgcgtggggcacggcgttccggatgggattcccgatgtcgtcgtggagatggccgaagcggacctgagagctctcttgtgtagggaattgcgacctctcggggcctatatgtctggcaggttgaaagttaaaggggacctggcaatggccatgaaattggaggccgttctgagagcactcaaatag

SEQ ID NO: 91150 - DNA, 1044 bp, Artificial Sequence
  derived and/or modified sequence
atgctgggccgcagcggctaccgggccctgcccctgggggactttgaccgcttccagcagagcagctttggcttcctgggcagccagaagggctgcctgagccctgagcggggcggcgtgggcaccggggctgatgtgccccagagctggcccagctgcctgtgccacggcctcatctccttcctgggcttcctgctgctgctggtgaccttccccatcagcggctggtttgccctgaagctggccagcaaggatggagctgtgctgtctgtgggcgcagatgtgcagttccgcatctgggaccctgtgctgtctgtgatgacagtgaaggacctgaacacagccaccaggatgacagcccagaatgccatgaccaaggccctgctgaagaggcccctgcgggagatccagatggagaagctgaagatcagtgaccagctgctgctggagatcaatgatgtgacccgggcctggggcctggaggtggacagagtggagctggccgtggaggccgtgctgcagcccccccaggacagccctgctggccccaacctggacagcaccctgcagcagctggccctgcacttcctgggcggctccatgaacagcatggccggcggggcccccagccctggccctgacacagtggagatggtgtctgaggtggagcccccagccccccaggtgggcgcccggagcagccccaagcagcccctggccgagggcctgctgacagccctgcagcccttcctgtctgaggccctggtgtcccaggtgggcgcctgctaccagttcaacgtggtgctgcccagcggcacccagagcgcctacttcctggacctgaccaccggccggggccgggtgggccacggcgtgcctgatggcatcccagatgtggtggtggagatggccgaggccgacctgcgggccctgctgtgccgggagctgcggcccctgggcgcctacatgagcggccgcctgaaggtgaagggggacctggccatggccatgaagctggaggccgtgctgcgggccctgaagtag

SEQ ID NO: 91151 - DNA, 1044 bp, Artificial Sequence
  derived and/or modified sequence
atgctgggccggagcggctaccgggccctgcccctgggcgacttcgaccgctttcaacagtcttcctttggtttcctgggaagtcaaaagggatgcctctcacccgagagaggaggagttgggactggtgcggatgtgcctcaatcctggcctagttgcttatgtcacggtctgattagctttctgggctttttgctccttctggtgacatttcccatttcagggtggtttgcgttaaaactcgctagtaaggatggcgccgtcctgtctgtcggtgcagacgtgcagtttagaatttgggatccggttctgagcgtgatgactgtgaaggacctcaataccgcaactagaatgacggcgcagaacgctatgacaaaagcgcttctcaaaaggccccttagggaaatccaaatggaaaagctcaaaatttcggaccagctcttgctggagataaacgatgtcacccgggcttgggggttggaggtggatcgcgtcgaactggctgtcgaggcagtgctccagccaccgcaggactctcccgcgggccccaacctggattctactttgcagcagctggcgctgcactttctcggtggctctatgaatagtatggcaggaggggctcccagtcctggcccggacacggtcgagatggtgtctgaagtcgagcccccagcacctcaggtaggggctcgttcttctcctaaacagccactggccgagggcctgctgaccgctctgcagccatttttgtccgaggccctggtgtcccaggttggtgcttgctatcaatttaacgtcgtgcttccaagtggtacacagagtgcatactttctggatctgacaacaggcaggggacgcgtgggccatggtgtgcccgacggaattcctgatgtcgtggtggagatggccgaagctgacctcagagccttattgtgtcgcgagctgcgtccgcttggcgcatacatgtcaggtcgactgaaagtaaaaggtgatctcgctatggccatgaagcttgaagctgtgctccgtgccctgaaatag

SEQ ID NO: 91152 - DNA, 1044 bp, Artificial Sequence
  derived and/or modified sequence
atgcttgggaggtcgggctacagagccctgccccttggtgatttcgatagatttcagcagagtagtttcgggtttttgggctctcagaaaggctgcctgtcccctgaacgcggaggcgtcggaaccggtgcggacgtgccccaaagctggcccagctgtttatgccacggacttatctccttcctgggtttcctgctcctgctcgtgacttttccaattagtggatggttcgccctgaagctcgcttccaaagacggggctgtgctttcggtgggcgctgacgtccagtttcgcatttgggaccctgtactcagcgtgatgacggtaaaagacctgaatacagcaacccggatgaccgcacagaatgcgatgacgaaggctctgctcaagagaccattacgcgaaatccagatggagaagctcaagatctctgatcaacttcttctcgagattaacgacgtgacaagagcctgggggctagaggtagaccgtgtggaattggctgtcgaggccgtgttgcagcctccccaggatagccccgcaggaccaaatctagattctactctgcaacagcttgcactgcattttctgggcggttcaatgaattcaatggccggaggggctccatcaccaggtccagatacagtggaaatggttagcgaggtcgagccacctgctccccaagtcggcgctcgctccagtccaaaacagcccctagctgagggcctgttaactgcactgcagcccttcctatccgaggccctggtcagtcaggtgggggcatgttaccagtttaacgttgtgctaccatctggtactcaaagcgcttattttctcgatctgaccacagggaggggcagggtgggacatggtgttcctgatggaatccccgacgtagtggtggagatggccgaggctgatttgagggcacttttatgcagggagctgcggcctttgggggcatatatgtccggaaggcttaaggttaaaggagacctagctatggccatgaagctcgaagctgtcctgcgggctctgaagtag

SEQ ID NO: 91153 - DNA, 1849 bp, Artificial Sequence
  derived and/or modified sequence
gcggggccgcgtagggcccactggccagggagggcgccgcgcggaggcgcggggcgtgtctcctgtcaaaagccatgctcggcaggtctgggtaccgggcgctgcccctgggtgattttgaccgcttccagcagtcgagcttcggctttctgggctcgcagaagggctgcttgtccccggagcggggcggcgtggggacaggggccgatgtaccccagagctggccctcctgcctctgtcatggcctcatcagtttcctggggttcttgctgctgttggtcaccttccccatttctggctggtttgccctgaagctggcctctaaggacggggctgtgctgtccgtgggagccgatgtccagtttcgcatctgggacccggtgctgtcggtgatgactgtgaaagacctgaacacagccacacgcatgacagcccagaacgccatgaccaaggccctgctcaagaggccgctgcgggagatccagatggagaagctcaagatcagcgaccagcttctgctggagatcaacgatgtgaccagggcctgggggctggaggtagaccgcgtggagctggcagtggaggccgtgctccagccgccccaggacagcccagctgggcccaacctggacagcaccctccagcagctggccctgcacttcctgggaggaagcatgaactcaatggcaggaggtgccccgtccccggggccagacaccgtggagatggtgagtgaagttgagccacctgcccctcaagttggtgccaggtccagtccgaagcagcctctggcggaggggctactgactgctctacagcccttcctgtctgaggccctggtcagccaagtcggggcctgctaccagttcaatgtcgtcctgcccagcggcacccaaagcgcctacttcctggacctcactacaggacgaggaagagtgggacacggggtgcctgatggcatccctgatgtggtggtggagatggccgaggcagacctgcgggccctgctatgcagagagctgcggcccctgggggcctacatgagtggacggctgaaggtgaagggcgacctggctatggccatgaagctggaggctgtcctcagggccttgaagtagcagccttggctgactttccagagcccagtcccaagcctggcaccaagcctgaggggcctcttggaggaggaggtgttcatctgcaccacagagagttgaggccctaacaaatttcaggcccagccaagagcccatgaatggaggctgcaggaggctgagtccggctgccatgcacgtctcccctacagtggttctctggacaaggctttgtccatcccggtccccagctgagtgcccagcgctgagctgggtgcacggtgtgattccaggaggagagccaggcctgccctgccctgctggcttcctgactggagagacaggacccacagaaacagcctgacagcagctggtttggtccttgtgtgagggaccaagcatgtggcccaggctctaagctctgcggggattggagagggatggggagggaagggaaggcagctccaagaagaggtccctgtggcgaagttacctggggatcctggctggcccaccttcctggctgcagtccaggcccgtgctggcgggattgggcatgggaaggagcagggcctgctgcttccctggcgctgctcccaaagatttctgactcatctgccagctctgtcctgcatgcctggcgagctggggcccagggcagcatgaaggagagccctgcgttctgtgcttcttaccagaggtttgcaagcctcagacaaataaatgtggtgtttacaatgtataaaagagaagaa

SEQ ID NO: 91154 - protein, 327 aa, Artificial Sequence
  derived and/or modified sequence
MLGRSGYRALPLGDFDRFQQSSFGFLGSQKGCLSPERGGVGTGADVPQSWPSCLCHGLISFLGFLLLLVTFPISGWFALKIVPTYERMIVFRLGRIRTPQGPGMVLLLPFIDSFQRVDLRTRAFNVPPCKLASKDGAVLSVGADVQFRIWDPVLSVMTVKDLNTATRMTAQNAMTKALLKRPLREIQMEKLKISDQLLLEINDVTRAWGLEVDRVELAVEAVLQPPQDSPAGPNLDSTLQQLALHFLGGSMNSMAGGAPSPGPGRGRVGHGVPDGIPDVVVEMAEADLRALLCRELRPLGAYMSGRLKVKGDLAMAMKLEAVLRALK

SEQ ID NO: 91155 - DNA, 984 bp, Artificial Sequence
  derived and/or modified sequence
atgctgggcagaagcggctacagagccctgcccctgggcgacttcgacagattccagcagagcagcttcggcttcctgggcagccagaagggctgcctgagccccgagagaggcggcgtgggcaccggcgccgacgtgccccagagctggcccagctgcctgtgccacggcctgatcagcttcctgggcttcctgctgctgctggtgaccttccccatcagcggctggttcgccctgaagatcgtgcccacctacgagagaatgatcgtgttcagactgggcagaatcagaaccccccagggccccggcatggtgctgctgctgcccttcatcgacagcttccagagagtggacctgagaaccagagccttcaacgtgcccccctgcaagctggccagcaaggacggcgccgtgctgagcgtgggcgccgacgtgcagttcagaatctgggaccccgtgctgagcgtgatgaccgtgaaggacctgaacaccgccaccagaatgaccgcccagaacgccatgaccaaggccctgctgaagagacccctgagagagatccagatggagaagctgaagatcagcgaccagctgctgctggagatcaacgacgtgaccagagcctggggcctggaggtggacagagtggagctggccgtggaggccgtgctgcagcccccccaggacagccccgccggccccaacctggacagcaccctgcagcagctggccctgcacttcctgggcggcagcatgaacagcatggccggcggcgcccccagccccggccccggcagaggcagagtgggccacggcgtgcccgacggcatccccgacgtggtggtggagatggccgaggccgacctgagagccctgctgtgcagagagctgagacccctgggcgcctacatgagcggcagactgaaggtgaagggcgacctggccatggccatgaagctggaggccgtgctgagagccctgaagtag

SEQ ID NO: 91156 - DNA, 984 bp, Artificial Sequence
  derived and/or modified sequence
atgctggggagatctggctatcgagctctgccccttggagacttcgaccgattccagcaaagttcctttgggtttctaggcagccagaaagggtgcctgtcaccagagagagggggagtgggcaccggggccgatgtcccacaatcctggcctagttgcctttgtcatggcctgatttctttcttgggctttcttctgttgctggtgacttttcctatctcagggtggttcgccttgaagatcgttcccacgtacgaacggatgattgtgttccggctcggccggatcagaacccctcaggggccgggaatggttttactcctgccatttattgattccttccagcgcgtggacttgagaactagagcctttaacgtgcccccctgtaagctggcatcgaaggatggggccgttctttctgtgggggcggacgttcagttcaggatttgggaccctgtgttatccgtgatgactgtgaaagacctaaatactgctacgagaatgactgcacagaatgctatgacaaaggcactgctcaaaagaccacttcgcgaaatacagatggagaaactgaagatctccgatcagcttctcctcgagatcaatgatgtcactagggcatggggactcgaggtggatcgcgtggagctcgctgttgaggctgtcctgcagccaccccaggattcgcccgcggggccaaacctcgactctacactgcagcaactggcactgcactttctgggcgggtctatgaattctatggctgggggcgccccttctccgggaccaggccgcggccgtgtcggacatggagttccagacggaattcccgacgttgtggtagaaatggcagaagccgacctcagagcccttctgtgccgcgagctgagacctcttggcgcttacatgtcaggccgactcaaagtgaaaggtgaccttgcaatggccatgaaacttgaggcagtcctgcgggccttaaaatag

SEQ ID NO: 91157 - DNA, 984 bp, Artificial Sequence
  derived and/or modified sequence
atgctgggccgcagcggctaccgggccctgcccctgggggactttgaccgcttccagcagagcagctttggcttcctgggcagccagaagggctgcctgagccctgagcggggcggcgtgggcaccggggctgatgtgccccagagctggcccagctgcctgtgccacggcctcatctccttcctgggcttcctgctgctgctggtgaccttccccatcagcggctggtttgccctgaagatcgtgcccacctatgaaagaatgattgtgttccggctgggccgcatccgcaccccccagggccctggcatggtgctgctgctgcccttcatcgacagcttccagagggtggacctgcggacccgggccttcaacgtgcccccctgcaagctggccagcaaggatggagctgtgctgtctgtgggcgcagatgtgcagttccgcatctgggaccctgtgctgtctgtgatgacagtgaaggacctgaacacagccaccaggatgacagcccagaatgccatgaccaaggccctgctgaagaggcccctgcgggagatccagatggagaagctgaagatcagtgaccagctgctgctggagatcaatgatgtgacccgggcctggggcctggaggtggacagagtggagctggccgtggaggccgtgctgcagcccccccaggacagccctgctggccccaacctggacagcaccctgcagcagctggccctgcacttcctgggcggctccatgaacagcatggccggcggggcccccagccctggccctggccggggccgggtgggccacggcgtgcctgatggcatcccagatgtggtggtggagatggccgaggccgacctgcgggccctgctgtgccgggagctgcggcccctgggcgcctacatgagcggccgcctgaaggtgaagggggacctggccatggccatgaagctggaggccgtgctgcgggccctgaagtag

SEQ ID NO: 91158 - DNA, 984 bp, Artificial Sequence
  derived and/or modified sequence
atgctgggccggagcggctaccgggccctgcccctgggcgacttcgatcggtttcagcagtcctcctttggcttcttgggttcacagaaggggtgcctgtcccccgagagagggggggtaggcactggggccgatgtgccacagtcatggcctagctgtctttgtcacgggcttatatcctttctagggtttcttcttctcctggtgactttcccaatttctgggtggtttgcactgaagatcgtgcccacttacgagcgcatgatagtcttcaggctgggtcgcattcggacccctcaaggacccgggatggtgctgctcttgccattcatcgacagcttccagcgagtggaccttagaactcgcgcgtttaacgtgcccccctgtaagctcgctagtaaggacggtgccgtgcttagcgttggagctgatgtgcagtttcgcatttgggatcctgtactgtcagtaatgactgttaaagatctgaacacagccacccgcatgaccgctcagaatgccatgacgaaagcgctgttgaaaaggcccctccgggagatacagatggagaaactcaaaatttctgatcaactcctactagaaattaacgatgtaacaagagcgtggggtctggaggtcgatcgagtcgagctggctgtggaagccgtacttcagcccccacaagattccccagccggccccaacctggactctaccctacagcagttggctctgcacttcctcggtggaagtatgaactccatggctgggggtgcaccctccccagggccaggtcgcggtagggtgggccatggagtgcccgacgggattccagacgttgttgtagaaatggccgaggccgacctgcgagccctgctttgccgggagcttcgtcctctgggagcttatatgagtggtagattaaaggtgaagggcgatctcgccatggctatgaaactcgaagctgtcttgcgagccttgaagtag

SEQ ID NO: 91159 - DNA, 984 bp, Artificial Sequence
  derived and/or modified sequence
atgctcggtaggagtggctatagagcgctgcccctgggggacttcgatagatttcagcagagctcctttggcttccttggcagccagaaggggtgcctgtctcctgagcgaggtggagtcgggaccggggcagacgtccctcagtcatggccatcatgtctgtgccatgggctgatttcttttctggggtttctgctcctgcttgttaccttcccaatctcgggctggtttgcattaaaaatcgtgcccacttacgagaggatgattgtattcagactagggagaatccgtacgcctcagggtcccggtatggtgctgttgctgccttttatcgactctttccagagggtcgatctgcggaccagagccttcaatgtccccccttgtaagctggccagcaaggacggagccgtgctgtccgtgggtgctgacgtgcagtttaggatctgggatcccgttttgtctgtgatgacagtcaaagatcttaatactgccacccgcatgacagcgcagaatgcaatgaccaaggccctcctgaagcggccattaagagagatccagatggagaaactcaagatttctgaccagctcctgcttgagatcaacgatgtcacccgcgcatggggcttggaggtggatcgcgttgagctcgccgttgaggccgtactgcagcctccacaggactctccagccggaccaaacttggactcgaccctgcagcagctggcattacattttctgggaggcagtatgaacagtatggccggaggtgctccgtccccagggcctggtcgaggtcgagttggccatggcgtcccagatggaataccggacgttgtggtagagatggctgaggccgatctaagagctcttctgtgcagggagcttcgacccctgggcgcttatatgtcaggcagactgaaagtgaaaggagatctcgcaatggccatgaagctggaggctgtactgcgtgctctgaagtag

SEQ ID NO: 91160 - DNA, 984 bp, Artificial Sequence
  derived and/or modified sequence
atgctcggcaggtctgggtaccgggcgctgcccctgggtgattttgaccgcttccagcagtcgagcttcggctttctgggctcgcagaagggctgcttgtccccggagcggggcggcgtggggacaggggccgatgtaccccagagctggccctcctgcctctgtcatggcctcatcagtttcctggggttcttgctgctgttggtcaccttccccatttctggctggtttgccctgaagattgtgcccacctacgagcggatgattgtgttccgcctgggccggatccgcaccccccagggacctggcatggttctgctcttgcccttcattgactcctttcagagggtggatctgaggacacgagccttcaacgtccctccctgcaagctggcctctaaggacggggctgtgctgtccgtgggagccgatgtccagtttcgcatctgggacccggtgctgtcggtgatgactgtgaaagacctgaacacagccacacgcatgacagcccagaacgccatgaccaaggccctgctcaagaggccgctgcgggagatccagatggagaagctcaagatcagcgaccagcttctgctggagatcaacgatgtgaccagggcctgggggctggaggtagaccgcgtggagctggcagtggaggccgtgctccagccgccccaggacagcccagctgggcccaacctggacagcaccctccagcagctggccctgcacttcctgggaggaagcatgaactcaatggcaggaggtgccccgtccccggggccaggacgaggaagagtgggacacggggtgcctgatggcatccctgatgtggtggtggagatggccgaggcagacctgcgggccctgctatgcagagagctgcggcccctgggggcctacatgagtggacggctgaaggtgaagggcgacctggctatggccatgaagctggaggctgtcctcagggccttgaagtag

SEQ ID NO: 91161 - protein, 310 aa, Artificial Sequence
  derived and/or modified sequence
MIVFRLGRIRTPQGPGMVLLLPFIDSFQRVDLRTRAFNVPPCKLASKDGAVLSVGADVQFRIWDPVLSVMTVKDLNTATRMTAQNAMTKALLKRPLREIQMEKLKISDQLLLEINDVTRAWGLEVDRVELAVEAVLQPPQDSPAGPNLDSTLQQLALHFLGGSMNSMAGGAPSPGPDTVEMVSEVEPPAPQVGARSSPKQPLAEGLLTALQPFLSEALVSQVGACYQFNVVLPSGTQSAYFLDLTTGRGRVGHGVPDGIPDVVVEMAEADLRALLCRELRPLGAYMSGRLKVKGDLAMAMKLEAVLRALK

SEQ ID NO: 91162 - DNA, 933 bp, Artificial Sequence
  derived and/or modified sequence
atgatcgtgttcagactgggcagaatcagaaccccccagggccccggcatggtgctgctgctgcccttcatcgacagcttccagagagtggacctgagaaccagagccttcaacgtgcccccctgcaagctggccagcaaggacggcgccgtgctgagcgtgggcgccgacgtgcagttcagaatctgggaccccgtgctgagcgtgatgaccgtgaaggacctgaacaccgccaccagaatgaccgcccagaacgccatgaccaaggccctgctgaagagacccctgagagagatccagatggagaagctgaagatcagcgaccagctgctgctggagatcaacgacgtgaccagagcctggggcctggaggtggacagagtggagctggccgtggaggccgtgctgcagcccccccaggacagccccgccggccccaacctggacagcaccctgcagcagctggccctgcacttcctgggcggcagcatgaacagcatggccggcggcgcccccagccccggccccgacaccgtggagatggtgagcgaggtggagccccccgccccccaggtgggcgccagaagcagccccaagcagcccctggccgagggcctgctgaccgccctgcagcccttcctgagcgaggccctggtgagccaggtgggcgcctgctaccagttcaacgtggtgctgcccagcggcacccagagcgcctacttcctggacctgaccaccggcagaggcagagtgggccacggcgtgcccgacggcatccccgacgtggtggtggagatggccgaggccgacctgagagccctgctgtgcagagagctgagacccctgggcgcctacatgagcggcagactgaaggtgaagggcgacctggccatggccatgaagctggaggccgtgctgagagccctgaagtag

SEQ ID NO: 91163 - DNA, 933 bp, Artificial Sequence
  derived and/or modified sequence
atgatagtgtttcgtctgggtagaattcgcacacctcagggcccaggaatggttcttctgcttccattcattgactccttccaacgcgtggacctcagaacgcgagctttcaatgtgccaccttgtaaattggcctcaaaggacggcgccgtgttaagcgtgggcgcggacgtgcaatttagaatctgggaccccgtgctgtcggtaatgactgttaaggatttgaacacagctacaaggatgaccgcccagaacgctatgacaaaggccctgttgaaacgcccccttcgggagatacagatggaaaagctcaaaatttcagatcagttactgctggaaatcaatgacgtgaccagggcctgggggctggaggttgacagggtggagctggctgtggaagccgtgttacagccacctcaggactcccctgcagggccgaacttggactctactctgcaacagttagccctccatttcctgggtgggtctatgaactcgatggcagggggcgctccttctccaggaccagacactgtggagatggtctccgaggtggaaccgcctgctccacaggtaggagcacgatctagcccaaagcagccgctcgccgaaggactattaactgctctgcagccttttctgtccgaggctctggttagtcaggtaggcgcttgctatcagttcaacgtggtactgccatcagggacccagtccgcatattttctggacttgacaaccggcagaggacgtgtggggcatggtgtccccgatggtatccccgacgttgtggtggagatggccgaggccgatctcagagccctgctgtgcagagagttaaggcccctgggcgcttacatgtcaggaagattgaaagtcaaaggcgatctggcgatggccatgaagttggaggcagttctcagggcgctcaaatag

SEQ ID NO: 91164 - DNA, 933 bp, Artificial Sequence
  derived and/or modified sequence
atgattgtgttccggctgggccgcatccgcaccccccagggccctggcatggtgctgctgctgcccttcatcgacagcttccagagggtggacctgcggacccgggccttcaacgtgcccccctgcaagctggccagcaaggatggagctgtgctgtctgtgggcgcagatgtgcagttccgcatctgggaccctgtgctgtctgtgatgacagtgaaggacctgaacacagccaccaggatgacagcccagaatgccatgaccaaggccctgctgaagaggcccctgcgggagatccagatggagaagctgaagatcagtgaccagctgctgctggagatcaatgatgtgacccgggcctggggcctggaggtggacagagtggagctggccgtggaggccgtgctgcagcccccccaggacagccctgctggccccaacctggacagcaccctgcagcagctggccctgcacttcctgggcggctccatgaacagcatggccggcggggcccccagccctggccctgacacagtggagatggtgtctgaggtggagcccccagccccccaggtgggcgcccggagcagccccaagcagcccctggccgagggcctgctgacagccctgcagcccttcctgtctgaggccctggtgtcccaggtgggcgcctgctaccagttcaacgtggtgctgcccagcggcacccagagcgcctacttcctggacctgaccaccggccggggccgggtgggccatggagtgcctgatggcatcccagatgtggtggtggagatggccgaggccgacctgcgggccctgctgtgccgggagctgcggcccctgggcgcctacatgagcggccgcctgaaggtgaagggggacctggccatggccatgaagctggaggccgtgctgcgggccctgaagtag

SEQ ID NO: 91165 - DNA, 933 bp, Artificial Sequence
  derived and/or modified sequence
atgatcgtgttccggctgggccggatccggaccccccagggccccgggatggtactgctcctcccttttattgacagtttccagcgcgtagacctaagaacgcgcgcctttaatgtcccaccttgcaagctcgcgtctaaagacggtgccgtgctgtcagtaggagcggacgtacagtttaggatatgggatcctgtgctgtccgtgatgacggtgaaggatttgaatacggcaacccgcatgacggcccaaaacgcaatgactaaagctctccttaaaagacccttgagggagattcagatggaaaagctcaagatctctgaccagcttttgttagagatcaacgatgtgacaagagcctggggcctggaagtggatcgagtggagttggctgtggaagccgtgctgcaaccccctcaggacagtccagccggccccaatctggatagcaccctgcagcagttggctctgcattttcttggaggttcaatgaatagcatggctggcggggcccccagcccaggccccgacaccgtggagatggtgagcgaggtcgagccaccagccccacaagtgggcgctagatccagccccaaacaacccctggctgaaggactgcttacggcactccagccctttctgtcagaggcattggtgagccaggtaggggcctgttaccagtttaacgtcgttttgcctagcggaacacagagtgcttattttctcgatctgacgaccggccgagggcgggttgggcacggcgtgcctgatggaattcccgatgtcgtggtggaaatggccgaagctgatttgagggcattgctctgcagggaactgaggccacttggtgcctacatgtctggtcgtcttaaggtgaagggcgatcttgcaatggccatgaaattagaggccgtcctgagagctctcaagtag

SEQ ID NO: 91166 - DNA, 933 bp, Artificial Sequence
  derived and/or modified sequence
atgatcgtattccgtcttggccgtattaggacacctcaagggccaggcatggtgttactgttgcccttcatcgacagttttcagcgggtcgatctgagaactagggcttttaatgtgcccccttgcaaactcgctagtaaggatggggctgtgctgtcagttggtgcagatgtgcagtttcgcatttgggaccccgttctgtccgttatgaccgtgaaggatcttaataccgccacacggatgaccgcccagaatgcgatgactaaggccctactgaagcgccctctacgcgagatccagatggagaaactcaagatatctgaccagctgctgctggagattaatgatgtgacacgcgcatggggcttggaagtggatcgtgtggaactcgccgtagaagccgtcctgcagccacctcaggacagccctgccggtccaaatttggatagcacactccagcagttggccttgcacttcttgggtggctcaatgaattctatggctgggggagccccatccccaggaccggacactgtggagatggtatcggaagtcgagcctcctgcccctcaggtcggagcgcgatcaagtccaaagcaaccactggccgagggcctcttgacggccctgcagccctttctatcagaggcacttgtctcccaagtcggtgcctgttaccagtttaatgttgtattacccagcggcacacagtccgcctactttctggaccttaccaccggtcggggacgcgtgggccacggcgtgccggacgggattcccgacgtggtggtggaaatggcggaagcggatcttcgcgctctattgtgccgggaactgagaccgttgggggcttatatgagcggcaggcttaaagtgaagggcgatctggctatggccatgaaactggaagcagttctccgcgctctgaagtag

SEQ ID NO: 91167 - protein, 355 aa, Artificial Sequence
  derived and/or modified sequence
MPDVPQSWPSCLCHGLISFLGFLLLLVTFPISGWFALKIVPTYERMIVFRLGRIRTPQGPGMVLLLPFIDSFQRVDLRTRAFNVPPCKLASKDGAVLSVGADVQFRIWDPVLSVMTVKDLNTATRMTAQNAMTKALLKRPLREIQMEKLKISDQLLLEINDVTRAWGLEVDRVELAVEAVLQPPQDSPAGPNLDSTLQQLALHFLGGSMNSMAGGAPSPGPDTVEMVSEVEPPAPQVGARSSPKQPLAEGLLTALQPFLSEALVSQVGACYQFNVVLPSGTQSAYFLDLTTGRGRVGHGVPDGIPDVVVEMAEADLRALLCRELRPLGAYMSGRLKVKGDLAMAMKLEAVLRALK

SEQ ID NO: 91168 - DNA, 1068 bp, Artificial Sequence
  derived and/or modified sequence
atgcccgacgtgccccagagctggcccagctgcctgtgccacggcctgatcagcttcctgggcttcctgctgctgctggtgaccttccccatcagcggctggttcgccctgaagatcgtgcccacctacgagagaatgatcgtgttcagactgggcagaatcagaaccccccagggccccggcatggtgctgctgctgcccttcatcgacagcttccagagagtggacctgagaaccagagccttcaacgtgcccccctgcaagctggccagcaaggacggcgccgtgctgagcgtgggcgccgacgtgcagttcagaatctgggaccccgtgctgagcgtgatgaccgtgaaggacctgaacaccgccaccagaatgaccgcccagaacgccatgaccaaggccctgctgaagagacccctgagagagatccagatggagaagctgaagatcagcgaccagctgctgctggagatcaacgacgtgaccagagcctggggcctggaggtggacagagtggagctggccgtggaggccgtgctgcagcccccccaggacagccccgccggccccaacctggacagcaccctgcagcagctggccctgcacttcctgggcggcagcatgaacagcatggccggcggcgcccccagccccggccccgacaccgtggagatggtgagcgaggtggagccccccgccccccaggtgggcgccagaagcagccccaagcagcccctggccgagggcctgctgaccgccctgcagcccttcctgagcgaggccctggtgagccaggtgggcgcctgctaccagttcaacgtggtgctgcccagcggcacccagagcgcctacttcctggacctgaccaccggcagaggcagagtgggccacggcgtgcccgacggcatccccgacgtggtggtggagatggccgaggccgacctgagagccctgctgtgcagagagctgagacccctgggcgcctacatgagcggcagactgaaggtgaagggcgacctggccatggccatgaagctggaggccgtgctgagagccctgaagtag

SEQ ID NO: 91169 - DNA, 1068 bp, Artificial Sequence
  derived and/or modified sequence
atgccagacgttccacagtcctggccatcctgcctctgccacggactcatttcattcctgggttttctcctgctcttggtcacgttccctatcagcggctggtttgctttgaagatcgtccccacttacgaaagaatgatagtatttcgccttggcagaatccgaactccccaaggacccggtatggtgctcttactccctttcattgactcatttcagagagtggacctccgcacccgagccttcaacgtacctccatgcaagctagcaagtaaagatggagcagtactgtctgtgggcgccgacgtccagttcagaatctgggatcctgtcctttccgtaatgaccgtaaaggacttgaacacagccactagaatgacggcccagaatgccatgacaaaagccctgctcaagcgccctctaagggaaatccaaatggagaagcttaagataagcgaccagctgttactggaaatcaatgacgtgacaagggcatggggattagaggtcgaccgggtcgaattggccgtcgaggcggtcctccaacctcctcaggattcccccgccggacctaacctagattctaccctgcagcaactcgccctccatttcttaggcggctcgatgaacagcatggctggcggcgctccttcgcctggccctgacaccgtggagatggtcagcgaggtcgaaccacccgctccacaggtaggggcccggtcttccccaaagcagcccctcgcagagggtttactgacagccctgcaaccattcctgtcagaggcattggtgagtcaggttggcgcctgttaccagttcaatgtggtactgccctctggcacccaatccgcttactttctggacctgacaacaggtaggggacgcgttggccacggcgtcccagacggaattccagatgtggtggtggaaatggccgaagcagatttacgagcactgctatgcagggagctccgccctctgggagcctacatgtccgggaggctcaaagtgaagggagatctggctatggcaatgaaattggaagcagtgcttcgggccctcaagtag

SEQ ID NO: 91170 - DNA, 1068 bp, Artificial Sequence
  derived and/or modified sequence
atgccagatgtgccccagagctggcccagctgcctgtgccacggcctcatctccttcctgggcttcctgctgctgctggtgaccttccccatcagcggctggtttgccctgaagatcgtgcccacctatgaaagaatgattgtgttccggctgggccgcatccgcaccccccagggccctggcatggtgctgctgctgcccttcatcgacagcttccagagggtggacctgcggacccgggccttcaacgtgcccccctgcaagctggccagcaaggatggagctgtgctgtctgtgggcgcagatgtgcagttccgcatctgggaccctgtgctgtctgtgatgacagtgaaggacctgaacacagccaccaggatgacagcccagaatgccatgaccaaggccctgctgaagaggcccctgcgggagatccagatggagaagctgaagatcagtgaccagctgctgctggagatcaatgatgtgacccgggcctggggcctggaggtggacagagtggagctggccgtggaggccgtgctgcagcccccccaggacagccctgctggccccaacctggacagcaccctgcagcagctggccctgcacttcctgggcggctccatgaacagcatggccggcggggcccccagccctggccctgacacagtggagatggtgtctgaggtggagcccccagccccccaggtgggcgcccggagcagccccaagcagcccctggccgagggcctgctgacagccctgcagcccttcctgtctgaggccctggtgtcccaggtgggcgcctgctaccagttcaacgtggtgctgcccagcggcacccagagcgcctacttcctggacctgaccaccggccggggccgggtgggccacggcgtgcctgatggcatcccagatgtggtggtggagatggccgaggccgacctgcgggccctgctgtgccgggagctgcggcccctgggcgcctacatgagcggccgcctgaaggtgaagggggacctggccatggccatgaagctggaggccgtgctgcgggccctgaagtag

SEQ ID NO: 91171 - DNA, 1068 bp, Artificial Sequence
  derived and/or modified sequence
atgcccgacgtgccccagagctggcccagctgcctgtgccacggcttgatcagcttcctgggatttttgctcctgctggtcacctttccaatttctggctggttcgccttgaagattgtcccaacctacgaacggatgatagtgttccgactggggcgcattaggactccacaggggccaggcatggtgttgttactgcctttcatcgactctttccagcgggtggacttgcgaactcgggcattcaatgtccccccttgtaagctcgcatccaaggatggcgccgtgttgtccgtgggcgcagacgttcagtttaggatatgggatccggtgctgtcagtgatgactgtcaaagacctgaacaccgctactagaatgacagcgcagaatgcaatgaccaaggcactactgaaacggccactccgggagattcagatggaaaagctgaaaatttctgatcaacttctactagagatcaacgacgtcactcgggcatggggactggaggtggaccgcgtggagttggccgtcgaagccgtccttcagcccccccaggattcaccagcagggcctaatctggatagcaccctacagcagctggccctacacttcctgggcgggtctatgaactccatggcgggaggagcccccagccccgggcctgataccgttgagatggttagcgaagtcgaacctccagcacctcaggtaggggcacggtcatcacctaagcagcccctagctgaggggcttttgacggctcttcagccatttctctcagaagcactggtcagccaggtgggggcttgctaccagttcaacgtagtgttgccatccggcacccagtccgcctatttcctcgacctcaccaccggcagaggaagggtcgggcatggagtgccagacgggattcccgacgtggtcgtcgagatggccgaagccgatctacgagcgctgctgtgcagagaactgaggcccttaggggcttacatgagtggcagactgaaagttaagggcgatctggccatggcaatgaagctggaggccgtactacgcgctctgaaatag

SEQ ID NO: 91172 - DNA, 1068 bp, Artificial Sequence
  derived and/or modified sequence
atgcctgatgtgccacagtcttggccatcctgcctgtgtcacggcctaattagtttcctggggtttctgctgttacttgtgacgttccccatctccggttggttcgcattgaagatcgttcctacctacgagaggatgatagtctttcgactgggcaggattagaacacctcaggggccaggtatggtgcttctgctaccgttcattgactcattccagcgcgtggatttaagaaccagagctttcaacgttcctccttgcaaactggcttcaaaagatggcgctgtgctcagcgtcggcgcagatgtgcaatttaggatttgggacccagtgttgtcggtcatgacagtgaaagacctgaacaccgccactagaatgactgcacagaatgcaatgacaaaggccctgttgaagagacctctgagagagatccagatggagaagttaaaaatttcagaccagctgctgcttgagataaacgatgtgaccagagcctgggggctggaagtggaccgtgtggaactcgctgtggaagctgtcctccaaccacctcaggactccccagccggacccaacttagatagtactctgcagcagctggcccttcacttcctagggggatcaatgaatagcatggcgggtggcgctccctctcctggcccagatacggtggagatggtgtcagaagtagaaccccctgcaccccaagtgggggcacgctcgtctcccaagcaaccattagccgaaggcttgcttacagcccttcagcctttcctcagcgaagctcttgtgtctcaggtcggggcttgttatcagttcaatgtggtgctgccctccgggactcaatccgcctattttttagatttgacaaccggtcgtggtcgcgtgggccacggtgtacctgacggcatcccggacgtcgttgtcgagatggctgaagcagatttacgcgcactgctctgtcgcgagttgcggccattgggggcttacatgtcgggtcgactcaaagttaagggcgatcttgccatggctatgaagttggaggctgtgcttagggccctgaagtag

SEQ ID NO: 91173 - DNA, 1448 bp, Artificial Sequence
  derived and/or modified sequence
aaaagccatgctcggcaggtctgggtaccgggcgctgcccctgggtgattttgaccgcttccagcagtcgagcttcggctttctgggctcgcagaagggctgcttgtccccggagcggggcggcgtggggacaggggccggctaaggcatcatcttcataaggactcctggaaagcacacttctggggctgatggtataggaggaatgtgttttgccagcagtattcagtgcatgtttacagatgcccaggtgctcctggctccatgccagatgtaccccagagctggccctcctgcctctgtcatggcctcatcagtttcctggggttcttgctgctgttggtcaccttccccatttctggctggtttgccctgaagattgtgcccacctacgagcggatgattgtgttccgcctgggccggatccgcaccccccagggacctggcatggttctgctcttgcccttcattgactcctttcagagggtggatctgaggacacgagccttcaacgtccctccctgcaagctggcctctaaggacggggctgtgctgtccgtgggagccgatgtccagtttcgcatctgggacccggtgctgtcggtgatgactgtgaaagacctgaacacagccacacgcatgacagcccagaacgccatgaccaaggccctgctcaagaggccgctgcgggagatccagatggagaagctcaagatcagcgaccagcttctgctggagatcaacgatgtgaccagggcctgggggctggaggtagaccgcgtggagctggcagtggaggccgtgctccagccgccccaggacagcccagctgggcccaacctggacagcaccctccagcagctggccctgcacttcctgggaggaagcatgaactcaatggcaggaggtgccccgtccccggggccagacaccgtggagatggtgagtgaagttgagccacctgcccctcaagttggtgccaggtccagtccgaagcagcctctggcggaggggctactgactgctctacagcccttcctgtctgaggccctggtcagccaagtcggggcctgctaccagttcaatgtcgtcctgcccagcggcacccaaagcgcctacttcctggacctcactacaggacgaggaagagtgggacacggggtgcctgatggcatccctgatgtggtggtggagatggccgaggcagacctgcgggccctgctatgcagagagctgcggcccctgggggcctacatgagtggacggctgaaggtgaagggcgacctggctatggccatgaagctggaggctgtcctcagggccttgaagtagcagccttggctgactttccagagcccagtcccaagcctggcaccaagcctgaggggcctcttggaggaggaggtgttcatctgcaccacagagagttgaggccctaacaaatttca

SEQ ID NO: 91174 - DNA, 1833 bp, Artificial Sequence
  derived and/or modified sequence
tgggttttaaagacacgcccagagcggggaggaggtagaggcggagagctgcagacctaccgctgacttacgatgtaccccagagctggccctcctgcctctgtcatggcctcatcagtttcctggggttcttgctgctgttggtcaccttccccatttctggctggtttgccctgaagattgtgcccacctacgagcggatgattgtgttccgcctgggccggatccgcaccccccagggacctggcatggttctgctcttgcccttcattgactcctttcagagggtggatctgaggacacgagccttcaacgtccctccctgcaagctggcctctaaggacggggctgtgctgtccgtgggagccgatgtccagtttcgcatctgggacccggtgctgtcggtgatgactgtgaaagacctgaacacagccacacgcatgacagcccagaacgccatgaccaaggccctgctcaagaggccgctgcgggagatccagatggagaagctcaagatcagcgaccagcttctgctggagatcaacgatgtgaccagggcctgggggctggaggtagaccgcgtggagctggcagtggaggccgtgctccagccgccccaggacagcccagctgggcccaacctggacagcaccctccagcagctggccctgcacttcctgggaggaagcatgaactcaatggcaggaggtgccccgtccccggggccagacaccgtggagatggtgagtgaagttgagccacctgcccctcaagttggtgccaggtccagtccgaagcagcctctggcggaggggctactgactgctctacagcccttcctgtctgaggccctggtcagccaagtcggggcctgctaccagttcaatgtcgtcctgcccagcggcacccaaagcgcctacttcctggacctcactacaggacgaggaagagtgggacacggggtgcctgatggcatccctgatgtggtggtggagatggccgaggcagacctgcgggccctgctatgcagagagctgcggcccctgggggcctacatgagtggacggctgaaggtgaagggcgacctggctatggccatgaagctggaggctgtcctcagggccttgaagtagcagccttggctgactttccagagcccagtcccaagcctggcaccaagcctgaggggcctcttggaggaggaggtgttcatctgcaccacagagagttgaggccctaacaaatttcaggcccagccaagagcccatgaatggaggctgcaggaggctgagtccggctgccatgcacgtctcccctacagtggttctctggacaaggctttgtccatcccggtccccagctgagtgcccagcgctgagctgggtgcacggtgtgattccaggaggagagccaggcctgccctgccctgctggcttcctgactggagagacaggacccacagaaacagcctgacagcagctggtttggtccttgtgtgagggaccaagcatgtggcccaggctctaagctctgcggggattggagagggatggggagggaagggaaggcagctccaagaagaggtccctgtggcgaagttacctggggatcctggctggcccaccttcctggctgcagtccaggcccgtgctggcgggattgggcatgggaaggagcagggcctgctgcttccctggcgctgctcccaaagatttctgactcatctgccagctctgtcctgcatgcctggcgagctggggcccagggcagcatgaaggagagccctgcgttctgtgcttcttaccagaggtttgcaagcctcagacaaataaa

SEQ ID NO: 91175 - protein, 567 aa, Artificial Sequence
  derived and/or modified sequence
MTFYLFGIRSFPKLWKSPYLGLGPGHSYVSLFLADRCGIRNQQRLFSLKTMSPQNTKATNLIAKARYLRKDEGSNKQVYSVPHFFLAGAAKERSQMNSQTEDHALAPVRNTIQLPTQPLNSEEWDKLKEDLKENTGKTSFESWIISQMAGCHSSIDVAKSLLAWVAAKNNGIVSYDLLVKYLYLCVFHMQTSEVIDVFEIMKARYKTLEPRGYSLLIRGLIHSDRWREALLLLEDIKKVITPSKKNYNDCIQGALLHQDVNTAWNLYQELLGHDIVPMLETLKAFFDFGKDIKDDNYSNKLLDILSYLRNNQLYPGESFAHSIKTWFESGQCSGCGKTIESIQLSPEEYECLKGKIMRDVIDGGDQYRKTTPQELKRFENFIKSRPPFDVVIDGLNVAKMFPKVRESQLLLNVVSQLAKRNLRLLVLGRKHMLRRSSQWSRDEMEEVQKQASCFFADDISEDDPFLLYATLHSGNHCRFITRDLMRDHKACLPDAKTQRLFFKWQQGHQLAIVNRFPGSKLTFQRILSYDTVVQTTGDSWHIPYDEDLVERCSCEVPTKWLCLHQKT

SEQ ID NO: 91176 - protein, 34 aa, Artificial Sequence
  derived and/or modified sequence
MTFYLFGIRSFPKLWKSPYLGLGPGHSYVSLFLA

SEQ ID NO: 91177 - protein, 20 aa, Artificial Sequence
  derived and/or modified sequence
MTFYLFGIRSFPKLWKSPYL

SEQ ID NO: 91178 - protein, 23 aa, Artificial Sequence
  derived and/or modified sequence
MTFYLFGIRSFPKLWKSPYLGLG

SEQ ID NO: 91179 - DNA, 1704 bp, Artificial Sequence
  derived and/or modified sequence
atgaccttctacctgttcggcatcagaagcttccccaagctgtggaagagcccctacctgggcctgggccccggccacagctacgtgagcctgttcctggccgacagatgcggcatcagaaaccagcagagactgttcagcctgaagaccatgagcccccagaacaccaaggccaccaacctgatcgccaaggccagatacctgagaaaggacgagggcagcaacaagcaggtgtacagcgtgccccacttcttcctggccggcgccgccaaggagagaagccagatgaacagccagaccgaggaccacgccctggcccccgtgagaaacaccatccagctgcccacccagcccctgaacagcgaggagtgggacaagctgaaggaggacctgaaggagaacaccggcaagaccagcttcgagagctggatcatcagccagatggccggctgccacagcagcatcgacgtggccaagagcctgctggcctgggtggccgccaagaacaacggcatcgtgagctacgacctgctggtgaagtacctgtacctgtgcgtgttccacatgcagaccagcgaggtgatcgacgtgttcgagatcatgaaggccagatacaagaccctggagcccagaggctacagcctgctgatcagaggcctgatccacagcgacagatggagagaggccctgctgctgctggaggacatcaagaaggtgatcacccccagcaagaagaactacaacgactgcatccagggcgccctgctgcaccaggacgtgaacaccgcctggaacctgtaccaggagctgctgggccacgacatcgtgcccatgctggagaccctgaaggccttcttcgacttcggcaaggacatcaaggacgacaactacagcaacaagctgctggacatcctgagctacctgagaaacaaccagctgtaccccggcgagagcttcgcccacagcatcaagacctggttcgagagcggccagtgcagcggctgcggcaagaccatcgagagcatccagctgagccccgaggagtacgagtgcctgaagggcaagatcatgagagacgtgatcgacggcggcgaccagtacagaaagaccaccccccaggagctgaagagattcgagaacttcatcaagagcagaccccccttcgacgtggtgatcgacggcctgaacgtggccaagatgttccccaaggtgagagagagccagctgctgctgaacgtggtgagccagctggccaagagaaacctgagactgctggtgctgggcagaaagcacatgctgagaagaagcagccagtggagcagagacgagatggaggaggtgcagaagcaggccagctgcttcttcgccgacgacatcagcgaggacgaccccttcctgctgtacgccaccctgcacagcggcaaccactgcagattcatcaccagagacctgatgagagaccacaaggcctgcctgcccgacgccaagacccagagactgttcttcaagtggcagcagggccaccagctggccatcgtgaacagattccccggcagcaagctgaccttccagagaatcctgagctacgacaccgtggtgcagaccaccggcgacagctggcacatcccctacgacgaggacctggtggagagatgcagctgcgaggtgcccaccaagtggctgtgcctgcaccagaagacctag

SEQ ID NO: 91180 - DNA, 1704 bp, Artificial Sequence
  derived and/or modified sequence
atgacattttacctcttcgggattagaagcttccctaagctctggaagagcccctacttgggattgggacctggacattcttatgtatccttgttcttggctgacaggtgtggcatacgcaatcagcaacgtttgttcagcttaaaaacaatgtcacctcagaatactaaggccaccaacctgatcgccaaagctcgttatctcaggaaggacgaaggcagtaacaagcaagtgtactcagtcccccactttttcctggccggcgctgccaaggaaaggtctcagatgaacagtcaaacggaggaccacgcacttgcccccgtgcgcaacacgatacagctccctacccagcccttaaattccgaagagtgggataagctgaaagaggaccttaaggagaacacgggtaaaacgtcttttgagagctggattatcagccagatggccggttgccacagcagtattgacgtggccaagtccttgctggcttgggtggccgcgaaaaacaacggcatcgtttcttacgacttgctggtcaagtatctctatttgtgcgtgtttcacatgcaaaccagtgaagtgatcgatgtgtttgaaatcatgaaggctagatacaaaaccctcgaaccacggggttacagtttgttaatcagaggattgatacatagcgaccgctggagagaagctctgcttcttcttgaggatattaaaaaggtgattacccctagcaaaaaaaattataatgactgtatacagggcgcactgctgcaccaagacgttaacacagcatggaatctctatcaagagcttttggggcatgacattgtacctatgctcgaaaccctgaaagcattctttgactttggcaaggacatcaaagacgataactattctaataagcttcttgatatactgtcgtatctgaggaataaccaactgtaccccggggagtccttcgcacactcaatcaaaacctggtttgaatcgggacagtgttcaggttgtggcaagacaatcgaatcaatccaactcagtcctgaggaatatgagtgcctaaagggaaagatcatgagagacgtcatcgatggcggcgatcagtatcgcaagacaaccccccaagaactgaaacgctttgaaaactttatcaaatcacgccccccttttgacgtcgtgattgacggtctgaatgttgctaaaatgttccccaaggttcgcgagtctcaactcctgctcaatgtggtctcacagttggctaagcgcaaccttagacttctggtgctgggacggaaacacatgttgcgccggagctcccaatggagccgcgatgagatggaggaggttcaaaagcaggcaagttgtttcttcgcggatgatatctcagaagatgatcctttccttctgtacgctacgctccatagcggtaaccattgccggtttatcacacgggatttgatgcgcgaccacaaggcttgcctgcctgatgctaagactcagagactgttcttcaaatggcagcaaggccatcaacttgccatcgttaatagattcccaggtagtaagctaacatttcagcgcatcctgagctacgacacagtggtccaaactacgggtgacagctggcatattccctatgatgaagacctggtggaacgttgctcatgcgaagtgccaactaaatggctttgtcttcaccaaaagacttag

SEQ ID NO: 91181 - DNA, 1704 bp, Artificial Sequence
  derived and/or modified sequence
atgacgttctacctgtttggcatacggagcttccctaagctgtggaaatccccttatctcggccttggaccggggcatagctatgtttccttattcctagccgacaggtgcggaattcgaaatcagcagcggctgttttctctcaaaaccatgtcgcctcaaaataccaaagccacaaacctaattgctaaggcaaggtacctacgaaaagacgaggggagcaacaaacaggtctactccgtgccccacttttttctagccggcgctgcgaaggagaggtcacagatgaacagccaaactgaggatcacgcgctggctcctgtacggaataccatccagcttcctactcagcccctgaactccgaggagtgggacaaactgaaggaagatttgaaagagaacactggcaagacatccttcgaaagctggataatttcccagatggcaggctgtcattcatccatagatgttgcgaagagtctactggcctgggtggcggctaaaaataacgggatcgttagctatgatttgcttgtgaagtacctgtatctctgtgttttccacatgcagacctcagaagtgatcgacgttttcgagattatgaaggcaagatacaaaactttggaaccccgggggtacagtctcctgatacgcggactcatacattctgataggtggagggaagccctgctcttactggaggacatcaaaaaagtgattacacctagtaagaagaactacaatgattgtatccagggggctctacttcatcaggacgtgaacactgcatggaacctttaccaggagctgttggggcacgatatagtcccaatgctcgagactctgaaggctttcttcgatttcggtaaggacatcaaagacgataactacagcaataagctgcttgacatcctctcctatctgaggaataaccagctttaccccggcgagtcgttcgcccacagcattaaaacttggtttgagtctgggcagtgctccgggtgcggcaagactatcgagagtattcaactcagtcccgaagagtacgaatgtctaaaaggcaaaatcatgagagatgtgatcgacggaggagaccagtacagaaagaccacaccacaggagcttaagcgtttcgagaacttcatcaagagtagaccaccctttgacgttgttatagacggccttaatgtggcaaagatgtttcccaaggtgagagagtcccagctgcttttgaacgtcgtatcgcaattagccaagcggaatctgagactcttagtgctgggaagaaagcatatgcttcgaaggtcttctcagtggtccagagacgaaatggaggaggttcaaaaacaggcttcctgtttctttgctgatgacatttctgaagatgatccctttctgctgtatgcaaccctgcattccgggaaccattgcagatttataacacgggatctaatgcgcgatcataaagcatgccttcccgatgccaaaacccagcgcctgtttttcaagtggcaacagggacatcagctcgccatagttaatcggtttccaggaagcaaattgacattccagagaattctgtcctatgacacagtggtgcagacaacgggcgatagctggcatatcccatatgatgaggatctcgtcgaacgctgctcatgtgaggtgcccacaaagtggctatgtctgcaccagaagacttag

SEQ ID NO: 91182 - DNA, 1704 bp, Artificial Sequence
  derived and/or modified sequence
atgaccttctacctgtttggcatccgctccttccccaagctgtggaagagcccctacctgggcctgggccctggccacagctatgtgtccctcttcctggccgacagatgtggcatccggaaccagcagaggctcttcagcctgaagaccatgagcccccagaacaccaaggccaccaacctgattgccaaggcccgctacctgaggaaggatgagggcagcaacaagcaggtgtacagcgtgccccacttcttcctggccggggccgccaaggagaggagccagatgaacagccagacagaagatcatgccctggcccctgtgaggaacaccatccagctgcccacccagcccctgaacagcgaggagtgggacaagctgaaggaggacctgaaggaaaatacaggcaagaccagctttgagagctggatcatcagccagatggccggctgccacagcagcattgatgtggccaagagcctgctggcctgggtggccgccaagaacaacggcatcgtgtcctatgacctgctggtgaagtacctgtacctgtgtgtgttccacatgcagaccagcgaggtgattgatgtgtttgagatcatgaaggcccgctacaagaccctggagccccggggctacagcctgctgatccggggcctcatccacagcgaccgctggagggaggccctgctgctgctggaggacatcaagaaggtgatcacccccagcaagaagaactacaatgactgcatccagggcgccctgctgcaccaggatgtgaacacagcctggaacctgtaccaggagctgctgggccatgacatcgtgcccatgctggagaccctgaaggccttctttgattttgggaaggacatcaaggatgacaactacagcaacaagctgctggacatcctgagctacctgaggaacaaccagctgtacccaggagagagctttgcccacagcatcaagacctggtttgaaagtggccagtgcagcggctgcggcaagaccatcgagagcatccagctgagccctgaggagtatgagtgcctgaagggcaagatcatgagagatgtgattgatggaggagaccagtacaggaagaccaccccccaggagctgaagagatttgagaacttcatcaagagccggcccccatttgatgtggtgattgatggcctgaatgtggccaagatgttccccaaggtgcgggagagccagctgctgctgaatgtggtgtcccagctggccaagaggaacctgcggctgctggtgctgggcaggaagcacatgctgcggcgcagcagccagtggagcagagatgagatggaggaggtgcagaagcaggccagctgcttctttgctgatgacatcagtgaagatgaccccttcctgctgtatgccaccctgcacagcggcaaccactgccgcttcatcacccgggacctgatgagggaccacaaggcctgcctgcctgatgccaagacccagaggctcttcttcaagtggcagcagggccaccagctggccatcgtgaaccgcttccctggcagcaagctgaccttccagaggatcctgtcctatgacacagtggtgcagaccaccggggacagctggcacatcccctatgatgaggacctggtggagcgctgcagctgtgaggtgcccaccaagtggctgtgcctgcaccagaagacctag

SEQ ID NO: 91183 - DNA, 2464 bp, Artificial Sequence
  derived and/or modified sequence
gtttatggccgcgttaagtctgagtgccgctttgagttgttgaatgaagtgaacttcatttgtcagcgttcggttcatgaactggaatgtaagaggcaccagaggattcctgctctgtcccctggtttgcggcttgcgacgttggacatccccggattgttgtttaatagagaaaactcacctgccttcttgcttttaagtagccccaaaagcagaaccttgatttgtctgtaaggaagaaacacaaaccttttaaaaagttccacttcgactctgcaccgccgacccccaatctctttaattttgccatagaagaggggttttttcaacatctctctcactatctggtgctgatctcactgcataatgactttctatttgtttggtattcgaagctttccgaagctttggaagagcccataccttgggctaggcccagggcactcttatgtctcgctgtttctggcagaccgctgtggcatcaggaaccagcagaggttgttttctcttaaaacaatgtctccacagaataccaaagcaacgaatctgattgccaaggccagatatctcaggaaagatgagggcagtaataagcaagtttattctgttcctcatttttttttagctggagcagctaaggagagatcacagatgaattctcaaactgaagatcatgccttggcacctgtgaggaacactattcaactcccaacacaacctttgaattcagaggagtgggataaacttaaggaagatttaaaagaaaacaccggaaagaccagtttcgaaagttggatcatttcacagatggctggctgtcatagctctatagatgtggctaaatctctgctggcatgggtagcagccaaaaataatggtattgtaagttacgatttactggtcaagtatttgtatctctgtgtctttcatatgcagacatctgaagttattgatgtctttgaaattatgaaagccagatataagactttagaacctagaggttacagtcttctcatccggggattgatccattcagacagatggagagaagcattgttgctgttagaggacatcaaaaaagttataactccttcaaaaaagaactataatgactgtatccagggagctctccttcatcaagatgtaaacacagcttggaatttatatcaggaattgctaggtcatgatattgttcctatgttggaaactttaaaagctttctttgattttggaaaagacataaaggatgataactattcaaataaactactagatattctttcatatctaagaaataatcagctgtatccaggggagtcatttgcacacagtataaaaacatggtttgagagtggccagtgttcgggctgtggaaaaaccatagagtctattcagctgagtccagaagaatatgaatgtcttaagggaaaaatcatgagggatgtgatagatggaggtgaccagtacagaaagacaacacctcaggaacttaagagatttgagaacttcataaaatctcgtcctccttttgatgttgtcattgatggtctcaatgttgccaaaatgtttcctaaagttcgtgaatctcaacttctcttgaatgtcgtctctcaactagccaaacggaatctgcgactgctggtcctaggccggaagcacatgctaagacggagttcccagtggagtcgggatgagatggaagaggtgcaaaagcaagccagctgtttttttgctgatgacatctcggaggatgatccattccttctgtatgccacactgcactccgggaatcactgcaggtttatcacaagagacctgatgcgggaccacaaggcctgtctgcctgatgccaagacccaacgcctgttttttaagtggcagcagggacatcagctggcaattgtaaataggtttccaggatcaaaactaacctttcagcgtattctcagctatgacacagtggtgcaaacaactggagactcgtggcacataccatatgatgaagacttggtagaaagatgttcctgtgaagtaccaaccaaatggctttgcctccaccaaaagacatagagattcttacctctatgctaagtttgtgtttgggtaccctctaggttggcatcagaggctcttgagctggtgtttgtttagggcattgcctctgtcctgaagataaaaggattctattaacagcattgacattgattttttaatgaaatgagatatatcttttcataaccagctgcgtttttttcccctaacatttgtttttggaggcttatcaagagttggagaacttagtgtagagcaaaacctgcatttctcctactgggccagctattccacttagcttgggtgactaatagtgcttttggtatccattttttgctacttctgaccttgccttccaggcctaccaatagcagaatcaatccatctgtccctgagatactcatgttgtttc

SEQ ID NO: 91184 - DNA, 603 bp, Artificial Sequence
  derived and/or modified sequence
acctctaggagtttagggccgggccatcccaacgggctgcccctcccaaaactcactgtttggacaggtgttgggcgtcgctaggcgccgacgaagaacttctttccagtccatggccgacttccgcgcagcagcttctgcatttgctgtttcctacctgctccacccctaccagctcaggcgtcagcaccgccaggccccgtaaaggttcatgaactggaatgtaagaggcaccagaggattcctgctctgtcccctggtttgcggcttgcgacgttggacatccccggattgttgtttaatagagaaaactcacctgccttcttgcttttaagtagccccaaaagcagaaccttgatttgtctgtaaggaagaaacacaaaccttttaaaaagttccacttcgactctgcaccgccgacccccaatctctttaattttgccatagaagaggggttttttcaacatctctctcactatctggtgctgatctcactgcataatgactttctatttgtttggtattcgaagctttccgaagctttggaagagcccataccttgggctaggcccagggcactcttatgtctcgctgtttctggca

SEQ ID NO: 91185 - DNA, 552 bp, Artificial Sequence
  derived and/or modified sequence
gagttcattagttccggcttgagggaagcgccttctttcacaatttcttttcattgttcattgcggatatctggaagccttccaggtcccctgaatgtagtagacacttcagcagccgtctcctaccccttttgccactaaatgcttcaaaactgccttttttcctcgccgccgggccaggcggaacgcctaagtccgggttcatgaactggaatgtaagaggcaccagaggattcctgctctgtcccctggtttgcggcttgcgacgttggacatccccggattgttgtttaatagagaaaactcacctgccttcttgcttttaagtagccccaaaagcagaaccttgatttgtctgtaaggaagaaacacaaaccttttaaaaagttccacttcgactctgcaccgccgacccccaatctctttaattttgccatagaagaggggttttttcaacatctctctcactatctggtgctgatctcactgcataatgactttctatttgtttggtattcgaagctttccgaagctttggaagagcccatacct

SEQ ID NO: 91186 - DNA, 578 bp, Artificial Sequence
  derived and/or modified sequence
tttccgccgcgtttatggccgcgttaagtctgagtgccgctttgagttgttgaatgaagtgaacttcatttgtcagcgttcggtacgcagtctaggcagcgcccttcctgtacctctcttcctttcctgagtcgttggcgcagctgactcgccacctcctccctcctcgtccccccaccggaggagttttgcggtctgtagagagctatgcagggttcatgaactggaatgtaagaggcaccagaggattcctgctctgtcccctggtttgcggcttgcgacgttggacatccccggattgttgtttaatagagaaaactcacctgccttcttgcttttaagtagccccaaaagcagaaccttgatttgtctgtaaggaagaaacacaaaccttttaaaaagttccacttcgactctgcaccgccgacccccaatctctttaattttgccatagaagaggggttttttcaacatctctctcactatctggtgctgatctcactgcataatgactttctatttgtttggtattcgaagctttccgaagctttggaagagcccataccttgggctaggcc

SEQ ID NO: 91187 - DNA, 2232 bp, Artificial Sequence
  derived and/or modified sequence
ttcctgagtcgttggcgcagctgactcgccacctcctccctcctcgtccccccaccggaggagttttgcggtctgtagagagctatgcagggtgagggcccctagacttcggctttcgccgctgttggtggttcatgaactggaatgtaagaggcaccagaggattcctgctctgtcccctggtttgcggcttgcgacgttggacatccccggattgttgtttaatagagaaaactcacctgccttcttgcttttaagtagccccaaaagcagaaccttgatttgtctgtaaggaagaaacacaaaccttttaaaaagttccacttcgactctgcaccgccgacccccaatctctttaattttgccatagaagaggggttttttcaacatctctctcactatctggtgctgatctcactgcataatgactttctatttgtttggtattcgaagctttccgaagctttggaagagcccataccttgggctaggcccagggcactcttatgtctcgctgtttctggcagaccgctgtggcatcaggaaccagcagaggttgttttctcttaaaacaatgtctccacagaataccaaagcaacgaatctgattgccaaggccagatatctcaggaaagatgagggcagtaataagcaagtttattctgttcctcatttttttttagctggagcagctaaggagagatcacagatgaattctcaaactgaagatcatgccttggcacctgtgaggaacactattcaactcccaacacaacctttgaattcagaggagtgggataaacttaaggaagatttaaaagaaaacaccggaaagaccagtttcgaaagttggatcatttcacagatggctggctgtcatagctctatagatgtggctaaatctctgctggcatgggtagcagccaaaaataatggtattgtaagttacgatttactggtcaagtatttgtatctctgtgtctttcatatgcagacatctgaagttattgatgtctttgaaattatgaaagccagatataagactttagaacctagaggttacagtcttctcatccggggattgatccattcagacagatggagagaagcattgttgctgttagaggacatcaaaaaagttataactccttcaaaaaagaactataatgactgtatccagggagctctccttcatcaagatgtaaacacagcttggaatttatatcaggaattgctaggtcatgatattgttcctatgttggaaactttaaaagctttctttgattttggaaaagacataaaggatgataactattcaaataaactactagatattctttcatatctaagaaataatcagctgtatccaggggagtcatttgcacacagtataaaaacatggtttgagagtggccagtgttcgggctgtggaaaaaccatagagtctattcagctgagtccagaagaatatgaatgtcttaagggaaaaatcatgagggatgtgatagatggaggtgaccagtacagaaagacaacacctcaggaacttaagagatttgagaacttcataaaatctcgtcctccttttgatgttgtcattgatggtctcaatgttgccaaaatgtttcctaaagttcgtgaatctcaacttctcttgaatgtcgtctctcaactagccaaacggaatctgcgactgctggtcctaggccggaagcacatgctaagacggagttcccagtggagtcgggatgagatggaagaggtgcaaaagcaagccagctgtttttttgctgatgacatctcggaggatgatccattccttctgtatgccacactgcactccgggaatcactgcaggtttatcacaagagacctgatgcgggaccacaaggcctgtctgcctgatgccaagacccaacgcctgttttttaagtggcagcagggacatcagctggcaattgtaaataggtttccaggatcaaaactaacctttcagcgtattctcagctatgacacagtggtgcaaacaactggagactcgtggcacataccatatgatgaagacttggtagaaagatgttcctgtgaagtaccaaccaaatggctttgcctccaccaaaagacatagagattcttacctctatgctaagtttgtgtttgggtaccctctaggttggcatcagaggctcttgagctggtgtttgtttagggcattgcctctgtcctgaagat

SEQ ID NO: 91188 - DNA, 1704 bp, Artificial Sequence
  derived and/or modified sequence
atgaccttctacctgttcggcatccggagcttccccaagctgtggaaatctccctacctggggcttggcccaggtcattcatatgtgtcactgtttctcgcggatcggtgtggcattaggaatcagcagagactgtttagcctgaaaactatgtccccgcagaatacaaaagccaccaacctcatcgccaaagcccggtaccttcgcaaagacgagggaagtaacaaacaagtgtattcagttcctcacttcttcctggcaggcgccgctaaggagcgatcgcagatgaatagccagacagaggaccacgcactcgccccagtcagaaatacaatacagctacctacccagccgctgaatagtgaggagtgggacaagttgaaggaagacctgaaggagaacacaggcaaaactagcttcgagtcctggattatttcccagatggctgggtgccatagcagcatcgatgtggcaaagtcattgcttgcttgggtggctgcgaaaaacaacgggattgtgagctacgacctcctcgttaagtatctttacctatgcgtgtttcatatgcagacttcagaagtgatcgacgtctttgagatcatgaaggcacggtataaaaccctcgagcctcggggctactctctgctgatacgggggttgatacattctgaccgctggagagaggcgttgctgttgcttgaagacatcaaaaaggttattacacctagtaagaaaaattacaacgactgcattcagggcgctctactccatcaggacgtgaatactgcatggaacttgtaccaagagctcctgggccacgatatcgtgccgatgctggagacattgaaggctttcttcgactttgggaaggacatcaaggacgataattactctaacaaactactggatattctgtcttatttgcggaataaccagctgtacccgggggaaagctttgcccatagcattaaaacttggtttgagtcaggccagtgttcgggatgcggtaaaacaattgagagtattcagcttagcccagaagaatatgagtgcctaaaaggcaagataatgcgagacgtgatagatggcggtgaccagtatcggaaaacaacaccgcaggaattgaagcggtttgagaatttcataaagagcaggccaccgttcgacgtggtgatagacggtctcaacgtggcgaaaatgtttccgaaggtacgcgagagccaactgttgctgaatgttgtatcccaattagcgaaacgcaatctgcggctgctggtcttgggacggaaacacatgctgcgccggagctcgcagtggagtagggacgaaatggaggaggttcaaaaacaggcatcatgcttcttcgctgatgatataagtgaggacgacccatttttgctgtacgcaaccctacactcaggaaaccattgtagattcatcacccgcgacctcatgcgggaccacaaggcttgcctccctgatgctaaaacacagcgccttttttttaaatggcagcaaggtcatcagttggccattgtcaacagattccctgggtccaagctgaccttccaacgcatccttagctacgataccgtggtgcaaactacaggagacagttggcatatcccttacgacgaagatctcgtggagcgttgtagctgtgaggttccaacaaagtggctgtgccttcaccagaagacctag

SEQ ID NO: 91189 - DNA, 1704 bp, Artificial Sequence
  derived and/or modified sequence
atgaccttctacctgttcggcatccggagcttccccaagctgtggaagtctccatacttagggctcggcccaggccactcatacgttagcttgtttctggccgatcgctgcggtattagaaaccagcagagattgttctctctgaaaacaatgtctccccagaacactaaagctacgaatctgattgccaaagccagatacctcaggaaagacgaggggtccaacaaacaggtatattctgtgcctcatttctttttagcaggggctgccaaagagcggtcccagatgaatagccagaccgaggatcatgcattagccccagtaaggaacaccattcaactccctacacagcctcttaatagcgaggagtgggacaagttaaaagaagacttgaaggagaatactgggaaaacaagctttgagagctggattatcagtcagatggcagggtgccattccagtatagacgtcgcaaagtccctgcttgcgtgggttgccgccaagaacaacggcatagtgagctatgacctactcgttaagtacctgtacctctgcgtgtttcacatgcaaacaagcgaagtgatcgatgtttttgagattatgaaagcccgctacaagacattggaacctcgcgggtattcattgttgattcgtggcctgattcattcagaccgttggagggaggctctgctgcttctcgaggatattaagaaggtgatcacaccttctaagaagaactataatgattgtattcagggcgccctgctccaccaggatgttaatacagcttggaacctgtaccaggagctgctgggtcatgatattgtgcctatgcttgagactctcaaagctttttttgactttggaaaagacatcaaagatgacaattacagtaacaagctccttgacatactgagttatttgcggaataatcaactgtatccgggtgaatcattcgcccatagtattaagacatggtttgagtcgggacagtgctccgggtgtggtaaaacaatagagagtatccagctgtctcctgaagagtacgagtgtctgaaggggaaaattatgagagacgtaatcgatgggggtgaccagtacaggaaaacaaccccccaggaacttaagcgattcgaaaattttattaaatcaaggccaccttttgatgtggttatagacgggcttaatgtcgcgaagatgttcccgaaagtgagggagagccagctcctcctaaacgtggtgtcacagctcgcaaagaggaatcttaggctgctggtactcgggcgcaaacatatgctccgacggagttctcagtggagccgtgatgagatggaagaggtgcaaaaacaagcaagctgcttttttgccgatgacatctccgaagatgacccttttttactgtatgccacgctacattcgggcaaccattgccgctttatcaccagagacctaatgagagatcacaaagcctgtctgcccgacgccaagacccagcgcctgttcttcaagtggcagcagggccaccagctggctattgtcaacagatttcccggatctaagctgactttccagcgaatcctaagctatgacactgtggtccagaccacaggagatagttggcatatcccgtatgacgaggacctggtcgagcggtgtagctgtgaagtcccgactaagtggctctgtctgcaccagaagacatag

SEQ ID NO: 91190 - DNA, 1704 bp, Artificial Sequence
  derived and/or modified sequence
atgaccttctatttgttcggaataagatcctttccaaaactgtggaagtcgccatacctcggactggggcctggacactcatatgtctcactttttttggccgaccgatgcggtatacggaatcagcagcgactcttcagtcttaaaactatgtccccccagaatactaaggccaccaatctgattgcaaaggcgaggtatcttagaaaggatgaaggcagtaacaaacaggtgtactctgtgccgcacttctttctcgctggggctgccaaagagaggtcccaaatgaatagccagacagaggaccacgccctcgcgccagtgcgtaacacaatccagttaccgacacagcctttgaattcggaagaatgggacaaacttaaagaggacctgaaggagaatacgggaaaaacatcgtttgaatcctggataatcagccagatggccggttgccactccagtatcgacgttgccaagagcctcctagcctgggtagccgctaagaataatggtattgtgtcttacgacttgctggtgaagtacctgtacctttgtgttttccacatgcagacctcagaggttatcgatgtatttgagattatgaaggctcgttataaaaccctggaacccagggggtactccctgcttatccggggtcttatacactcagatcgatggagagaggcactgctcttgttggaagatatcaaaaaggtcattacaccatcaaagaaaaattacaacgactgcatacagggagcgttgttacatcaggacgtgaacaccgcctggaatttgtatcaggaactcctgggccacgacatagtgccgatgctggagacactgaaggctttctttgattttggcaaagatattaaagatgataactacagtaacaagcttctggatattctgagctacttgcgcaataatcagctctaccccggtgagtccttcgcgcacagcatcaagacttggtttgaaagtgggcagtgtagtggttgcggtaaaactatcgaatcaattcaacttagccccgaagaatatgagtgcttaaaaggtaaaataatgagggatgttattgacggtggcgaccaatacaggaaaacaacaccacaggagctcaagaggtttgagaacttcatcaagagccggccacctttcgatgttgtcattgacggactgaacgtagcaaagatgttccctaaggttagggaatcccagcttttactcaacgtggtatcccagctcgcaaagcgtaacttgcgcctcctggtgcttggcaggaagcacatgctgcggagatcatcccaatggtcccgcgacgagatggaggaggtccagaaacaggcatcctgcttcttcgctgacgatatatctgaagacgaccctttccttctttacgcaaccctgcattctgggaaccattgccggtttatcactagggatttgatgagagatcacaaggcttgtctaccggatgcaaaaacccagcgattgttctttaagtggcagcagggtcaccagctcgccatagtgaacagattcccaggaagcaagttgacttttcagcgaatcctgtcttacgacactgtcgtccagactaccggggactcctggcatatcccatacgacgaggacctggtggagagatgcagctgcgaagtgcctaccaagtggctctgtctccatcaaaagacatag

SEQ ID NO: 91191 - DNA, 1704 bp, Artificial Sequence
  derived and/or modified sequence
atgacgttttatcttttcggtattaggagctttcctaagctgtggaaaagcccctaccttggattaggccctggacacagctacgtctccctttttttagcagatcggtgcgggattagaaatcaacagaggctgttttcgttgaagactatgagtccccagaatacgaaggctaccaacctcatagccaaagcccgatacctgagaaaggatgagggaagtaataaacaagtatactccgtaccgcatttcttcttagcgggtgcagcaaaagagaggtcacagatgaattctcaaactgaggatcacgcccttgcccctgtccgaaatacaatccaactcccgacccagcctctgaactccgaggaatgggacaaactgaaagaggacctaaaagaaaatacaggtaaaacatctttcgaatcatggatcatttctcagatggccggatgtcatagctcaattgatgtggcaaaaagccttcttgcgtgggtcgccgcaaaaaataacggcatcgtttcctacgatttgctggttaagtacctctacctctgcgtttttcatatgcagacaagtgaagttatcgacgtgttcgaaattatgaaggctcgttataaaaccttggagcctcgcggatactcactgctcatccgaggactgatccactctgataggtggcgcgaagcacttttgctgctcgaggacattaaaaaagttatcacacccagcaagaagaattataacgactgtatacagggggctctgttacaccaggacgtgaacaccgcctggaacctctatcaggaacttttgggacatgatatagtgcccatgctcgagacactcaaggccttcttcgactttgggaaggatattaaagatgataactacagcaataaactcctggatatattaagctatctacgcaataaccagctgtatccaggagagtcgttcgctcactcgattaagacatggttcgagagcgggcagtgctccgggtgcgggaagacaattgaaagtattcaattgtccccggaggagtacgaatgcctaaagggcaaaataatgagagatgtgatcgatggaggtgatcagtacaggaaaaccactccacaagaactgaaaaggttcgagaatttcattaagtcaagaccacccttcgatgtggtgattgatggactgaacgttgctaaaatgtttcccaaagtgagggagtcacaacttctcctgaacgtcgtaagccaactcgccaaacgaaaccttagacttttagtcctgggcaggaaacacatgctccgtcgtagttctcagtggtccagagatgagatggaggaagtgcagaaacaagcctcctgcttttttgccgatgatatttcagaggatgatcccttcctgttgtatgcaacactgcattcaggcaatcactgcagattcatcacacgcgacctaatgcgagaccacaaagcttgtctgcccgatgctaaaacccagcgacttttcttcaaatggcagcagggtcaccagctagcaatcgtgaataggtttcccggaagcaagctgacattccaaagaattctgtcatatgatactgttgtccagacgactggggactcgtggcacattccatatgacgaggatttggtggagagatgctcttgtgaagtgcctacaaagtggttatgtcttcaccagaagacttag

SEQ ID NO: 91192 - DNA, 1467 bp, Artificial Sequence
  derived and/or modified sequence
atgaacagccagaccgaggaccacgccctggcccccgtgagaaacaccatccagctgcccacccagcccctgaacagcgaggagtgggacaagctgaaggaggacctgaaggagaacaccggcaagaccagcttcgagagctggatcatcagccagatggccggctgccacagcagcatcgacgtggccaagagcctgctggcctgggtggccgccaagaacaacggcatcgtgagctacgacctgctggtgaagtacctgtacctgtgcgtgttccacatgcagaccagcgaggtgatcgacgtgttcgagatcatgaaggccagatacaagaccctggagcccagaggctacagcctgctgatcagaggcctgatccacagcgacagatggagagaggccctgctgctgctggaggacatcaagaaggtgatcacccccagcaagaagaactacaacgactgcatccagggcgccctgctgcaccaggacgtgaacaccgcctggaacctgtaccaggagctgctgggccacgacatcgtgcccatgctggagaccctgaaggccttcttcgacttcggcaaggacatcaaggacgacaactacagcaacaagctgctggacatcctgagctacctgagaaacaaccagctgtaccccggcgagagcttcgcccacagcatcaagacctggttcgagagcgtgcccggcaagcagtggaagggccagttcaccaccgtgagaaagagcggccagtgcagcggctgcggcaagaccatcgagagcatccagctgagccccgaggagtacgagtgcctgaagggcaagatcatgagagacgtgatcgacggcggcgaccagtacagaaagaccaccccccaggagctgaagagattcgagaacttcatcaagagcagaccccccttcgacgtggtgatcgacggcctgaacgtggccaagatgttccccaaggtgagagagagccagctgctgctgaacgtggtgagccagctggccaagagaaacctgagactgctggtgctgggcagaaagcacatgctgagaagaagcagccagtggagcagagacgagatggaggaggtgcagaagcaggccagctgcttcttcgccgacgacatcagcgaggacgaccccttcctgctgtacgccaccctgcacagcggcaaccactgcagattcatcaccagagacctgatgagagaccacaaggcctgcctgcccgacgccaagacccagagactgttcttcaagtggcagcagggccaccagctggccatcgtgaacagattccccggcagcaagctgaccttccagagaatcctgagctacgacaccgtggtgcagaccaccggcgacagctggcacatcccctacgacgaggacctggtggagagatgcagctgcgaggtgcccaccaagtggctgtgcctgcaccagaagacctag

SEQ ID NO: 91193 - DNA, 1467 bp, Artificial Sequence
  derived and/or modified sequence
atgaactcccagacggaggatcatgccctggcgcccgttcggaacactattcagttaccgactcagccactgaacagcgaagagtgggacaagctgaaagaggatctgaaggaaaacacgggtaaaacctctttcgaatcgtggataatttcccagatggccggctgccattcgagcatcgacgtggccaagagtttgttggcgtgggtggcggctaaaaataatggaatcgttagttatgacctcctcgtgaagtacttgtatctgtgcgtttttcacatgcagacttcagaggtcatcgatgtcttcgagattatgaaagccaggtacaaaactctggagcccagaggatattccctgcttattcggggactgatccattcagatagatggagagaggccctgttgctgttggaggacattaaaaaggtaatcacacctagtaaaaaaaactacaacgattgcattcagggggctctgttgcaccaggacgtcaatactgcttggaacctttatcaggagctgctggggcatgacatagtgccaatgcttgagaccctgaaagcctttttcgatttcggaaaagacatcaaggatgataattactcaaacaaactcctggatatcttgtcatacttacgaaacaatcagttgtaccctggcgagtcgtttgcccactcaatcaagacctggttcgagtctgtacccgggaagcagtggaaaggacaattcaccacagtgcgaaaatctggtcagtgttcaggatgcgggaaaaccatcgagagtatacagctttctccagaggagtacgagtgtttaaagggtaagatcatgagagacgttattgatggtggggaccagtaccggaaaacaacaccacaggaactgaagcgttttgaaaatttcatcaagtccaggcccccttttgacgtcgtgatcgatggcctgaatgtggcaaagatgtttccaaaggttcgggagagccagcttctcctcaatgttgtctcccagctggctaagagaaatcttaggctcttggtgctcggccggaagcacatgttacgcagaagctcccagtggagccgcgacgagatggaagaggtccagaagcaagcttcctgcttcttcgcggacgatatcagcgaagacgatccattcctattatatgcaactctgcacagtgggaatcattgccgcttcatcacccgcgatttgatgcgggatcataaagcttgtttacccgacgctaaaacccaaaggcttttttttaaatggcagcaggggcaccagctagctatcgtcaacaggtttccaggctccaaactaaccttccagcgtatcttgagttatgacacagtggtgcagaccaccggggatagttggcacattccctacgacgaagacctggtcgagaggtgctcttgcgaggtgcccaccaagtggttatgtctgcatcagaagacttag

SEQ ID NO: 91194 - DNA, 1467 bp, Artificial Sequence
  derived and/or modified sequence
atgaactctcagacagaagatcacgcccttgcgcccgttagaaatactatccagctgcccactcagcccttaaattccgaggagtgggacaagttaaaggaagacctgaaagagaacactggcaaaacctcttttgagagttggattatatcccaaatggcgggatgtcacagcagcatagacgtagctaaatcacttttagcttgggttgccgctaaaaataatggcattgtttcttatgatttacttgtgaaatatttgtacctgtgcgtttttcacatgcaaacctcagaggtgatcgatgtctttgaaattatgaaagctaggtacaagaccttggagccaaggggctacagtctgcttatccgcgggctaatccattctgatcggtggcgtgaagccctgcttttgttggaggacattaagaaagtaataacccccagcaagaagaactataatgattgcatacagggcgccctcctccatcaggacgtgaataccgcttggaatctgtatcaggaactgctggggcatgatatcgtaccaatgttggagacacttaaagcctttttcgacttcggcaaggacatcaaagacgataattatagtaacaaattgctcgacatcttgagctatctcaggaataaccagctgtaccctggcgagtccttcgcccacagcatcaaaacctggttcgagagcgtgcccgggaagcagtggaaaggtcaatttacaactgtgagaaaatctggccagtgttcaggttgcggcaagacaatcgaatccatccagctgagtccggaggagtacgaatgcctgaagggaaagattatgcgcgacgtaatcgacgggggagatcagtatcgcaagactactccccaggaactgaaacgcttcgaaaactttatcaaatccaggcctccttttgatgtagttatcgatgggttaaatgtcgccaagatgtttcccaaggtgcgcgaaagtcaactgctcctgaacgtagtgtctcagctggcaaaaagaaaccttcgtctgctcgtccttgggagaaagcacatgctgcgccggagttcccagtggagccgcgatgaaatggaagaggtacaaaagcaggctagctgcttttttgcagacgacatcagtgaagatgacccatttctactgtatgccaccctccactcaggaaatcactgcaggttcatcactcgagatctcatgcgggatcacaaggcctgtctgcctgacgctaaaacccagaggctgttcttcaagtggcagcaggggcatcagttggctatcgtgaataggtttcccggatcaaagctgacgttccagagaattttatcgtacgacaccgtcgtacagacaactggagacagttggcacataccctatgacgaggacctggtggaaagatgctcatgtgaagtgccaaccaagtggctttgtctccaccaaaagacatag

SEQ ID NO: 91195 - DNA, 1467 bp, Artificial Sequence
  derived and/or modified sequence
atgaacagccagacagaggaccacgccctggcccctgtgaggaacaccatccagctgcccacccagcccctgaacagcgaggagtgggacaagctgaaggaggacctgaaggagaacacaggcaagaccagctttgagagctggatcatcagccagatggccggctgccacagcagcattgatgtggccaagagcctgctggcctgggtggccgccaagaacaatggaattgtgtcctatgacctgctggtgaagtacctgtacctgtgtgtgttccacatgcagaccagcgaggtgattgatgtgtttgagatcatgaaggcccgctacaagaccctggagccccggggctacagcctgctgatccggggcctcatccacagcgaccgctggagggaggccctgctgctgctggaggacatcaagaaggtgatcacccccagcaagaagaactacaatgactgcatccagggcgccctgctgcaccaggatgtgaacacagcctggaacctgtaccaggagctgctgggccatgacatcgtgcccatgctggagaccctgaaggccttctttgattttgggaaggacatcaaggatgacaactacagcaacaagctgctggacatcctgagctacctgaggaacaaccagctgtacccaggagagagctttgcccacagcatcaagacctggtttgagagcgtgcctgggaagcagtggaagggccagttcaccaccgtgaggaagagcggccagtgcagcggctgtgggaagaccatcgagagcatccagctgagccctgaggagtatgaatgtctgaagggcaagatcatgagagatgtgattgatggaggagaccagtacaggaagaccaccccccaggagctgaagagatttgagaacttcatcaagagccggcccccatttgatgtggtgattgatggcctgaatgtggccaagatgttccccaaggtgcgggagagccagctgctgctgaatgtggtgtcccagctggccaagaggaacctgcggctgctggtgctgggcaggaagcacatgctgcggcgcagcagccagtggagcagagatgagatggaggaggtgcagaagcaggccagctgcttctttgctgatgacatcagtgaagatgaccccttcctgctgtatgccaccctgcacagcggcaaccactgccgcttcatcacccgggacctgatgagggaccacaaggcctgcctgcctgatgccaagacccagaggctcttcttcaagtggcagcagggccaccagctggccatcgtgaaccgcttccctggcagcaagctgaccttccagaggatcctgtcctatgacacagtggtgcagaccactggagacagctggcacatcccctatgatgaggacctggtggagcgctgcagctgtgaggtgcccaccaagtggctgtgcctgcaccagaagacctag

SEQ ID NO: 91196 - DNA, 1406 bp, Artificial Sequence
  derived and/or modified sequence
gtccccccaccggaggagttttgcggtctgtagagagctatgcagggtgagggcccctagacttcggctttcgccgctgttggtggtaggctggagttgggggtccctggatacggttttggctttacaccccctttccagcaagcttcccgtgggaatctgttccttttcaggacagctgtgatccactgttcctggaaaacaatggaaaggacaattcaccacagtccgaaaaagtggccagtgttcgggctgtggaaaaaccatagagtctattcagctgagtccagaagaatatgaatgtcttaagggaaaaatcatgagggatgtgatagatggaggtgaccagtacagaaagacaacacctcaggaacttaagagatttgagaacttcataaaatctcgtcctccttttgatgttgtcattgatggtctcaatgttgccaaaatgtttcctaaagttcgtgaatctcaacttctcttgaatgtcgtctctcaactagccaaacggaatctgcgactgctggtcctaggccggaagcacatgctaagacggagttcccagtggagtcgggatgagatggaagaggtgcaaaagcaagccagctgtttttttgctgatgacatctcggaggatgatccattccttctgtatgccacactgcactccgggaatcactgcaggtttatcacaagagacctgatgcgggaccacaaggcctgtctgcctgatgccaagacccaacgcctgttttttaagtggcagcagggacatcagctggcaattgtaaataggtttccaggatcaaaactaacctttcagcgtattctcagctatgacacagtggtgcaaacaactggagactcgtggcacataccatatgatgaagacttggtagaaagatgttcctgtgaagtaccaaccaaatggctttgcctccaccaaaagacatagagattcttacctctatgctaagtttgtgtttgggtaccctctaggttggcatcagaggctcttgagctggtgtttgtttagggcattgcctctgtcctgaagataaaaggattctattaacagcattgacattgattttttaatgaaatgagatatatcttttcataaccagctgcgtttttttcccctaacatttgtttttggaggcttatcaagagttggagaacttagtgtagagcaaaacctgcatttctcctactgggccagctattccacttagcttgggtgactaatagtgcttttggtatccattttttgctacttctgaccttgccttccaggcctaccaatagcagaatcaatccatctgtccctgagatactcatgttgtttcaaatgcctcctcccatttctggcatagtctcattctctgtatgttatgccctatcca

SEQ ID NO: 91197 - DNA, 1467 bp, Artificial Sequence
  derived and/or modified sequence
atgaacagccagaccgaggaccacgccctggcccccgtgcggaacactatccagcttccgacccaaccccttaactctgaggagtgggacaaactaaaggaggacctcaaggagaatactggaaagacctcctttgagtcctggattattagccaaatggcaggttgtcactcatctatcgacgtggctaaatctctcctggcgtgggtcgccgccaagaataacgggatcgtgtcttatgacctgctagtcaaatatttgtatctgtgtgtcttccacatgcagacgagcgaggtaatagatgtcttcgaaatcatgaaagcccgatataagacacttgaacctcgggggtatagcttattaatccggggccttatccactccgaccgttggagagaggcactgctcttgctggaggatatcaaaaaagttatcaccccctctaaaaaaaattataatgattgcattcaaggcgccctgttgcaccaggatgtaaacacagcctggaatctctaccaggagctactcggccatgatatcgtaccaatgttagagactctgaaagccttctttgatttcggtaaagatatcaaagacgataactacagcaataaactcctggatatcctgagctatctacgaaacaaccagctctatcccggagagtcctttgctcattcgatcaagacatggttcgagagtgtgcctggcaagcagtggaaaggacagttcactacggtgcggaaatctggacagtgcagcgggtgcgggaagaccattgagtcgatccagctgagtccggaagaatacgagtgcttaaagggcaagataatgcgtgacgtgatcgatggcggggatcagtaccgaaaaactaccccacaagagcttaagaggttcgagaattttatcaaatctcgtcctcccttcgacgtggtgattgatggattaaacgtcgcgaaaatgttcccaaaagtccgcgaaagccagttgcttttgaatgtggtttctcagctcgcaaaacgcaatttaagactcctggtcttaggacgaaaacatatgctgcgtaggagctctcagtggtcacgcgacgagatggaggaggtgcagaagcaggcatcctgtttcttcgccgacgacatctccgaggacgacccattcttattatacgctacactacactccggaaatcactgtaggtttatcacccgagacctcatgcgggatcacaaggcatgtctcccagacgctaagactcagaggctatttttcaagtggcagcaaggtcaccagctggctattgtgaaccgtttcccaggatcaaaactgaccttccaacgcatactatcttatgacacagtggtgcagaccaccggagatagttggcacataccttatgatgaggaccttgtggagcggtgctcctgcgaggtgccaacgaagtggctgtgcctgcaccagaaaacctag

SEQ ID NO: 91198 - DNA, 1467 bp, Artificial Sequence
  derived and/or modified sequence
atgaacagccagaccgaggaccacgccctggcccccgtgcggaacacaatccaactcccaacccagcctctgaattctgaagaatgggacaaactgaaggaggacttgaaagagaatactggcaaaacctccttcgaatcctggattatttcacagatggcaggatgtcattcatctatcgacgttgcgaaaagcctgttagcatgggtcgcagccaaaaataacggcatcgtcagctacgaccttctggtgaagtatttgtacttatgtgtgtttcacatgcagacttctgaggtcattgatgtatttgagattatgaaagcacgatataagactctggagcctagaggctatagcctgcttattagaggactgatacactccgacagatggcgggaggctctgctgctgctggaagacattaagaaggtgattacccccagcaagaaaaactacaatgattgtatccagggcgcgctactgcatcaagatgtgaacactgcgtggaatctctaccaagagcttctgggacacgacattgtaccaatgttggaaaccttgaaggccttttttgactttgggaaagacataaaggatgataactactcgaataaactgttagacattctgagctacctgagaaacaatcaactgtatcctggggagtctttcgctcacagcattaaaacctggtttgagagcgtcccgggtaagcaatggaaggggcaatttaccacggtgcgcaagagcggacagtgctcaggctgcggtaagactatcgagtctattcagctgtcacccgaagagtatgagtgtctgaagggcaaaattatgagagatgttattgacggcggtgaccagtatagaaaaactacacctcaggagctcaagcgctttgaaaatttcatcaagtcacgccccccctttgacgtcgtgattgacgggcttaatgtcgctaaaatgtttccgaaggtgagagaaagccaacttctgctgaatgttgtgagtcagctggccaaaagaaacctgcgtctgctagtgctagggcgaaaacacatgcttcgaagatcaagccaatggtcgagagatgagatggaagaggtgcaaaagcaagcgagctgcttctttgcagacgacattagtgaggatgaccccttcctcttgtacgctacactgcacagtggcaaccactgtcgtttcattacacgggacttaatgcgagatcacaaagcctgcctcccggacgccaagacccagcgcttattctttaagtggcagcagggccaccaattggctattgtgaataggttccccgggagcaaactgacattccagagaatcctctcttacgacacagttgtgcagacgacaggcgattcttggcacatcccttatgacgaagacttggttgagcgctgctcctgcgaggtgccaaccaagtggctgtgtctgcaccagaagacatag

SEQ ID NO: 91199 - DNA, 1467 bp, Artificial Sequence
  derived and/or modified sequence
atgaattctcagaccgaagaccatgctctcgcccctgtgcgcaacacaattcagctgcctacacagcctctcaactctgaagagtgggataagctgaaggaagacctgaaggagaacaccgggaaaacttcctttgaatcttggattatttcacagatggcgggttgtcattcgagcattgatgtagccaaatctctcctggcctgggttgcagccaagaacaatggaattgtatcatacgatctcctggttaagtacctatatctttgcgtctttcacatgcagacttcagaagtgatcgacgtctttgagatcatgaaggccagatacaaaactctggagcccagggggtactccttattgatacggggtttgattcatagcgatagatggagagaggctttgctgctgctagaggatattaagaaagtgataacaccctctaaaaaaaactacaacgactgtattcagggagcattgctacatcaggatgtaaacacggcctggaacttgtatcaggagctgctcggtcatgacattgtgcccatgcttgagacacttaaggccttttttgactttggcaaggacattaaggacgacaactattcgaataagctcctggacatactgagctatctgaggaataaccagctataccctggagagagtttcgctcattcaatcaaaacttggtttgagagcgtgcctggaaagcagtggaaaggacagtttactacagtgcgtaaaagcggtcagtgctccgggtgcgggaaaacgatcgaatctattcagttgagccctgaagagtatgagtgtcttaaaggaaagataatgcgggatgtgattgatggcggagaccagtataggaaaacgactccccaagaactgaaacgatttgagaactttataaaaagccgccctccattcgatgtggtgatcgacgggctgaacgtggccaaaatgtttcccaaagttagggagtcccaactgctactcaatgttgtttcccagctggccaaaagaaatctgaggcttctcgtgctagggaggaaacacatgctgagacggtctagtcagtggtcccgagatgagatggaggaagttcagaaacaggctagctgcttctttgcggatgacatctccgaggacgatcccttcctattgtatgcaacgcttcactctggcaaccactgtcggtttataacccgggacctgatgcgggatcacaaagcctgccttccagatgcaaagacgcagaggttattttttaagtggcagcaggggcaccagcttgccattgtgaaccggttcccgggtagcaagctgacattccagaggattttgtcttatgatactgttgtgcagaccaccggagattcttggcacattccatacgacgaggacctggtggagagatgctcctgtgaagtgccaacaaaatggctgtgccttcaccagaaaacctag

SEQ ID NO: 91200 - DNA, 1467 bp, Artificial Sequence
  derived and/or modified sequence
atgaactcacaaactgaggaccacgctttggctccagtgcggaatactatacagctgccaactcagcctctgaattctgaggaatgggataaattgaaggaggaccttaaggagaacactggtaagacatccttcgaatcctggattatatcccagatggcaggatgtcacagttccatcgatgttgccaaaagtctgcttgcatgggttgcagctaagaataacggtatcgtgtcttacgatttgctcgtgaaatacctatatctctgcgtctttcacatgcaaaccagtgaagtgatcgatgttttcgaaattatgaaggcacggtataaaaccctcgagccacgcggatactccctccttattcggggtctcattcattccgatagatggcgggaagccctcctgttgctggaggacattaagaaagtgatcactccatcaaagaagaactacaacgattgcattcagggcgcacttttacaccaagacgtgaacaccgcctggaacctctatcaggaactgcttgggcacgatatagtgcctatgctggagactctcaaggcatttttcgacttcgggaaggacatcaaagacgataactacagcaacaaattgctcgatattctatcctacctgcggaacaatcaactgtaccctggcgagtccttcgctcatagtataaaaacttggttcgagagcgtacccggaaaacagtggaagggccagtttaccaccgtaaggaaaagcggacaatgcagcgggtgcggtaaaacaatagagtcaattcaactcagtcccgaagaatatgagtgtcttaaagggaagataatgcgtgacgtcatagacggaggagatcagtatcggaagaccacaccccaggagttaaagagatttgagaattttatcaaaagccggcctcctttcgatgtagtcattgacggactgaatgtggcaaaaatgttccccaaagtgagagagagccagctcctcttgaatgtggtatcccaactggctaagcgaaacctgcggctgcttgtcctcgggcgtaaacatatgttgcgacgcagttcgcaatggtcccgcgatgaaatggaggaagttcagaaacaggctagctgtttcttcgctgatgacatatcagaggatgacccattcctcttatacgccaccctccacagtggcaaccattgccgatttattactagggaccttatgcgagatcacaaagcatgtctgcccgatgccaaaacacagaggttattctttaaatggcagcagggacatcagcttgccatcgtgaacagattcccgggaagcaaactgactttccagcgcatcctcagttacgatactgtggtgcagaccacaggcgattcgtggcacattccttatgacgaggacctcgtagaacgttgtagctgcgaggtccccacaaaatggctctgtctacaccagaagacctag

SEQ ID NO: 91201 - DNA, 636 bp, Artificial Sequence
  derived and/or modified sequence
atgagagacgtgatcgacggcggcgaccagtacagaaagaccaccccccaggagctgaagagattcgagaacttcatcaagagcagaccccccttcgacgtggtgatcgacggcctgaacgtggccaagatgttccccaaggtgagagagagccagctgctgctgaacgtggtgagccagctggccaagagaaacctgagactgctggtgctgggcagaaagcacatgctgagaagaagcagccagtggagcagagacgagatggaggaggtgcagaagcaggccagctgcttcttcgccgacgacatcagcgaggacgaccccttcctgctgtacgccaccctgcacagcggcaaccactgcagattcatcaccagagacctgatgagagaccacaaggcctgcctgcccgacgccaagacccagagactgttcttcaagtggcagcagggccaccagctggccatcgtgaacagattccccggcagcaagctgaccttccagagaatcctgagctacgacaccgtggtgcagaccaccggcgacagctggcacatcccctacgacgaggacctggtggagagatgcagctgcgaggtgcccaccaagtggctgtgcctgcaccagaagacctag

SEQ ID NO: 91202 - DNA, 636 bp, Artificial Sequence
  derived and/or modified sequence
atgcgtgatgtgattgacggcggggaccagtatcgcaagactacaccccaggagcttaagagatttgaaaacttcataaagagcaggcctccttttgatgtggtgatcgatggcctcaatgtggccaaaatgttccctaaagtaagggagagtcagctgctgttgaatgtggtgtcacaactcgccaagagaaacctgagactcctggttctcggcagaaaacatatgctccggagaagcagccagtggtctagagatgagatggaggaggttcaaaaacaggcttcctgttttttcgctgacgacattagcgaagatgatccctttttgctttacgctactctacacagcggcaaccactgtcgcttcatcacacgggacctgatgcgggaccataaggcatgcctccccgacgcgaagacccagagactgttctttaagtggcaacagggacatcagttggcaatcgtaaaccgcttccccgggagcaaacttacattccagagaattttatcttacgatactgtggtgcaaactactggcgatagctggcacatcccatatgacgaggacctggtagagcgctgttcctgtgaggtcccaaccaagtggttgtgtctgcaccagaagacgtag

SEQ ID NO: 91203 - DNA, 636 bp, Artificial Sequence
  derived and/or modified sequence
atgagagatgtgattgatggaggagaccagtacaggaagaccaccccccaggagctgaagagatttgagaacttcatcaagagccggcccccatttgatgtggtgattgatggcctgaatgtggccaagatgttccccaaggtgcgggagagccagctgctgctgaatgtggtgtcccagctggccaagaggaacctgcggctgctggtgctgggcaggaagcacatgctgcggcgcagcagccagtggagcagagatgagatggaggaggtgcagaagcaggccagctgcttctttgctgatgacatcagtgaagatgaccccttcctgctgtatgccaccctgcacagcggcaaccactgccgcttcatcacccgggacctgatgagggaccacaaggcctgcctgcctgatgccaagacccagaggctcttcttcaagtggcagcagggccaccagctggccatcgtgaaccgcttccctggcagcaagctgaccttccagaggatcctgtcctatgacacagtggtgcagaccaccggggacagctggcacatcccctatgatgaggacctggtggagcgctgcagctgtgaggtgcccaccaagtggctgtgcctgcaccagaagacctag

SEQ ID NO: 91204 - DNA, 636 bp, Artificial Sequence
  derived and/or modified sequence
atgcgggacgtgatcgacggcggcgaccagtaccggaagaccaccccacaggaactcaaaagattcgagaatttcattaaatcacggccgccattcgatgtggtcatcgatggcctgaatgtcgcaaagatgtttcccaaggtgcgggaatcgcagttgttactgaatgtggttagtcaactggccaaacggaatctgcggctgttagttctgggcagaaagcacatgctgaggcgtagcagccagtggagtagggacgagatggaagaggtgcagaaacaagccagttgttttttcgccgatgacatcagtgaagatgatccttttctcctctacgccacactacatagcggaaaccattgtagatttatcactcgagacctgatgagggatcataaagcttgtttaccggacgccaagacacagcggctgtttttcaagtggcaacagggccaccaactcgcaatcgtgaaccgttttccaggttccaagctgacatttcagcggatactcagctatgataccgtggtccagacaactggggattcgtggcatattccgtatgatgaggacctggtcgagaggtgttcctgtgaggtcccaactaaatggctatgcctccatcagaaaacctag

SEQ ID NO: 91205 - DNA, 636 bp, Artificial Sequence
  derived and/or modified sequence
atgcgcgacgtgatcgacggtggagatcagtatcggaagaccacccctcaagaactcaagcggttcgagaacttcattaaatctagaccgccttttgacgtagtgatcgacggtctgaacgtggccaagatgttccctaaggtgcgggaatcccagctcttattaaacgtggtgagtcagctggccaaaagaaatcttcggcttctggtgcttgggaggaagcatatgttgaggaggtcatcacagtggtcaagggatgaaatggaagaggtgcagaagcaggcctcctgttttttcgctgacgacatcagtgaagacgatccattcttgctttacgctaccttacatagcggaaaccactgtagattcatcacgagagatttaatgcgtgaccacaaggcttgtctgccagacgctaagacacagcgcttgttcttcaaatggcagcagggccatcagctggccattgttaacagatttccaggttccaagctgacatttcaaaggatattgtcctacgataccgtggtgcagactaccggggattcttggcacataccttacgatgaggacctagtagaacgctgctcttgtgaggtgcctactaaatggctgtgtcttcatcagaagacttag

SEQ ID NO: 91206 - protein, 610 aa, Artificial Sequence
  derived and/or modified sequence
MKDYDELLKYYELHETIGTGGFAKVKLACHILTGEMVAIKIMDKNTLGSDLPRIKTEIEALKNLRHQHICQLYHVLETANKIFMVLEYCPGGELFDYIISQDRLSEEETRVVFRQIVSAVAYVHSQGYAHRDLKPENLLFDEYHKLKLIDFGLCAKPKGNKDYHLQTCCGSLAYAAPELIQGKSYLGSEADVWSMGILLYVLMCGFLPFDDDNVMALYKKIMRGKYDVPKWLSPSSILLLQQMLQVDPKKRISMKNLLNHPWIMQDYNYPVEWQSKNPFIHLDDDCVTELSVHHRNNRQTMEDLISLWQYDHLTATYLLLLAKKARGKPVRLRLSSFSCGQASATPFTDIKFTKYWTESNGVESKSLTPALCRTPANKLKNKENVYTPKSAVKNEEYFMFPEPKTPVNKNQHKREILTTPNRYTTPSKARNQCLKETPIKIPVNSTGTDKLMTGVISPERRCRSVELDLNQAHMEETPKRKGAKVFGSLERGLDKVITVLTRSKRKGSARDGPRRLKLHYNVTTTRLVNPDQLLNEIMSILPKKHVDFVQKGYTLKCQTQSDFGKVTMQFELEVCQLQKPDVVGIRRQRLKGDAWVYKRLVEDILSSCKV

SEQ ID NO: 91207 - DNA, 1833 bp, Artificial Sequence
  derived and/or modified sequence
atgaaggactacgacgagcttctgaagtactacgagctgcacgaaacaatcggaactgggggctttgcaaaggtaaagctggcctgtcatattctgactggggaaatggtggccattaaaatcatggataagaacacattagggtccgacttacccagaattaagacagagattgaggccctcaagaacctcagacatcagcatatttgtcagctgtatcacgtcctggagacggctaacaaaatatttatggtgctagagtattgccctggcggagaactatttgattatatcatatcccaggaccgattatccgaggaagagacccgcgtggtgttccgtcagattgtgtccgccgttgcttatgttcattcccaggggtacgcacaccgcgatctaaagcccgagaacctgttgttcgatgagtatcataaattaaaactgatagactttggcctgtgtgccaagccgaagggaaacaaagactaccacctacagacctgctgtggctccctggcctatgcagcgcctgagctcatccaaggcaaaagctacctgggctcagaagcggacgtgtggagtatgggcatcctgctgtatgttctgatgtgcggttttttgccttttgatgacgataacgtgatggcgctgtataagaagatcatgagaggtaagtacgacgtgcccaaatggctctccccttcctccatcctgctactgcaacagatgcttcaggtggaccccaagaaaaggattagcatgaagaacctgctgaatcacccgtggatcatgcaggattataactaccctgtcgagtggcagagtaaaaaccctttcatccacctggacgatgactgtgtaacggagctctctgtacaccatcgtaataaccgtcagaccatggaggacttgatatcgctgtggcagtatgaccatttgactgcaacgtacctgctactgttggccaagaaagcccgcgggaagcctgtgcgactgcggctctcctctttctcctgtggccaagcatccgcgactccgttcacagatatcaagtttaccaagtactggacagagagtaatggagtagagtccaagagcctgacccccgcattatgtcgtactcccgctaacaagctaaaaaataaggaaaacgtgtacacccccaaaagcgccgtgaagaacgaggagtatttcatgtttccagagcctaagaccccagtcaataagaatcagcacaagcgggaaattttgaccacccctaaccgctatactacaccctcaaaagccagaaaccagtgtctgaaggagactccaatcaaaatccctgttaacagcaccggcacggacaagctgatgacaggcgtaatatctccagagcgccggtgtcgaagtgtggagctggatctgaatcaggcacatatggaggagacaccaaagagaaaaggcgcgaaggtgtttggctccctggagaggggcctcgataaagtgatcaccgtgctgactaggtccaaacgaaaaggatccgcccgggacggccctcggagattgaagcttcactacaatgttacgacaacaaggctggttaaccccgaccaattactcaacgaaataatgagtatcctcccgaaaaaacacgtcgactttgttcagaagggctatacgctgaagtgtcaaacgcagtccgactttgggaaagtgactatgcagttcgaactggaagtttgtcagctgcagaaaccagatgtcgtcggtattagaagacagcggttgaagggggacgcttgggtttataagcggctcgtagaagatatactgagctcgtgtaaagtgtag

SEQ ID NO: 91208 - DNA, 1833 bp, Artificial Sequence
  derived and/or modified sequence
atgaaggactatgatgagctgctgaagtactatgagctgcacgagaccatcggcactggaggctttgccaaggtgaagctggcctgccacatcctgactggagagatggtggccatcaagatcatggacaagaacaccctgggcagtgacctgccccgcatcaagacagaaattgaggccctgaagaacctgcggcaccagcacatctgccagctgtaccacgtgctggagacagccaacaagatcttcatggtgctggagtactgccctggaggagagctgtttgactacatcatcagccaggaccggctgtctgaggaggagaccagggtggtgttccggcagatcgtgtctgctgtggcctacgtgcacagccagggctacgcccaccgggacctgaagccagagaacctgctgtttgatgagtaccacaagctgaagctgattgactttggcctgtgtgccaagcccaagggcaacaaggactaccacctgcagacctgctgcggcagcctggcctatgctgcccctgagctgatccagggcaagagctacctgggcagcgaggctgatgtgtggagcatgggcatcctgctgtatgtgctgatgtgtggcttcctgccctttgatgatgacaacgtgatggccctgtacaagaagatcatgaggggcaagtatgatgtgcccaagtggctgagccccagcagcatcctgctgctgcagcagatgctgcaggtggaccccaagaagaggatctccatgaagaacctgctgaaccacccctggatcatgcaggactacaactaccctgtggagtggcagagcaagaaccccttcatccacctggatgatgactgtgtgacagagctgtctgtgcaccacaggaacaaccggcagaccatggaggacctgatcagcctgtggcagtatgaccacctgacagccacctacctgctgctgctggccaagaaggcccggggcaagcctgtgcggctgcggctgagcagcttcagctgtggccaggccagcgccacccccttcacagacatcaagttcaccaagtactggacagagagcaatggagtggagagcaagagcctgaccccagccctgtgcaggaccccagccaacaagctgaagaacaaggaaaatgtgtacacccccaagtctgctgtgaagaatgaggagtacttcatgtttcctgagcccaagacccctgtgaacaagaaccagcacaagcgggagatcctgaccacccccaaccgctacaccacccccagcaaggccaggaaccagtgcctgaaggagacccccatcaagatccctgtgaacagcactggaacagacaagctgatgactggagtcatcagccctgagcggcgctgccgctctgtggagctggacctgaaccaggcccacatggaggagacccccaagaggaaaggagccaaggtgtttggcagcctggagcggggcctggacaaggtgatcaccgtgctgaccaggagcaagaggaagggcagcgccagagatggcccccggcggctgaagctgcactacaacgtgaccaccacccggctggtgaacccagaccagctgctgaatgagatcatgagcatcctgcccaagaagcacgtggactttgtgcagaagggctacaccctgaagtgccagacccagagcgactttgggaaggtgaccatgcagtttgagctggaggtgtgccagctgcagaagccagatgtggtgggcatccggcggcagaggctgaagggagatgcctgggtgtacaagaggctggtggaggacatcctgagcagctgcaaggtgtag

SEQ ID NO: 91209 - DNA, 2291 bp, Artificial Sequence
  derived and/or modified sequence
aaaagattcttaggaacgccgtaccagccgcgtctctcaggacagcaggcccctgtccttctgtcgggcgccgctcagccgtgccctccgcccctcaggttctttttctaattccaaataaacttgcaagaggactatgaaagattatgatgaacttctcaaatattatgaattacatgaaactattgggacaggtggctttgcaaaggtcaaacttgcctgccatatccttactggagagatggtagctataaaaatcatggataaaaacacactagggagtgatttgccccggatcaaaacggagattgaggccttgaagaacctgagacatcagcatatatgtcaactctaccatgtgctagagacagccaacaaaatattcatggttcttgagtactgccctggaggagagctgtttgactatataatttcccaggatcgcctgtcagaagaggagacccgggttgtcttccgtcagatagtatctgctgttgcttatgtgcacagccagggctatgctcacagggacctcaagccagaaaatttgctgtttgatgaatatcataaattaaagctgattgactttggtctctgtgcaaaacccaagggtaacaaggattaccatctacagacatgctgtgggagtctggcttatgcagcacctgagttaatacaaggcaaatcatatcttggatcagaggcagatgtttggagcatgggcatactgttatatgttcttatgtgtggatttctaccatttgatgatgataatgtaatggctttatacaagaagattatgagaggaaaatatgatgttcccaagtggctctctcccagtagcattctgcttcttcaacaaatgctgcaggtggacccaaagaaacggatttctatgaaaaatctattgaaccatccctggatcatgcaagattacaactatcctgttgagtggcaaagcaagaatccttttattcacctcgatgatgattgcgtaacagaactttctgtacatcacagaaacaacaggcaaacaatggaggatttaatttcactgtggcagtatgatcacctcacggctacctatcttctgcttctagccaagaaggctcggggaaaaccagttcgtttaaggctttcttctttctcctgtggacaagccagtgctaccccattcacagacatcaagtttaccaagtactggacagaatcaaatggggtggaatctaaatcattaactccagccttatgcagaacacctgcaaataaattaaagaacaaagaaaatgtatatactcctaagtctgctgtaaagaatgaagagtactttatgtttcctgagccaaagactccagttaataagaaccagcataagagagaaatactcactacgccaaatcgttacactacaccctcaaaagctagaaaccagtgcctgaaagaaactccaattaaaataccagtaaattcaacaggaacagacaagttaatgacaggtgtcattagccctgagaggcggtgccgctcagtggaattggatctcaaccaagcacatatggaggagactccaaaaagaaagggagccaaagtgtttgggagccttgaaagggggttggataaggttatcactgtgctcaccaggagcaaaaggaagggttctgccagagacgggcccagaagactaaagcttcactataacgtgactacaactagattagtgaatccagatcaactgttgaatgaaataatgtctattcttccaaagaagcatgttgactttgtacaaaagggttatacactgaagtgtcaaacacagtcagattttgggaaagtgacaatgcaatttgaattagaagtgtgccagcttcaaaaacccgatgtggtgggtatcaggaggcagcggcttaagggcgatgcctgggtttacaaaagattagtggaagacatcctatctagctgcaaggtataattgatggattcttccatcctgccggatgagtgtgggtgtgatacagcctacataaagactgttatgatcgctttgattttaaagttcattggaactaccaacttgtttctaaagagctatcttaagaccaatatctctttgtttttaaacaaaagatattattttgtgtatgaatctaaatcaagcccatctgtcattatgttactgtcttttttaatcatgtggttttgtatattaataattgttgactttcttagattcacttccatatgtgaatgtaagctcttaactatgtctctttgtaatgtgtaatttctttctg

SEQ ID NO: 91210 - DNA, 1833 bp, Artificial Sequence
  derived and/or modified sequence
atgaaggactacgacgagctgctgaagtactacgagctgcacgagacaatcgggacaggcggctttgctaaggtcaaattggcatgtcacatcttaaccggagaaatggtggctattaaaatcatggacaagaacacactcggttcagacctgccacgtatcaagaccgaaattgaagccctgaaaaatctacgacaccagcacatttgccagctgtatcatgtgctggaaactgccaataaaattttcatggtccttgaatattgtcccggcggcgagctgtttgactatatcatttcccaggataggctgtctgaggaggaaacccgtgttgtattcaggcagatagtatcggctgtagcttatgtgcactcgcagggctatgcacaccgcgacttgaaaccagagaatctactcttcgacgaataccacaaactcaaacttatagacttcggcctgtgtgccaagccaaagggcaataaggattaccaccttcagacctgctgcgggagcttggcatatgctgcccccgaactaatacagggaaagtcatacctgggtagtgaggccgacgtttggtcaatgggcattctcctttacgttcttatgtgtggtttcttgccattcgatgatgataatgtgatggccttgtataagaagattatgcgcggcaagtatgacgtgcctaagtggctcagcccctccagcatcttactactccagcaaatgcttcaagtcgatccaaagaaaaggatctctatgaagaacttactaaaccacccctggattatgcaggattacaactaccccgtggagtggcagagcaaaaacccttttattcacctggacgacgactgcgttacagaactgtctgtgcatcaccggaataacaggcagactatggaagatctgatcagcttgtggcagtatgaccatttaactgctacgtacctgctattgcttgcaaagaaggctagaggcaagcctgtccgcctccgcctgagctcattctcgtgtgggcaggcgtccgccacaccctttacagacattaagttcactaaatactggactgaatccaatggagtggaatcaaagtcactgaccccagccctgtgccggacaccggcaaataagctgaagaacaaagagaacgtgtacacccccaaaagcgcagtcaagaacgaagagtattttatgttccccgagccaaagacacctgttaacaagaaccagcataagagggagatcctgaccacccctaaccggtatacaacaccaagcaaagcacgcaaccagtgcctgaaagaaacacccataaaaatacctgtaaattctacgggcaccgataaattgatgaccggcgtgatcagcccagagaggcggtgcagatcagtggagctcgatctgaatcaggctcatatggaagagacccctaagcgcaagggcgccaaagtcttcggctctctcgaaaggggcctggacaaagttattaccgttctgacacggagcaagcgtaagggaagcgcgagagacggcccgagacggctgaagctgcactataatgtaactaccaccaggctagtgaatccagaccaactcttgaacgaaattatgtccatccttccgaagaaacatgtggacttcgtgcagaagggctatactcttaaatgccagacacaatccgatttcggcaaagtcacgatgcagttcgaactggaagtttgtcaacttcagaaaccagatgtggttggtattcgcagacagcggctaaaaggcgacgcttgggtctacaaacgcctcgtggaggatattctgagctcatgtaaagtctag

SEQ ID NO: 91211 - DNA, 1833 bp, Artificial Sequence
  derived and/or modified sequence
atgaaggattatgatgagttactgaagtactatgaactgcacgaaacgattgggactgggggattcgcaaaagttaaactagcgtgccacatcttgacgggggagatggtcgctataaagatcatggacaagaatacgcttggttccgacctgcctcgaatcaaaaccgagatcgaggccctcaaaaatttgcgccaccagcacatctgtcagttgtaccacgtcctggaaactgctaataagatctttatggttctcgagtactgcccgggaggggaattattcgactacattatttcgcaagacaggctgtcagaagaagagactagggtggtcttcaggcagattgtgagtgcagtggcgtacgtgcactcgcagggctacgctcatcgagacctgaaacccgagaacctgctcttcgacgagtatcacaaactcaaactgattgatttcggcctttgcgcaaagcctaagggtaacaaggactatcacctgcaaacatgctgcggtagcctggcctacgccgcaccagaactaattcagggaaaaagctatttgggatctgaagcggacgtgtggtcaatgggtattctactctacgtgctaatgtgcggttttctgccattcgatgacgacaacgttatggccctgtacaagaaaattatgcgcggtaaatacgacgtgcctaagtggctttccccttcctcgatccttctgcttcagcagatgctccaggttgacccgaagaaaagaatcagcatgaaaaacttgctgaatcacccttggatcatgcaggattacaactaccccgtggagtggcagagcaagaatccatttatccatctggatgacgactgtgtaacagagctgagcgtgcaccacaggaataatagacagacgatggaagatttgattagcctgtggcagtatgatcacctgacagcaacttatttgcttctgctggccaaaaaagccagggggaagcccgtgcggcttcggctctcgtccttctcttgcggccaggctagcgccacccctttcaccgatatcaagtttaccaaatactggaccgagagcaatggggtggaaagcaagtcccttacccctgccctgtgtaggactcctgctaataagctgaagaacaaagagaatgtgtatacgcctaagagcgctgtaaagaacgaggagtatttcatgttccctgaacccaaaaccccagttaacaaaaaccagcataagagggagattcttactacacctaacagatacacaactcccagcaaggctcggaatcagtgcctgaaggagacaccaataaaaattcccgtgaattctactggcaccgacaaactgatgacgggtgttattagtcccgagcggaggtgcagatctgtagagctcgacctgaaccaggcccatatggaagagacacctaagcggaaaggggcaaaggtcttcggaagccttgagcgtggcctggacaaggtgatcacagtgctcactaggagcaagagaaagggaagcgctagagacggcccacgacgactgaaacttcactataacgtcaccacgacgcgcttagtaaacccggaccagctgttaaacgaaatcatgtctattcttcccaaaaagcacgtagactttgtgcagaaggggtacaccctgaaatgccagacccagtccgattttggaaaggtcactatgcagttcgagttagaggtgtgccagctccagaaaccagatgtcgtaggtatacgtcggcagaggctgaaaggcgatgcttgggtttataagcgactggttgaagacatcctctcaagctgcaaagtttag

SEQ ID NO: 91212 - DNA, 1833 bp, Artificial Sequence
  derived and/or modified sequence
atgaaggactacgacgagctgctgaagtactacgagctgcacgagaccatcggcaccggcggcttcgccaaggtgaagctggcctgccacatcctgaccggcgagatggtggccatcaagatcatggacaagaacaccctgggcagcgacctgcccagaatcaagaccgagatcgaggccctgaagaacctgagacaccagcacatctgccagctgtaccacgtgctggagaccgccaacaagatcttcatggtgctggagtactgccccggcggcgagctgttcgactacatcatcagccaggacagactgagcgaggaggagaccagagtggtgttcagacagatcgtgagcgccgtggcctacgtgcacagccagggctacgcccacagagacctgaagcccgagaacctgctgttcgacgagtaccacaagctgaagctgatcgacttcggcctgtgcgccaagcccaagggcaacaaggactaccacctgcagacctgctgcggcagcctggcctacgccgcccccgagctgatccagggcaagagctacctgggcagcgaggccgacgtgtggagcatgggcatcctgctgtacgtgctgatgtgcggcttcctgcccttcgacgacgacaacgtgatggccctgtacaagaagatcatgagaggcaagtacgacgtgcccaagtggctgagccccagcagcatcctgctgctgcagcagatgctgcaggtggaccccaagaagagaatcagcatgaagaacctgctgaaccacccctggatcatgcaggactacaactaccccgtggagtggcagagcaagaaccccttcatccacctggacgacgactgcgtgaccgagctgagcgtgcaccacagaaacaacagacagaccatggaggacctgatcagcctgtggcagtacgaccacctgaccgccacctacctgctgctgctggccaagaaggccagaggcaagcccgtgagactgagactgagcagcttcagctgcggccaggccagcgccacccccttcaccgacatcaagttcaccaagtactggaccgagagcaacggcgtggagagcaagagcctgacccccgccctgtgcagaacccccgccaacaagctgaagaacaaggagaacgtgtacacccccaagagcgccgtgaagaacgaggagtacttcatgttccccgagcccaagacccccgtgaacaagaaccagcacaagagagagatcctgaccacccccaacagatacaccacccccagcaaggccagaaaccagtgcctgaaggagacccccatcaagatccccgtgaacagcaccggcaccgacaagctgatgaccggcgtgatcagccccgagagaagatgcagaagcgtggagctggacctgaaccaggcccacatggaggagacccccaagagaaagggcgccaaggtgttcggcagcctggagagaggcctggacaaggtgatcaccgtgctgaccagaagcaagagaaagggcagcgccagagacggccccagaagactgaagctgcactacaacgtgaccaccaccagactggtgaaccccgaccagctgctgaacgagatcatgagcatcctgcccaagaagcacgtggacttcgtgcagaagggctacaccctgaagtgccagacccagagcgacttcggcaaggtgaccatgcagttcgagctggaggtgtgccagctgcagaagcccgacgtggtgggcatcagaagacagagactgaagggcgacgcctgggtgtacaagagactggtggaggacatcctgagcagctgcaaggtgtag

SEQ ID NO: 91213 - protein, 603 aa, Artificial Sequence
  derived and/or modified sequence
MKDYDELLKYYELHETIGTGGFAKVKLACHILTGEMVAIKIMDKNTLGSDLPRIKTEIEALKNLRHQHICQLYHVLETANKIFMVLEENLLFDEYHKLKLIDFGLCAKPKGNKDYHLQTCCGSLAYAAPELIQGKSYLGSEADVWSMGILLYVLMCGFLPFDDDNVMALYKKIMRGKYDVPKWLSPSSILLLQQMLQVDPKKRISMKNLLNHPWIMQDYNYPVEWQSKNPFIHLDDDCVTELSVHHRNNRQTMEDLISLWQYDHLTATYLLLLAKKARGKPVRLRLSSFSCGQASATPFTDIKSNNWSLEDVTASDKNYVAGLIDYDWCEDDLSTGAATPRTSQFTKYWTESNGVESKSLTPALCRTPANKLKNKENVYTPKSAVKNEEYFMFPEPKTPVNKNQHKREILTTPNRYTTPSKARNQCLKETPIKIPVNSTGTDKLMTGVISPERRCRSVELDLNQAHMEETPKRKGAKVFGSLERGLDKVITVLTRSKRKGSARDGPRRLKLHYNVTTTRLVNPDQLLNEIMSILPKKHVDFVQKGYTLKCQTQSDFGKVTMQFELEVCQLQKPDVVGIRRQRLKGDAWVYKRLVEDILSSCKV

SEQ ID NO: 91214 - protein, 520 aa, Artificial Sequence
  derived and/or modified sequence
MVLEENLLFDEYHKLKLIDFGLCAKPKGNKDYHLQTCCGSLAYAAPELIQGKSYLGSEADVWSMGILLYVLMCGFLPFDDDNVMALYKKIMRGKYDVPKWLSPSSILLLQQMLQVDPKKRISMKNLLNHPWIMQDYNYPVEWQSKNPFIHLDDDCVTELSVHHRNNRQTMEDLISLWQYDHLTATYLLLLAKKARGKPVRLRLSSFSCGQASATPFTDIKSNNWSLEDVTASDKNYVAGLIDYDWCEDDLSTGAATPRTSQFTKYWTESNGVESKSLTPALCRTPANKLKNKENVYTPKSAVKNEEYFMFPEPKTPVNKNQHKREILTTPNRYTTPSKARNQCLKETPIKIPVNSTGTDKLMTGVISPERRCRSVELDLNQAHMEETPKRKGAKVFGSLERGLDKVITVLTRSKRKGSARDGPRRLKLHYNVTTTRLVNPDQLLNEIMSILPKKHVDFVQKGYTLKCQTQSDFGKVTMQFELEVCQLQKPDVVGIRRQRLKGDAWVYKRLVEDILSSCKV

SEQ ID NO: 91215 - DNA, 1812 bp, Artificial Sequence
  derived and/or modified sequence
atgaaggattatgacgaactgctgaagtactacgaattgcatgagaccatagggaccggtggctttgccaaagtgaagctcgcctgccacattctgacaggcgaaatggttgctatcaaaatcatggacaaaaatacactgggcagcgacctccccaggattaagactgaaatcgaagccctcaagaacctgcgccatcagcacatatgccaactgtaccatgtgctcgaaaccgcaaacaaaatttttatggtcctggaggaaaacctcctgtttgacgagtaccataagctcaaactcattgattttgggttgtgtgctaaaccaaagggtaacaaggactaccacctgcagacgtgctgcggatccttagcctatgctgccccagagctcatacagggtaagtcttacctgggttccgaggccgacgtttggagcatgggcatccttctctacgtgctcatgtgcggctttttaccatttgatgatgacaatgtcatggcattgtacaaaaagattatgaggggcaaatacgacgtgcccaaatggctgtccccctcttctattctgctcttgcagcaaatgctgcaggtggatcctaagaaacggatctccatgaagaatttgcttaatcacccctggatcatgcaggactacaactatccggtcgagtggcagagcaagaacccctttattcatctggatgacgattgcgtcactgagctatccgtccaccaccgcaataaccggcagacaatggaagatttgatatctctgtggcaatacgaccaccttactgcgacgtacctccttcttttggccaaaaaagcaaggggtaaacctgtgagattgagactttcttctttctcctgtggacaggcttccgccactccttttactgacattaagtcgaataactggtctttggaagacgtgacagcaagcgacaagaattacgtggccggactgattgactatgattggtgtgaggatgacctgagcaccggagcagctacaccccgaactagccaatttacaaagtattggacagagagtaatggagttgagtctaaatctctgacgcctgctctgtgtcggacacctgctaacaagctgaagaacaaggagaatgtttacacacccaaaagtgccgttaaaaatgaagaatatttcatgttcccagagcccaagactccagtcaataagaatcaacataagcgggagattctgacaacaccaaaccggtacacgactccttcgaaagcccgcaaccagtgcctcaaggagaccccgatcaagatacctgtgaattccacaggcacagacaaactgatgactggcgtgatctctccagaaagaagatgcaggtctgtggaactagacttgaatcaagcccacatggaggagaccccaaagcgcaagggcgccaaggtgttcggctcgctcgagcgcgggctggataaggttatcaccgttctgactagatctaagagaaagggaagtgcaagggacggccctcgacgtctcaaactgcattacaacgtaacgaccacacgcttggttaaccccgatcagttgttgaatgagataatgagtattctgcctaagaagcatgtcgatttcgtacaaaaagggtacactctgaagtgtcagacacagagcgatttcggaaaggtgacaatgcagtttgagctggaagtttgtcagctgcagaagccagacgtggtggggatccgtcgtcagcgactgaaaggggacgcctgggtatacaagaggttggtcgaagacatactctcgtcctgtaaggtatag

SEQ ID NO: 91216 - DNA, 1812 bp, Artificial Sequence
  derived and/or modified sequence
atgaaggactatgatgagctgctgaagtactatgagctgcacgagaccatcggcactggaggctttgccaaggtgaagctggcctgccacatcctgactggagagatggtggccatcaagatcatggacaagaacaccctgggcagtgacctgccccgcatcaagacagaaattgaggccctgaagaacctgcggcaccagcacatctgccagctgtaccacgtgctggagacagccaacaagatcttcatggtgctggaggagaacctgctgtttgatgagtaccacaagctgaagctgattgactttggcctgtgtgccaagcccaagggcaacaaggactaccacctgcagacctgctgcggcagcctggcctatgctgcccctgagctgatccagggcaagagctacctgggcagcgaggctgatgtgtggagcatgggcatcctgctgtatgtgctgatgtgtggcttcctgccctttgatgatgacaacgtgatggccctgtacaagaagatcatgaggggcaagtatgatgtgcccaagtggctgagccccagcagcatcctgctgctgcagcagatgctgcaggtggaccccaagaagaggatctccatgaagaacctgctgaaccacccctggatcatgcaggactacaactaccctgtggagtggcagagcaagaaccccttcatccacctggatgatgactgtgtgacagagctgtctgtgcaccacaggaacaaccggcagaccatggaggacctgatcagcctgtggcagtatgaccacctgacagccacctacctgctgctgctggccaagaaggcccggggcaagcctgtgcggctgcggctgagcagcttcagctgtggccaggccagcgccacccccttcacagacatcaagagcaacaactggagcctggaggatgtgacagccagtgacaagaactacgtggccggcctgattgattatgactggtgtgaagatgacctgagcactggagctgccacccccaggaccagccagttcaccaagtactggacagagagcaatggagtggagagcaagagcctgaccccagccctgtgcaggaccccagccaacaagctgaagaacaaggaaaatgtgtacacccccaagtctgctgtgaagaatgaggagtacttcatgtttcctgagcccaagacccctgtgaacaagaaccagcacaagcgggagatcctgaccacccccaaccgctacaccacccccagcaaggccaggaaccagtgcctgaaggagacccccatcaagatccctgtgaacagcactggaacagacaagctgatgactggagtcatcagccctgagcggcgctgccgctctgtggagctggacctgaaccaggcccacatggaggagacccccaagaggaagggggccaaggtgtttggcagcctggagcggggcctggacaaggtgatcaccgtgctgaccaggagcaagaggaaaggaagtgccagagatggcccccggcggctgaagctgcactacaacgtgaccaccacccggctggtgaacccagaccagctgctgaatgagatcatgagcatcctgcccaagaagcacgtggactttgtgcagaagggctacaccctgaagtgccagacccagagcgactttgggaaggtgaccatgcagtttgagctggaggtgtgccagctgcagaagccagatgtggtgggcatccggcggcagaggctgaagggagatgcctgggtgtacaagaggctggtggaggacatcctgagcagctgcaaggtgtag

SEQ ID NO: 91217 - DNA, 2271 bp, Artificial Sequence
  derived and/or modified sequence
aacccggcgatcgaaaagattcttaggaacgccgtaccagccgcgtctctcaggacagcaggcccctgtccttctgtcgggcgccgctcagccgtgccctccgcccctcaggttctttttctaattccaaataaacttgcaagaggactatgaaagattatgatgaacttctcaaatattatgaattacatgaaactattgggacaggtggctttgcaaaggtcaaacttgcctgccatatccttactggagagatggtagctataaaaatcatggataaaaacacactagggagtgatttgccccggatcaaaacggagattgaggccttgaagaacctgagacatcagcatatatgtcaactctaccatgtgctagagacagccaacaaaatattcatggttcttgaggaaaatttgctgtttgatgaatatcataaattaaagctgattgactttggtctctgtgcaaaacccaagggtaacaaggattaccatctacagacatgctgtgggagtctggcttatgcagcacctgagttaatacaaggcaaatcatatcttggatcagaggcagatgtttggagcatgggcatactgttatatgttcttatgtgtggatttctaccatttgatgatgataatgtaatggctttatacaagaagattatgagaggaaaatatgatgttcccaagtggctctctcccagtagcattctgcttcttcaacaaatgctgcaggtggacccaaagaaacggatttctatgaaaaatctattgaaccatccctggatcatgcaagattacaactatcctgttgagtggcaaagcaagaatccttttattcacctcgatgatgattgcgtaacagaactttctgtacatcacagaaacaacaggcaaacaatggaggatttaatttcactgtggcagtatgatcacctcacggctacctatcttctgcttctagccaagaaggctcggggaaaaccagttcgtttaaggctttcttctttctcctgtggacaagccagtgctaccccattcacagacatcaagtcaaataattggagtctggaagatgtgaccgcaagtgataaaaattatgtggcgggattaatagactatgattggtgtgaagatgatttatcaacaggtgctgctactccccgaacatcacagtttaccaagtactggacagaatcaaatggggtggaatctaaatcattaactccagccttatgcagaacacctgcaaataaattaaagaacaaagaaaatgtatatactcctaagtctgctgtaaagaatgaagagtactttatgtttcctgagccaaagactccagttaataagaaccagcataagagagaaatactcactacgccaaatcgttacactacaccctcaaaagctagaaaccagtgcctgaaagaaactccaattaaaataccagtaaattcaacaggaacagacaagttaatgacaggtgtcattagccctgagaggcggtgccgctcagtggaattggatctcaaccaagcacatatggaggagactccaaaaagaaagggagccaaagtgtttgggagccttgaaagggggttggataaggttatcactgtgctcaccaggagcaaaaggaagggttctgccagagacgggcccagaagactaaagcttcactataacgtgactacaactagattagtgaatccagatcaactgttgaatgaaataatgtctattcttccaaagaagcatgttgactttgtacaaaagggttatacactgaagtgtcaaacacagtcagattttgggaaagtgacaatgcaatttgaattagaagtgtgccagcttcaaaaacccgatgtggtgggtatcaggaggcagcggcttaagggcgatgcctgggtttacaaaagattagtggaagacatcctatctagctgcaaggtataattgatggattcttccatcctgccggatgagtgtgggtgtgatacagcctacataaagactgttatgatcgctttgattttaaagttcattggaactaccaacttgtttctaaagagctatcttaagaccaatatctctttgtttttaaacaaaagatattattttgtgtatgaatctaaatcaagcccatctgtcattatgttactgtcttttttaatcatgtggttttgtatattaataattgttgactttcttagattcacttccatatgtgaatgtaagctcttaactatgtctctttgtaatgtgt

SEQ ID NO: 91218 - DNA, 1812 bp, Artificial Sequence
  derived and/or modified sequence
atgaaggactacgacgagctgctgaagtactacgagctgcacgagacaataggcacaggcggctttgctaaggtcaagctggcgtgccacatcctcactggcgaaatggtggccattaaaattatggacaagaacacccttggttccgaccttccacggattaagacagaaatcgaggccctgaagaacctgagacaccagcatatttgccagttgtatcacgtcctcgaaactgccaataagatctttatggtgttagaagagaaccttctgtttgatgagtatcacaagctgaagctgattgacttcggactgtgcgccaagcccaaagggaacaaggactaccaccttcagacctgctgtggttcgctggcgtacgccgctcccgaattgatccaaggaaagtcatacctcggttccgaggccgatgtttggagcatgggtatcctcttgtacgtcctgatgtgcgggtttctgccatttgatgatgacaatgtaatggccctgtacaagaagattatgcgcgggaaatacgatgttcccaagtggttatcgccgtcatcgatcctcctcctccagcagatgctccaggttgatccgaaaaagagaatctccatgaaaaacttgctgaatcatccgtggataatgcaagactacaactatcctgtggaatggcaatctaagaacccatttatccacctggatgacgactgcgtaacagagcttagtgtgcaccaccgtaacaacagacagacaatggaggacctcatttcattatggcagtatgatcacctgacagctacatacttattgctgttggctaaaaaagcaagggggaaacccgtgcgcctgaggttgagttcgttttcctgcggccaggcaagtgctactccgttcactgatatcaagtcgaataattggtcactggaagatgtaacagctagtgataagaactatgtggccggcttgattgactatgactggtgtgaagatgatctatcaacaggcgctgccaccccccgaacctcccaattcactaagtactggaccgagtctaatggagttgagagtaaaagccttacacccgccctgtgccggactcccgcaaataagttaaagaataaagaaaatgtctacacccccaagtcagcagttaaaaacgaggaatattttatgtttcctgaacctaagactccggtcaacaaaaatcagcataagagagagattctgacaacccctaacaggtacactaccccttctaaagcaagaaatcaatgcctgaaggaaacccccataaagattccggtaaacagcactggcacagacaagctgatgactggtgtgatctcaccggaacggcggtgtcgctctgtggagctagatctgaatcaggcccatatggaggagactcccaagcgaaagggagccaaggtgttcggctcgctggagaggggccttgacaaggtcatcactgtgctgacccgcagcaagagaaagggcagcgctagagatggacccagacggctgaagttgcactacaatgtcacaaccaccagattggtgaatccagaccagcttcttaatgagattatgtccatcttgcccaagaaacacgttgacttcgttcaaaaaggctacactcttaagtgccagacccagagtgattttggaaaggtgacgatgcagtttgaattagaggtttgccagttacagaagcctgacgtcgtgggcatccgcagacaaaggctcaagggagacgcctgggtgtataaacgcctagtcgaagatattctttctagttgcaaagtgtag

SEQ ID NO: 91219 - DNA, 1812 bp, Artificial Sequence
  derived and/or modified sequence
atgaaggactacgatgagctgctgaagtactacgagctgcacgaaacaattggcaccggcggattcgctaaggtcaagcttgcgtgtcatatccttacgggggagatggtggccatcaagattatggataaaaacacgctgggctctgaccttcctaggataaaaaccgaaatcgaggcactaaagaatctaaggcatcagcacatctgccagctgtatcacgtcttggaaaccgccaataaaattttcatggtgcttgaagaaaacctgttgttcgacgagtatcacaaattgaaactgatagatttcggcctgtgtgcgaagcccaaggggaacaaggattatcatctgcaaacctgttgtggctctctggcctatgccgctcctgaattgatccagggtaagtcatatctgggctcagaggccgacgtctggtctatgggcatcctcttgtatgttctgatgtgtggatttctgcccttcgatgatgataatgtcatggctctgtacaagaagataatgcgaggaaaatatgatgtcccgaaatggctatcaccctcctccatcttattgcttcaacaaatgctgcaggtggatccaaaaaagagaatttctatgaaaaatttactgaaccacccctggataatgcaagattacaattaccccgtagaatggcagtcaaagaacccattcatacatctggacgatgattgtgtcactgagttgagcgtgcaccacagaaataacaggcagaccatggaagatctgattagcctgtggcagtacgaccatcttactgcaacttacctgctgctgctggcaaagaaggccagagggaaacccgtgaggcttagactgagtagtttttcctgtggacaggcctcggcaacgccttttaccgatattaagagcaacaactggtctctcgaggacgtgacagcgtcagacaagaactatgtggcaggtttgatagactatgattggtgcgaggatgatctgagtacaggcgctgctacacccaggacatctcaatttaccaagtactggactgaatctaacggggtggagagtaaaagcctgacacccgctttgtgccgtactcctgccaataagctgaaaaacaaggaaaatgtctacacgccaaagagcgccgtgaaaaatgaagaatacttcatgtttcccgaacctaaaacacctgttaacaagaatcagcacaagagagaaattctgactactccaaaccgctatacaacgccatcaaaggcccgtaatcagtgcctcaaagaaacccccatcaagattcctgtcaactcaacgggtactgacaagcttatgacgggcgtgattagtcccgaacgacgatgccgcagcgtcgagttggaccttaatcaggcccacatggaggagaccccgaagaggaaaggcgcaaaggtcttcggttctttggaacggggattggacaaagttataactgtgttgacccggagtaagcgcaagggaagcgcaagggatggccctaggaggctcaaactccactacaatgtaaccaccacacgccttgtgaatcctgaccagctgctgaatgagattatgagcatcttgcctaaaaagcacgtggatttcgtgcaaaagggttacacactgaaatgccagacacagagcgactttggaaaagtcaccatgcagttcgagttggaagtttgccagctgcagaagccggacgtagttggaatccgacgccagcgactcaagggtgatgcatgggtctacaagcgtctggtggaggacatcctctcaagctgtaaagtgtag

SEQ ID NO: 91220 - DNA, 1812 bp, Artificial Sequence
  derived and/or modified sequence
atgaaggactacgacgagctgctgaagtactacgagctgcacgagaccatcggcaccggcggcttcgccaaggtgaagctggcctgccacatcctgaccggcgagatggtggccatcaagatcatggacaagaacaccctgggcagcgacctgcccagaatcaagaccgagatcgaggccctgaagaacctgagacaccagcacatctgccagctgtaccacgtgctggagaccgccaacaagatcttcatggtgctggaggagaacctgctgttcgacgagtaccacaagctgaagctgatcgacttcggcctgtgcgccaagcccaagggcaacaaggactaccacctgcagacctgctgcggcagcctggcctacgccgcccccgagctgatccagggcaagagctacctgggcagcgaggccgacgtgtggagcatgggcatcctgctgtacgtgctgatgtgcggcttcctgcccttcgacgacgacaacgtgatggccctgtacaagaagatcatgagaggcaagtacgacgtgcccaagtggctgagccccagcagcatcctgctgctgcagcagatgctgcaggtggaccccaagaagagaatcagcatgaagaacctgctgaaccacccctggatcatgcaggactacaactaccccgtggagtggcagagcaagaaccccttcatccacctggacgacgactgcgtgaccgagctgagcgtgcaccacagaaacaacagacagaccatggaggacctgatcagcctgtggcagtacgaccacctgaccgccacctacctgctgctgctggccaagaaggccagaggcaagcccgtgagactgagactgagcagcttcagctgcggccaggccagcgccacccccttcaccgacatcaagagcaacaactggagcctggaggacgtgaccgccagcgacaagaactacgtggccggcctgatcgactacgactggtgcgaggacgacctgagcaccggcgccgccacccccagaaccagccagttcaccaagtactggaccgagagcaacggcgtggagagcaagagcctgacccccgccctgtgcagaacccccgccaacaagctgaagaacaaggagaacgtgtacacccccaagagcgccgtgaagaacgaggagtacttcatgttccccgagcccaagacccccgtgaacaagaaccagcacaagagagagatcctgaccacccccaacagatacaccacccccagcaaggccagaaaccagtgcctgaaggagacccccatcaagatccccgtgaacagcaccggcaccgacaagctgatgaccggcgtgatcagccccgagagaagatgcagaagcgtggagctggacctgaaccaggcccacatggaggagacccccaagagaaagggcgccaaggtgttcggcagcctggagagaggcctggacaaggtgatcaccgtgctgaccagaagcaagagaaagggcagcgccagagacggccccagaagactgaagctgcactacaacgtgaccaccaccagactggtgaaccccgaccagctgctgaacgagatcatgagcatcctgcccaagaagcacgtggacttcgtgcagaagggctacaccctgaagtgccagacccagagcgacttcggcaaggtgaccatgcagttcgagctggaggtgtgccagctgcagaagcccgacgtggtgggcatcagaagacagagactgaagggcgacgcctgggtgtacaagagactggtggaggacatcctgagcagctgcaaggtgtag

SEQ ID NO: 91221 - protein, 580 aa, Artificial Sequence
  derived and/or modified sequence
MKDYDELLKYYELHETIGTGGFAKVKLACHILTGEMVAIKIMDKNTLGSDLPRIKTEIEALKNLRHQHICQLYHVLETANKIFMVLEGNKDYHLQTCCGSLAYAAPELIQGKSYLGSEADVWSMGILLYVLMCGFLPFDDDNVMALYKKIMRGKYDVPKWLSPSSILLLQQMLQVDPKKRISMKNLLNHPWIMQDYNYPVEWQSKNPFIHLDDDCVTELSVHHRNNRQTMEDLISLWQYDHLTATYLLLLAKKARGKPVRLRLSSFSCGQASATPFTDIKSNNWSLEDVTASDKNYVAGLIDYDWCEDDLSTGAATPRTSQFTKYWTESNGVESKSLTPALCRTPANKLKNKENVYTPKSAVKNEEYFMFPEPKTPVNKNQHKREILTTPNRYTTPSKARNQCLKETPIKIPVNSTGTDKLMTGVISPERRCRSVELDLNQAHMEETPKRKGAKVFGSLERGLDKVITVLTRSKRKGSARDGPRRLKLHYNVTTTRLVNPDQLLNEIMSILPKKHVDFVQKGYTLKCQTQSDFGKVTMQFELEVCQLQKPDVVGIRRQRLKGDAWVYKRLVEDILSSCKV

SEQ ID NO: 91222 - DNA, 1743 bp, Artificial Sequence
  derived and/or modified sequence
atgaaggactatgacgagctgctgaaatactacgagcttcacgagaccatcggtacaggcgggttcgccaaagtgaagctggcctgtcacattctgactggcgaaatggttgcaattaagataatggataagaacactcttgggagtgacctgccaaggatcaagactgagatcgaggcactcaagaatctgagacaccagcatatttgtcagctttatcatgtgctcgagacagctaataagattttcatggttctcgaagggaacaaagactatcatttacagacatgctgtgggtcactggcgtacgccgcccccgagctaattcagggtaaatcttacttggggagtgaggcagacgtttggtctatgggcattttgctttatgtgctgatgtgtggcttcctcccttttgatgacgataacgttatggcattgtacaaaaagattatgcgagggaagtacgatgtccccaaatggctgtccccgagctcgatcctccttctgcaacagatgctacaggtcgaccccaagaaaaggatctctatgaagaatctactaaaccatccttggattatgcaggactacaactaccccgtggagtggcaatccaagaatcctttcattcacttggacgatgattgtgtcacagagctaagcgtgcatcatcgaaataacagacagacaatggaggacctgatctcactgtggcaatacgatcatctcactgcaacctatctgctgcttttagccaaaaaggctagggggaagcctgtccgtctgcgcctcagtagtttttcttgcggccaagctagcgccactcccttcacggatatcaagtccaacaactggtcccttgaggacgtgaccgcctctgataaaaactacgtcgcgggactgattgactacgattggtgcgaagacgacttgtcaaccggcgccgccaccccacgaacatcacaatttaccaagtactggaccgagagtaatggcgttgagagcaagtctctgaccccagcgctctgtaggactccggcaaataagcttaagaacaaggaaaacgtatacaccccaaaatcagccgtcaagaacgaggagtactttatgtttcctgagccgaagacccctgttaataagaaccaacataagcgcgagatcctaaccacccccaaccgttacaccacaccttcgaaagctaggaatcagtgcctgaaagagacccccatcaaaatccccgtgaacagcaccggaaccgataaattgatgaccggcgtgatttccccagaacgccgttgcaggtctgtggaactagatctgaaccaggcacatatggaggaaacgcctaagcgtaagggagctaaagtttttgggagcctcgagcgcggtcttgacaaagtgattacagtgcttacaaggtccaaacgtaagggaagtgccagggacgggcctaggagactcaaactacattacaacgtcaccactactcggcttgtgaatccagatcagctgctgaacgagatcatgagcattcttcctaagaaacatgtggactttgttcaaaaaggatatactctaaagtgccagacccaatcagatttcgggaaagtgactatgcaatttgagctggaggtgtgccagctccagaagcccgacgttgtgggtatccgccggcaaaggctgaagggcgatgcgtgggtgtacaagcggctggtggaagatattctatcttcatgtaaagtatag

SEQ ID NO: 91223 - DNA, 1743 bp, Artificial Sequence
  derived and/or modified sequence
atgaaggactatgatgagctgctgaagtactatgagctgcacgagaccatcggcactggaggctttgccaaggtgaagctggcctgccacatcctgactggagagatggtggccatcaagatcatggacaagaacaccctgggcagtgacctgccccgcatcaagacagaaattgaggccctgaagaacctgcggcaccagcacatctgccagctgtaccacgtgctggagacagccaacaagatcttcatggtgctggagggcaacaaggactaccacctgcagacctgctgcggcagcctggcctatgctgcccctgagctgatccagggcaagagctacctgggcagcgaggctgatgtgtggagcatgggcatcctgctgtatgtgctgatgtgtggcttcctgccctttgatgatgacaacgtgatggccctgtacaagaagatcatgaggggcaagtatgatgtgcccaagtggctgagccccagcagcatcctgctgctgcagcagatgctgcaggtggaccccaagaagaggatctccatgaagaacctgctgaaccacccctggatcatgcaggactacaactaccctgtggagtggcagagcaagaaccccttcatccacctggatgatgactgtgtgacagagctgtctgtgcaccacaggaacaaccggcagaccatggaggacctgatcagcctgtggcagtatgaccacctgacagccacctacctgctgctgctggccaagaaggcccggggcaagcctgtgcggctgcggctgagcagcttcagctgtggccaggccagcgccacccccttcacagacatcaagagcaacaactggagcctggaggatgtgacagccagtgacaagaactacgtggccggcctgattgattatgactggtgtgaagatgacctgagcactggagctgccacccccaggaccagccagttcaccaagtactggacagagagcaatggagtggagagcaagagcctgaccccagccctgtgcaggaccccagccaacaagctgaagaacaaggaaaatgtgtacacccccaagtctgctgtgaagaatgaggagtacttcatgtttcctgagcccaagacccctgtgaacaagaaccagcacaagcgggagatcctgaccacccccaaccgctacaccacccccagcaaggccaggaaccagtgcctgaaggagacccccatcaagatccctgtgaacagcactggaacagacaagctgatgactggagtcatcagccctgagcggcgctgccgctctgtggagctggacctgaaccaggcccacatggaggagacccccaagaggaaaggagccaaggtgtttggcagcctggagcggggcctggacaaggtgatcaccgtgctgaccaggagcaagaggaagggcagcgccagagatggcccccggcggctgaagctgcactacaacgtgaccaccacccggctggtgaacccagaccagctgctgaatgagatcatgagcatcctgcccaagaagcacgtggactttgtgcagaagggctacaccctgaagtgccagacccagagcgactttgggaaggtgaccatgcagtttgagctggaggtgtgccagctgcagaagccagatgtggtgggcatccggcggcagaggctgaagggagatgcctgggtgtacaagaggctggtggaggacatcctgagcagctgcaaggtgtag

SEQ ID NO: 91224 - DNA, 2236 bp, Artificial Sequence
  derived and/or modified sequence
aacccggcgatcgaaaagattcttaggaacgccgtaccagccgcgtctctcaggacagcaggcccctgtccttctgtcgggcgccgctcagccgtgccctccgcccctcaggttctttttctaattccaaataaacttgcaagaggactatgaaagattatgatgaacttctcaaatattatgaattacatgaaactattgggacaggtggctttgcaaaggtcaaacttgcctgccatatccttactggagagatggtagctataaaaatcatggataaaaacacactagggagtgatttgccccggatcaaaacggagattgaggccttgaagaacctgagacatcagcatatatgtcaactctaccatgtgctagagacagccaacaaaatattcatggttcttgagggtaacaaggattaccatctacagacatgctgtgggagtctggcttatgcagcacctgagttaatacaaggcaaatcatatcttggatcagaggcagatgtttggagcatgggcatactgttatatgttcttatgtgtggatttctaccatttgatgatgataatgtaatggctttatacaagaagattatgagaggaaaatatgatgttcccaagtggctctctcccagtagcattctgcttcttcaacaaatgctgcaggtggacccaaagaaacggatttctatgaaaaatctattgaaccatccctggatcatgcaagattacaactatcctgttgagtggcaaagcaagaatccttttattcacctcgatgatgattgcgtaacagaactttctgtacatcacagaaacaacaggcaaacaatggaggatttaatttcactgtggcagtatgatcacctcacggctacctatcttctgcttctagccaagaaggctcggggaaaaccagttcgtttaaggctttcttctttctcctgtggacaagccagtgctaccccattcacagacatcaagtcaaataattggagtctggaagatgtgaccgcaagtgataaaaattatgtggcgggattaatagactatgattggtgtgaagatgatttatcaacaggtgctgctactccccgaacatcacagtttaccaagtactggacagaatcaaatggggtggaatctaaatcattaactccagccttatgcagaacacctgcaaataaattaaagaacaaagaaaatgtatatactcctaagtctgctgtaaagaatgaagagtactttatgtttcctgagccaaagactccagttaataagaaccagcataagagagaaatactcactacgccaaatcgttacactacaccctcaaaagctagaaaccagtgcctgaaagaaactccaattaaaataccagtaaattcaacaggaacagacaagttaatgacaggtgtcattagccctgagaggcggtgccgctcagtggaattggatctcaaccaagcacatatggaggagactccaaaaagaaagggagccaaagtgtttgggagccttgaaagggggttggataaggttatcactgtgctcaccaggagcaaaaggaagggttctgccagagacgggcccagaagactaaagcttcactataacgtgactacaactagattagtgaatccagatcaactgttgaatgaaataatgtctattcttccaaagaagcatgttgactttgtacaaaagggttatacactgaagtgtcaaacacagtcagattttgggaaagtgacaatgcaatttgaattagaagtgtgccagcttcaaaaacccgatgtggtgggtatcaggaggcagcggcttaagggcgatgcctgggtttacaaaagattagtggaagacatcctatctagctgcaaggtataattgatggattcttccatcctgccggatgagtgtgggtgtgatacagcctacataaagactgttatgatcgctttgattttaaagttcattggaactaccaacttgtttctaaagagctatcttaagaccaatatctctttgtttttaaacaaaagatattattttgtgtatgaatctaaatcaagcccatctgtcattatgttactgtcttttttaatcatgtggttttgtatattaataattgttgactttcttagattcacttccatatgtgaatgtaagctcttaactatgtctctttgtaatgtgtaatttctttctgaaataaaaccatttgtgaatat

SEQ ID NO: 91225 - DNA, 1743 bp, Artificial Sequence
  derived and/or modified sequence
atgaaggactacgacgagctgctgaagtactacgagctgcacgagacaatagggaccgggggattcgccaaagtgaagttagcctgccacatcctaaccggggagatggtggccattaaaatcatggacaagaacacattgggctccgatctacccaggattaaaaccgagatagaagccttgaagaacttgcgtcaccagcatatctgccagctctaccacgtcttagaaacagcgaataagatattcatggtccttgagggtaataaagattatcacctgcagacttgctgcgggagcctagcctacgcagcgccagagcttattcaggggaaatcatacttgggctctgaagctgacgtgtggagcatgggaattctgctatacgttctaatgtgtgggttcctacccttcgacgatgacaatgtgatggccctttacaagaagatcatgagaggcaagtacgatgttcctaagtggttatctcccagctcgatcttgctcctccaacagatgctgcaggtcgacccaaaaaaacgcatctctatgaagaatctgctcaatcatccttggattatgcaggactacaactaccccgtggaatggcaatccaagaacccatttatccatttggacgatgactgtgtcactgagctgtctgttcaccacagaaacaatcggcagaccatggaggatctcattagcttatggcagtacgaccacctgaccgcaacatacctgcttttactagccaagaaggccaggggcaagcccgtgagactgcggctgagcagcttttcctgcgggcaagcctccgcaacccccttcactgatatcaaatccaacaactggagcctcgaagacgtgaccgcctcagacaagaattatgtggctgggctgatcgattacgattggtgcgaggatgacctgtccaccggagcagccacccctaggacgtctcagttcacaaagtattggaccgaatccaacggagtcgagtctaaatccctcacacctgccctttgtcggaccccagcaaataagctcaagaacaaagaaaacgtgtacacacccaaaagcgccgttaaaaacgaggagtatttcatgttccctgaacccaaaacacctgtcaataagaaccagcataagcgtgagatcctcactactccgaatagatacactactccttccaaagcgcggaatcaatgcctaaaggaaacccctattaagatcccagtcaattctactggcaccgacaagttaatgacaggggtcatctcccccgaacgacggtgcagatccgttgagctcgatctgaaccaggcacacatggaagagacccctaagaggaagggcgccaaggtatttggcagcttggagcggggcctcgataaagttataaccgtgctcactagatcgaagcgcaaaggctccgcccgagatgggcctcgtagactcaagctgcactacaacgttacgacaacccggctcgtgaaccctgaccaactccttaacgaaataatgagcatcctaccgaaaaaacatgtggattttgtacagaaagggtacaccctgaaatgtcaaacacaatctgatttcggaaaagtcaccatgcagtttgagctggaagtgtgtcagttacagaagcccgatgtcgtcggcattcgtagacagcgcctgaaaggtgatgcctgggtttataagcgcctggtggaagatatcctgtcaagttgtaaagtctag

SEQ ID NO: 91226 - DNA, 1743 bp, Artificial Sequence
  derived and/or modified sequence
atgaaagattacgatgagcttctaaagtattatgagctgcatgaaaccatcgggacaggaggtttcgccaaagtgaaacttgcatgccatatactgacgggtgaaatggtggccatcaagatcatggataagaatactctgggctctgaccttccccgaatcaagacagagattgaagccttgaaaaacctgcgacatcaacatatctgtcagctttaccacgttctggaaactgccaacaagatttttatggtccttgaaggcaacaaggattatcatttacagacctgttgcggatctcttgcatacgctgctcctgagctgatacaggggaagagttacctggggtctgaggctgatgtttggtcaatgggcattttactttacgttctcatgtgcggttttctcccatttgatgacgataacgttatggccctgtacaaaaagataatgcggggtaagtacgatgtccctaaatggctcagcccgagtagcatcctgctgcttcaacagatgctacaggttgacccaaaaaagagaatctctatgaagaacttgctgaatcacccttggattatgcaggattataattaccccgtagaatggcagagcaagaatcctttcatccacctggatgacgattgtgttactgagctttccgttcaccataggaataataggcaaacgatggaggatttgatctctctatggcagtatgatcacctaaccgccacataccttctgctgctcgcgaaaaaggctaggggtaaacccgtcagactccgtctatcatccttctcctgcggccaggcttcagccacgcctttcacagatattaagagcaacaattggagtctggaagatgtgaccgcctctgataagaactatgtggccggactgattgactatgactggtgtgaagacgacctgagtacgggtgccgcaacccctcgaactagccaatttacaaagtattggaccgagtccaacggcgtcgagtcaaaaagtttaacccccgctctctgtcgcacccccgctaacaaactgaagaataaagagaacgtgtacacgccgaagtctgcggttaagaacgaggaatactttatgtttcccgagcctaagacaccggtgaacaagaatcagcataagagagagatcctcacgacgccaaaccgctacaccacaccgtcaaaagcgagaaaccagtgtcttaaggaaacccccattaaaattcccgtgaattccactgggaccgataaactcatgacgggcgttataagtccagaacggcgatgtcgatctgttgagctagaccttaaccaggcacacatggaggaaacacctaaacgaaaaggagccaaggttttcggctcactcgaaaggggcctggacaaagtaataaccgttctgacgaggagcaaacgcaagggatccgctcgggatggaccacgacggcttaaactccactacaacgtaacaacaacccggctagtcaaccctgatcagttgttgaacgaaataatgagcattctccctaaaaagcacgtggacttcgttcagaagggctacacacttaagtgtcaaacacagagcgatttcggaaaggtgaccatgcagtttgagctggaagtgtgccagctccagaaacctgatgtcgttgggatccggaggcaaaggctgaagggtgacgcgtgggtgtataagcgcctcgtagaagacatattgtcctcttgcaaggtgtag

SEQ ID NO: 91227 - DNA, 1743 bp, Artificial Sequence
  derived and/or modified sequence
atgaaggactacgacgagctgctgaagtactacgagctgcacgagaccatcggcaccggcggcttcgccaaggtgaagctggcctgccacatcctgaccggcgagatggtggccatcaagatcatggacaagaacaccctgggcagcgacctgcccagaatcaagaccgagatcgaggccctgaagaacctgagacaccagcacatctgccagctgtaccacgtgctggagaccgccaacaagatcttcatggtgctggagggcaacaaggactaccacctgcagacctgctgcggcagcctggcctacgccgcccccgagctgatccagggcaagagctacctgggcagcgaggccgacgtgtggagcatgggcatcctgctgtacgtgctgatgtgcggcttcctgcccttcgacgacgacaacgtgatggccctgtacaagaagatcatgagaggcaagtacgacgtgcccaagtggctgagccccagcagcatcctgctgctgcagcagatgctgcaggtggaccccaagaagagaatcagcatgaagaacctgctgaaccacccctggatcatgcaggactacaactaccccgtggagtggcagagcaagaaccccttcatccacctggacgacgactgcgtgaccgagctgagcgtgcaccacagaaacaacagacagaccatggaggacctgatcagcctgtggcagtacgaccacctgaccgccacctacctgctgctgctggccaagaaggccagaggcaagcccgtgagactgagactgagcagcttcagctgcggccaggccagcgccacccccttcaccgacatcaagagcaacaactggagcctggaggacgtgaccgccagcgacaagaactacgtggccggcctgatcgactacgactggtgcgaggacgacctgagcaccggcgccgccacccccagaaccagccagttcaccaagtactggaccgagagcaacggcgtggagagcaagagcctgacccccgccctgtgcagaacccccgccaacaagctgaagaacaaggagaacgtgtacacccccaagagcgccgtgaagaacgaggagtacttcatgttccccgagcccaagacccccgtgaacaagaaccagcacaagagagagatcctgaccacccccaacagatacaccacccccagcaaggccagaaaccagtgcctgaaggagacccccatcaagatccccgtgaacagcaccggcaccgacaagctgatgaccggcgtgatcagccccgagagaagatgcagaagcgtggagctggacctgaaccaggcccacatggaggagacccccaagagaaagggcgccaaggtgttcggcagcctggagagaggcctggacaaggtgatcaccgtgctgaccagaagcaagagaaagggcagcgccagagacggccccagaagactgaagctgcactacaacgtgaccaccaccagactggtgaaccccgaccagctgctgaacgagatcatgagcatcctgcccaagaagcacgtggacttcgtgcagaagggctacaccctgaagtgccagacccagagcgacttcggcaaggtgaccatgcagttcgagctggaggtgtgccagctgcagaagcccgacgtggtgggcatcagaagacagagactgaagggcgacgcctgggtgtacaagagactggtggaggacatcctgagcagctgcaaggtgtag

SEQ ID NO: 91228 - protein, 580 aa, Artificial Sequence
  derived and/or modified sequence
MMNFSNIMNYMKLLGQYCPGGELFDYIISQDRLSEEETRVVFRQIVSAVAYVHSQGYAHRDLKPENLLFDEYHKLKLIDFGLCAKPKGNKDYHLQTCCGSLAYAAPELIQGKSYLGSEADVWSMGILLYVLMCGFLPFDDDNVMALYKKIMRGKYDVPKWLSPSSILLLQQMLQVDPKKRISMKNLLNHPWIMQDYNYPVEWQSKNPFIHLDDDCVTELSVHHRNNRQTMEDLISLWQYDHLTATYLLLLAKKARGKPVRLRLSSFSCGQASATPFTDIKSNNWSLEDVTASDKNYVAGLIDYDWCEDDLSTGAATPRTSQFTKYWTESNGVESKSLTPALCRTPANKLKNKENVYTPKSAVKNEEYFMFPEPKTPVNKNQHKREILTTPNRYTTPSKARNQCLKETPIKIPVNSTGTDKLMTGVISPERRCRSVELDLNQAHMEETPKRKGAKVFGSLERGLDKVITVLTRSKRKGSARDGPRRLKLHYNVTTTRLVNPDQLLNEIMSILPKKHVDFVQKGYTLKCQTQSDFGKVTMQFELEVCQLQKPDVVGIRRQRLKGDAWVYKRLVEDILSSCKV

SEQ ID NO: 91229 - DNA, 1743 bp, Artificial Sequence
  derived and/or modified sequence
atgatgaacttctccaacattatgaactacatgaagctgttaggacaatattgcccgggaggcgagctgttcgattatatcatttcacaggatagactatcggaggaggagaccagggtcgtattcaggcagatcgtctctgccgttgcttacgtgcactcacagggctacgctcatcgcgacctcaaacccgagaacctgctgttcgacgaataccataaactgaagctgattgacttcgggctatgtgccaagcccaagggaaataaggactaccacctgcagacttgctgcggctccctcgcctatgccgcccccgagctgatacaagggaaatcctatctcggttcagaagccgatgtgtggagcatgggtattcttctatacgtgctaatgtgcggttttctgccattcgatgatgacaacgtaatggcgttatacaagaagatcatgaggggcaaatacgatgtccccaagtggttatctccatcgtccattttgctattacaacagatgctgcaggtcgatcccaagaaacggatctcgatgaagaaccttttgaaccacccctggatcatgcaggactataattacccggtggaatggcagtctaagaacccctttattcacctcgacgacgactgtgtgaccgaattgtccgtacatcatagaaataacaggcagaccatggaggacctcattagtctgtggcagtacgaccaccttaccgcaacctatcttctgttactcgccaagaaggctaggggcaagcccgtccgcttacgcctctcttctttcagctgtgggcaggcctctgccactccctttaccgacatcaagagcaataattggagtctagaagatgtgacagcctcagacaagaattatgtcgcggggctcattgactacgattggtgcgaagacgacctgtcaacaggggcagccacccccagaaccagccagtttacaaaatactggactgagagtaacggagtggagtccaagagtctcacccctgcactgtgtcgcactcctgctaataaactaaagaacaaggaaaatgtatacactcctaaaagtgcagtcaagaatgaggagtactttatgtttcctgagccaaagactcctgtaaacaagaaccagcataaaagagagatacttacgaccccaaataggtataccaccccaagcaaggctcgcaaccagtgcctcaaagagaccccaataaaaattcccgtcaattccaccggcaccgacaaattgatgaccggtgtgatttcaccagagcggcgatgccgcagtgtggaactcgatctaaaccaggcccacatggaagaaactcccaaaagaaaaggggccaaagtgttcgggtctctggaaagaggactcgacaaagtcattacagtccttacacgcagcaagagaaaggggtctgcaagggacggtccacggaggctgaagttacactacaatgtgaccacaactcgactggtgaacccagatcagctcctgaatgagattatgagtatcctgccaaaaaaacacgtcgatttcgtgcaaaagggatacacactcaaatgtcaaacccagtcggacttcggcaaagtcactatgcagtttgaacttgaagtatgccagcttcaaaagcccgatgtggtggggattagacgccagcgcttgaaaggagacgcctgggtctacaagcgcctcgttgaagatatcctgagcagctgcaaggtgtag

SEQ ID NO: 91230 - DNA, 1743 bp, Artificial Sequence
  derived and/or modified sequence
atgatgaacttcagcaacatcatgaactacatgaagctgctgggccagtactgccctggaggagagctgtttgactacatcatcagccaggaccggctgtctgaggaggagaccagggtggtgttccggcagatcgtgtctgctgtggcctacgtgcacagccagggctacgcccaccgggacctgaagccagagaacctgctgtttgatgagtaccacaagctgaagctgattgactttggcctgtgtgccaagcccaagggcaacaaggactaccacctgcagacctgctgcggcagcctggcctatgctgcccctgagctgatccagggcaagagctacctgggcagcgaggctgatgtgtggagcatgggcatcctgctgtatgtgctgatgtgtggcttcctgccctttgatgatgacaacgtgatggccctgtacaagaagatcatgaggggcaagtatgatgtgcccaagtggctgagccccagcagcatcctgctgctgcagcagatgctgcaggtggaccccaagaagaggatctccatgaagaacctgctgaaccacccctggatcatgcaggactacaactaccctgtggagtggcagagcaagaaccccttcatccacctggatgatgactgtgtgacagagctgtctgtgcaccacaggaacaaccggcagaccatggaggacctgatcagcctgtggcagtatgaccacctgacagccacctacctgctgctgctggccaagaaggcccggggcaagcctgtgcggctgcggctgagcagcttcagctgtggccaggccagcgccacccccttcacagacatcaagagcaacaactggagcctggaggatgtgacagccagtgacaagaactacgtggccggcctgattgattatgactggtgtgaagatgacctgagcactggagctgccacccccaggaccagccagttcaccaagtactggacagagagcaatggagtggagagcaagagcctgaccccagccctgtgcaggaccccagccaacaagctgaagaacaaggaaaatgtgtacacccccaagtctgctgtgaagaatgaggagtacttcatgtttcctgagcccaagacccctgtgaacaagaaccagcacaagcgggagatcctgaccacccccaaccgctacaccacccccagcaaggccaggaaccagtgcctgaaggagacccccatcaagatccctgtgaacagcactggaacagacaagctgatgactggagtcatcagccctgagcggcgctgccgctctgtggagctggacctgaaccaggcccacatggaggagacccccaagaggaaaggagccaaggtgtttggcagcctggagcggggcctggacaaggtgatcaccgtgctgaccaggagcaagaggaagggcagcgccagagatggcccccggcggctgaagctgcactacaacgtgaccaccacccggctggtgaacccagaccagctgctgaatgagatcatgagcatcctgcccaagaagcacgtggactttgtgcagaagggctacaccctgaagtgccagacccagagcgactttgggaaggtgaccatgcagtttgagctggaggtgtgccagctgcagaagccagatgtggtgggcatccggcggcagaggctgaagggagatgcctgggtgtacaagaggctggtggaggacatcctgagcagctgcaaggtgtag

SEQ ID NO: 91231 - DNA, 2232 bp, Artificial Sequence
  derived and/or modified sequence
gaaaagattcttaggaacgccgtaccagccgcgtctctcaggacagcaggcccctgtccttctgtcgggcgccgctcagccgtgccctccgcccctcaggttctttttctaattccaaataaacttgcaagaggactatgaaagattatgatgaacttctcaaatattatgaattacatgaaactattgggacagtactgccctggaggagagctgtttgactatataatttcccaggatcgcctgtcagaagaggagacccgggttgtcttccgtcagatagtatctgctgttgcttatgtgcacagccagggctatgctcacagggacctcaagccagaaaatttgctgtttgatgaatatcataaattaaagctgattgactttggtctctgtgcaaaacccaagggtaacaaggattaccatctacagacatgctgtgggagtctggcttatgcagcacctgagttaatacaaggcaaatcatatcttggatcagaggcagatgtttggagcatgggcatactgttatatgttcttatgtgtggatttctaccatttgatgatgataatgtaatggctttatacaagaagattatgagaggaaaatatgatgttcccaagtggctctctcccagtagcattctgcttcttcaacaaatgctgcaggtggacccaaagaaacggatttctatgaaaaatctattgaaccatccctggatcatgcaagattacaactatcctgttgagtggcaaagcaagaatccttttattcacctcgatgatgattgcgtaacagaactttctgtacatcacagaaacaacaggcaaacaatggaggatttaatttcactgtggcagtatgatcacctcacggctacctatcttctgcttctagccaagaaggctcggggaaaaccagttcgtttaaggctttcttctttctcctgtggacaagccagtgctaccccattcacagacatcaagtcaaataattggagtctggaagatgtgaccgcaagtgataaaaattatgtggcgggattaatagactatgattggtgtgaagatgatttatcaacaggtgctgctactccccgaacatcacagtttaccaagtactggacagaatcaaatggggtggaatctaaatcattaactccagccttatgcagaacacctgcaaataaattaaagaacaaagaaaatgtatatactcctaagtctgctgtaaagaatgaagagtactttatgtttcctgagccaaagactccagttaataagaaccagcataagagagaaatactcactacgccaaatcgttacactacaccctcaaaagctagaaaccagtgcctgaaagaaactccaattaaaataccagtaaattcaacaggaacagacaagttaatgacaggtgtcattagccctgagaggcggtgccgctcagtggaattggatctcaaccaagcacatatggaggagactccaaaaagaaagggagccaaagtgtttgggagccttgaaagggggttggataaggttatcactgtgctcaccaggagcaaaaggaagggttctgccagagacgggcccagaagactaaagcttcactataacgtgactacaactagattagtgaatccagatcaactgttgaatgaaataatgtctattcttccaaagaagcatgttgactttgtacaaaagggttatacactgaagtgtcaaacacagtcagattttgggaaagtgacaatgcaatttgaattagaagtgtgccagcttcaaaaacccgatgtggtgggtatcaggaggcagcggcttaagggcgatgcctgggtttacaaaagattagtggaagacatcctatctagctgcaaggtataattgatggattcttccatcctgccggatgagtgtgggtgtgatacagcctacataaagactgttatgatcgctttgattttaaagttcattggaactaccaacttgtttctaaagagctatcttaagaccaatatctctttgtttttaaacaaaagatattattttgtgtatgaatctaaatcaagcccatctgtcattatgttactgtcttttttaatcatgtggttttgtatattaataattgttgactttcttagattcacttccatatgtgaatgtaagctcttaactatgtctctttgtaatgtgtaatttctttctgaaataaaaccatttgtgaat

SEQ ID NO: 91232 - DNA, 1743 bp, Artificial Sequence
  derived and/or modified sequence
atgatgaacttcagcaacatcatgaactacatgaagctgctgggccaatactgcccaggaggcgaactgttcgactacatcatctcccaggaccgcttgagcgaggaggaaactcgtgtggttttcagacagattgtctctgctgtggcttacgtccatagtcagggctacgcacatagagacctcaagccagagaacctgttattcgacgaatatcataagctgaagctgatagacttcggactgtgtgctaaacccaaaggcaacaaggactaccacttacaaacttgttgtgggagtctggcatacgctgcacctgagttgattcaaggtaagtcctacctggggtccgaagctgatgtgtggagcatgggtattcttctctacgtgctcatgtgtggcttcctgccatttgatgacgataacgtgatggctctgtataaaaaaataatgcgaggtaaatatgatgttcccaaatggctgtcaccctcaagcattctgctcctacagcagatgctgcaagtagaccctaagaagaggatcagtatgaagaatttgctgaaccatccctggataatgcaagactataactatcccgttgagtggcagtccaagaatccctttatccaccttgacgatgattgcgtgacggagttaagtgtccatcatagaaacaataggcagacaatggaagacttgatatcattatggcagtacgaccatttgacagcgacctatcttcttttgctggctaaaaaagctcgcgggaagcctgtgcgattgcgcctgtctagtttttcttgcggccaggcgtccgctactcccttcaccgatatcaaatccaataattggtccctggaagacgtaacagctagcgataaaaactacgtggccggactgattgactacgattggtgcgaggatgatctttccaccggtgcggcaacaccccgcactagtcagtttactaaatactggactgaaagtaacggagtggagagcaaaagtctcacaccagccttgtgtcgaacccccgcaaacaagttgaaaaataaagagaacgtctatacccctaagtctgctgtgaagaatgaggaatacttcatgttccctgaaccaaaaactcctgtgaataagaatcaacacaagcgggaaatccttaccaccccaaatagatacactaccccaagcaaggcgaggaaccagtgcctaaaagagactcctattaagattcctgttaactctaccgggaccgacaaactaatgactggggtgatctcacccgagcgacgttgtcgcagcgtggaactggatcttaaccaggctcacatggaggaaacaccaaaacggaagggcgctaaggtgttcggttccctcgagcgagggctagataaggtgattaccgtactgactaggagcaagagaaaggggtccgctcgggacggtccaagacggctgaagcttcattataatgttactactacaagattagtcaacccagatcaactgctgaacgaaataatgtctatactcccaaaaaaacacgtagattttgtgcagaagggctacacactgaagtgccagacccagtcggatttcggaaaggttacgatgcaattcgaactcgaggtctgccagctccagaagccagatgtggttggaatacgccggcagcggttaaaaggggatgcctgggtttacaagcggctcgtggaagacatcttgtcttcatgcaaggtgtag

SEQ ID NO: 91233 - DNA, 1743 bp, Artificial Sequence
  derived and/or modified sequence
atgatgaatttctcaaatatcatgaactatatgaaacttttaggccaatattgcccaggtggtgagctgtttgactacattataagtcaggatcgtctgagcgaagaggaaacaagggtagtcttccggcagatagtttcagcagtggcctacgtacactcacagggctatgcacatagggatctaaaaccagaaaacctcctgttcgatgagtatcacaagctaaaactgatcgactttggcctgtgtgcaaaacctaaagggaacaaggattatcacttgcagacctgttgcggctccctggcttacgcagcccctgagttaatccaggggaagtcctatctgggaagcgaagctgacgtgtggtccatgggcatcctgttatatgttctcatgtgcggattcttaccattcgatgatgacaatgtgatggctctgtataagaagattatgcgcggtaaatatgacgtccctaaatggttgtcaccatccagtatattgctgttgcagcagatgctgcaggtcgaccctaaaaagagaatcagtatgaagaacctactgaatcacccctggatcatgcaggactacaactaccctgtggaatggcagagcaagaaccccttcatacacctcgacgatgattgtgtgactgaacttagtgtccaccaccgcaacaatcgccagaccatggaggacctgatttctctgtggcaatatgaccatctcacagccacatatcttctgctcttggccaagaaagcacgcggtaagcctgtccgcctccggctctcaagctttagttgcgggcaggcctcggccaccccttttactgacatcaagtccaacaactggagccttgaggatgtgactgcatcagataaaaactatgtggctggactcatcgattatgactggtgcgaagatgacctttcaactggggctgccactccaaggactagccagtttacaaagtactggaccgagagcaatggcgtcgaatctaaaagcttgactcctgctttatgccgtacaccagctaacaagctgaagaacaaggagaacgtatatacccctaaatctgccgtgaaaaatgaagagtacttcatgttccccgaaccaaaaaccccggttaataagaaccagcacaagcgggagatcctcacaactcctaatagatacacaacccccagcaaggccaggaatcaatgcctgaaggagacccctatcaagatccccgtgaatagcactggcactgataagctgatgaccggtgtgatatcgccagaaaggcgttgccgcagtgtggaactcgatcttaaccaggctcatatggaagaaacaccaaagcgtaagggcgctaaggtgtttgggtccctggaacggggtcttgacaaagtcattaccgttctgaccagatctaaaagaaagggctctgctagggatggcccacgcaggttgaaattgcattacaacgttacaacgacccgactggttaatccagatcagctcctgaatgagattatgtctatccttccaaagaagcatgttgactttgtgcagaagggatataccctgaaatgccagacccagagcgactttgggaaagtgactatgcagtttgaactggaagtgtgccagcttcagaagcccgatgttgtcggcatcagacgccagagactgaaaggagacgcgtgggtttacaagaggctggtggaagatattcttagctcatgcaaggtgtag

SEQ ID NO: 91234 - DNA, 1743 bp, Artificial Sequence
  derived and/or modified sequence
atgatgaacttcagcaacatcatgaactacatgaagctgctgggccagtactgccccggcggcgagctgttcgactacatcatcagccaggacagactgagcgaggaggagaccagagtggtgttcagacagatcgtgagcgccgtggcctacgtgcacagccagggctacgcccacagagacctgaagcccgagaacctgctgttcgacgagtaccacaagctgaagctgatcgacttcggcctgtgcgccaagcccaagggcaacaaggactaccacctgcagacctgctgcggcagcctggcctacgccgcccccgagctgatccagggcaagagctacctgggcagcgaggccgacgtgtggagcatgggcatcctgctgtacgtgctgatgtgcggcttcctgcccttcgacgacgacaacgtgatggccctgtacaagaagatcatgagaggcaagtacgacgtgcccaagtggctgagccccagcagcatcctgctgctgcagcagatgctgcaggtggaccccaagaagagaatcagcatgaagaacctgctgaaccacccctggatcatgcaggactacaactaccccgtggagtggcagagcaagaaccccttcatccacctggacgacgactgcgtgaccgagctgagcgtgcaccacagaaacaacagacagaccatggaggacctgatcagcctgtggcagtacgaccacctgaccgccacctacctgctgctgctggccaagaaggccagaggcaagcccgtgagactgagactgagcagcttcagctgcggccaggccagcgccacccccttcaccgacatcaagagcaacaactggagcctggaggacgtgaccgccagcgacaagaactacgtggccggcctgatcgactacgactggtgcgaggacgacctgagcaccggcgccgccacccccagaaccagccagttcaccaagtactggaccgagagcaacggcgtggagagcaagagcctgacccccgccctgtgcagaacccccgccaacaagctgaagaacaaggagaacgtgtacacccccaagagcgccgtgaagaacgaggagtacttcatgttccccgagcccaagacccccgtgaacaagaaccagcacaagagagagatcctgaccacccccaacagatacaccacccccagcaaggccagaaaccagtgcctgaaggagacccccatcaagatccccgtgaacagcaccggcaccgacaagctgatgaccggcgtgatcagccccgagagaagatgcagaagcgtggagctggacctgaaccaggcccacatggaggagacccccaagagaaagggcgccaaggtgttcggcagcctggagagaggcctggacaaggtgatcaccgtgctgaccagaagcaagagaaagggcagcgccagagacggccccagaagactgaagctgcactacaacgtgaccaccaccagactggtgaaccccgaccagctgctgaacgagatcatgagcatcctgcccaagaagcacgtggacttcgtgcagaagggctacaccctgaagtgccagacccagagcgacttcggcaaggtgaccatgcagttcgagctggaggtgtgccagctgcagaagcccgacgtggtgggcatcagaagacagagactgaagggcgacgcctgggtgtacaagagactggtggaggacatcctgagcagctgcaaggtgtag

SEQ ID NO: 91235 - DNA, 2125 bp, Artificial Sequence
  derived and/or modified sequence
acaacccggcgatcgaaaagattcttaggaacgccgtaccagccgcgtctctcaggacagcaggcccctgtccttctgtcgggcgccgctcagccgtgccctccgcccctcagagtgatttgccccggatcaaaacggagattgaggccttgaagaacctgagacatcagcatatatgtcaactctaccatgtgctagagacagccaacaaaatattcatggttcttgaggaaaatttgctgtttgatgaatatcataaattaaagctgattgactttggtctctgtgcaaaacccaagggtaacaaggattaccatctacagacatgctgtgggagtctggcttatgcagcacctgagttaatacaaggcaaatcatatcttggatcagaggcagatgtttggagcatgggcatactgttatatgttcttatgtgtggatttctaccatttgatgatgataatgtaatggctttatacaagaagattatgagaggaaaatatgatgttcccaagtggctctctcccagtagcattctgcttcttcaacaaatgctgcaggtggacccaaagaaacggatttctatgaaaaatctattgaaccatccctggatcatgcaagattacaactatcctgttgagtggcaaagcaagaatccttttattcacctcgatgatgattgcgtaacagaactttctgtacatcacagaaacaacaggcaaacaatggaggatttaatttcactgtggcagtatgatcacctcacggctacctatcttctgcttctagccaagaaggctcggggaaaaccagttcgtttaaggctttcttctttctcctgtggacaagccagtgctaccccattcacagacatcaagtcaaataattggagtctggaagatgtgaccgcaagtgataaaaattatgtggcgggattaatagactatgattggtgtgaagatgatttatcaacaggtgctgctactccccgaacatcacagtttaccaagtactggacagaatcaaatggggtggaatctaaatcattaactccagccttatgcagaacacctgcaaataaattaaagaacaaagaaaatgtatatactcctaagtctgctgtaaagaatgaagagtactttatgtttcctgagccaaagactccagttaataagaaccagcataagagagaaatactcactacgccaaatcgttacactacaccctcaaaagctagaaaccagtgcctgaaagaaactccaattaaaataccagtaaattcaacaggaacagacaagttaatgacaggtgtcattagccctgagaggcggtgccgctcagtggaattggatctcaaccaagcacatatggaggagactccaaaaagaaagggagccaaagtgtttgggagccttgaaagggggttggataaggttatcactgtgctcaccaggagcaaaaggaagggttctgccagagacgggcccagaagactaaagcttcactataacgtgactacaactagattagtgaatccagatcaactgttgaatgaaataatgtctattcttccaaagaagcatgttgactttgtacaaaagggttatacactgaagtgtcaaacacagtcagattttgggaaagtgacaatgcaatttgaattagaagtgtgccagcttcaaaaacccgatgtggtgggtatcaggaggcagcggcttaagggcgatgcctgggtttacaaaagattagtggaagacatcctatctagctgcaaggtataattgatggattcttccatcctgccggatgagtgtgggtgtgatacagcctacataaagactgttatgatcgctttgattttaaagttcattggaactaccaacttgtttctaaagagctatcttaagaccaatatctctttgtttttaaacaaaagatattattttgtgtatgaatctaaatcaagcccatctgtcattatgttactgtcttttttaatcatgtggttttgtatattaataattgttgactttcttagattcacttccatatgtgaatgtaagctcttaactatgtctctttgtaatgtgtaatttctttctgaaataaaaccatttgtgaatat

SEQ ID NO: 91236 - DNA, 1563 bp, Artificial Sequence
  derived and/or modified sequence
atggtacttgaagagaacctgctctttgacgagtatcacaagctgaagttgattgattttggactctgtgccaagcctaagggcaacaaggattatcacctccagacttgctgtggctctctggcttacgcggcacctgaactgattcaggggaaaagttatctgggctcagaggcagatgtgtggagcatggggatacttttatatgtcctgatgtgcgggtttcttccattcgacgacgacaatgttatggccctgtacaaaaaaataatgaggggaaaatacgacgtccccaaatggttatcaccatcctcaatccttctcttgcagcagatgttgcaagtggacccaaagaaacgcatctcaatgaaaaacttgcttaaccatccatggattatgcaagactacaactaccctgtggagtggcaaagcaagaatcctttcattcaccttgatgatgactgcgtgacagagctgagtgtacaccaccgaaataaccgtcagacaatggaggacctcattagtctttggcaatatgaccatctgaccgcaacatacctgctgctgctcgcaaagaaggcaagaggaaagccagtcagattgcggctctcatccttcagttgtggccaagcttccgccacccctttcactgatattaaaagcaacaactggagtctcgaggacgtcaccgcctcagacaagaattatgttgcgggcctgattgactatgattggtgtgaggatgacctcagcaccggcgctgcgaccccaagaacaagtcagtttacaaagtactggactgagtccaacggtgtggagtctaaaagccttacccccgccctgtgtcgaactccagcaaataagctgaaaaacaaagagaatgtctatacccccaagtccgccgtgaagaacgaggaatattttatgtttccggagcccaaaacaccagtaaataaaaaccagcataaacgagagatcctgaccaccccaaaccgttatacgaccccctcaaaggcccgtaatcaatgtctaaaggaaacacctatcaaaattcctgtgaattctaccggcacagataaattgatgaccggcgtgattagccccgagaggcggtgtcgatccgtcgagctggatctgaaccaggcccatatggaagagaccccaaaacgcaagggagccaaagtgtttgggagtcttgagaggggattagataaggtcatcaccgtactgaccagaagcaagcgtaaagggtcagcgcgtgatggaccaagacgcttaaaactccactacaatgtaaccactacacgattggtgaaccctgatcagctgttgaacgaaattatgtcaatcctcccgaaaaaacacgtggatttcgtccagaaaggttacacgctaaagtgccagactcagagcgactttggaaaggtgactatgcagttcgagctcgaggtctgccagttacagaagcccgatgttgtcggcatcagaagacagaggctcaagggtgacgcctgggtctataaaagactggtggaggacattctgagctcgtgtaaggtgtag

SEQ ID NO: 91237 - DNA, 1563 bp, Artificial Sequence
  derived and/or modified sequence
atggtgctggaggagaacctgctgtttgatgagtaccacaagctgaagctgattgactttggcctgtgtgccaagcccaagggcaacaaggactaccacctgcagacctgctgcggcagcctggcctatgctgcccctgagctgatccagggcaagagctacctgggcagcgaggctgatgtgtggagcatgggcatcctgctgtatgtgctgatgtgtggcttcctgccctttgatgatgacaacgtgatggccctgtacaagaagatcatgaggggcaagtatgatgtgcccaagtggctgagccccagcagcatcctgctgctgcagcagatgctgcaggtggaccccaagaagaggatctccatgaagaacctgctgaaccacccctggatcatgcaggactacaactaccctgtggagtggcagagcaagaaccccttcatccacctggatgatgactgtgtgacagagctgtctgtgcaccacaggaacaaccggcagaccatggaggacctgatcagcctgtggcagtatgaccacctgacagccacctacctgctgctgctggccaagaaggcccggggcaagcctgtgcggctgcggctgagcagcttcagctgtggccaggccagcgccacccccttcacagacatcaagagcaacaactggagcctggaggatgtgacagccagtgacaagaactacgtggccggcctgattgattatgactggtgtgaagatgacctgagcactggagctgccacccccaggaccagccagttcaccaagtactggacagagagcaatggagtggagagcaagagcctgaccccagccctgtgcaggaccccagccaacaagctgaagaacaaggaaaatgtgtacacccccaagtctgctgtgaagaatgaggagtacttcatgtttcctgagcccaagacccctgtgaacaagaaccagcacaagcgggagatcctgaccacccccaaccgctacaccacccccagcaaggccaggaaccagtgcctgaaggagacccccatcaagatccctgtgaacagcactggaacagacaagctgatgactggagtcatcagccctgagcggcgctgccgctctgtggagctggacctgaaccaggcccacatggaggagacccccaagaggaaaggagccaaggtgtttggcagcctggagcggggcctggacaaggtgatcaccgtgctgaccaggagcaagaggaagggcagcgccagagatggcccccggcggctgaagctgcactacaacgtgaccaccacccggctggtgaacccagaccagctgctgaatgagatcatgagcatcctgcccaagaagcacgtggactttgtgcagaagggctacaccctgaagtgccagacccagagcgactttgggaaggtgaccatgcagtttgagctggaggtgtgccagctgcagaagccagatgtggtgggcatccggcggcagaggctgaagggagatgcctgggtgtacaagaggctggtggaggacatcctgagcagctgcaaggtgtag

SEQ ID NO: 91238 - DNA, 1563 bp, Artificial Sequence
  derived and/or modified sequence
atggtgctggaggagaacctgctgttcgacgagtaccacaagctgaagctgatcgatttcggtctgtgtgctaagcccaagggtaacaaagactatcacttgcagacctgctgtgggtccttagcttatgccgctcctgagttgattcaagggaaatcttacctgggatcagaagctgacgtctggtccatgggcattctcctgtatgttctgatgtgtggtttcctcccattcgatgacgacaatgtgatggccctctacaagaaaattatgcgcgggaagtatgatgtgcctaaatggctgtccccatcttcgatactcctgttacaacagatgctgcaggttgatccaaaaaagagaatttccatgaagaatctactgaaccatccatggatcatgcaggactataattaccccgtggagtggcagtccaagaacccgttcatccacctggacgatgactgcgtcaccgagctgtcggtgcatcatagaaacaacagacagacaatggaagacctcataagcttgtggcagtacgatcacctgacagcaacctacctgttacttctcgccaagaaagcaagagggaaaccggtcaggctgagactgtcatcgttttcctgcggccaggccagtgcgacaccgttcacagacatcaaatctaacaattggagcctggaagatgtgactgcctcggataagaattatgtggcaggtctcatagattacgactggtgtgaagatgatctctctactggcgccgcaacccctcgcacttcccaattcacaaaatattggaccgagtccaacggggtcgagagcaagagcctgacccctgcactctgccggactccagctaataaactcaaaaataaggagaatgtgtacacccctaagtccgcggtaaaaaatgaggagtacttcatgttcccagaacctaaaacccccgtgaataagaatcaacacaaacgtgagatcctgactacgcctaataggtacaccactccctctaaagcaagaaaccaatgtttgaaagagacccccatcaagattccagtgaactccaccgggacggacaaattgatgacaggggtcattagcccagagcgacgctgcaggagcgttgagctggacttgaatcaggcccatatggaggagacgccaaagagaaagggagccaaggtgttcggctctttggaaagaggactggataaagtaatcaccgtgctgacgcggtcgaagaggaaagggtccgcgagagatggccccaggaggctcaaactacattataacgtgaccacgacacggttggtgaaccctgaccagctactgaatgaaataatgtcgatacttccaaagaagcatgtggacttcgtgcagaaaggttacactctcaagtgtcagacacagagtgacttcggcaaagtgaccatgcaatttgagctggaggtctgtcaattgcaaaagccagatgtagtgggaatcaggagacagagacttaaaggggatgcttgggtctataaaagactcgtggaggacatactgtcatcttgcaaggtttag

SEQ ID NO: 91239 - DNA, 1563 bp, Artificial Sequence
  derived and/or modified sequence
atggtgctcgaagagaatttgctgttcgacgaatatcacaagcttaaactgatagactttggtctctgcgctaagcccaaaggaaacaaggactaccaccttcagacttgctgtggctctctggcttatgcagctcctgagctcatccaggggaagtcctaccttggttccgaggcggacgtgtggtccatgggcattctgctgtatgtgctgatgtgcggttttctcccatttgatgatgataatgtgatggccctctacaagaaaatcatgaggggaaagtatgacgttccgaagtggctctccccttcctctatattacttttgcaacagatgctgcaggtggaccccaaaaagcgtatttcgatgaagaatctgcttaaccacccctggattatgcaggactacaactaccctgtagagtggcagagtaagaacccgttcatccatctggacgacgattgtgtaactgaactatcagtgcaccaccgcaacaatcggcagactatggaagatctgatctccctgtggcagtacgaccacctgacagccacgtacttgctcctgctagccaaaaaggcccgtggaaagccagtacgactgcgcctgtctagtttctcgtgtggccaggcttctgccactccgttcaccgacataaaaagcaacaattggtcactagaagacgtgactgccagtgataagaactatgtggctggcctgattgattacgattggtgtgaagacgatctgtcgacgggagcagccacccccaggacctcccagttcacaaagtactggacagagtcgaacggcgtggaatctaagtctttaacacctgcactgtgcagaaccccagccaataagctgaagaacaaagaaaatgtgtacacgcccaagtccgccgtgaaaaacgaagaatactttatgttccccgaacctaaaacgccagtgaataaaaatcagcacaaaagggagattttaacaacacccaatagatacacaactccctccaaagcccgaaaccagtgcttgaaggagactcctatcaaaattcctgtcaattcgactggaacagataagctcatgaccggggtgatcagtcccgagcgaagatgcaggtctgtagaattggacctgaatcaggcccacatggaagaaacccccaagagaaaaggcgctaaagtgttcggcagcttggaacgcggactcgacaaagtgatcaccgtactcacaaggtccaagaggaaaggtagcgccagggacggcccacgcagactcaaacttcactataacgtgaccaccactcggctcgtgaatccagaccagttgctgaacgagataatgtctatcttaccaaagaagcacgtggactttgtgcagaaaggctacactttgaaatgccagactcaatcagattttgggaaggtgacgatgcaattcgaactggaggtgtgtcaactccaaaagccagacgtggtgggaatccgtcgacagcggttgaagggcgacgcatgggtatacaagaggctggttgaggacatcctgtccagctgcaaagtctag

SEQ ID NO: 91240 - DNA, 1563 bp, Artificial Sequence
  derived and/or modified sequence
atggtgctggaggagaacctgctgttcgacgagtaccacaagctgaagctgatcgacttcggcctgtgcgccaagcccaagggcaacaaggactaccacctgcagacctgctgcggcagcctggcctacgccgcccccgagctgatccagggcaagagctacctgggcagcgaggccgacgtgtggagcatgggcatcctgctgtacgtgctgatgtgcggcttcctgcccttcgacgacgacaacgtgatggccctgtacaagaagatcatgagaggcaagtacgacgtgcccaagtggctgagccccagcagcatcctgctgctgcagcagatgctgcaggtggaccccaagaagagaatcagcatgaagaacctgctgaaccacccctggatcatgcaggactacaactaccccgtggagtggcagagcaagaaccccttcatccacctggacgacgactgcgtgaccgagctgagcgtgcaccacagaaacaacagacagaccatggaggacctgatcagcctgtggcagtacgaccacctgaccgccacctacctgctgctgctggccaagaaggccagaggcaagcccgtgagactgagactgagcagcttcagctgcggccaggccagcgccacccccttcaccgacatcaagagcaacaactggagcctggaggacgtgaccgccagcgacaagaactacgtggccggcctgatcgactacgactggtgcgaggacgacctgagcaccggcgccgccacccccagaaccagccagttcaccaagtactggaccgagagcaacggcgtggagagcaagagcctgacccccgccctgtgcagaacccccgccaacaagctgaagaacaaggagaacgtgtacacccccaagagcgccgtgaagaacgaggagtacttcatgttccccgagcccaagacccccgtgaacaagaaccagcacaagagagagatcctgaccacccccaacagatacaccacccccagcaaggccagaaaccagtgcctgaaggagacccccatcaagatccccgtgaacagcaccggcaccgacaagctgatgaccggcgtgatcagccccgagagaagatgcagaagcgtggagctggacctgaaccaggcccacatggaggagacccccaagagaaagggcgccaaggtgttcggcagcctggagagaggcctggacaaggtgatcaccgtgctgaccagaagcaagagaaagggcagcgccagagacggccccagaagactgaagctgcactacaacgtgaccaccaccagactggtgaaccccgaccagctgctgaacgagatcatgagcatcctgcccaagaagcacgtggacttcgtgcagaagggctacaccctgaagtgccagacccagagcgacttcggcaaggtgaccatgcagttcgagctggaggtgtgccagctgcagaagcccgacgtggtgggcatcagaagacagagactgaagggcgacgcctgggtgtacaagagactggtggaggacatcctgagcagctgcaaggtgtag

SEQ ID NO: 91241 - protein, 511 aa, Artificial Sequence
  derived and/or modified sequence
MLKMAEPIASLMIVECRACLRCSPLFLYQREKDRMTENMKECLAQTNAAVGDMVTVVKTEVCSPLRDQEYGQPCSRRPDSSAMEVEPKKLKGKRDLIVPKSFQQVDFWFCESCQEYFVDECPNHGPPVFVSDTPVPVGIPDRAALTIPQGMEVVKDTSGESDVRCVNEVIPKGHIFGPYEGQISTQDKSAGFFSWLIVDKNNRYKSIDGSDETKANWMRYVVISREEREQNLLAFQHSERIYFRACRDIRPGEWLRVWYSEDYMKRLHSMSQETIHRNLARGEKRLQREKSEQVLDNPEDLRGPIHLSVLRQGKSPYKRGFDEGDVHPQAKKKKIDLIFKDVLEASLESAKVEAHQLALSTSLVIRKVPKYQDDAYSQCATTMTHGVQNIGQTQGEGDWKVPQGVSKEPGQLEDEEEEPSSFKADSPAEASLASDPHELPTTSFCPNCIRLKKKVRELQAELDMLKSGKLPEPPVLPPQVLELPEFSDPAGKLVWMRLLSEGRVRSGLCGG

SEQ ID NO: 91242 - protein, 477 aa, Artificial Sequence
  derived and/or modified sequence
MTENMKECLAQTNAAVGDMVTVVKTEVCSPLRDQEYGQPCSRRPDSSAMEVEPKKLKGKRDLIVPKSFQQVDFWFCESCQEYFVDECPNHGPPVFVSDTPVPVGIPDRAALTIPQGMEVVKDTSGESDVRCVNEVIPKGHIFGPYEGQISTQDKSAGFFSWLIVDKNNRYKSIDGSDETKANWMRYVVISREEREQNLLAFQHSERIYFRACRDIRPGEWLRVWYSEDYMKRLHSMSQETIHRNLARGEKRLQREKSEQVLDNPEDLRGPIHLSVLRQGKSPYKRGFDEGDVHPQAKKKKIDLIFKDVLEASLESAKVEAHQLALSTSLVIRKVPKYQDDAYSQCATTMTHGVQNIGQTQGEGDWKVPQGVSKEPGQLEDEEEEPSSFKADSPAEASLASDPHELPTTSFCPNCIRLKKKVRELQAELDMLKSGKLPEPPVLPPQVLELPEFSDPAGKLVWMRLLSEGRVRSGLCGG

SEQ ID NO: 91243 - DNA, 2229 bp, Artificial Sequence
  derived and/or modified sequence
gtcttgaggaccatctctcccggcagcataccgtgtggcttcacactgctctgcctctctgaacctcggtttcttcatctataaaatgggaataagagtaagccacctcaatggactgtgggaggcttaagtaaattgaagtgccatgcaagtagctagcatgcagttgcagctcaatgaatattatgatggccgcagatacgatggctacagctggggcacccatttcgggtcacaaggtagggttcaatgttgaagatggcagagccaattgcatccctgatgatcgtggagtgccgggcctgcctgagatgctcacctctcttcctttaccagagagagaaagacagaatgaccgagaacatgaaggagtgcttggcccagaccaatgcagccgtgggggatatggtgacggtggtgaagacggaggtctgctcaccactccgagaccaggagtatggccagccctgctctaggagaccggactcctcggccatggaagttgagcccaagaaactgaaggggaagcgcgacctcatcgtgcccaaaagcttccagcaagtggacttctggttctgtgagtcctgccaggagtacttcgtggatgaatgcccaaaccatggccccccggtgtttgtgtctgacacaccggtgcccgtgggcatcccagaccgggcggcgctcaccatcccacagggcatggaggtggtcaaggacactagtggagagagtgacgtgcgatgtgtaaacgaggtcatccccaagggccacatcttcggcccctatgaggggcagatctccacccaggacaaatcagctggcttcttctcctggctgattgtggacaagaacaaccgctataagtccatagatggctcagacgagaccaaagccaactggatgaggtacgtggtcatctcccgggaggagagggagcagaacctgctggcgttccagcacagtgagcgcatctacttccgggcgtgcagggacatccggcctggggagtggctgcgggtctggtacagcgaggactacatgaagcgcctgcacagcatgtcccaggaaaccattcaccgcaacctggccagaggagagaagaggttgcagagggagaagtctgagcaggttctggataacccagaagacctgaggggtcccattcatctctctgtgctgagacagggcaaaagtccctacaagcgtggctttgatgagggggatgtacacccccaagctaagaagaagaaaattgacctgattttcaaggatgttctggaggcctcactggaatctgcgaaggtggaagcccaccagttggccctgagcacctcactggtcatcaggaaagtccccaaataccaggatgacgcctacagtcagtgtgcaacaacaatgacccatggtgtgcagaatataggccagacccagggggagggggactggaaggtcccccagggggtctccaaggagccaggccaattggaggatgaagaagaggagccttcatcattcaaggccgacagtcctgccgaggcctcccttgcatctgaccctcatgaacttcccaccacctctttttgccctaactgtattcgcctaaagaagaaggttcgggagctccaggcagaattagacatgcttaagtctgggaaacttcctgagccccccgtattgccaccacaggtactggagctcccagagttctcggaccctgcaggtaagttggtttggatgagattattgtcggagggcagagtacgcagtgggctgtgtggagggtagcctaaagctctctgtggaaaccaccttccgggagacctgaggagtgtaacgtggaggcggctacctccgtgggtgggagcccaggtcctcagtgtctctggcagacccatcggcagctctgccaggtgctccatgtgttgcccttgtatcctccttgtcaataaaggaagttccgctgcagaaggggtgtgtgctgtgttcttgacccgttgcctttctctggtactggtgtcttaccccaaagcccaatttctaaacccagtctttctctgtccccagtctcaagcagggtgtcccactggagagatctcttggcttccctaacttagtccaggaacacagccttgttcttctcttcctgaatctctgtcctgccacacatggtcccagttccctagcctggagttctagaaggatggagagtgaggggatccaggccattca

SEQ ID NO: 91244 - DNA, 1536 bp, Artificial Sequence
  derived and/or modified sequence
atgctgaagatggccgagcccatcgccagcctgatgatcgtggagtgcagagcctgcctgagatgcagccccctgttcctgtaccagagagagaaggacagaatgaccgagaacatgaaggagtgcctggcccagaccaacgccgccgtgggcgacatggtgaccgtggtgaagaccgaggtgtgcagccccctgagagaccaggagtacggccagccctgcagcagaagacccgacagcagcgccatggaggtggagcccaagaagctgaagggcaagagagacctgatcgtgcccaagagcttccagcaggtggacttctggttctgcgagagctgccaggagtacttcgtggacgagtgccccaaccacggcccccccgtgttcgtgagcgacacccccgtgcccgtgggcatccccgacagagccgccctgaccatcccccagggcatggaggtggtgaaggacaccagcggcgagagcgacgtgagatgcgtgaacgaggtgatccccaagggccacatcttcggcccctacgagggccagatcagcacccaggacaagagcgccggcttcttcagctggctgatcgtggacaagaacaacagatacaagagcatcgacggcagcgacgagaccaaggccaactggatgagatacgtggtgatcagcagagaggagagagagcagaacctgctggccttccagcacagcgagagaatctacttcagagcctgcagagacatcagacccggcgagtggctgagagtgtggtacagcgaggactacatgaagagactgcacagcatgagccaggagaccatccacagaaacctggccagaggcgagaagagactgcagagagagaagagcgagcaggtgctggacaaccccgaggacctgagaggccccatccacctgagcgtgctgagacagggcaagagcccctacaagagaggcttcgacgagggcgacgtgcacccccaggccaagaagaagaagatcgacctgatcttcaaggacgtgctggaggccagcctggagagcgccaaggtggaggcccaccagctggccctgagcaccagcctggtgatcagaaaggtgcccaagtaccaggacgacgcctacagccagtgcgccaccaccatgacccacggcgtgcagaacatcggccagacccagggcgagggcgactggaaggtgccccagggcgtgagcaaggagcccggccagctggaggacgaggaggaggagcccagcagcttcaaggccgacagccccgccgaggccagcctggccagcgacccccacgagctgcccaccaccagcttctgccccaactgcatcagactgaagaagaaggtgagagagctgcaggccgagctggacatgctgaagagcggcaagctgcccgagccccccgtgctgcccccccaggtgctggagctgcccgagttcagcgaccccgccggcaagctggtgtggatgagactgctgagcgagggcagagtgagaagcggcctgtgcggcggctag

SEQ ID NO: 91245 - DNA, 1434 bp, Artificial Sequence
  derived and/or modified sequence
atgaccgagaacatgaaggagtgcctggcccagaccaacgccgccgtgggcgacatggtgaccgtggtgaagaccgaggtgtgcagccccctgagagaccaggagtacggccagccctgcagcagaagacccgacagcagcgccatggaggtggagcccaagaagctgaagggcaagagagacctgatcgtgcccaagagcttccagcaggtggacttctggttctgcgagagctgccaggagtacttcgtggacgagtgccccaaccacggcccccccgtgttcgtgagcgacacccccgtgcccgtgggcatccccgacagagccgccctgaccatcccccagggcatggaggtggtgaaggacaccagcggcgagagcgacgtgagatgcgtgaacgaggtgatccccaagggccacatcttcggcccctacgagggccagatcagcacccaggacaagagcgccggcttcttcagctggctgatcgtggacaagaacaacagatacaagagcatcgacggcagcgacgagaccaaggccaactggatgagatacgtggtgatcagcagagaggagagagagcagaacctgctggccttccagcacagcgagagaatctacttcagagcctgcagagacatcagacccggcgagtggctgagagtgtggtacagcgaggactacatgaagagactgcacagcatgagccaggagaccatccacagaaacctggccagaggcgagaagagactgcagagagagaagagcgagcaggtgctggacaaccccgaggacctgagaggccccatccacctgagcgtgctgagacagggcaagagcccctacaagagaggcttcgacgagggcgacgtgcacccccaggccaagaagaagaagatcgacctgatcttcaaggacgtgctggaggccagcctggagagcgccaaggtggaggcccaccagctggccctgagcaccagcctggtgatcagaaaggtgcccaagtaccaggacgacgcctacagccagtgcgccaccaccatgacccacggcgtgcagaacatcggccagacccagggcgagggcgactggaaggtgccccagggcgtgagcaaggagcccggccagctggaggacgaggaggaggagcccagcagcttcaaggccgacagccccgccgaggccagcctggccagcgacccccacgagctgcccaccaccagcttctgccccaactgcatcagactgaagaagaaggtgagagagctgcaggccgagctggacatgctgaagagcggcaagctgcccgagccccccgtgctgcccccccaggtgctggagctgcccgagttcagcgaccccgccggcaagctggtgtggatgagactgctgagcgagggcagagtgagaagcggcctgtgcggcggctag

SEQ ID NO: 91246 - DNA, 1536 bp, Artificial Sequence
  derived and/or modified sequence
atgctgaagatggctgagcccatagcttctctgatgattgtggaatgcagagcatgtcttcgatgttctccactgttcctgtaccagagagaaaaggacaggatgactgagaatatgaaagaatgccttgcccagaccaatgccgcggtgggcgatatggtcaccgtagttaagacggaagtgtgttcccccctgagggatcaagaatatggccagccatgtagccgtcgcccagacagttctgccatggaagtcgagcctaaaaaactcaagggtaagagagacctcattgttcccaaatcttttcaacaagtggacttttggttttgcgagtcttgtcaagagtattttgtcgacgaatgccccaaccatggcccaccagtgttcgtgagtgatacccctgtgcctgtaggaatcccggaccgcgctgcgcttacaatccctcagggaatggaggtagtaaaagatacctcaggggagtctgacgtgcgatgtgttaatgaggtgatcccaaaggggcacatcttcggcccttacgaaggtcagatttccactcaggataagagcgccggcttcttctcctggctgatcgttgataagaacaatcgctacaagtctattgacgggagcgacgagactaaggccaattggatgagatatgtggtgatttctcgggaagagagagagcagaaccttctggcatttcaacatagcgagaggatttacttccgggcttgcagagacataaggcctggggagtggctgagagtctggtactccgaggactacatgaagaggctgcattctatgagccaagaaaccatacaccggaatcttgcacgcggcgagaaacggctccagagagagaagtcagaacaggtgctagacaatcctgaggatctgcgcgggcccatccacctctcagtcctgagacagggtaagtcaccatacaagagaggatttgacgagggggacgtacatcctcaagctaagaaaaagaaaatcgatttaatcttcaaggacgttcttgaggcaagtttggagagcgccaaggtggaagctcatcagctcgcactaagtacgtccctggttatccgcaaggttcctaagtaccaggatgatgcctattctcagtgcgctaccactatgacccacggagtccaaaacatcggtcagacacagggagagggggattggaaagttccccagggtgtatcgaaggaacccggacaactcgaggacgaagaggaggagcctagctctttcaaggctgatagcccagccgaggcatcgttagcctcagacccccatgagctgcccaccacctcattttgccccaattgcattcggctgaagaaaaaggtccgagaactgcaggccgagttggacatgctgaagagtggaaagcttcctgagcccccagtgttacctcctcaagtgctggagctgcccgagttttccgatcccgctggcaagctcgtatggatgcgactgctaagcgaaggacgggtcaggagtgggctgtgcggcggctag

SEQ ID NO: 91247 - DNA, 1536 bp, Artificial Sequence
  derived and/or modified sequence
atgctgaagatggccgagcctatcgcatccctcatgattgtggagtgtcgagcatgcctcagatgcagccctctattcctctaccagcgcgagaaagaccgcatgaccgagaatatgaaagagtgtctggctcagactaatgctgcggtgggtgatatggtgactgtggtgaaaacagaggtatgtagcccactgcgcgatcaggagtatggtcagccctgcagtcggcgaccagattctagtgcaatggaggtagaacccaagaagctgaaggggaaacgcgatttaatcgtccccaagtcattccagcaggtggatttttggttctgcgagtcttgtcaggagtactttgtggacgaatgcccaaaccatggtccacctgtcttcgtgtccgacacccccgtgcccgtaggcatacccgatagagcagcgttgactattccgcaaggcatggaagtggtgaaagacaccagcggagagagcgacgtgaggtgcgttaatgaagtgatacccaaaggacatatttttgggccgtacgagggacagatcagcacacaggataaatctgcaggatttttttcatggctgattgtggataagaataatcgttacaagtctattgacggctctgacgagactaaggccaattggatgcggtacgtggttatcagccgagaagagcgggagcaaaatctcttagcattccagcattctgagagaatttatttcagggcttgccgggatatcagacctggcgaatggctgcgcgtgtggtatagcgaagattatatgaagcgtctgcactctatgagccaggagaccattcaccggaaccttgcccggggggaaaaacgcctccagagagaaaaaagtgagcaggttctggacaatcctgaggacctgcgaggacctattcacctgtcagtcctccggcaggggaagtctccctataagcgaggcttcgatgagggggatgttcatccacaagctaagaaaaaaaaaatagatctcatcttcaaagatgtcctggaggccagtttggagtctgcaaaagtcgaggcccatcagttggcattgtctaccagtttggtcattcggaaagtgccgaagtaccaggatgacgcctacagtcaatgcgccacaacaatgacccacggcgtgcaaaatataggccaaacacagggggaaggcgactggaaagtgccacaaggcgtgagcaaagagcccggtcagctggaggacgaagaagaggagccctcaagctttaaagctgactctcccgcggaggcttcgctggcatccgatccccatgaactcccgaccacttccttctgtcccaattgcatcagattaaagaagaaggtgcgggaattgcaggctgagcttgacatgctgaaatccggcaagctgcccgaaccgcctgtacttccaccccaagtgcttgagcttccagaatttagcgatccagcgggaaagctcgtttggatgaggttgctttcggaagggcgagtaaggtccggcctttgtggcggctag

SEQ ID NO: 91248 - DNA, 1434 bp, Artificial Sequence
  derived and/or modified sequence
atgaccgagaacatgaaagagtgtctggctcagacgaacgcagccgttggcgatatggttacagtcgtgaaaaccgaggtctgttctcccctgcgtgaccaagaatatgggcagccttgctctagacgccccgatagctctgcaatggaggtggaacccaaaaagctgaagggcaaacgggatctgatagtaccgaagtcattccaacaggtcgacttttggttttgcgagtcctgccaagaatattttgtggatgaatgcccgaaccacgggcctccagtctttgtatcagacaccccagtccctgtcggcatcccggacagagccgccttgacaatacctcagggaatggaggtggtcaaggacacatccggggagagcgatgtgcgatgcgtgaacgaagttatacctaaaggccatatctttggcccctatgagggccagatatcgacccaggacaagtccgctggtttctttagctggttgatcgtggataagaacaatcgctataaaagcattgatgggagtgacgaaaccaaagcgaactggatgcgctacgtagttatttctcgggaagaaagggagcagaatcttctagccttccagcattccgagagaatttacttccgtgcttgtcgtgacatccggccaggtgaatggctgagggtgtggtactctgaagattacatgaaacgcctgcatagcatgtcccaagagactattcaccgaaacctcgcccgcggtgagaagcgcttacaaagagaaaagagcgagcaagtcctcgataaccctgaagatttacgagggcctattcacctctctgtcctgcgccaaggcaagagtccttacaaacgcggatttgacgaaggcgacgttcatccacaggcaaagaaaaaaaagatagacctcatctttaaggacgtgcttgaggctagtctcgaatcagcaaaagtcgaagcccatcaattggctctcagtacctcacttgtcatccgaaaggtgccaaaatatcaggacgatgcctactcccagtgcgcaacaactatgactcacggcgtacagaacataggacagacacagggtgagggagactggaaggtgccccagggggtcagcaaggagccgggacagttagaggatgaggaggaagaacctagttcatttaaggctgactccccagcagaagccagcctggcctcggatccccacgagctcccgactacctccttctgtcctaactgcatacgactgaagaagaaggtgagggaactccaggctgagctcgatatgctgaagagcgggaaactgcctgagcccccggtcttgccgccccaggttctggagttgccagaatttagtgatcccgccggaaagctcgtgtggatgagactgctctccgagggcagggtgagaagtggtctatgcggtggctag

SEQ ID NO: 91249 - DNA, 1536 bp, Artificial Sequence
  derived and/or modified sequence
atgctgaagatggccgagcccatcgccagcctgatgattgtggagtgccgggcctgcctgcgctgcagccccctcttcctgtaccagcgggagaaggacaggatgacagagaacatgaaggaatgtctggcccagaccaatgctgctgtgggggacatggtgacagtggtgaagacagaggtgtgcagccccctgcgggaccaggagtatggccagccctgcagccggcggccagacagcagcgccatggaggtggagcccaagaagctgaagggcaagagggacctgattgtgcccaagagcttccagcaggtggacttctggttctgtgagagctgccaggagtactttgtggatgagtgccccaaccacggcccccctgtgtttgtgtctgacacccctgtgcctgtgggcatcccagacagagctgccctgaccatcccccagggcatggaggtggtgaaggacaccagcggggagagtgatgtgcgctgtgtgaatgaagtcatccccaagggccacatcttcggcccctatgagggccagatcagcacccaggacaagtctgctggcttcttctcctggctgattgtggacaagaacaaccgctacaagagcattgatggcagtgatgagaccaaggccaactggatgagatatgtggtgatcagccgggaggagcgggagcagaacctgctggccttccagcacagcgagcgcatctacttccgggcctgccgggacatccggcctggagagtggctgcgggtgtggtacagcgaggactacatgaagaggctgcacagcatgagccaggagaccatccacaggaacctggcccggggggagaagaggctgcagcgggagaagtctgagcaggtgctggacaaccctgaggacctgcggggccccatccacctgtctgtgctgcggcagggcaagagcccctacaagaggggctttgatgaaggagatgtgcacccccaggccaagaagaagaagattgacctgatcttcaaggatgtgctggaggccagcctggagagcgccaaggtggaggcccaccagctggccctgagcaccagcctggtgatcaggaaggtgcccaagtaccaggatgatgcctacagccagtgtgccaccaccatgacccatggagtgcagaacatcggccagacccagggcgagggggactggaaggtgccccagggcgtgtccaaggagcccggccagctggaggatgaggaggaggagcccagcagcttcaaggctgacagccctgctgaggccagcctggccagtgacccccatgagctgcccaccaccagcttctgccccaactgcatccggctgaagaagaaggtgcgggagctgcaggccgagctggacatgctgaagagcggcaagctgcctgagccccctgtgctgcccccccaggtgctggagctgcctgagttcagtgaccctgctgggaagctggtgtggatgaggctgctgtctgagggccgggtgcgcagcggcctgtgtggcggctag

SEQ ID NO: 91250 - DNA, 1434 bp, Artificial Sequence
  derived and/or modified sequence
atgacagagaacatgaaggaatgtctggcccagaccaatgctgctgtgggggacatggtgacagtggtgaagacagaggtgtgcagccccctgcgggaccaggagtatggccagccctgcagccggcggccagacagcagcgccatggaggtggagcccaagaagctgaagggcaagagggacctgattgtgcccaagagcttccagcaggtggacttctggttctgtgagagctgccaggagtactttgtggatgagtgccccaaccacggcccccctgtgtttgtgtctgacacccctgtgcctgtgggcatcccagacagagctgccctgaccatcccccagggcatggaggtggtgaaggacaccagcggggagagtgatgtgcgctgtgtgaatgaagtcatccccaagggccacatcttcggcccctatgagggccagatcagcacccaggacaagtctgctggcttcttctcctggctgattgtggacaagaacaaccgctacaagagcattgatggcagtgatgagaccaaggccaactggatgagatatgtggtgatcagccgggaggagcgggagcagaacctgctggccttccagcacagcgagcgcatctacttccgggcctgccgggacatccggcctggagagtggctgcgggtgtggtacagcgaggactacatgaagaggctgcacagcatgagccaggagaccatccacaggaacctggcccggggggagaagaggctgcagcgggagaagtctgagcaggtgctggacaaccctgaggacctgcggggccccatccacctgtctgtgctgcggcagggcaagagcccctacaagaggggctttgatgaaggagatgtgcacccccaggccaagaagaagaagattgacctgatcttcaaggatgtgctggaggccagcctggagagcgccaaggtggaggcccaccagctggccctgagcaccagcctggtgatcaggaaggtgcccaagtaccaggatgatgcctacagccagtgtgccaccaccatgacccatggagtgcagaacatcggccagacccagggcgagggggactggaaggtgccccagggcgtgtccaaggagcccggccagctggaggatgaggaggaggagcccagcagcttcaaggctgacagccctgctgaggccagcctggccagtgacccccatgagctgcccaccaccagcttctgccccaactgcatccggctgaagaagaaggtgcgggagctgcaggccgagctggacatgctgaagagcggcaagctgcctgagccccctgtgctgcccccccaggtgctggagctgcctgagttcagtgaccctgctgggaagctggtgtggatgaggctgctgtctgagggccgggtgcgcagcggcctgtgtggcggctag

SEQ ID NO: 91251 - DNA, 1536 bp, Artificial Sequence
  derived and/or modified sequence
atgctgaagatggccgagcccatcgccagcctgatgatcgtggagtgtagagcatgtttaagatgtagccctctgttcttataccagagggaaaaagataggatgacagagaacatgaaggaatgtctagcccagacaaacgcggctgtcggagacatggtgacagtcgtgaagacagaggtttgcagccctcttcgcgatcaggagtatggtcagccttgcagccggaggcctgattcctcagccatggaagtcgaacctaaaaagctgaaggggaagagagatctgatagtgcccaaatccttccagcaggtagacttttggttttgtgagagttgccaggagtacttcgtggatgaatgcccaaaccatggacccccagtgtttgtgtccgatactccggttccggtcggtatcccagaccgtgctgctttaacaataccacaaggtatggaagtggtgaaggataccagcggtgagtcagatgttcggtgcgtgaatgaagtcatcccaaaaggacacatttttggtccttatgaagggcagatttcaactcaggacaaaagtgcaggcttcttctcatggctgatcgtggataagaacaataggtataagagtattgatggatcagacgagacaaaagcgaactggatgcggtacgttgtcatctccagagaagaaagggaacaaaacctcttggccttccaacacagtgaaaggatctattttcgagcttgtagggatatacgccctggagaatggctgagagtgtggtacagtgaagactacatgaaaagactacatagcatgtcacaggagactattcaccggaacttagcacgcggagagaaaaggcttcagagagagaagtctgagcaggtgcttgacaatcccgaagatctcagagggcccatacacctaagcgtcctgcgacagggaaaaagtccttacaagcgcgggttcgatgagggcgatgttcatccacaggctaaaaagaaaaagatcgatttaattttcaaagatgttctcgaggcgagtcttgaatctgctaaggttgaggcccaccagctggccctttccaccagtctcgtcattaggaaggtgcccaagtaccaggacgacgcctacagccagtgcgccacaactatgacacacggagtccagaatattggtcagacccagggtgagggcgactggaaggtgcctcagggggtctcgaaggagcctggacaattggaggatgaggaagaggaacctagcagttttaaagcagatagtcctgcagaagcctctctcgcatcagacccacacgagcttcccaccacatcgttctgccccaactgcataaggctaaagaagaaggtaagagagctgcaggcagaactcgacatgctcaaatccggtaagctgccagagcctcctgtgttgcccccgcaggtgttggaacttccggaattttcagatccagctggcaagctggtctggatgagactgctcagcgaaggcagggttcgatcaggcctatgtggcggctag

SEQ ID NO: 91252 - DNA, 1536 bp, Artificial Sequence
  derived and/or modified sequence
atgctgaagatggccgagcccatcgccagcctgatgatcgtggagtgtcgcgcctgcctaaggtgcagccctctattcctgtatcaaagagaaaaggatagaatgactgaaaatatgaaagaatgccttgcacaaactaatgctgcagtgggggacatggtaacagttgtgaagacagaggtctgcagccccctgagagaccaggagtacggtcaaccctgttccagaagaccagacagttctgcgatggaagtagaacccaaaaaactcaagggcaagagagacctcattgtgccaaaatccttccaacaagtcgatttctggttttgcgagagttgtcaagagtacttcgtcgatgagtgccctaaccacgggccacctgtctttgtgtctgacacccccgtgccagtcggaattccagatagagcggccctgactatcccccagggtatggaagtagtgaaagacacaagcggcgaatcggatgtgcggtgcgtgaacgaagtcatcccaaaaggacacattttcggcccatatgaaggccagatttccacccaggacaagtctgctgggttcttctcatggcttatagtggacaagaataaccggtacaaatcgatcgacggcagcgatgagaccaaggctaactggatgagatatgtcgtcatttctagggaagagagagagcaaaacctgttggcattccagcacagtgagaggatctattttagagcatgtagggatatcagaccgggcgaatggctgcgggtgtggtattcagaagactacatgaaacggctacattcaatgagccaagagacgatccacagaaatctggccagaggtgaaaaacgacttcaaagagagaagagcgagcaggtgcttgataacccagaggatcttagaggacccatccacctctcagtgctccgtcagggaaaatccccatacaagcggggtttcgatgagggggacgtacatccccaagcaaagaaaaaaaagatagatctgatcttcaaagatgtgctggaggccagtctcgagagcgccaaagtggaggcccaccaacttgcactgtctacaagtctggttatccggaaagttcctaaataccaggacgacgcctactctcagtgcgcaaccaccatgacccatggtgtccagaacattggccagacccagggagagggggactggaaagtaccccagggggtcagcaaggaaccaggacagttggaagacgaagaggaagaaccgtcttctttcaaggccgacagtcctgcagaggctagcctggcaagtgacccccatgaactcccaaccacgagtttttgccccaactgcatcaggctgaagaagaaagtcagagaactgcaggccgagcttgatatgctaaagtccgggaaactacccgaaccgcccgtgctgcctccccaagtcttagagcttccagagttttccgatcccgcagggaagctggtgtggatgcggctcctttcagaggggcgcgtgagaagcgggctatgtggcgggtag

SEQ ID NO: 91253 - DNA, 1434 bp, Artificial Sequence
  derived and/or modified sequence
atgaccgagaacatgaaggagtgcctggcccagaccaacgccgccgttggggatatggtaactgtggtaaagaccgaagtatgctctcccttgcgggatcaggaatacggacaaccatgctctcgacggccagattcatctgccatggaggtcgaacctaaaaagctaaaggggaaacgcgatctcatcgtacctaaatctttccagcaggtggatttttggttttgcgagtcttgtcaggagtattttgtcgacgagtgtccgaaccatggcccacccgtctttgtgtctgatacaccagtacccgtcgggattccagatagagccgctttaaccatcccgcaggggatggaggtggtaaaggatacatcaggcgagtccgatgttcgatgtgtgaatgaggtgataccgaagggtcacatctttggaccttacgagggtcagatctctacacaggacaagagcgcagggtttttctcttggctgatcgttgacaaaaacaacagatataagagcatcgacggaagcgacgagactaaggcgaattggatgcgatacgtggtgataagccgggaagagcgggagcagaatctcttggcattccagcactctgaacgcatttatttcagggcttgcagagacattagacctggcgaatggctcagagtctggtattccgaggactatatgaagcgattgcactctatgagccaagaaactatccacaggaaccttgcacgtggtgagaagcgcctccagcgagagaagtcagagcaggtcttagacaaccctgaagatttgaggggacccattcatttatctgtcctgcgccaaggcaagtccccctataaacgtggcttcgatgagggcgatgtgcacccacaggccaagaaaaaaaaaatcgatttaatcttcaaggacgttttagaagcctctctggagagcgctaaggtggaagcgcatcagctcgcactgtcaaccagtctggtcatccgtaaggtgccaaaataccaagacgacgcttactctcagtgcgcaacaacaatgacacatggtgtgcagaacattgggcagactcagggagagggggattggaaggtgccccagggggtctcgaaggagccaggacagcttgaggacgaggaagaggaaccttcgtcgttcaaggccgatagtccagcagaagcctctctggcttccgaccctcacgaactgcctaccaccagtttctgtccgaactgcatccggctcaaaaagaaagtccgggagctgcaggcagagttagacatgctcaagtcggggaagttgccagagccaccagtgctcccaccacaggtgctcgagctgcccgagttcagtgaccctgctggcaagttggtgtggatgcgtctgttgagtgaagggagagtgagaagcggcctatgcggtggatag

SEQ ID NO: 91254 - DNA, 1536 bp, Artificial Sequence
  derived and/or modified sequence
atgcttaaaatggccgaacccatcgcctcactgatgattgtcgagtgtagagcttgtctccgatgttctcccttgtttctgtaccaacgggaaaaggacaggatgaccgagaatatgaaggagtgtctcgctcaaacaaatgcggcagtcggggacatggtgaccgtggtcaaaaccgaggtgtgtagtcccttgcgcgaccaggaatatggccagccttgcagtcgcagacctgactccagcgctatggaggtagaaccgaaaaaactgaaaggaaagcgggacttgattgtgcctaagagcttccagcaggtggatttttggttctgtgagtcatgtcaggagtacttcgtggacgaatgccctaaccacggtccaccggtgttcgtctcagatacccctgtgccggtgggtattcccgatcgggcagctctgaccataccccagggcatggaagtcgtaaaggacacctccggggaatccgatgttcgctgtgtgaatgaagtaatcccaaagggtcatatcttcggcccttacgaaggtcagatatctacacaggacaagtccgccggtttctttagctggctcatcgtggataagaacaataggtacaagtcaattgacggctccgatgaaacaaaagccaactggatgcgatacgtggtgatttccagggaagagagagaacagaacttgctcgccttccagcacagtgaaaggatttattttagagcctgccgggacataaggccaggggagtggctccgggtctggtactctgaggactatatgaagcggctccacagcatgtctcaggagaccattcataggaacttagcacgaggtgaaaagcgccttcagagagagaaatcagagcaggtcctcgacaacccggaggatctgagaggtccgatacacctttccgtgctgcgccaaggcaaaagcccctacaagcgcggattcgacgagggcgacgtgcatccccaagccaagaagaagaaaatagatcttatatttaaggacgtcctggaagccagcctggagtctgctaaagttgaggctcaccagctggctctctctacctccctggtcatcagaaaagtgcctaagtaccaggacgatgcttatagccagtgcgcgacaacaatgacacacggagtgcagaatataggacagacccagggagaaggggactggaaagttccccaaggtgtatcaaaagaaccaggccagctcgaggatgaggaagaagaaccgagctccttcaaggcggattcccctgccgaagcatcacttgccagcgatccccatgagctgcctactacaagcttttgcccaaattgcatcagactgaaaaagaaggtcagagaactccaagccgagctagatatgcttaaatcaggtaaactacctgagcccccagttctccctccacaagtgctggagctccctgagttttcggatcccgcaggcaaactcgtctggatgagacttttatccgagggacgggtcaggtccgggctatgcggcggttag

SEQ ID NO: 91255 - DNA, 1536 bp, Artificial Sequence
  derived and/or modified sequence
atgctgaaaatggcagaacccatcgccagcctcatgatcgtagaatgtcgcgcttgcttgcgctgcagcccactctttttataccaaagagaaaaggacaggatgactgagaatatgaaggagtgcctggcacagacaaacgccgctgtgggcgatatggtaacagtcgtgaagacagaggtgtgttcaccactccgggaccaggagtatggccagccatgttcaagacggccagattccagcgccatggaagttgagccaaagaagctaaaagggaaaagggacctcatcgtacccaagtccttccagcaggtggacttttggttctgcgagagctgtcaggagtattttgttgatgaatgtccaaaccatgggcctcctgtgtttgtctctgacaccccagtccccgtgggcatcccggacagggccgctctgacaatcccgcagggaatggaagtggtgaaagacacctctggagaatccgatgtgcgatgtgtaaacgaagtgatccccaaaggccacatctttggaccttacgaaggtcagatttccacccaggacaagtccgccggtttcttctcctggttaattgtggacaagaacaatagatataagtcgatcgatgggagcgatgagacaaaagccaactggatgcggtacgtggtgattagccgggaagaacgggaacagaatttactggcgtttcagcacagcgagcgaatatattttcgcgcttgtcgggatataaggcccggtgagtggttgagggtctggtattctgaggactacatgaaacgtctgcacagcatgagtcaggagaccatccaccggaacctggctaggggtgagaagaggctgcagcgcgagaaatctgaacaggtccttgacaatcccgaagacctgcgaggtccaatacatttgtctgttttgcggcaggggaaaagtccttacaagcgcggatttgatgagggtgacgtccaccctcaggccaagaaaaagaagatcgacctgatcttcaaggatgtcctggaagcaagcctggagtccgcaaaggttgaagctcaccagctggctcttagtacctcactggtgattcgcaaagtgcctaagtatcaggatgatgcatactcccaatgtgcaaccactatgacccacggcgtccagaatatcgggcagacccagggtgaaggagattggaaagtgccacaaggggtgagtaaggagccagggcagttggaggatgaagaagaggagccttctagctttaaagcagactcgcccgctgaggcttccctcgctagcgacccacacgaattgcctactacttcattctgccctaattgtatccggctcaaaaaaaaggttagagagttgcaggccgaactcgacatgctgaaatccggaaaactaccagagcctcctgttttgccgcctcaggtacttgaattgccagagttttccgacccggctggcaagctcgtgtggatgagacttctgagcgaagggagggttaggtctggactctgtggtggatag

SEQ ID NO: 91256 - DNA, 1434 bp, Artificial Sequence
  derived and/or modified sequence
atgactgagaatatgaaggagtgcctggcacagacaaatgctgccgtgggagacatggtgacagtggtgaaaacagaggtctgctcacctctgcgggaccaggagtatgggcagccttgttccaggagaccagattcctctgccatggaagtcgagccaaagaagttaaaaggcaagcgcgacctgatcgtgcctaaaagctttcagcaggtcgatttctggttttgtgaaagttgccaggagtatttcgtggatgagtgtccgaatcacggcccaccagtcttcgtgtcggacacccctgtccccgtaggcatccccgacagagctgctctcaccattcctcaaggtatggaggtagttaaagatacttctggggagtcagacgttaggtgcgtaaacgaagtgattcctaaaggacacatcttcggcccatacgagggccagatctctacccaggataagagcgctggttttttctcctggcttatagtggacaagaataatcgttacaaaagcattgatggatctgatgagacaaaggcaaattggatgcggtacgtagttatttcacgggaagaaagagaacaaaatcttctggcatttcagcattcagagagaatctatttccgtgcttgccgcgatataaggcccggagagtggttgcgcgtgtggtactccgaggactacatgaaacgactgcacagtatgagtcaggagaccattcaccgcaatctcgcccgtggcgaaaaacggctccaacgcgagaagagtgaacaagtactggataatcctgaagacctacgagggcctatccatctatcagttttacgtcaagggaagtccccctataaaagaggtttcgacgagggagacgttcatccccaggccaaaaaaaaaaagattgacctgatattcaaggatgtcttggaggcctcgttggaatcggcaaaggtagaagcccatcagttggcactcagcacatcattggtgatacgcaaggtgcccaaataccaggacgacgcctattcccagtgtgccaccaccatgacacacggcgtgcagaacatcggtcagacacagggagaaggcgattggaaggtgcctcagggggtctctaaagagcccggtcagctagaggacgaggaagaagaaccttcttcctttaaagcagacagtccagcagaagcaagtttggcctccgatccccatgagctcccaacgacttccttctgtccaaactgcatccggctcaagaaaaaagtacgggaactgcaggctgaactggacatgctcaaatcggggaaactcccagagcccccagtgctgcccccacaggtgttggaactccctgagttctcggaccctgccggaaagctggtctggatgaggctgctctccgagggtcgcgtccgcagtggattgtgcggcggttag

SEQ ID NO: 91257 - DNA, 1536 bp, Artificial Sequence
  derived and/or modified sequence
atgttgaagatggcagagccaattgcatccctgatgatcgtggagtgccgggcctgcctgagatgctcacctctcttcctttaccagagagagaaagacagaatgaccgagaacatgaaggagtgcttggcccagaccaatgcagccgtgggggatatggtgacggtggtgaagacggaggtctgctcaccactccgagaccaggagtatggccagccctgctctaggagaccggactcctcggccatggaagttgagcccaagaaactgaaggggaagcgcgacctcatcgtgcccaaaagcttccagcaagtggacttctggttctgtgagtcctgccaggagtacttcgtggatgaatgcccaaaccatggccccccggtgtttgtgtctgacacaccggtgcccgtgggcatcccagaccgggcggcgctcaccatcccacagggcatggaggtggtcaaggacactagtggagagagtgacgtgcgatgtgtaaacgaggtcatccccaagggccacatcttcggcccctatgaggggcagatctccacccaggacaaatcagctggcttcttctcctggctgattgtggacaagaacaaccgctataagtccatagatggctcagacgagaccaaagccaactggatgaggtacgtggtcatctcccgggaggagagggagcagaacctgctggcgttccagcacagtgagcgcatctacttccgggcgtgcagggacatccggcctggggagtggctgcgggtctggtacagcgaggactacatgaagcgcctgcacagcatgtcccaggaaaccattcaccgcaacctggccagaggagagaagaggttgcagagggagaagtctgagcaggttctggataacccagaagacctgaggggtcccattcatctctctgtgctgagacagggcaaaagtccctacaagcgtggctttgatgagggggatgtacacccccaagctaagaagaagaaaattgacctgattttcaaggatgttctggaggcctcactggaatctgcgaaggtggaagcccaccagttggccctgagcacctcactggtcatcaggaaagtccccaaataccaggatgacgcctacagtcagtgtgcaacaacaatgacccatggtgtgcagaatataggccagacccagggggagggggactggaaggtcccccagggggtctccaaggagccaggccaattggaggatgaagaagaggagccttcatcattcaaggccgacagtcctgccgaggcctcccttgcatctgaccctcatgaacttcccaccacctctttttgccctaactgtattcgcctaaagaagaaggttcgggagctccaggcagaattagacatgcttaagtctgggaaacttcctgagccccccgtattgccaccacaggtactggagctcccagagttctcggaccctgcaggtaagttggtttggatgagattattgtcggagggcagagtacgcagtgggctgtgtggagggtag

SEQ ID NO: 91258 - DNA, 1858 bp, Artificial Sequence
  derived and/or modified sequence
agttctcgcggacgccctcggccccgcgccgggggctgctgcggggtgctcggggatgaaggtgggaggcgtcctttgggatgcgacgaagccttctccatcgcggttcgcgattgcccgcgaagcgtggccgagccggagggcatttctggaatgcgttttaagtgtcagttgcggtgtagactcttcgggaaacctctccggagcgtagcctccaccccccactcgcagtccccaaggacagaatgaccgagaacatgaaggagtgcttggcccagaccaatgcagccgtgggggatatggtgacggtggtgaagacggaggtctgctcaccactccgagaccaggagtatggccagccctgctctaggagaccggactcctcggccatggaagttgagcccaagaaactgaaggggaagcgcgacctcatcgtgcccaaaagcttccagcaagtggacttctggttctgtgagtcctgccaggagtacttcgtggatgaatgcccaaaccatggccccccggtgtttgtgtctgacacaccggtgcccgtgggcatcccagaccgggcggcgctcaccatcccacagggcatggaggtggtcaaggacactagtggagagagtgacgtgcgatgtgtaaacgaggtcatccccaagggccacatcttcggcccctatgaggggcagatctccacccaggacaaatcagctggcttcttctcctggctgattgtggacaagaacaaccgctataagtccatagatggctcagacgagaccaaagccaactggatgaggtacgtggtcatctcccgggaggagagggagcagaacctgctggcgttccagcacagtgagcgcatctacttccgggcgtgcagggacatccggcctggggagtggctgcgggtctggtacagcgaggactacatgaagcgcctgcacagcatgtcccaggaaaccattcaccgcaacctggccagaggagagaagaggttgcagagggagaagtctgagcaggttctggataacccagaagacctgaggggtcccattcatctctctgtgctgagacagggcaaaagtccctacaagcgtggctttgatgagggggatgtacacccccaagctaagaagaagaaaattgacctgattttcaaggatgttctggaggcctcactggaatctgcgaaggtggaagcccaccagttggccctgagcacctcactggtcatcaggaaagtccccaaataccaggatgacgcctacagtcagtgtgcaacaacaatgacccatggtgtgcagaatataggccagacccagggggagggggactggaaggtcccccagggggtctccaaggagccaggccaattggaggatgaagaagaggagccttcatcattcaaggccgacagtcctgccgaggcctcccttgcatctgaccctcatgaacttcccaccacctctttttgccctaactgtattcgcctaaagaagaaggttcgggagctccaggcagaattagacatgcttaagtctgggaaacttcctgagccccccgtattgccaccacaggtactggagctcccagagttctcggaccctgcaggtaagttggtttggatgagattattgtcggagggcagagtacgcagtgggctgtgtggagggtagcctaaagctctctgtggaaaccaccttccgggagacctgaggagtgtaacgtggaggcggctacctccgtgggtgggagcccaggtcctcagtgtctctggcagacccatcggcagctctgccaggtgctccatgtgttgcccttgtatcctccttgtcaataaaggaagttccgctgc

SEQ ID NO: 91259 - protein, 476 aa, Artificial Sequence
  derived and/or modified sequence
MECPHLSSSVCIAPDSAKFPNGSPSSWCCSVCRSNKSPWVCLTCSSVHCGSYRCDDFVVNDTKLGLVQKVREHLQNLENSAFTADRHKKRKLLENSTLNSKLLKVNGSTTAICATGLRNLGNTCFMNAILQSLSNIEQFCCYFKELPAVELRNGKTAGRRTYHTRSQGDNNVSLVEEFRKTLCALWQGSQTAFSPESLFYVVWKIMPNFRGYQQQDAHEFMRYLLDHLHLELQGGFNGVSRSAILQENSTLSASNKCCINGASTVVTAIFGGILQNEVNCLICGTESRKFDPFLDLSLDIPSQFRSKRSKNQENGPVCSLRDCLRSFTDLEELDETELYMCHKCKKKQKSTKKFWIQKLPKVLCLHLKRFHWTAYLRNKVDTYVEFPLRGLDMKCYLLEPENSGPESCLYDLAAVVVHHGSGVGSGHYTAYATHEGRWFHFNDSTVTLTDEETVVKAKAYILFYVEHQAKAGSDKL

SEQ ID NO: 91260 - DNA, 1431 bp, Artificial Sequence
  derived and/or modified sequence
atggagtgcccccacctgagcagcagcgtgtgcatcgcccccgacagcgccaagttccccaacggcagccccagcagctggtgctgcagcgtgtgcagaagcaacaagagcccctgggtgtgcctgacctgcagcagcgtgcactgcggcagctacagatgcgacgacttcgtggtgaacgacaccaagctgggcctggtgcagaaggtgagagagcacctgcagaacctggagaacagcgccttcaccgccgacagacacaagaagagaaagctgctggagaacagcaccctgaacagcaagctgctgaaggtgaacggcagcaccaccgccatctgcgccaccggcctgagaaacctgggcaacacctgcttcatgaacgccatcctgcagagcctgagcaacatcgagcagttctgctgctacttcaaggagctgcccgccgtggagctgagaaacggcaagaccgccggcagaagaacctaccacaccagaagccagggcgacaacaacgtgagcctggtggaggagttcagaaagaccctgtgcgccctgtggcagggcagccagaccgccttcagccccgagagcctgttctacgtggtgtggaagatcatgcccaacttcagaggctaccagcagcaggacgcccacgagttcatgagatacctgctggaccacctgcacctggagctgcagggcggcttcaacggcgtgagcagaagcgccatcctgcaggagaacagcaccctgagcgccagcaacaagtgctgcatcaacggcgccagcaccgtggtgaccgccatcttcggcggcatcctgcagaacgaggtgaactgcctgatctgcggcaccgagagcagaaagttcgaccccttcctggacctgagcctggacatccccagccagttcagaagcaagagaagcaagaaccaggagaacggccccgtgtgcagcctgagagactgcctgagaagcttcaccgacctggaggagctggacgagaccgagctgtacatgtgccacaagtgcaagaagaagcagaagagcaccaagaagttctggatccagaagctgcccaaggtgctgtgcctgcacctgaagagattccactggaccgcctacctgagaaacaaggtggacacctacgtggagttccccctgagaggcctggacatgaagtgctacctgctggagcccgagaacagcggccccgagagctgcctgtacgacctggccgccgtggtggtgcaccacggcagcggcgtgggcagcggccactacaccgcctacgccacccacgagggcagatggttccacttcaacgacagcaccgtgaccctgaccgacgaggagaccgtggtgaaggccaaggcctacatcctgttctacgtggagcaccaggccaaggccggcagcgacaagctgtag

SEQ ID NO: 91261 - DNA, 1431 bp, Artificial Sequence
  derived and/or modified sequence
atggaatgcccacatctcagttcaagcgtgtgtatcgcgcctgactccgccaagttccctaatggctccccctcttcatggtgctgctcagtgtgcagaagcaacaaatccccatgggtctgtctgacttgctcttcagtgcactgtggatcttacaggtgtgacgattttgtggttaacgatacgaaactggggctcgtgcagaaagtccgtgagcatctccaaaacctagagaacagcgccttcaccgccgacaggcataaaaagcggaagctgctggagaattccaccttaaacagcaagcttctgaaagtcaacgggtcgaccacagctatatgcgcaaccggactgaggaacctcggaaacacatgctttatgaacgctatattgcagtccctcagcaatatcgaacagttctgttgttatttcaaagagctcccagctgtggagcttcggaacggcaagactgctggaaggaggacttatcatacccgttcccagggagacaataacgtatcgctcgtcgaggaatttagaaaaaccctctgcgcactctggcagggaagtcagacagctttctctcccgaatcccttttctatgtggtgtggaagattatgcctaattttaggggctatcagcagcaggacgctcacgagttcatgaggtatctgttagaccacctccatttagagctgcagggcgggtttaatggtgtgagccgatctgctatcctccaggaaaattctacgctgtccgcatctaataagtgctgcatcaacggagcctctaccgtggtcactgctatctttgggggaattctgcagaatgaggtgaactgcctcatctgcggtactgagagtcgcaaatttgatccatttctggacctgagcctggatatacccagtcaatttcgatccaagcgtagtaagaaccaggaaaacggcccagtgtgcagccttcgggactgcctgcgctcttttactgatcttgaggagctcgatgaaacagaattgtatatgtgccataaatgcaagaagaaacagaaatctactaaaaaattctggattcagaaattacctaaggtgctgtgtttgcatcttaaacgttttcattggaccgcctatctgcgcaacaaggtcgacacttatgtggagtttccactgcgaggcttagatatgaagtgctacctcctagaacccgagaatagtgggcctgagagttgcctttacgacctggctgcagtagtggtgcaccacgggtcaggcgtgggtagtggccattatacggcttatgctacgcacgaagggagatggtttcatttcaatgattctacggtcactctgacagacgaagagacggtggtgaaagctaaagcatatattcttttctacgtggagcatcaggccaaagccggatctgacaaactgtag

SEQ ID NO: 91262 - DNA, 1431 bp, Artificial Sequence
  derived and/or modified sequence
atggagtgcccccacctgagcagctctgtgtgcatcgccccagacagcgccaagttccccaacggcagccccagctcctggtgctgcagcgtgtgccgcagcaacaagagcccctgggtgtgcctgacctgcagctctgtgcactgcggcagctaccgctgtgatgactttgtggtgaatgacaccaagctgggcctggtgcagaaggtgcgggagcacctgcagaacctggagaacagcgccttcaccgctgacagacacaagaagaggaagctgctggagaacagcaccctgaacagcaagctgctgaaggtgaatggcagcaccacagccatctgtgccaccggcctgaggaacctgggcaacacctgcttcatgaatgccatcctgcagagcctgagcaacatcgagcagttctgctgctacttcaaggagctgcctgctgtggagctgagaaatggcaagacagctggaagaaggacctaccacaccaggagccagggcgacaacaacgtgtccctggtggaggagttcaggaagaccctgtgtgccctgtggcagggcagccagacagccttcagccctgagagcctcttctacgtggtgtggaagatcatgcccaacttccggggctaccagcagcaggatgcccacgagttcatgagatacctgctggaccacctgcacctggagctgcagggcggcttcaatggagtgagccgcagcgccatcctgcaggagaacagcaccctgagcgccagcaacaagtgctgcatcaacggggccagcacagtggtgacagccatctttggaggcatcctgcagaatgaggtgaactgcctgatctgtggcacagagagcaggaagtttgaccccttcctggacctgagcctggacatccccagccagttccgcagcaagaggagcaagaaccaggagaatggacctgtgtgcagcctgcgggactgcctgcggagcttcacagacctggaggagctggatgaaacagagctgtacatgtgccacaagtgcaagaagaagcagaagagcaccaagaagttctggatccagaagctgcccaaggtgctgtgcctgcacctgaagcgcttccactggacagcctacctgaggaacaaggtggacacctacgtggagttccccctgcggggcctggacatgaagtgctacctgctggagccagaaaattctggccctgagagctgcctgtatgacctggccgctgtggtggtgcaccacggcagcggcgtgggcagcggccactacacagcctatgccacccatgagggccgctggttccacttcaatgacagcacagtgaccctgacagatgaggagaccgtggtgaaggccaaggcctacatcctcttctacgtggagcaccaggccaaggccggcagtgacaagctgtag

SEQ ID NO: 91263 - DNA, 1431 bp, Artificial Sequence
  derived and/or modified sequence
atggagtgcccccacctgagcagcagcgtgtgcatcgcccccgactccgcaaagtttcctaacggcagtccctccagctggtgttgttctgtctgtagatctaataaaagcccatgggtgtgcttgacctgcagcagtgtccattgcggctcttaccgatgtgacgacttcgtcgtgaacgacactaaactggggttggtgcagaaagtaagggaacatctgcagaatttggagaacagcgcctttacagccgatcgtcacaagaagagaaaacttttggagaactcaacgctgaatagcaagttgttgaaagtgaacggctccacgaccgccatctgtgccacgggtttaagaaacctaggtaacacatgcttcatgaatgccatattgcagtctctgagcaatatcgagcagttttgctgctacttcaaggagctgccagctgtggagttaaggaatggcaaaacagccggacgccggacttaccacaccagatcgcaaggcgacaataacgtctctcttgttgaggagtttcgaaagaccttatgtgcactttggcagggttctcagactgcctttagccctgaatcattattctacgtcgtatggaagattatgccaaattttagagggtaccagcaacaggacgcccatgagttcatgaggtacctgttggaccacttacacctggagttgcagggcggcttcaacggggtgagccgctctgccatcctccaggaaaacagtaccttatcagcttccaacaagtgctgcatcaatggagcatccaccgtagtgacagcaatcttcggaggcatcctgcagaatgaggtgaattgtcttatttgcggcacagaatcacggaagttcgatccgtttctcgacctttccttggatatcccgagccagtttcggagtaaacggagcaaaaatcaagaaaacggtccggtctgcagccttagggattgcctccgttctttcacagatctggaagaactggatgagaccgagttgtatatgtgtcacaagtgcaagaaaaagcagaaatccaccaaaaaattttggatccaaaaactgcccaaagtgctttgcctccacttgaaacggtttcattggacagcctacttacggaacaaagtcgatacttacgtcgaatttcccctgcgcggcctcgatatgaaatgttacctgctggagcctgaaaacagcgggcccgagagctgcctgtacgatctggcagctgttgtcgtacaccatggctcgggggtcggcagtggccactacacagcctacgcgacacacgaaggccgatggtttcacttcaacgattccaccgtgaccctcaccgatgaggagacagtggtaaaagcgaaggcttatatccttttttacgtggagcaccaagctaaagcaggatctgataagctgtag

SEQ ID NO: 91264 - DNA, 1431 bp, Artificial Sequence
  derived and/or modified sequence
atggaatgtccccacctgtctagctccgtgtgtatagcccctgattcagctaagtttcctaatgggagtccgagctcctggtgttgttcagtgtgccgatccaataagtccccctgggtgtgcctgacttgtagctccgttcactgtggatcctacagatgtgatgacttcgtggtgaacgacaccaagcttggcctggtacagaaagtgcgagaacatctccagaacctcgagaattccgcctttaccgccgatcggcacaagaagcgaaaactcctggagaattcaactctgaatagcaaactactgaaagtgaatggctccactaccgctatctgtgctactgggctccgcaaccttgggaacacctgctttatgaacgctatcctgcagtctctgtccaacatcgaacagttctgttgttatttcaaggaactgcccgctgtggaactgcggaatggaaagactgcaggacgtaggacatatcacacccgttctcagggcgataataacgtcagcttagttgaggaattccgcaagaccttatgtgctctctggcaaggctcgcaaacagctttctctccagagtctttattttatgtggtctggaaaattatgccaaatttcagggggtaccagcagcaggatgcccacgaattcatgaggtatttgctggatcatctgcacctggagctgcaaggcggatttaacggagtgtctcgttccgccatcctgcaggagaactcgacattgagtgctagcaacaaatgttgcattaacggggcaagtaccgtggtcacagcaattttcggtgggattctgcagaacgaggtaaattgtctgatctgcggaactgagtccagaaagtttgacccctttctggatttatcactcgacattccgagtcagttcaggagtaaacgctctaaaaaccaagaaaacggccctgtgtgttctctcagagattgcctccgatcattcactgatctggaagagctggatgaaacggagctttacatgtgccacaagtgtaaaaaaaaacaaaaaagcaccaaaaaattctggattcagaagctccccaaagtcttatgcctacatttgaagcggttccactggaccgcttacttgaggaataaggtcgacacgtacgtagagtttccgctgagaggcctggacatgaagtgttacctgctagaacctgagaacagcggccctgagtcttgtctttatgatctggcagcagtagttgtgcaccacggaagtggtgtgggctccgggcattacactgcgtacgctacgcatgaaggaagatggttccacttcaacgactccaccgtcaccctaaccgatgaggaaacagttgtgaaggcaaaggcatacatcctgttctacgtagaacatcaggctaaggccggttctgataaattgtag

SEQ ID NO: 91265 - DNA, 1972 bp, Artificial Sequence
  derived and/or modified sequence
ttctttgacgcaagggctcgagacgcagccgccgtcggccgagcgcccggctagaagcgacaccagacggagcctccggagttcctccgcccccacctcgccgggtcctggagccgcagtcctcccagctgccctcctcgtggccatggagtgtccacacctgagctccagcgtctgcattgctccggactcagccaagttccccaacggctccccgtcgtcctggtgctgcagcgtgtgccggtccaacaaaagcccttgggtctgtttgacttgttcaagtgtccactgtggaagttatcgctgtgatgattttgtggttaatgacaccaagctgggactggtacagaaagtcagagaacacttacagaacttggaaaactcagctttcacagctgacaggcataagaaaagaaaacttttggaaaactcaacactaaacagcaagttattaaaagtaaatggaagcaccactgccatttgtgccacaggccttcggaatttggggaacacatgtttcatgaatgccatccttcagtcactcagtaacattgagcagttttgctgttatttcaaagaactgcccgccgtggagttaaggaatgggaaaacagcaggaaggcggacataccacaccaggagccaaggggataacaatgtgtctttggtagaagagtttagaaagacactctgtgctttatggcaaggcagccagactgcatttagcccagagtccttattttatgttgtttggaagattatgccaaactttaggggctatcaacagcaggacgcccatgaattcatgcgctaccttttggaccacctacacttggaacttcagggcggtttcaacggtgtttcccgctcagcaattctgcaggagaattctactctgtctgcaagtaacaagtgttgcataaatggagcatctactgttgtcacggctatattcggaggcattctccaaaatgaggttaactgcctcatatgtgggacagaatctagaaagtttgatccattcctagacctttcattagatattccaagtcagttcagaagtaagcgctctaagaatcaagaaaatggaccagtttgttcgttacgagattgtcttcgcagttttaccgacttagaagaacttgatgagacagagttatatatgtgccataaatgcaaaaagaaacaaaagtccacaaaaaagttttggattcaaaaactacccaaggtgctatgcttacatttgaaaagatttcattggacagcatatttaagaaataaagttgatacatacgtagaatttccactgagaggcctagacatgaaatgctacttactagagcctgagaacagtggcccggagagctgcctgtatgacctcgccgctgtggtggtgcaccatggttccggggttggttctggacattacacagcatacgcaactcacgaaggccgctggttccacttcaatgacagtactgtaacactgactgacgaggagactgtggtgaaggcgaaggcctacatccttttctacgtggaacaccaggccaaagctggatcggataaactttaatacctcctccaaatcatcattcaccaaccataccagagaaacatttccagttttccacaaatacttgatacaagatttaatttcattatgcacttttcaatttcctattttggatttagttttgtcaatggtagtgacttactgaacatgggcaccaactaattttgttgttgttctaccagaaaacctcagcagatgttttgatttgctgctttagttgtaataattcaatttttataggtagttgtaagaacttagtcttatttgacttttttattttatgttaatgttttcagttctcactttgaggcacatttacatcaatgcttttgttcctctcacatgctgaaagcaagatgtgttccttattgtgaagagcgacacaactgcctgctg

SEQ ID NO: 91266 - protein, 462 aa, Artificial Sequence
  derived and/or modified sequence
MLAVPNMRFGIFLLWWGWVLATESRMHWPGREVHEMSKKGSPILRRSPDITKSPLTKSEQLLRIDDHDFSMRPGFGGPAIPVGVDVQVESLDSISEVDMDFTMTLYLRHYWKDERLSFPSTNNLSMTFDGRLVKKIWVPDMFFVHSKRSFIHDTTTDNVMLRVQPDGKVLYSLRVTVTAMCNMDFSRFPLDTQTCSLEIESYAYTEDDLMLYWKKGNDSLKTDERISLSQFLIQEFHTTTKLAFYSSTGWYNRLYINFTLRRHIFFFLLQTYFPATLMVMLSWVSFWIDRRAVPARVPLGITTVLTMSTIITGVNASMPRVSYIKAVDIYLWVSFVFVFLSVLEYAAVNYLTTVQERKEQKLREKLPCTSGLPPPRTAMLDGNYSDGEVNDLDNYMPENGEKPDRMMVQLTLASERSSPQRKSQRSSYVSMRIDTHAIDKYSRIIFPAAYILFNLIYWSIFS

SEQ ID NO: 91267 - DNA, 1389 bp, Artificial Sequence
  derived and/or modified sequence
atgctggctgtgcctaatatgcgcttcggaatattcttgctctggtggggctgggtgcttgcgaccgagtctcgcatgcattggcccggaagagaagttcatgagatgagtaaaaagggcagccccattcttagaaggtcccccgatattacaaaatcccccctgaccaaaagcgagcaactgctgcgcatcgatgatcacgatttctcaatgcgaccgggattcggcggccccgctattcctgtgggcgttgatgtccaggtggagagcctggactctatttcggaggtcgacatggacttcactatgacgctttaccttaggcactactggaaggatgaaaggctgtcatttccttctactaataatctgtcaatgacattcgacgggagactggtgaagaaaatctgggtcccggacatgtttttcgttcatagtaagcgctcctttatccatgatacaactactgataatgtcatgttaagggtgcaaccggatgggaaagtgctctactccctccgggtaaccgtgacagccatgtgtaacatggacttctcccgattcccccttgacacacagacctgttccctggaaatcgaaagctacgcttacaccgaggacgacctcatgctctactggaaaaagggtaacgacagtttaaaaacagatgagaggatcagtctgtcgcaattcttgattcaggagttccatactactaccaaactagccttctacagcagcaccggttggtataaccgcctttacataaacttcactttgcggcggcatatattctttttcctgctccaaacatatttcccagctactttgatggtcatgctgtcctgggtgtccttttggattgacagacgggcggtcccggcacgcgtgcccttgggcattaccacagtgctgaccatgtccactatcatcaccggggtcaatgcttctatgcctcgggtcagttacatcaaagctgtcgatatctatctgtgggtgagcttcgtctttgtcttcctttcagtgttggaatacgccgctgttaactacctcaccaccgtgcaggaaagaaaagaacaaaaacttagagagaagctgccctgtaccagcggactgccacctccccggactgccatgctagatggaaactactctgacggggaggtgaatgacttggataattacatgcccgagaacggtgagaaaccagaccggatgatggtgcagttgactctagctagcgaaagaagctccccccaacgtaagtcccagagaagctcatacgtgtccatgaggatcgacacccatgcgatcgataagtattccagaattattttccccgccgcctatatcctgtttaatctgatctattggtccatttttagttag

SEQ ID NO: 91268 - DNA, 3110 bp, Artificial Sequence
  derived and/or modified sequence
taataatggccgtaagcttaaaatagatccagggaggagctcattaacgtgaacatagaaagcagttccgcacctctggccttactcctcttggaaattgctttggtccatttttacttccttttattcgacgcaccagaaaataagacttttaccaacatttttactgcatttgacgatgaactaatttagaccggctaaaataattgttccactgggacacaggaattcaacctcagttcagaaaatccctgacatctgacgtaggaggatttataggtttagtggaaattgctttctcctgctctccagattgcatcctgtgggttgattttttttttgcatgagtaaacatccttctaataatgaacagaccaataatgtcttaagagagaaaaagaacaatcttttcctttttgctgtttctggagagagctgtttgaatttggaaacccatgttggctgtcccaaatatgagatttggcatctttcttttgtggtggggatgggttttggccactgaaagcagaatgcactggcccggaagagaagtccacgagatgtctaagaaaggcagcccaattctgagacgaagtcctgacatcaccaaatcgcctctgacaaagtcagaacagcttctgaggatagatgaccatgatttcagcatgaggcctggctttggaggccctgccattcctgttggtgtggatgtgcaggtggagagtttggatagcatctcagaggttgacatggactttacgatgaccctctacctgaggcactactggaaggacgagaggctgtcttttccaagcaccaacaacctcagcatgacgtttgacggccggctggtcaagaagatctgggtccctgacatgtttttcgtgcactccaaacgctccttcatccacgacaccaccacagacaacgtcatgttgcgggtccagcctgatgggaaagtgctctatagtctcagggttacagtaactgcaatgtgcaacatggacttcagccgatttcccttggacacacaaacgtgctctcttgaaattgaaagctatgcctatacagaagatgacctcatgctgtactggaaaaagggcaatgactccttaaagacagatgaacggatctcactctcccagttcctcattcaggaattccacaccaccaccaaactggctttctacagcagcacaggctggtacaaccgtctctacattaatttcacgttgcgtcgccacatcttcttcttcttgctccaaacttatttccccgctaccctgatggtcatgctgtcctgggtgtccttctggatcgaccgcagagccgtgcctgccagagtccccttaggtatcacaacggtgctgaccatgtccaccatcatcacgggcgtgaatgcctccatgccgcgcgtctcctacatcaaggccgtggacatctacctctgggtcagctttgtgttcgtgttcctctcggtgctggagtatgcggccgtcaactacctgaccactgtgcaggagaggaaggaacagaagctgcgggagaagcttccctgcaccagcggattacctccgccccgcactgcgatgctggacggcaactacagtgatggggaggtgaatgacctggacaactacatgccagagaatggagagaagcccgacaggatgatggtgcagctgaccctggcctcagagaggagctccccacagaggaaaagtcagagaagcagctatgtgagcatgagaatcgacacccacgccattgataaatactccaggatcatctttccagcagcatacattttattcaatttaatatactggtctattttctcctagatgcttgtaattctacaaatttcacatttccatggcatgcactacagaaataactgtataatgaaaaagtatttaaggatatggttaaaaaaaaatcccaggacccacccatgttttcactatcccttctgcagctttccaaagctacattgacgagacacttactggtttaatttgcacttattaaccatctattgaatacacagcattatattaggtgctgcaggaaatacgacactgtagcgactgatgttagttgttacccagatcccctggaaaagcacactaccagtgttgtgggcacatttagttccacccgttagacccttgatgctattcacatgaataatttattttcctcaagtgtcattacattgttcaggctacgtgaacttggaagcacctacaggccatttgcatgaaattcacatgcacctaaatcctcactttgacagaaactcatgcttcagtttataacctattacctattttgtatgcgactccacctccgcatgtttattttaataaaaggcaatgataacattcacattatttttctttatatgctgtggttcacaggctttaccccttcacaagaaaagctctttagattggcgcaattgcttctgattttggtgaaattttccctggtagggaaactttgaagataagagtacacacatgcattttgtctgttgtgtcatagaggtaactaggctagaaaatttgtgtttaaatgttccctattttatataatcaccacttcatgtttcttcttcttggagcatgtccttgttcaaagagaagtgctttctcagtgatgtgatatcttcactgaggaacttgggtagagaatgatttcttctgcataaacacttcaaggaaatacataatttgggactacttgtaactcattagaatgagaaatactcacatggtttcttaagagaaaaagaacatcggaaagcaaaataaatgggaagatatcactggacatctgcatttatactcgaaataccagcattttctatggaccagaaaactgccatcacctagaccacacagcccagataccaggcagacggatggcccaatggcaactgatgtcagggcatggggtaaaggagagggttctaatctggtgtatcacttaaaaacagttatttatattatatatctgctatatagatcaacctccaccaaacttacccaaacagcatttgttttatttgaaactcactttaataaagtgaattatatacacaa

SEQ ID NO: 91269 - DNA, 1389 bp, Artificial Sequence
  derived and/or modified sequence
atgctggccgtgcccaacatgagatttggcatcttcctgctgtggtggggctgggtgctggccacagagagcaggatgcactggccaggccgggaggtgcatgagatgagcaagaagggcagccccatcctgcggcgcagcccagacatcaccaagagccccctgaccaagtctgagcagctgctgagaattgatgaccatgacttctccatgaggcctggctttggaggccctgccatccctgtgggcgtggatgtgcaggtggagagcctggacagcatcagcgaggtggacatggacttcaccatgaccctgtacctgcggcactactggaaggatgagcggctgtccttccccagcaccaacaacctgtccatgacctttgatggccgcctggtgaagaagatctgggtgcctgacatgttctttgtgcacagcaagaggagcttcatccatgacaccaccacagacaacgtgatgctgcgggtgcagccagatggcaaggtgctgtacagcctgcgggtgacagtgacagccatgtgcaacatggacttcagccgcttccccctggacacccagacctgcagcctggagattgagagctatgcctacacagaagatgacctgatgctgtactggaagaagggaaatgacagcctgaagacagatgagcgcatcagcctgagccagttcctgatccaggagttccacaccaccaccaagctggccttctacagcagcacaggctggtacaaccggctgtacatcaacttcaccctgcggcggcacatcttcttcttcctgctgcagacctacttccctgccaccctgatggtgatgctgtcctgggtgtccttctggattgaccggcgggctgtgcctgcccgggtgcccctgggcatcaccaccgtgctgaccatgagcaccatcatcaccggggtgaatgcctccatgccccgggtgtcctacatcaaggctgtggacatctacctgtgggtgtcctttgtgtttgtgttcctgtctgtgctggagtatgctgctgtgaactacctgaccaccgtgcaggagaggaaggagcagaagctgcgggagaagctgccctgcaccagcggcctgcccccacccaggacagccatgctggatggcaactacagtgatggagaggtgaatgacctggacaactacatgccagaaaatggagagaagccagacaggatgatggtgcagctgaccctggccagcgagaggagcagcccccagaggaagagccagaggagcagctatgtgtccatgagaattgacacccacgccatcgacaagtacagccgcatcatcttccctgctgcctacatcctcttcaacctgatctactggagcatcttctcctag

SEQ ID NO: 91270 - DNA, 1389 bp, Artificial Sequence
  derived and/or modified sequence
atgctggccgtgcccaacatgcggttcggcatcttcctgctgtggtggggctgggtcttagctactgagtctagaatgcattggccagggagggaggtgcatgagatgtctaagaagggatcacccatattgcgcagaagcccggacattacaaaaagtcctctgaccaaatcagagcagctgcttagaatcgatgaccatgacttcagcatgcgcccgggctttggagggcctgcgatccctgtgggcgtcgatgtgcaagtggagagtctcgatagcatctcagaggtcgatatggattttaccatgaccctttatctcaggcattattggaaggacgaacgtctatctttcccatctacaaataacctcagtatgacgtttgacggaagactggtcaagaaaatttgggtgcccgacatgttcttcgttcactccaaaaggtccttcattcatgatacaactactgataacgttatgctgcgagtccagcctgatggtaaggttctgtactcactcagggttactgtaaccgccatgtgcaatatggatttctcaaggtttccactggatacgcagacttgctcacttgaaatcgagagttatgcatacaccgaggacgatctcatgctgtattggaagaaaggcaatgactccctgaagacagacgaaaggatcagcctgtcgcagtttctgattcaggagttccatacaacaacaaaactcgctttctattcaagtactgggtggtacaacagattgtacataaacttcactcttagaagacacatcttcttctttttactgcaaacctattttccagctaccctgatggtaatgctgagctgggtcagtttttggatcgaccgccgcgccgttcccgcaagggtgcctctcggcataaccaccgtcctcactatgagcacaatcattactggagtgaacgcctccatgccacgggtctcttacatcaaggccgtcgatatctatctctgggttagtttcgtgttcgtgttcttgtctgtcctggagtatgcagcagtcaattatctgacaactgtgcaggagcgaaaagagcagaagctcagagaaaagctcccctgtacaagcggactcccacctcctcggacggctatgctcgacggaaactatagcgacggggaagtaaacgatctcgataactacatgcccgaaaacggcgagaaaccagacagaatgatggtacagctaaccctggcttccgaacgatcctccccacagcgcaagtcgcagagaagctcgtatgttagcatgcgcattgacactcacgcaattgacaagtattccaggataattttccctgccgcgtacatactgttcaatctgatatattggtcgatattctcatag

SEQ ID NO: 91271 - DNA, 1389 bp, Artificial Sequence
  derived and/or modified sequence
atgctggctgtgcctaatatgagattcgggatatttcttctgtggtggggttgggtactggcaactgagtctcggatgcactggcccggaagagaagttcatgagatgtccaagaaaggcagcccaatcctaagacgatcccccgatatcacaaagagcccactgaccaagtcggaacagctgctgcgtattgacgatcatgactttagtatgagaccagggttcggaggaccagctatccccgtaggggtggacgtccaggtggagtcacttgactcaatctctgaagttgatatggattttaccatgacactttacctgcgtcactattggaaggatgaacggctctctttccccagtactaataatttgtccatgactttcgatggcagattggttaaaaaaatttgggttcccgacatgtttttcgtgcactctaagaggtctttcatccacgacaccaccaccgacaatgtcatgctgcgagtccagccggatgggaaggtgctctattctctgcgggtgaccgttactgcaatgtgtaacatggacttctccagatttcctctcgatacacagacgtgctccttagagattgaatcatacgcatacactgaggacgatctcatgttatactggaagaagggcaacgactctctcaagaccgatgagaggatttcactgagccagttcctcatccaggagttccacacaactacaaagcttgcgttttactcaagcactggatggtataaccgtttgtacattaattttaccctacggcgacatatcttcttcttcctcctccagacttatttccctgcaacgctcatggtcatgttgtcttgggtgagtttctggattgaccgaagggccgtcccagccagggtcccattggggattacaacggttctcaccatgtccaccataattacaggagtgaacgcctcaatgcctagagtaagctacatcaaggccgttgatatctacctctgggtgtcttttgtgtttgtgttcctgagcgtgctggagtatgccgctgtcaattacctcacaacagtgcaggaacggaaagaacagaagctgcgtgaaaaactgccctgcacaagcggtttgcccccacctcgcacggccatgctggatgggaactacagtgacggcgaggtcaatgatctggacaactatatgccagagaatggcgaaaagcctgacaggatgatggtccagctgacactggcctcggagcgatctagtccgcagcggaagagccaacggtcctcctatgtgagcatgcgtatcgacacacacgctatagataagtatagccgaatcatttttccagcagcgtacatactgttcaacttgatatactggagcatcttttcctag

SEQ ID NO: 91272 - DNA, 1389 bp, Artificial Sequence
  derived and/or modified sequence
atgctggccgtgcccaacatgagattcggcatcttcctgctgtggtggggctgggtgctggccaccgagagcagaatgcactggcccggcagagaggtgcacgagatgagcaagaagggcagccccatcctgagaagaagccccgacatcaccaagagccccctgaccaagagcgagcagctgctgagaatcgacgaccacgacttcagcatgagacccggcttcggcggccccgccatccccgtgggcgtggacgtgcaggtggagagcctggacagcatcagcgaggtggacatggacttcaccatgaccctgtacctgagacactactggaaggacgagagactgagcttccccagcaccaacaacctgagcatgaccttcgacggcagactggtgaagaagatctgggtgcccgacatgttcttcgtgcacagcaagagaagcttcatccacgacaccaccaccgacaacgtgatgctgagagtgcagcccgacggcaaggtgctgtacagcctgagagtgaccgtgaccgccatgtgcaacatggacttcagcagattccccctggacacccagacctgcagcctggagatcgagagctacgcctacaccgaggacgacctgatgctgtactggaagaagggcaacgacagcctgaagaccgacgagagaatcagcctgagccagttcctgatccaggagttccacaccaccaccaagctggccttctacagcagcaccggctggtacaacagactgtacatcaacttcaccctgagaagacacatcttcttcttcctgctgcagacctacttccccgccaccctgatggtgatgctgagctgggtgagcttctggatcgacagaagagccgtgcccgccagagtgcccctgggcatcaccaccgtgctgaccatgagcaccatcatcaccggcgtgaacgccagcatgcccagagtgagctacatcaaggccgtggacatctacctgtgggtgagcttcgtgttcgtgttcctgagcgtgctggagtacgccgccgtgaactacctgaccaccgtgcaggagagaaaggagcagaagctgagagagaagctgccctgcaccagcggcctgcccccccccagaaccgccatgctggacggcaactacagcgacggcgaggtgaacgacctggacaactacatgcccgagaacggcgagaagcccgacagaatgatggtgcagctgaccctggccagcgagagaagcagcccccagagaaagagccagagaagcagctacgtgagcatgagaatcgacacccacgccatcgacaagtacagcagaatcatcttccccgccgcctacatcctgttcaacctgatctactggagcatcttcagctag

SEQ ID NO: 91273 - DNA, 868 bp, Artificial Sequence
  derived and/or modified sequence
attgagctgcgacccttgttcaacgccgttggcgaagccagctgctggaggtgccgagaatctgagtttcggcaagcagccagaatattttaaaaatgactacaccaaacaagacacctcctggtgctgaccccaagcagttggaaaggactggaacagtacgggaaattgggtcacaagctgtttggtcactctcatcttgcaaaccaggatttggagtggatcagttacgagatgacaatctagaaacttattggcaatcagatggttcccagcctcatttagtgaacatccaattcagaagaaaaacaacagtgaagacattatgtatttatgcagactacaaatctgatgaaagctatactccaagcaagatctcagtcagagtaggaaataattttcacaaccttcaagaaattcggcaacttgagttggtggaaccaagtggctggattcatgttcccttaactgacaatcataagaagccaactcgtacattcatgatacagattgctgttctagccaatcaccagaatggaagagacacccatatgagacaaattaaaatatacacaccagtagaagagagctccattggtaaatttcctagatgtacaactatagatttcatgatgtatcgttcaataaggtgactttaaaatgagacgaaaatcattaaacgtatctttgttttatcctgtatttaaataatatatcatgtacctttattgaacaaggcatccgttatatctaattttgtatatgtttaaaaatattttattgtaactttgacaaataaatttggggtcatattatctttattttctttaacatgtaataaagctcacatattttacattactaaaaa

SEQ ID NO: 91274 - DNA, 928 bp, Artificial Sequence
  derived and/or modified sequence
gccgttggcgaagccagctgctggaggtgccgagaatctgagtttcggcaagcagccaggtctggaaactgtaacaggacattcagttagtaatgatggttgcaggttgaatagtctcgccctagatctcacctaacttgcagaatattttaaaaatgactacaccaaacaagacacctcctggtgctgaccccaagcagttggaaaggactggaacagtacgggaaattgggtcacaagctgtttggtcactctcatcttgcaaaccaggatttggagtggatcagttacgagatgacaatctagaaacttattggcaatcagatggttcccagcctcatttagtgaacatccaattcagaagaaaaacaacagtgaagacattatgtatttatgcagactacaaatctgatgaaagctatactccaagcaagatctcagtcagagtaggaaataattttcacaaccttcaagaaattcggcaacttgagttggtggaaccaagtggctggattcatgttcccttaactgacaatcataagaagccaactcgtacattcatgatacagattgctgttctagccaatcaccagaatggaagagacacccatatgagacaaattaaaatatacacaccagtagaagagagctccattggtaaatttcctagatgtacaactatagatttcatgatgtatcgttcaataaggtgactttaaaatgagacgaaaatcattaaacgtatctttgttttatcctgtatttaaataatatatcatgtacctttattgaacaaggcatccgttatatctaattttgtatatgtttaaaaatattttattgtaactttgacaaataaatttggggtcatattatctttattttctttaacatgtaataaagctcacatattttacattactaaaaa

SEQ ID NO: 91275 - DNA, 608 bp, Artificial Sequence
  derived and/or modified sequence
gccaggtctggaaactgtgagtgtgtgggcttttctccgacgtcgagcgtggtcctagcgtaaacagatgcattcgcctctccggtttcaatctttttttacgtttgcgctttcctcaaggccggtgggtcaggagtggagccttagtcattctaacgctggaggtgtcagtaggaccaacagagtctggtgccgacacggcttactgttgcgcgctcttctaggcctcaacttcctctcaactgtgtggtaacaggacattcagttagtaatgatggttgcaggttgaatagtctcgccctagatctcacctaacttgcagtaagtatcaagtgcttgtgtgccgattaaagaacaacttcggatacaatgggaggtgtcaaggaaacgaatattttaaaaatgactacaccaaacaagacacctcctggtgctgaccccaagcagttggaaaggactggaacagtacgggaaattgggtcacaagctgtttggtcactctcatcttgcaaaccaggatttggagtggatcagttacgagatgacaatctagaaacttattggcaatcagatggttcccagcctcatttagtgaacatccaattcag

SEQ ID NO: 91276 - DNA, 794 bp, Artificial Sequence
  derived and/or modified sequence
acgcgctgctgctgtctccgccacctaaggcctaaccaaaggctctcggagaacgtccctacattctttccaacctggcagatggcagctaacggccaaacctctccgggctattcacgtacctggagaaaacgatccccttgcggaggggagcacagaggccaaatcagctcttgccttcacttttcagccacacagcgtgttctcacggccaccggccaaaatggcggtgcccagccgccgcacgcgcaagccataggacgtagtgcgcgcgcgcgacatagagcgtgaggcggaaccctggagaatattttaaaaatgactacaccaaacaagacacctcctggtgctgaccccaagcagttggaaaggactggaacagtacgggaaattgggtcacaagctgtttggtcactctcatcttgcaaaccaggatttggagtggatcagttacgagatgacaatctagaaacttattggcaatcagatggttcccagcctcatttagtgaacatccaattcagaagaaaaacaacagtgaagacattatgtatttatgcagactacaaatctgatgaaagctatactccaagcaagatctcagtcagagtaggaaataattttcacaaccttcaagaaattcggcaacttgagttggtggaaccaagtggctggattcatgttcccttaactgacaatcataagaagccaactcgtacattcatgatacagattgctgttctagccaatcaccagaatggaagagacacccatatgagacaaattaaaatata

SEQ ID NO: 91277 - DNA, 207 bp, Artificial Sequence
  derived and/or modified sequence
atgactacccctaacaagacgccaccgggagcggatcctaaacagttagaacgcaccgggacagtccgagaaatcgggtctcaagctgtgtggtccctgtcttcctgcaagcctggatttggcgtggatcaactgcgcgatgataatcttgagacctattggcagtctgacgggagccagccccatttggtgaacattcagttctag

SEQ ID NO: 91278 - DNA, 207 bp, Artificial Sequence
  derived and/or modified sequence
atgaccacccccaacaagaccccacctggagctgaccccaagcagctggagaggactggaacagtgcgggagatcggcagccaggccgtgtggagcctgagcagctgcaagccaggcttcggcgtggaccagctgagagatgacaacctggagacctactggcagagtgatggcagccagccccacctggtgaacatccagttctag

SEQ ID NO: 91279 - DNA, 207 bp, Artificial Sequence
  derived and/or modified sequence
atgaccacccccaacaagaccccccccggcgccgaccccaagcagttggagaggacgggaacagtgagggaaattggaagccaggctgtgtggagcctgtcttcatgcaagcctggattcggcgtcgaccaactccgcgatgataacctggagacatattggcagagcgacgggtcacaacctcacctagtgaacatccaattctag

SEQ ID NO: 91280 - DNA, 207 bp, Artificial Sequence
  derived and/or modified sequence
atgacgaccccaaataaaactcctccgggagctgacccaaagcaactcgaaaggacggggactgtgcgtgaaattggaagccaagctgtttggtcattgtccagttgcaaaccaggcttcggggttgaccagctgcgggatgacaatctggaaacctactggcagtctgacggttcccagccccacctagtcaacattcagttttag

SEQ ID NO: 91281 - DNA, 207 bp, Artificial Sequence
  derived and/or modified sequence
atgaccacccccaacaagaccccccccggcgccgaccccaagcagctggagagaaccggcaccgtgagagagatcggcagccaggccgtgtggagcctgagcagctgcaagcccggcttcggcgtggaccagctgagagacgacaacctggagacctactggcagagcgacggcagccagccccacctggtgaacatccagttctag

SEQ ID NO: 91282 - protein, 608 aa, Artificial Sequence [sequence omitted]

SEQ ID NO: 91283 - DNA, 2226 bp, Artificial Sequence
  derived and/or modified sequence
atgcttccattgcttgattcctcgaaaagggcggggactctgggcagcggttgtggagtgccgcgggtccacagtgctgcactgagcagagaggaaggggcgtcccgggatatttggaggataaaggtgtgggcaagggtgatgaccacacctgccggctccggcagcggcttcggctccgtgtcctggtggggcctgtccccggcgctggacctgcaggctgaaagggatgctacggtggacgctctgccaaccaccatggtgccccagccagctgtcatcttgccaggtcctcctgtggacccagactcccaggccgatacagtgcacagcaaccccgagctagatgtgctgcttctgggctctgtggatggacggcacctgctgcggaccctgtcccgagcgaagttctggcctcgcaggaggttcaacttctttgtgctggagaataatctggaagctgtggcccgacacatgctgatcttcagcctagccctggaggaaccggagaagatggggctgcaagagcgaagcgagaccttcctggaagtgtgggggaacgcgctgctgcgcccgccagtggccgccttcgtgcgtgcccaggccgacctgctggcgcacctggtccccgagcccgaccgcctggaggaacagctgccctggctcagcctccgcgccctcaagttccgcgagcgggatgccctggaggccgtattccgcttctgggctggcggcgagaaagggccccaggcgttccccatgagccgcctctgggactcgcgcctgcgccactacctgggctcccgctacgacgcccggcgcggtgtcagcgactgggacctgcgcatgaagctgcatgaccgcggggctcaagtcattcacccccaggagttccgacgctggcgggacacaggcgtcgcctttgaactcagggactccagcgcctatcatgtgcccaaccggaccctggcgtccggtcgcctcctgagctaccgtggggagcgcgtggcagcgcgcgggtactggggggacatcgccacggggcccttcgtggccttcggcatcgaagcggacgacgagagcctcctgcggacgagcaacggccagccagtcaagacggccggggagatcactcaacacaacgtgacggagctgctccgcgacgtggccgcctgggggcgcgcgagagccaccgggggggacctggaggagcagcagcacgcggagggaagcccggagccagggactccagccccgaccccggaatctttcaccgtccacttcctgccgctcgattctgctcagactctccaccacaagagctgctacaacggccgattccagctcctctatgtggcctgtggtatggtccatcttctcatccctgagcttggggcctgtgtggcacccggagggaacttgattgtggaattagcccggtacctggtggacgtgcggcaggagcagctgcagggattcaacacccgggtcagggagctagctcaggcagctggatttgctccacagaccggggccaggccttcagagaccttcgcacgtttctgcaagtcccaggaatcagctctgggcaacactgtcccagctgtggaacccggaactccgccccttgacatcctggcccagcctcttgaagccagcaacccagcccttgagggcctgacccagcctctgcagggtgggaccccacactgtgagccctgccagctgccctctgagtctccaggttcactctcagaggttctggctcagcctcagggggccttggctccgcccaactgtgagtcagactccaaaactggagtctgacccaacccctagacaccccttatctccaacttccaaagtcaggttgtaggatgagaacccgctgataccattctaagtccgctgctagagtcctcaattttattctaatcattcccactcagtacccgccacccccaccccgggagtgttggtagactttcaaattccatttctgagattctatggtctattcctagaattctagattgttctctcagaattccaaattccacttctgaggctctaagcccagcctaggatctgacactgagtctcaggcccttgactttggcccccttgttcccaggcaccctgtggctgactaggggctggggtgtctcctcaccagggcctggtcagcacccagatggttcaagtaaagcaagttgtgtccaccct

SEQ ID NO: 91284 - DNA, 1827 bp, Artificial Sequence
  derived and/or modified sequence
atgctgcccctgctggacagcagcaagagagccggcaccctgggcagcggctgcggcgtgcccagagtgcacagcgccgccctgagcagagaggagggcgccagcagagacatctggagaatcaaggtgtgggccagagtgatgaccacccccgccggcagcggcagcggcttcggcagcgtgagctggtggggcctgagccccgccctggacctgcaggccgagagagacgccaccgtggacgccctgcccaccaccatggtgccccagcccgccgtgatcctgcccggcccccccgtggaccccgacagccaggccgacaccgtgcacagcaaccccgagctggacgtgctgctgctgggcagcgtggacggcagacacctgctgagaaccctgagcagagccaagttctggcccagaagaagattcaacttcttcgtgctggagaacaacctggaggccgtggccagacacatgctgatcttcagcctggccctggaggagcccgagaagatgggcctgcaggagagaagcgagaccttcctggaggtgtggggcaacgccctgctgagaccccccgtggccgccttcgtgagagcccaggccgacctgctggcccacctggtgcccgagcccgacagactggaggagcagctgccctggctgagcctgagagccctgaagttcagagagagagacgccctggaggccgtgttcagattctgggccggcggcgagaagggcccccaggccttccccatgagcagactgtgggacagcagactgagacactacctgggcagcagatacgacgccagaagaggcgtgagcgactgggacctgagaatgaagctgcacgacagaggcgcccaggtgatccacccccaggagttcagaagatggagagacaccggcgtggccttcgagctgagagacagcagcgcctaccacgtgcccaacagaaccctggccagcggcagactgctgagctacagaggcgagagagtggccgccagaggctactggggcgacatcgccaccggccccttcgtggccttcggcatcgaggccgacgacgagagcctgctgagaaccagcaacggccagcccgtgaagaccgccggcgagatcacccagcacaacgtgaccgagctgctgagagacgtggccgcctggggcagagccagagccaccggcggcgacctggaggagcagcagcacgccgagggcagccccgagcccggcacccccgcccccacccccgagagcttcaccgtgcacttcctgcccctggacagcgcccagaccctgcaccacaagagctgctacaacggcagattccagctgctgtacgtggcctgcggcatggtgcacctgctgatccccgagctgggcgcctgcgtggcccccggcggcaacctgatcgtggagctggccagatacctggtggacgtgagacaggagcagctgcagggcttcaacaccagagtgagagagctggcccaggccgccggcttcgccccccagaccggcgccagacccagcgagaccttcgccagattctgcaagagccaggagagcgccctgggcaacaccgtgcccgccgtggagcccggcaccccccccctggacatcctggcccagcccctggaggccagcaaccccgccctggagggcctgacccagcccctgcagggcggcaccccccactgcgagccctgccagctgcccagcgagagccccggcagcctgagcgaggtgctggcccagccccagggcgccctggccccccccaactgcgagagcgacagcaagaccggcgtgtag

SEQ ID NO: 91285 - DNA, 1827 bp, Artificial Sequence
  derived and/or modified sequence
atgctcccactgctggatagtagtaaaagagcaggaacactgggctcaggatgtggagtgccccgagtgcactctgcagctttaagccgagaagaaggggcctcgcgggacatctggcgaatcaaggtgtgggccagagtaatgaccacaccggccgggtctggatcaggattcggatccgtctcgtggtgggggctgtcccctgccttagatctccaggctgagagagacgccactgtggacgccctcccaactactatggttccacagccagcagtgattctacccggcccccccgtagaccctgattcccaagccgacaccgttcacagtaatcctgaactggatgtgctactgttagggagtgtggacggtagacatttgctgcgcacactgagtagagccaagttttggccaagaagacggtttaacttttttgttctcgagaacaatctggaggcggttgcacgccacatgctgatcttttccctagcattggaggaacctgagaagatgggcctgcaagagagaagcgagaccttcttggaggtctggggcaatgccctgctgcgtccccccgtggccgcctttgtgcgagcacaagcggacttattggcacatttagtgcctgagcccgaccggctggaggagcaattaccttggctttcacttagagctctgaagttccgtgaacgggacgccctggaagcggtgttccgattctgggcagggggcgaaaaagggccgcaggcttttccaatgtcaaggctctgggattcccgactgagacattacctgggtagcaggtatgatgctagacggggcgtgagtgattgggacctgcgcatgaagctgcacgaccggggagcacaagtgatacacccacaggaatttcggagatggagggacaccggggttgcctttgaactgcgggatagctctgcctaccacgtgccaaatcgcactcttgcctccgggagattactgtcttaccggggggagcgggtggccgcaaggggctattggggtgatatcgcaaccggcccattcgtggcttttgggatcgaggctgatgacgaatcgctgttaaggacttccaacggacaacccgtgaagactgctggcgagatcactcagcataacgtgaccgagttgttaagagatgttgcagcttggggacgtgctcgcgcaactggcggtgaccttgaggaacagcagcacgccgagggcagccctgaacccggaactccagctcccaccccagaatccttcaccgttcactttcttcccttggattcagctcagaccctgcatcacaagtcatgttacaacggccggtttcaactgctctatgtggcctgcggaatggtccacctcttaatcccggaactcggagcttgcgtggcccctggcggtaacctgattgttgagctcgctcgctatttagtggacgtgcgccaggaacagcttcaaggcttcaatacacgtgtgcgggaattggcacaggcggccggcttcgccccccagaccggtgccagaccatctgagacatttgcgcggttttgtaagagccaggagtctgcacttggaaacactgtcccagcagtcgaacctgggaccccccctctagatatactggctcagcctctggaggcttcaaatccagcgctagagggacttactcaaccgttgcagggggggacccctcattgtgaaccttgccagctgcctagcgaatcaccaggttctctctccgaggttctagcccagccccagggcgcgctcgcgcctcctaattgcgagtctgacagcaagactggcgtgtag

SEQ ID NO: 91286 - DNA, 1827 bp, Artificial Sequence
  derived and/or modified sequence
atgctgccacttctggatagctctaagagagcgggcactcttgggtcaggatgcggcgtcccacgagtgcactctgcagccctttcccgggaggaaggcgctagtagagatatatggcgcataaaggtgtgggccagggtcatgaccaccccagcaggatccgggagtggatttggtagcgtttcatggtggggcctgtctccagcccttgacctccaagctgaacgagacgctactgtggatgctcttccaaccacgatggtgccacaacctgccgtcatattgccagggcctccagtggatcccgatagtcaggccgatacagtgcactccaatccagagctggatgtcttattgctgggctccgtcgatggccggcatctgcttagaacattgagcagggcaaagttttggccacggaggcgctttaacttttttgtcctcgagaacaacttggaagcagtggcacggcacatgctaatcttcagtctagccctggaggaaccggagaagatgggcctccaggagcgcagtgaaactttcctcgaggtttggggcaacgccctgcttaggccgccagtagccgcttttgttcgcgcacaagccgacctgcttgcacacctcgtaccagaaccagacaggctggaggagcagctgccatggctctctctgagggccctcaaatttcgcgagcgcgacgcgcttgaggctgtttttaggttctgggccggaggtgagaaaggtccacaagccttcccaatgagcagattgtgggactcccgcctgaggcactacctgggaagcagatatgatgcacgccgcggcgtctctgactgggacctccgcatgaagttacatgacaggggggcacaggtaatccatccacaagaatttcggcggtggagagacacgggggttgctttcgagctcagggattctagtgcctatcatgtgcccaatcgcacgcttgcaagtggccgcttgctgagctataggggagagagggtagccgctagaggctattggggcgacatagccactggtccattcgtagcgttcgggattgaggcagatgacgagtcactgttgcggacgtcaaatggtcagccagtgaagactgccggtgagatcacacagcacaacgttacagagctgctgcgggacgtggctgcgtgggggagagcaagggccacaggcggagacttagaagaacagcagcatgccgaaggttctccggaacccggtacgcccgctcccacacctgaaagttttacagttcattttttgcccctggactcagctcaaactctgcaccacaagtcctgttacaacgggagattccagctactgtacgtggcctgcggaatggtccatctactcatccccgaattgggcgcgtgcgtagccccaggaggaaacctgatcgtcgagctggctcgctatcttgtagacgtacgccaagaacaactccaggggttcaacacgcgcgtgcgcgagcttgcccaggccgccggtttcgcccctcagacaggagcgcgaccctcagaaacttttgctcggttttgcaaaagccaggaatcagccctcgggaataccgtaccagccgtggagcctggaaccccacctttggatatccttgcgcaacctctggaggcctctaaccccgccctggagggcctgacacagccgctgcagggaggaactccccactgtgaaccttgtcagctgcctagcgagtcacccggctcactgtccgaagttcttgcgcagccacagggagccctagctccacctaactgtgaaagcgattccaagacaggtgtgtag

SEQ ID NO: 91287 - DNA, 2228 bp, Artificial Sequence
  derived and/or modified sequence
acatgcttccattgcttgattcctcgaaaagggcggggactctgggcagcggttgtggagtgccgcgggtccacagtgctgcactgagcagagaggaaggggcgtcccgggatatttggaggataaaggtgtgggcaagggtgatgaccacacctgccggctccggcagcggcttcggctccgtgtcctggtggggcctgtccccggcgctggacctgcaggctgaaagggatgctacggtggacgctctgccaaccaccatggtgccccagccagctgtcatcttgccaggtcctcctgtggacccagactcccaggccgatacagtgcacagcaaccccgagctagatgtgctgcttctgggctctgtggatggacggcacctgctgcggaccctgtcccgagcgaagttctggcctcgcaggaggttcaacttctttgtgctggagaataatctggaagctgtggcccgacacatgctgatcttcagcctagccctggaggaaccggagaagatggggctgcaagagcgaagcgagaccttcctggaagtgtgggggaacgcgctgctgcgcccgccagtggccgccttcgtgcgtgcccaggccgacctgctggcgcacctggtccccgagcccgaccgcctggaggaacagctgccctggctcagcctccgcgccctcaagttccgcgagcgggatgccctggaggccgtattccgcttctgggctggcggcgagaaagggccccaggcgttccccatgagccgcctctgggactcgcgcctgcgccactacctgggctcccgctacgacgcccggcgcggtgtcagcgactgggacctgcgcatgaagctgcatgaccgcggggctcaagtcattcacccccaggagttccgacgctggcgggacacaggcgtcgcctttgaactcagggactccagcgcctatcatgtgcccaaccggaccctggcgtccggtcgcctcctgagctaccgtggggagcgcgtggcagcgcgcgggtactggggggacatcgccacggggcccttcgtggccttcggcatcgaagcggacgacgagagcctcctgcggacgagcaacggccagccagtcaagacggccggggagatcactcaacacaacgtgacggagctgctccgcgacgtggccgcctgggggcgcgcgagagccaccgggggggacctggaggagcagcagcacgcggagggaagcccggagccagggactccagccccgaccccggaatctttcaccgtccacttcctgccgctcgattctgctcagactctccaccacaagagctgctacaacggccgattccagctcctctatgtggcctgtggtatggtccatcttctcatccctgagcttggggcctgtgtggcacccggagggaacttgattgtggaattagcccggtacctggtggacgtgcggcaggagcagctgcagggattcaacacccgggtcagggagctagctcaggcagctggatttgctccacagaccggggccaggccttcagagaccttcgcacgtttctgcaagtcccaggaatcagctctgggcaacactgtcccagctgtggaacccggaactccgccccttgacatcctggcccagcctcttgaagccagcaacccagcccttgagggcctgacccagcctctgcagggtgggaccccacactgtgagccctgccagctgccctctgagtctccaggttcactctcagaggttctggctcagcctcagggggccttggctccgcccaactgtgagtcagactccaaaactggagtctgacccaacccctagacaccccttatctccaacttccaaagtcaggttgtaggatgagaacccgctgataccattctaagtccgctgctagagtcctcaattttattctaatcattcccactcagtacccgccacccccaccccgggagtgttggtagactttcaaattccatttctgagattctatggtctattcctagaattctagattgttctctcagaattccaaattccacttctgaggctctaagcccagcctaggatctgacactgagtctcaggcccttgactttggcccccttgttcccaggcaccctgtggctgactaggggctggggtgtctcctcaccagggcctggtcagcacccagatggttcaagtaaagcaagttgtgtccaccct

SEQ ID NO: 91288 - DNA, 1827 bp, Artificial Sequence
  derived and/or modified sequence
atgctgcccctgctggacagcagcaagagagctggcaccctgggcagcggctgcggcgtgccccgggtgcacagcgctgccctgagccgggaggagggcgccagccgggacatctggaggatcaaggtgtgggcccgggtgatgaccaccccagctggcagcggcagcggcttcggctctgtgtcctggtggggcctgagccctgccctggacctgcaggccgagagagatgccaccgtggatgccctgcccaccaccatggtgccccagcctgctgtgatcctgcccggcccccctgtggaccctgacagccaggccgacacagtgcacagcaaccctgagctggatgtgctgctgctgggctctgtggatggccgccacctgctgcggaccctgagccgggccaagttctggccccggcggcgcttcaacttctttgtgctggagaacaacctggaggccgtggcccggcacatgctgatcttcagcctggccctggaggagcctgagaagatgggcctgcaggagaggtctgagaccttcctggaggtgtggggcaatgccctgctgcggccccctgtggccgcctttgtgcgggcccaggccgacctgctggcccacctggtgcctgagccagaccggctggaggagcagctgccctggctgagcctgcgggccctgaagttccgggagagagatgccctggaggccgtgttccgcttctgggccggcggggagaagggcccccaggccttccccatgagccggctgtgggacagccggctgcggcactacctgggcagccgctatgatgccaggagaggagtgtctgactgggacctgaggatgaagctgcatgacagaggagcccaggtgatccacccccaggagttccgccgctggagggacaccggggtggcctttgagctgcgggacagcagcgcctaccacgtgcccaacagaaccctggccagcggccgcctgctgagctacagaggagagcgggtggccgcccggggctactggggagacatcgccaccggcccctttgtggcctttggaattgaagcagatgatgagagcctgctgcggaccagcaatggccagcctgtgaagacagctggggagatcacccagcacaacgtgacagagctgctgagagatgtggccgcctggggccgggcccgggccaccggcggggacctggaggagcagcagcacgccgagggcagccctgagcccggcaccccagcccccaccccagagagcttcaccgtgcacttcctgcccctggacagcgcccagaccctgcaccacaagagctgctacaacggccgcttccagctgctgtatgtggcctgtggcatggtgcacctgctgatccctgagctgggcgcctgtgtggcccctgggggcaacctgattgtggagctggcccgctacctggtggatgtgcggcaggagcagctgcagggcttcaacaccagggtgcgggagctggcccaggccgccggctttgccccccagacaggagcccggcccagcgagacctttgcccgcttctgcaagagccaggagagcgccctgggcaacacagtgcctgctgtggagcccggcaccccacccctggacatcctggcccagcccctggaggccagcaacccagccctggagggcctgacccagcccctgcagggcggcaccccccactgtgagccctgccagctgcccagcgagagccctggcagcctgtctgaggtgctggcccagccccagggcgccctggccccacccaactgtgagagtgacagcaagacaggagtgtag

SEQ ID NO: 91289 - DNA, 1827 bp, Artificial Sequence
  derived and/or modified sequence
atgctgcccctgctggacagcagcaagcgggccggcaccctgggctcgggatgtggcgttccaagggttcattctgctgctctaagccgagaggagggcgccagtcgggacatatggcgaatcaaggtctgggccagagttatgacaaccccagctggctcggggagcgggtttggctcagtgtcatggtgggggttgagccccgcccttgatcttcaggcagagcgcgacgccacggtggatgcccttcctactaccatggttccccagcccgcggtgattctgccaggaccccctgtcgatccagacagccaagcagatacagttcactccaatccggagctcgatgtccttctgctaggttccgttgacggtcgccaccttctcaggaccctcagccgcgctaaattctggccccggcgcagattcaacttctttgtgttggaaaataacttggaagcggtggccaggcacatgctgatcttctctctggcgctggaagagcctgaaaagatggggctacaggaaagatctgagacgtttttggaagtgtggggtaacgctctgcttcgtccacccgttgctgctttcgttcgggcgcaggccgaccttctcgcccacctggtgcctgagcccgacagactcgaagaacagttgccctggctgagcctaagggcactgaagtttagagagagggacgcgcttgaggccgtgtttagattctgggccggcggcgagaaagggcctcaagccttccctatgtctcgtctgtgggacagccgactccggcattatctcgggagtcggtacgacgctaggaggggtgtgagcgattgggacctcagaatgaaactgcacgaccgaggggcccaggtcatccacccccaggagttccgccggtggcgcgatacgggcgtggcctttgaattgagggactcttcagcctaccacgttcctaacaggaccctggcaagcggtcggctattgtcgtatcgtggagagcgggttgcagcgcgcggatactggggagacattgcaacaggaccatttgtggctttcggcattgaagccgatgatgaaagcctgctgagaacatccaatggacagccagtgaagacagccggggagatcactcaacacaacgttacggaactgctccgtgacgtagcagcttggggccgggctcgagctactgggggtgacctcgaagaacagcagcacgccgagggatcaccagaacccggaactccagcccctacccctgagagcttcacagtgcacttcctgccactcgattcagcacagacacttcaccataaaagctgctacaatggcaggtttcagcttctatacgttgcatgcgggatggtccaccttctgattcctgagctcggagcctgtgtggcgcctgggggcaacctgatagtcgagctcgccagatacctcgtagatgtgaggcaggaacaattgcaggggtttaataccagggtgagagagctggcccaggccgcggggttcgcaccccagacaggtgcaaggccatcagaaactttcgcacgtttttgcaaaagccaggagtccgcccttgggaatactgtcccagccgtagaacctgggacccctcctctggatatactggctcaacctctggaggcctctaatcctgccctagagggcttaacccagcctttacagggcggcacccctcactgtgaaccttgccagctcccatccgaaagccctggatccctctcagaggtcctggcccagcctcagggtgcccttgcaccacctaactgtgaatcagattccaagaccggggtgtag

SEQ ID NO: 91290 - DNA, 1827 bp, Artificial Sequence
  derived and/or modified sequence
atgctgcccctgctggacagcagcaagcgggccggcaccctgggctcaggctgtggagtgccccgcgtccactccgccgccctttcccgagaagagggcgccagccgggatatctggcggataaaagtgtgggctagggtgatgacaacacctgctggatccggaagtggatttggttcagtgtcctggtggggactctcaccggccttggatctgcaggctgaacgggacgccactgttgacgcgctaccaactacgatggtgccccagcccgcagtgattctgccagggccgccggtagacccagacagccaggccgatacggtacatagcaatccagagctcgatgttctgctactcggctctgtcgatggaaggcacctgcttaggacattgtctagggcgaaattttggcccagacgtcgctttaacttcttcgtgctggaaaacaacctcgaagcggttgctaggcacatgcttatcttctctctggcccttgaagagcccgaaaagatggggcttcaagaaagatctgaaactttcctcgaggtttgggggaacgcactgctgcggccaccagtggctgcctttgttcgggcacaagcggatctcttagcccatctggtgcccgaacctgaccggctcgaggagcagctgccatggctgagtctgcgagctttgaagtttagagagagagatgcattagaagccgtctttagattctgggccggcggagaaaagggacctcaggcattcccaatgagtagactgtgggattctaggcttcgccattatctggggagtagatacgacgctaggcgtggagtctccgactgggacctgcgaatgaaattacacgatagaggagcccaggtgatacacccccaggagtttcgcagatggcgagacaccggtgtggcattcgagcttagagactcaagcgcctaccatgtcccaaatagaactttggcaagtgggcgcctgctgtcttatcgcggcgagagagtggcagcccgaggctactggggggatatcgccaccgggccgtttgtggccttcggcattgaggcggatgatgagtcactgctgcggacaagcaacggccagccggtgaaaactgcgggggaaattacccaacacaatgtgacagagctgctgcgggatgtggcagcatgggggcgcgcacgggctactggaggggatctggaagagcaacagcacgcagagggatctccagagccggggacacctgcccccacccccgagtcatttactgttcactttctccccctggattccgcacaaactttacatcataagtcatgttataacggccggtttcaactgttgtatgtggcatgcggcatggtccatctcctcattcccgaactaggcgcctgtgtcgctccaggaggcaacctcatagtcgaactggctcgttatctggtggacgtgcgccaggagcaacttcaggggtttaatactagagtgagggaactagcccaagctgccggcttcgcccctcagacgggcgcacggcccagtgagacctttgcacgcttttgtaagtctcaggaatccgccctgggcaatacagtcccggccgtcgaaccagggacaccccctcttgacattcttgcgcagcctctggaggcgtccaaccccgcgctcgaaggtctgactcagcctctccagggaggcacaccgcactgcgagccttgtcagctcccatctgaaagccctggctctctgtctgaagtgttagcccagccacagggtgcactggcccccccgaactgcgaatctgattctaaaactggcgtgtag

SEQ ID NO: 91291 - DNA, 1827 bp, Artificial Sequence
  derived and/or modified sequence
atgcttccccttctggactcgagcaaacgtgccggtactttaggaagcggatgcggtgtgccgcgagtccactcagccgcattgagtcgagaagagggtgcctcacgcgatatctggcgcatcaaggtctgggctcgagtaatgaccactccggcaggctccggctctggctttggatctgtgtcatggtggggtctgagtccagctttggacctgcaagctgagcgagacgcaaccgttgacgctctgcctactaccatggtgccacagcccgctgtcatactacccggtcctccagtggatcctgatagccaggcagacaccgttcactcaaatccagagctagatgtcttgttattaggaagcgtggacggacgtcacctgctgaggaccctgagtcgggctaaattctggccaagaaggcgtttcaatttttttgtgctggaaaataacctggaagctgtggctcgtcatatgttgatcttcagcctggccctggaagaacccgagaaaatgggccttcaagaacgctcagagacgtttctggaagtttgggggaacgcactgcttaggcccccagtcgccgcattcgtgcgagcccaagccgaccttttagcccacttagtccctgaaccggacagactcgaagaacaattgccttggctaagccttagagccctcaagtttagagaacgcgatgcgctcgaggccgtgtttaggttctgggcgggaggggagaaaggtccacaggctttccccatgtcacgtctttgggattcacgactgaggcactatcttggctctcgatatgatgctcgaaggggtgtgtcggactgggatcttaggatgaagctgcatgatcgaggagctcaggttatacatcctcaggaattccggagatggagagatactggagttgcattcgagcttcgtgactcttccgcttatcacgttcctaatagaaccctagcatccggaagactgctgtcttacagaggagaacgggtggctgcgcgtggctattggggcgacattgctactggtcccttcgtcgcatttgggattgaagccgacgatgaaagcctgttacgaacaagcaatggccagccagtcaagactgcgggagaaatcacacagcataacgttactgagctgcttcgggacgttgccgcttgggggagagctcgagcaaccgggggtgatttggaagagcagcagcatgccgagggatctcctgaacccggaacaccggctccaacgcccgagtcattcacagtgcatttcctgcccctagacagcgcccagactcttcatcataagagttgctataacggtagatttcaattactttatgtggcatgcgggatggtgcacctgctgatccccgaactgggggcatgtgtggcccctgggggaaacctcatcgttgagcttgcccgatatctggttgatgtgcggcaagaacagctgcaagggttcaacacacgggtgagggagctcgcccaggcagcagggttcgcaccacagaccggcgcacggccttcagaaaccttcgcaagattctgtaaaagtcaggagagcgcgctcggaaataccgttcctgctgtggagccgggaacccctccccttgatattttggctcaaccactcgaggcttccaacccagctctagaaggactcactcagccactgcagggaggtactccacactgtgagccatgccaactcccaagtgaaagtcctggctctttgagtgaggtgcttgcacagccccagggggctctcgcccctcccaattgcgagtccgattctaagaccggggtgtag

SEQ ID NO: 91292 - DNA, 1827 bp, Artificial Sequence
  derived and/or modified sequence
atgctacccctgcttgatagctctaagcgcgcaggaacactggggtccggatgcggggtgcctagggtgcatagcgcagcactctcccgagaggaaggtgcttccagagacatttggagaataaaggtgtgggccagagttatgaccacacccgcaggtagtggatctggattcggtagcgtcagctggtgggggctgtcaccggcactggatctacaggcagagcgggacgctaccgtagacgcactgccaacaactatggtgcctcaaccagccgtgatcctgccagggccaccagttgaccctgattcccaggctgatacagtccacagtaatcccgagttggatgtcctcctgctgggtagcgtggacggaaggcatctgctgcgaaccctgtccagagcaaagttctggcccaggagacgtttcaactttttcgtgcttgaaaacaacctagaagcggtggccaggcatatgttaattttcagtcttgctctggaagaacccgaaaaaatgggcttgcaggagaggtcagaaacattcctcgaggtgtggggtaacgcgttgttacgccctcccgtagccgcttttgtgagggcacaagcagatctcctagcgcatctagtgcccgagcctgaccgcttggaggaacagctgccctggctgtccctccgtgcccttaaatttcgcgaacgggacgccctcgaagcagtgttccggttctgggccggaggagagaaaggcccacaggccttccccatgagtagactttgggacagccgacttagacattacctcggtagccgctatgacgccagacgcggtgtgtcggattgggacttgcgaatgaaactgcatgaccgaggtgcccaggtgattcatcctcaggagttccggcgatggagagataccggcgtcgctttcgagttgcgggattccagcgcataccatgtgccgaatcgcaccctggcttctggaagactcctttcttatcggggtgaacgcgtcgctgccagagggtactggggcgacattgccaccggcccattcgtggcgtttggtatagaagcggacgatgagtccctgctacgcacatccaatgggcagcccgtgaagacggccggtgaaattactcaacacaatgttacagagctgctgagagatgttgcagcttgggggagggcccgtgctaccggcggtgatctggaggaacagcagcacgcggagggtagtcctgagccaggtaccccggctcctacgcctgaaagctttaccgttcactttctcccattggatagtgcccaaacgctccatcacaaatcttgttataatggcagatttcagctgctctatgtggcttgcgggatggtgcacctgctaattcctgagctcggcgcttgcgtcgcacctggaggaaacctcatcgtggagttggcccgttatctggtcgatgtgcgccaagaacaactacaagggttcaacacccgggtgcgagagcttgcacaggctgcagggtttgccccacagacaggcgctaggccgtctgagactttcgccaggttctgcaagagccaggagtcagcactgggcaatactgtgcccgctgtggaacccggaactccccctcttgatattctcgctcagccactggaggcctcaaaccccgcacttgagggcctgactcagcccctgcagggcggtactcctcactgcgaaccctgccaattgccatcggaatcaccgggttcactctctgaggtgctggctcagcctcagggggctttggccccacccaactgtgaaagcgactcaaaaacaggagtgtag

SEQ ID NO: 91293 - protein, 95 aa, Artificial Sequence
  derived and/or modified sequence
MTTPAGSGSGFGSVSWWGLSPALDLQAESPPVDPDSQADTVHSNPELDVLLLGSVDGRHLLRTLSRAKFWPRRRFNVSWDEDESPDSRVLEGGRD

SEQ ID NO: 91294 - DNA, 288 bp, Artificial Sequence
  derived and/or modified sequence
atgaccacccccgccggcagcggcagcggcttcggcagcgtgagctggtggggcctgagccccgccctggacctgcaggccgagagcccccccgtggaccccgacagccaggccgacaccgtgcacagcaaccccgagctggacgtgctgctgctgggcagcgtggacggcagacacctgctgagaaccctgagcagagccaagttctggcccagaagaagattcaacgtgagctgggacgaggacgagagccccgacagcagagtgctggagggcggcagagactag

SEQ ID NO: 91295 - DNA, 288 bp, Artificial Sequence
  derived and/or modified sequence
atgaccacacccgccgggagcggttctggctttggatcggttagctggtggggcttgtctccagctctggacctacaagctgagtcaccccccgtggaccctgactctcaggcagacactgtccattctaaccccgagttagatgttcttctgctgggctcagtcgatggcagacatctccttaggactctcagcagagcaaaattttggccccgccgaaggttcaatgtgtcttgggacgaggacgagagtcctgatagtcgggttctagagggcggcagggattag

SEQ ID NO: 91296 - DNA, 288 bp, Artificial Sequence
  derived and/or modified sequence
atgaccaccccagctggcagcggcagcggctttggatctgtgtcctggtggggcctgagccctgccctggacctgcaggccgagagcccccctgtggaccctgacagccaggccgacacagtgcacagcaaccctgagctggatgtgctgctgctgggctctgtggatggccgccacctgctgcggaccctgagccgggccaagttctggccccggcggcgcttcaacgtgtcctgggatgaagatgagagcccagacagccgggtgctggagggcggccgggactag

SEQ ID NO: 91297 - DNA, 288 bp, Artificial Sequence
  derived and/or modified sequence
atgaccacccccgccggcagcggcagcggcttcggcagcgtgagctggtgggggctctctccagcattggaccttcaggcggaatcacctccagtggaccctgactctcaggccgacactgtgcattcaaatcctgagctcgatgtgctccttctgggttcagtggatgggcggcatctgctgaggacactgagccgggccaaattttggccccgccgccgttttaacgtctcttgggatgaggacgagtcccctgactctagagtcctggaaggggggagggattag

SEQ ID NO: 91298 - DNA, 288 bp, Artificial Sequence
  derived and/or modified sequence
atgactaccccagcgggttccggatccgggttcgggtcagtctcttggtggggcctcagcccagcgcttgacctccaggccgagagtccaccagtggatccagactctcaggcggacactgttcactcgaaccctgaactggatgtcctcctgcttgggtcagtggacggtcgtcacctcttgcgaacgttatcgagggccaagttctggccccgtcgaagattcaacgtcagctgggatgaagacgagtccccagattctagagtgttggaagggggtcgcgactag

SEQ ID NO: 91299 - protein, 487 aa, Artificial Sequence
  derived and/or modified sequence
MKMRAQIPESLREEGIEILKPQFFVLENNLEAVARHMLIFSLALEEPEKMGLQERSETFLEVWGNALLRPPVAAFVRAQADLLAHLVPEPDRLEEQLPWLSLRALKFRERDALEAVFRFWAGGEKGPQAFPMSRLWDSRLRHYLGSRYDARRGVSDWDLRMKLHDRGAQVIHPQEFRRWRDTGVAFELRDSSAYHVPNRTLASGRLLSYRGERVAARGYWGDIATGPFVAFGIEADDESLLRTSNGQPVKTAGEITQHNVTELLRDVAAWGRARATGGDLEEQQHAEGSPEPGTPAAPTPESFTVHFLPLDSAQTLHHKSCYNGRFQLLYVACGMVHLLIPELGACVAPGGNLIVELARYLVDVRQEQLQGFNTRVRELAQAAGFAPQTGARPSETFARFCKSQESALGNTVPAVEPGTPPLDILAQPLEASNPALEGLTQPLQGGTPHCEPCQLPSESPGSLSEVLAQPQGALAPPNCESDSKTGV

SEQ ID NO: 91300 - DNA, 1863 bp, Artificial Sequence
  derived and/or modified sequence
atgaagatgagagcccagattcccgagtccttgagggaggaagggattgaaattctaaaacctcagttctttgtgctggagaataatctggaagctgtggcccgacacatgctgatcttcagcctagccctggaggaaccggagaagatggggctgcaagagcgaagcgagaccttcctggaagtgtgggggaacgcgctgctgcgcccgccagtggccgccttcgtgcgtgcccaggccgacctgctggcgcacctggtccccgagcccgaccgcctggaggaacagctgccctggctcagcctccgcgccctcaagttccgcgagcgggatgccctggaggccgtattccgcttctgggctggcggcgagaaagggccccaggcgttccccatgagccgcctctgggactcgcgcctgcgccactacctgggctcccgctacgacgcccggcgcggtgtcagcgactgggacctgcgcatgaagctgcatgaccgcggggctcaagtcattcacccccaggagttccgacgctggcgggacacaggcgtcgcctttgaactcagggactccagcgcctatcatgtgcccaaccggaccctggcgtccggtcgcctcctgagctaccgtggggagcgcgtggcagcgcgcgggtactggggggacatcgccacggggcccttcgtggccttcggcatcgaagcggacgacgagagcctcctgcggacgagcaacggccagccagtcaagacggccggggagatcactcaacacaacgtgacggagctgctccgcgacgtggccgcctgggggcgcgcgagagccaccgggggggacctggaggagcagcagcacgcggagggaagcccggagccagggactccagcagccccgaccccggaatctttcaccgtccacttcctgccgctcgattctgctcagactctccaccacaagagctgctacaacggccgattccagctcctctatgtggcctgtggtatggtccatcttctcatccctgagcttggggcctgtgtggcacccggagggaacttgattgtggaattagcccggtacctggtggacgtgcggcaggagcagctgcagggattcaacacccgggtcagggagctagctcaggcagctggatttgctccacagaccggggccaggccttcagagaccttcgcacgtttctgcaagtcccaggaatcagctctgggcaacactgtcccagctgtggaacccggaactccgccccttgacatcctggcccagcctcttgaagccagcaacccagcccttgagggcctgacccagcctctgcagggtgggaccccacactgtgagccctgccagctgccctctgagtctccaggttcactctcagaggttctggctcagcctcagggggccttggctccgcccaactgtgagtcagactccaaaactggagtctgacccaacccctagacaccccttatctccaacttccaaagtcaggttgtaggatgagaacccgctgataccattctaagtccgctgctagagtcctcaattttattctaatcattcccactcagtacccgccacccccaccccgggagtgttggtagactttcaaattccatttctgagattctatggtctattcctagaattctagattgttctctcagaattccaaattccacttctgaggctctaagcccagcctaggatctgacactgagtctcaggcccttgactttggcccccttgttcccaggcaccctgtggctgactaggggctggggtgtctcctcaccagggcctggtcagcacccagatggttcaagtaaagcaagttgtgtccaccct

SEQ ID NO: 91301 - DNA, 1464 bp, Artificial Sequence
  derived and/or modified sequence
atgaagatgagagcccagatccccgagagcctgagagaggagggcatcgagatcctgaagccccagttcttcgtgctggagaacaacctggaggccgtggccagacacatgctgatcttcagcctggccctggaggagcccgagaagatgggcctgcaggagagaagcgagaccttcctggaggtgtggggcaacgccctgctgagaccccccgtggccgccttcgtgagagcccaggccgacctgctggcccacctggtgcccgagcccgacagactggaggagcagctgccctggctgagcctgagagccctgaagttcagagagagagacgccctggaggccgtgttcagattctgggccggcggcgagaagggcccccaggccttccccatgagcagactgtgggacagcagactgagacactacctgggcagcagatacgacgccagaagaggcgtgagcgactgggacctgagaatgaagctgcacgacagaggcgcccaggtgatccacccccaggagttcagaagatggagagacaccggcgtggccttcgagctgagagacagcagcgcctaccacgtgcccaacagaaccctggccagcggcagactgctgagctacagaggcgagagagtggccgccagaggctactggggcgacatcgccaccggccccttcgtggccttcggcatcgaggccgacgacgagagcctgctgagaaccagcaacggccagcccgtgaagaccgccggcgagatcacccagcacaacgtgaccgagctgctgagagacgtggccgcctggggcagagccagagccaccggcggcgacctggaggagcagcagcacgccgagggcagccccgagcccggcacccccgccgcccccacccccgagagcttcaccgtgcacttcctgcccctggacagcgcccagaccctgcaccacaagagctgctacaacggcagattccagctgctgtacgtggcctgcggcatggtgcacctgctgatccccgagctgggcgcctgcgtggcccccggcggcaacctgatcgtggagctggccagatacctggtggacgtgagacaggagcagctgcagggcttcaacaccagagtgagagagctggcccaggccgccggcttcgccccccagaccggcgccagacccagcgagaccttcgccagattctgcaagagccaggagagcgccctgggcaacaccgtgcccgccgtggagcccggcaccccccccctggacatcctggcccagcccctggaggccagcaaccccgccctggagggcctgacccagcccctgcagggcggcaccccccactgcgagccctgccagctgcccagcgagagccccggcagcctgagcgaggtgctggcccagccccagggcgccctggccccccccaactgcgagagcgacagcaagaccggcgtgtag

SEQ ID NO: 91302 - DNA, 1464 bp, Artificial Sequence
  derived and/or modified sequence
atgaaaatgcgggctcaaattcccgaatcactaagggaggaggggatcgagattctaaaaccccagttctttgttctggagaataacctcgaggccgtggccaggcacatgctgatctttagccttgccctcgaggagccagagaagatggggctccaggagaggagcgagacctttctagaagtttgggggaacgccctgttgaggccgcctgtggcagcgttcgtgagggcgcaggccgacttacttgcccacctagtcccagaacccgacagactggaagagcagctcccatggctttcacttcgggctctaaaattcagggagagggacgcgctcgaagcagttttcagattctgggcggggggcgagaaaggccctcaggctttcccaatgtcccgattgtgggactcaaggctgcgtcactatctgggaagccggtacgacgctaggcggggggtgtctgactgggatctgcgaatgaaactccacgatcgcggagcgcaggtgatacaccctcaggagttccgacggtggagagacaccggggtggcatttgagctgcgtgattcctctgcctatcatgtcccaaatcgcacattggcctccggacgtttgctgtcataccggggggaaagagtggctgccagagggtactggggtgacattgctaccggtcccttcgtcgcatttggcatcgaggctgatgatgagagtttactgagaacatcaaatggacagcccgttaagaccgccggggagattacacagcataacgtcacagagttgcttcgtgacgttgccgcctgggggcgcgctagagccaccggcggggatctcgaggaacagcagcacgcagagggctctccagaacctgggacaccggctgcccccacacctgagtcattcacagtccacttcctgcccctggactccgctcagacacttcaccacaagagttgttacaacgggcggtttcaactactgtacgtggcctgcgggatggttcatttgcttatccccgaactaggagcatgcgtggcgcctggtgggaatttgattgtagaattggcaaggtatctagttgacgtgaggcaagaacagctccaggggtttaacacacgggtcagagaactagcccaggcggctgggttcgcacctcaaactggagctcgtccatctgagaccttcgcacgcttttgtaaatcccaggaatccgccctcgggaacactgtcccggcggtcgagcccggaacacctcccttggatatcctggctcagcccttggaagcatccaatccggctctggaaggcttaacccagcctctgcagggcggaactcctcattgcgaaccctgccagcttcctagcgagtccccaggatccctctcggaggtgctggcacagcctcaaggcgcactagctccaccaaactgtgagtctgactctaaaacaggagtctag

SEQ ID NO: 91303 - DNA, 2215 bp, Artificial Sequence
  derived and/or modified sequence
agggcggggactctgggcagcggttgtggagtgccgcgggtccacagtgctgcactgagcagagaggaaggggcgtcccgggatatttggaggataaaggtgtgggcaagggtgatgaccacacctgccggctccggcagcggcttcggctccgtgtcctggtggggcctgtccccggcgctggacctgcaggctgaaagtcctcctgtggacccagactcccaggccgatacagtgcacagcaaccccgagctagatgtgctgcttctgggctctgtggatggacggcacctgctgcggaccctgtcccgagcgaagttctggcctcgcaggaggttcaacgtgagctgggatgaagatgagagcccagattcccgagtccttgagggaggaagggattgaaattctaaaacctcagttctttgtgctggagaataatctggaagctgtggcccgacacatgctgatcttcagcctagccctggaggaaccggagaagatggggctgcaagagcgaagcgagaccttcctggaagtgtgggggaacgcgctgctgcgcccgccagtggccgccttcgtgcgtgcccaggccgacctgctggcgcacctggtccccgagcccgaccgcctggaggaacagctgccctggctcagcctccgcgccctcaagttccgcgagcgggatgccctggaggccgtattccgcttctgggctggcggcgagaaagggccccaggcgttccccatgagccgcctctgggactcgcgcctgcgccactacctgggctcccgctacgacgcccggcgcggtgtcagcgactgggacctgcgcatgaagctgcatgaccgcggggctcaagtcattcacccccaggagttccgacgctggcgggacacaggcgtcgcctttgaactcagggactccagcgcctatcatgtgcccaaccggaccctggcgtccggtcgcctcctgagctaccgtggggagcgcgtggcagcgcgcgggtactggggggacatcgccacggggcccttcgtggccttcggcatcgaagcggacgacgagagcctcctgcggacgagcaacggccagccagtcaagacggccggggagatcactcaacacaacgtgacggagctgctccgcgacgtggccgcctgggggcgcgcgagagccaccgggggggacctggaggagcagcagcacgcggagggaagcccggagccagggactccagcagccccgaccccggaatctttcaccgtccacttcctgccgctcgattctgctcagactctccaccacaagagctgctacaacggccgattccagctcctctatgtggcctgtggtatggtccatcttctcatccctgagcttggggcctgtgtggcacccggagggaacttgattgtggaattagcccggtacctggtggacgtgcggcaggagcagctgcagggattcaacacccgggtcagggagctagctcaggcagctggatttgctccacagaccggggccaggccttcagagaccttcgcacgtttctgcaagtcccaggaatcagctctgggcaacactgtcccagctgtggaacccggaactccgccccttgacatcctggcccagcctcttgaagccagcaacccagcccttgagggcctgacccagcctctgcagggtgggaccccacactgtgagccctgccagctgccctctgagtctccaggttcactctcagaggttctggctcagcctcagggggccttggctccgcccaactgtgagtcagactccaaaactggagtctgacccaacccctagacaccccttatctccaacttccaaagtcaggttgtaggatgagaacccgctgataccattctaagtccgctgctagagtcctcaattttattctaatcattcccactcagtacccgccacccccaccccgggagtgttggtagactttcaaattccatttctgagattctatggtctattcctagaattctagattgttctctcagaattccaaattccacttctgaggctctaagcccagcctaggatctgacactgagtctcaggcccttgactttggcccccttgttcccaggcaccctgtggctgactaggggctggggtgtctcctcaccagggcctggtcagcacccagatggttcaagtaaagcaagttgtgtccaccct

SEQ ID NO: 91304 - DNA, 1464 bp, Artificial Sequence
  derived and/or modified sequence
atgaagatgagggcccagatccctgagagcctgcgggaggagggcatcgagatcctgaagccccagttctttgtgctggagaacaacctggaggccgtggcccggcacatgctgatcttcagcctggccctggaggagcctgagaagatgggcctgcaggagaggtctgagaccttcctggaggtgtggggcaatgccctgctgcggccccctgtggccgcctttgtgcgggcccaggccgacctgctggcccacctggtgcctgagccagaccggctggaggagcagctgccctggctgagcctgcgggccctgaagttccgggagagagatgccctggaggccgtgttccgcttctgggccggcggggagaagggcccccaggccttccccatgagccggctgtgggacagccggctgcggcactacctgggcagccgctatgatgccaggagaggagtgtctgactgggacctgaggatgaagctgcatgacagaggagcccaggtgatccacccccaggagttccgccgctggagggacaccggggtggcctttgagctgcgggacagcagcgcctaccacgtgcccaacagaaccctggccagcggccgcctgctgagctacagaggagagcgggtggccgcccggggctactggggagacatcgccaccggcccctttgtggcctttggaattgaagcagatgatgagagcctgctgcggaccagcaatggccagcctgtgaagacagctggggagatcacccagcacaacgtgacagagctgctgagagatgtggccgcctggggccgggcccgggccaccggcggggacctggaggagcagcagcacgccgagggcagccctgagcccggcaccccagctgcccccaccccagagagcttcaccgtgcacttcctgcccctggacagcgcccagaccctgcaccacaagagctgctacaacggccgcttccagctgctgtatgtggcctgtggcatggtgcacctgctgatccctgagctgggcgcctgtgtggcccctgggggcaacctgattgtggagctggcccgctacctggtggatgtgcggcaggagcagctgcagggcttcaacaccagggtgcgggagctggcccaggccgccggctttgccccccagacaggagcccggcccagcgagacctttgcccgcttctgcaagagccaggagagcgccctgggcaacacagtgcctgctgtggagcccggcaccccacccctggacatcctggcccagcccctggaggccagcaacccagccctggagggcctgacccagcccctgcagggcggcaccccccactgtgagccctgccagctgcccagcgagagccctggcagcctgtctgaggtgctggcccagccccagggcgccctggccccacccaactgtgagagtgacagcaagacaggagtgtag

SEQ ID NO: 91305 - DNA, 1464 bp, Artificial Sequence
  derived and/or modified sequence
atgaagatgcgggcccagatccccgagagcctgcgggaggagggcattgaaatcctcaaaccacagttttttgtcctggaaaacaacctggaggcagtggcccgccatatgctgatcttctccttggccctggaggagcccgaaaaaatgggcctccaggagcgaagcgaaactttcctcgaggtgtggggaaatgctctcttaaggcctcctgtggctgcttttgtgagggcacaagccgatctgctagcccatctggtgcccgagcctgatcggctggaagagcagttgccatggttgtctctccgcgcactcaagttcagggaaagagacgcgctggaagctgtgtttcggttttgggcggggggcgagaagggccctcaggccttccctatgagccggttgtgggactctcgcttgaggcactatctcgggagcagatacgacgccaggcggggagtgagcgattgggatcttcgcatgaaactgcacgacagaggcgcacaggtcattcatcctcaggagttccggcggtggcgcgacacaggggtggctttcgagctgagggactccagtgcctaccacgtccctaatcgcacgttggcgagcgggcggctcctttcctatcgaggggaacgcgttgctgcacggggctattggggagacattgcgactggacccttcgttgcttttgggatcgaagcagacgatgagtctctcctcagaacatcaaatggacagccagtgaagactgccggggaaattacacagcacaacgtcaccgagctgctaagagatgtggccgcctggggccgagcacgagccacaggcggagatcttgaggaacagcagcacgcagagggatctcccgagccgggaactcctgccgcccccacccccgaatccttcacagtgcacttcctgccacttgactccgctcagacgctgcaccacaagagttgctacaatggcaggttccagcttctttacgtcgcatgtggaatggttcatctcctgattcccgagctcggggcctgtgtggccccaggtggcaacctcatcgttgagttggcccggtacctggtggatgtgaggcaagaacagctgcagggctttaatacacgagtgagagagctggcccaagccgcgggctttgcaccacagaccggggcccggccatctgaaacattcgcaagattctgcaagagccaggagtccgccttgggaaataccgtaccggctgtggagccaggcacccccccactagatatcctcgcccagccactcgaggccagcaatccagccctagaagggctgactcagccactccagggaggcactccacactgcgaaccctgccagctaccttcagagagtcctggcagcttgtcagaggttctggcccaacctcagggtgcccttgcgcccccaaactgtgagagtgattctaaaactggtgtatag

SEQ ID NO: 91306 - DNA, 1464 bp, Artificial Sequence
  derived and/or modified sequence
atgaagatgcgggcacagattccagagtccctgcgcgaagaagggattgaaatactgaagccacagtttttcgtgcttgagaataatctcgaagccgtcgcgaggcatatgcttatattctcccttgcgctggaggagccggaaaagatgggacttcaggaacgatctgagacttttctggaagtctggggcaacgcgctgttaagaccacccgttgcagcgtttgtgcgtgcccaagccgatctgctcgctcacctggtacctgagcctgatagactggaagagcaactcccctggctgtcgctgcgagcgctaaaattcagagagagagatgctttagaggcagtctttcgattctgggcagggggagagaaagggcctcaagcatttccaatgagtagactctgggacagtcgactaagacattacctgggctctaggtacgacgcacgaaggggcgtatctgactgggaccttagaatgaaacttcacgatcggggtgcacaagtcatccatccccaggaattccggaggtggagggatactggcgtcgcattcgaattacgagactccagcgcttaccatgtgccaaacaggacattggccagtggcagactcctctcctaccggggagaacgcgtggccgcacgaggctattggggcgatattgcaactggtccttttgtggcattcggaattgaagcggacgatgaatccctgctcagaacatcaaacgggcaaccagtgaagaccgccggtgagattactcagcacaatgtaacagaactgctgcgcgatgtggccgcatggggcagagcccgagccacaggaggagatcttgaagagcagcagcatgccgaaggctctcctgagcccggaactcccgctgcgcctacaccagagagctttactgttcactttctcccactcgatagcgcccagactctccatcacaagtcttgctataatggacgcttccagttgctgtatgtggcctgtggtatggtccacctccttatccctgagttaggagcatgtgtggccccaggcggaaacttaatagtggagctggccagatacctggtcgacgtgcggcaagagcagttgcaaggatttaacacaagagttagagaattggcccaggcagccggattcgcaccccagactggtgcgaggcctagtgagacattcgctcggttctgtaagtcacaagagagcgcgctgggaaatactgtcccagcagtagaaccaggaactcctcccctggatatcctggctcagcccctggaagccagcaatccagctctcgaaggcttgactcagcccctgcaaggcggtacccctcactgtgagccatgtcagctgcccagcgaatctccaggaagcctgtcagaagttctcgcacagcctcagggcgctttggccccacccaactgcgaatcagacagcaagacaggcgtctag

SEQ ID NO: 91307 - DNA, 4493 bp, Artificial Sequence
  derived and/or modified sequence
ccagtgcgtgccgggtgcggcgccagcagcggaggggcggcccggcgcccagcggagagccgctggctggaagaggaggcggtagacgcgaccacagaagatgtcgggccaaacgctcacggatcggatcgccgccgctcagtacagcgttacaggctctgctgtagcaagagcggtctgcaaagccactactcatgaagtaatgggccccaagaaaaagcacctggactacctacaaaccttctttcaacaagtgcttcctaattttgagatctgaaagtatgttccagcatcttttgagtcatacaaccaaagtatgaggagatcacaagtcttttaaaaagttgtgctaaaggagaaatacttcagaaatatgttacatttgttttggatcacagtattatttatttctcaagaagagatttgttcatcatagtagtattagcccggtgcaggaagaactcaagtaaaagacaagaaaaaacaaaaaacagtgttgattgtgggatattaaggaaggctagaatttaagcaactgagtaaagtaaaatgatgtactgagaactaaagttgtattccttggtacttccgagagaaaacagacttggatttttattggatgattcctcctaggaagtaagatgagggcgttcaagaataataacaatttgatccaggctaccaacgagaccaatgttaatattcctcagatggccgacactctctttgagcgggcaacaaacagtagctgggtggttgtgtttaaggctttagtgacaacacatcatctcatggtgcatggaaatgagagatttattcaatatttggcttctagaaatacactattcaatctcagcaattttttggacaaaagtggatcccatggttatgatatgtctaccttcataaggcgctatagtagatatttgaatgaaaaggctttttcttacagacagatggcctttgattttgccagggtgaagaaaggggccgatggtgtaatgaggacaatggctcccgaaaagctgctaaagagtatgccaatactacagggacaaattgatgcactgcttgaatttgatgtgcatccaaatgaactaacaaatggtgtcataaatgcagcatttatgcttcttttcaaagatcttatcaaactttttgcttgctacaatgatggtgttattaacttactcgaaaagttttttgaaatgaagaaaggacaatgtaaagatgctctagaaatttacaaacgatttctaactagaatgacacgagtgtctgaatttctcaaggttgcagagcaagttggtattgataaaggtgacattcctgacctcacacaggctcccagcagtcttatggagacgcttgaacagcatctaaatacattagaaggaaagaaacctggaaacaaatctggtgctccctctccattaagtaagtcttctccagccacaactgttacgtctcctaattctacaccagctaaaactattgacacatccccaccggttgatttatttgcaactgcatctgcggctgtcccagtcagcacttctaaaccatctagtgatctcctggacctccagccagacttttcctctggaggggcagcagcagccgcagcaccagcaccaccaccacctgctggaggagccactgcatggggagaccttttgggagaggattctttggctgcactttcctctgttccctctgaagcacagatttcagatccatttgcaccagaacctacccctcctactacaactgctgaaattgcaactgcctcagcttctgcctccactactacaactgttactgctgtcactgctgaagtggatctctttggagatgcctttgcagcttctcctggggaggcccctgcagcatccgaaggggccgccgcaccagctaccccaacccctgtagcagcagcacttgatgcatgttcaggaaatgacccctttgccccgtctgaaggtagtgcagaggctgcacctgagctggacctctttgcaatgaagccacctgagaccagtgttcctgtagttacccctacagctagcacagcccctccagttcccgcaactgctccttctcctgctcctgccgttgcagctgctgctgctgccactactgctgccaccgccgctgccaccaccactaccaccacctccgctgccaccgccaccactgctcctcctgctctagatatctttggtgatgctttctcctctccaccacaaggggcctctcctgtgcctgagagttctctcactgctgacctcttatctgatgcatttggaagtagtgcttctgaaccccaacctgcatctcaggctgcttctagttcatcagcatcggcagacctactagctggatttgggggttctttcatggcgccttccccatctccagtgactccagctcagaataacctgctacagcccaattttgaggcagcttttgggacaacgccttcaacttccagcagcagctcctttgatccatcagtgtttgatggtctaggtgatcttttgatgccaaccatggcaccagctgggcagcctgcacctgtctcaatggtaccacccagtcctgcaatggcagccagcaaagcccttggaagtgatcttgattcatctcttgccagcttagtaggcaatcttggaatttctggtaccacaacaaaaaagggagatcttcagtggaatgctggagagaaaaagttgactggtggagccaactggcagcctaaagtagctccagcaacctggtcagcaggcgttccaccaagtgcacctttgcaaggagctgtacctccaaccagttcagttcctcctgttgccggggccccatcggttggacaacctggagcaggatttggaatgcctcctgctgggacaggcatgcccatgatgcctcagcagccggtcatgtttgcacagcccatgatgaggcccccctttggagctgccgctgtacctggcacgcagctttctccaagccctacacctgccagtcagagtcccaagaaacctccagcaaaggacccattagcggatcttaacatcaaggatttcttgtaaacaatttaagctgcaatatttgtgactgaataggaaaataaatgagtttggagacttcaaataagattgatgctgagtttcaaagggagccaccagtaccaaacccaatacttactcataacttctcttccaaaatgtgtaacacagccgtgaaagtgaacattaggaatatgtactaccttagctgttatccctactcttgaaattgtagtgtatttggattatttgtgtattgtacgatgtaaacaatgaatggatgttactgatgccgttagtgcttttttggacttcacctgaggacagatgatgcagctgttgtgtggcgagctatttggaaagacgtctgtgtttttgaaggtttcaatgtacatataacttttgaacaaaccccaaactcttcccataaattatcttttcttctgtatctctgttacaagcgtagtgtgataataccagataataaggaaaacactcataaatatacaaaactttttcagtgtggagtacatttttccaatcacaggaacttcaactgttgtgagaaatgtttatttttgtggcactgtatatgttaagaaattttattttaaaaaatataaaggttaacgtccataataaatacttctctttgaagctaccttatcaagaacgaaaaatcgtatgggaagaatcccctatttatcactgctatattaaaatatatatattttaattatatttgacaggttttgcatctaaattgacctatttattcattcttgattaaatgcactgaaaagtaaagggtctgtttgtgtcatgttcatgaaaatgcggttagagaggtgctattcaagtgattctgaaggcaccccaaggtatatctgtaatttaaagattactgcaaatatctttactttactgtgggtttttagtacatctgttaatttagtgtttctttgtgtgttttgtagactagtgttcttccatccttcaactgagctcaaagtaggttttgttgtaacattgtgattaggatttaaactaattcagagaattgtatcttttactgtacatactgtattctttaagttttaatttgttgtcatactgtctgtgctgatggcttggcttaagattttgatgcataaatgaggtcactgttgatcagtgttgctagtagcttggcagctcttcataaaagcatattgggttggaaaggtgtttgcctatttttcaaattatttaatagatgtatggtaccatttaaaagtggttgtatctgaatttactgtggggataacatacactgtaatggggaaaaattacctaaaaccaatttcaaaatggctttctttgtatttcagtttaaaaacccagtgcatgtacgccctctgagatgcaataaacaccttgaacaaa

SEQ ID NO: 91308 - protein, 509 aa, Artificial Sequence
  derived and/or modified sequence
MPENVAPRSGATAGAAGGRGKGAYQDRDKPAQIRFSNISAAKAVADAIRTSLGPKGMDKMLVELSKAQDIEAGDGTTSVVIIAGSLLDSCTKLLQKGIHPTIISESFQKALEKGIEILTDMSRPVELSDRETLLNSATTSLNSKVVSQYSSLLSPMSVNAVMKVIDPATATSVDLRDIKIVKKLGGTIDDCELVEGLVLTQKVSNSGITRVEKAKIGLIQFCLSAPKTDMDNQIVVSDYAQMDRVLREERAYILNLVKQIKKTGCNVLLIQKSILRDALSDLALHFLNKMKIMVIKDIEREDIEFICKTIGTKPVAHIDQFTADMLGSAELAEEVNLNGSGKLLKITGCASPGKTVTIVVRGSNKLVIEEAERSIHDALCVIRCLVKKRALIAGGGAPEIELALRLTEYSRTLSGMESYCVRAFADAMEVIPSTLAENAGLNPISTVTELRNRHAQGEKTAGINVRKGGISNILEELVVQPLLVSVSALTLATETVRSILKIDDVVNTR

SEQ ID NO: 91309 - DNA, 1530 bp, Artificial Sequence
  derived and/or modified sequence
atgcctgagaatgtggcgccccgcagtggagccaccgcgggagccgctggaggacgtggtaaaggggcttatcaagacagggacaagcccgctcagatcaggttcagcaatatatctgccgcaaaagccgtcgctgatgccatacgcacgagcctcgggccgaaaggcatggacaagatgctggtagaactctccaaggctcaagacatcgaagcaggcgacgggacaaccagtgtcgttatcatagcaggatccttgctggattcatgcactaagttgttacaaaaggggattcaccctactattatctctgagagtttccagaaggctcttgagaagggcattgagattttgactgacatgagtaggcctgtggaactgagcgatagagagaccctgcttaacagcgccacaacctctctgaacagcaaagtggtctctcagtactcgagtctccttagtcccatgtccgtgaatgccgtcatgaaggttatcgacccagcaaccgccacttccgtggatctgagagatattaagatcgtcaagaagttaggcggaacaatcgacgactgcgagttggtggaaggcctggtgcttacacagaaggtcagtaactcgggaataacccgggtcgagaaggccaaaatcggtctgattcaattttgtctatccgcccccaagacagatatggataaccagatcgttgtcagtgactatgcacagatggatcgggtgctccgggaagagcgcgcctacatacttaacctcgtcaagcaaatcaaaaagaccggatgcaacgttctgctgatccagaaatcaatcttaagggatgccctttccgatctggctctccactttttgaataagatgaaaatcatggtcatcaaagacattgaacgggaagatatcgagttcatctgtaaaactataggaactaagcccgtagctcacattgaccagtttaccgccgacatgctgggctctgctgagctcgccgaggaggtgaatctgaatggaagcgggaagctgctcaaaatcaccggctgcgcctcacctggaaagacggtcaccattgtggtgagggggtctaacaaattggtcatcgaggaggccgagcggagcattcatgatgcgctttgcgtgataagatgtctggtcaaaaaacgagcactgatcgccggaggtggcgcacctgaaatcgagctcgccctgcgcttgaccgagtactcccgtaccctaagtggcatggagtcttattgcgtccgcgcctttgctgatgccatggaggtgataccatctactttagcagagaatgctgggctcaatcccattagtactgttacagagctccggaatcggcatgcgcaaggggaaaagacggctggtatcaatgtgagaaagggtgggatctctaatatactggaggagctggtagtgcagcccctgttggtgtctgttagcgctctgacactcgccaccgagacagtgaggagcatccttaagattgacgacgtggtgaatacccggtag

SEQ ID NO: 91310 - DNA, 1170 bp, Artificial Sequence
  derived and/or modified sequence
atgtctcggccagtcgagctgagtgacagggagaccctgctgaactcggcgacgactagcctcaacagcaaggtggtcagccagtactcttccttattgagccccatgagcgtgaatgcagtgatgaaagtgatcgatcctgctacagccacctctgtggacctgcgagacatcaagatcgtgaagaaactgggaggtactattgatgattgcgagttggtggagggtctcgtcttgacgcagaaggttagtaatagcggcatcactcgggttgagaaggcgaaaataggcctcatacagttctgcctcagcgcgcccaaaacagacatggataaccagattgtggtgtcagactatgcccagatggacagggtgctcagagaggagcgggcatacatccttaatctcgtgaagcagatcaagaagacgggctgtaatgtgcttcttatccagaaaagcattctccgcgacgctcttagtgacctggccctccactttctcaataaaatgaaaatcatggtgattaaagacatagagagggaggacatcgagttcatttgcaagaccatcggcactaagcctgtggcccacatcgaccaattcaccgccgacatgctgggatctgcagagctcgcggaagaagttaacctcaatgggtcaggtaagcttctgaagattactggctgcgcgagtcctggcaaaaccgtcacaatcgtggtccgcggctccaacaaactggtcatcgaagaagcggaaaggtcgatccatgatgctctctgtgtgattcgatgcttggttaagaaacgggcccttatcgccggcggaggcgctcccgagattgagctcgccctgcggctgacagagtactctcgaactctctctggaatggaaagctattgtgtaagggcctttgccgacgcaatggaagtcatcccctcaacacttgccgaaaatgccggtctcaacccaatctccacagttaccgaattgaggaataggcacgctcagggagagaagactgcggggattaatgtgcggaaaggtgggatctcgaacatactggaagagctggtcgtgcagcctctgctagtgtctgtgagcgcattaacactcgccaccgagactgtacgttcaattctgaaaattgacgatgtcgttaacacaaggtag

SEQ ID NO: 91311 - DNA, 1530 bp, Artificial Sequence
  derived and/or modified sequence
atgccagaaaatgtggcccccaggtctggggccacagctggagctgctgggggccggggcaaaggagcctaccaggaccgggacaagccagcccagatccgcttcagcaacatctctgctgccaaggctgtggctgatgccatccgcaccagcctgggccccaagggcatggacaagatgctggtggagctgagcaaggcccaggacatcgaggccggagatggcaccacctctgtggtgatcatcgccggcagcctgctggacagctgcaccaagctgctgcagaagggcatccaccccaccatcatcagcgagagcttccagaaggccctggagaagggcatcgagatcctgacagacatgagcaggcctgtggagctgagtgaccgggagaccctgctgaacagcgccaccaccagcctgaacagcaaggtggtgtcccagtacagcagcctgctgagccccatgtctgtgaatgctgtgatgaaggtgattgatcctgccacagccacctctgtggacctgcgggacatcaagatcgtgaagaagctgggcggcaccattgatgactgtgagctggtggagggcctggtgctgacccagaaggtgagcaacagcggcatcaccagggtggagaaggccaagattggcctcatccagttctgcctgagcgcccccaagacagacatggacaaccagatcgtggtgtctgactatgcccagatggacagagtgctgcgggaggagcgggcctacatcctgaacctggtgaagcagatcaagaagacaggctgcaatgtgctgctgatccagaagagcatcctgagagatgccctgagtgacctggccctgcacttcctgaacaagatgaagatcatggtgatcaaggacatcgagagagaagatattgagttcatctgcaagaccatcggcaccaagcctgtggcccacatcgaccagttcaccgctgacatgctgggcagcgctgagctggccgaggaggtgaacctgaatggcagcggcaagctgctgaagatcaccggctgtgccagccctgggaagacagtgaccatcgtggtgcggggcagcaacaagctggtgattgaggaggccgagaggagcatccatgatgccctgtgtgtgatccgctgcctggtgaagaagagggccctgattgctgggggcggggcccctgagattgagctggccctgcggctgacagagtacagcaggaccctgagcggcatggagagctactgtgtgcgggcctttgctgatgccatggaggtgatccccagcaccctggctgaaaatgccggcctgaaccccatcagcacagtgacagagctgaggaacagacatgcccagggcgagaagacagctggcatcaacgtgaggaaaggaggcatcagcaacatcctggaggagctggtggtgcagcccctgctggtgtctgtgtctgccctgaccctggccacagaaacagtgcgcagcatcctgaagattgatgatgtggtgaacaccaggtag

SEQ ID NO: 91312 - DNA, 1170 bp, Artificial Sequence
  derived and/or modified sequence
atgagcaggcctgtggagctgagtgaccgggagaccctgctgaacagcgccaccaccagcctgaacagcaaggtggtgtcccagtacagcagcctgctgagccccatgtctgtgaatgctgtgatgaaggtgattgatcctgccacagccacctctgtggacctgcgggacatcaagatcgtgaagaagctgggcggcaccattgatgactgtgagctggtggagggcctggtgctgacccagaaggtgagcaacagcggcatcaccagggtggagaaggccaagattggcctcatccagttctgcctgagcgcccccaagacagacatggacaaccagatcgtggtgtctgactatgcccagatggacagagtgctgcgggaggagcgggcctacatcctgaacctggtgaagcagatcaagaagacaggctgcaatgtgctgctgatccagaagagcatcctgagagatgccctgagtgacctggccctgcacttcctgaacaagatgaagatcatggtgatcaaggacatcgagagagaagatattgagttcatctgcaagaccatcggcaccaagcctgtggcccacatcgaccagttcaccgctgacatgctgggcagcgctgagctggccgaggaggtgaacctgaatggcagcggcaagctgctgaagatcaccggctgtgccagccctgggaagacagtgaccatcgtggtgcggggcagcaacaagctggtgattgaggaggccgagaggagcatccatgatgccctgtgtgtgatccgctgcctggtgaagaagagggccctgattgctgggggcggggcccctgagattgagctggccctgcggctgacagagtacagcaggaccctgagcggcatggagagctactgtgtgcgggcctttgctgatgccatggaggtgatccccagcaccctggctgaaaatgccggcctgaaccccatcagcacagtgacagagctgaggaacagacatgcccagggcgagaagacagctggcatcaacgtgaggaaaggaggcatcagcaacatcctggaggagctggtggtgcagcccctgctggtgtctgtgtctgccctgaccctggccacagaaacagtgcgcagcatcctgaagattgatgatgtggtgaacaccaggtag

SEQ ID NO: 91313 - DNA, 1530 bp, Artificial Sequence
  derived and/or modified sequence
atgcccgagaacgtggccccccggagcggcgccaccgccggcgccgctggcgggaggggtaagggcgcctatcaggatagggacaaaccagcccagattcgatttagcaatatctccgccgcaaaggcagtcgcggatgccattcggacctctctcggcccgaagggcatggacaaaatgttagtcgagctgagcaaggcccaggatattgaagctggggacgggacaacttccgtagtaataatagccgggtctctcttggacagttgtacaaagttattgcagaagggtatccacccaacaattatctctgagagctttcaaaaagctctggagaaaggtatcgagatactgacggatatgtcgaggcctgtggagttgtccgatcgtgaaaccctcctcaattctgctaccacctcactgaatagcaaggtggtcagccaatactcgtctctgctcagtccaatgagcgttaacgccgtgatgaaggtgatcgaccccgccaccgccacaagcgtagatttgagggatatcaagattgtcaagaagctgggcggaacaatcgacgactgcgaactggttgaaggcttggtgctgacacagaaggttagtaattcaggaatcacccgagtggaaaaagctaagattgggctgatccagttctgcttaagcgcacccaaaaccgacatggacaaccagattgtggtgtctgattatgcacagatggatcgggtgctcagggaggagcgtgcgtacattctgaatctggtcaagcaaataaagaagaccgggtgtaatgtgctactcatccaaaaatccattctgcgggatgccctatctgacctggccctgcattttttgaacaagatgaaaattatggtgataaaggatatcgaaagagaggacatagagtttatatgtaaaaccatcgggactaagcctgttgctcacatagatcagtttactgccgatatgctcggctcagctgaactggccgaggaagtgaacttaaacgggagcggaaaattgctcaagataacagggtgcgcttcacctggaaagacggtgaccatcgtagtgaggggatctaataaactagtaatcgaagaggccgagcggagtatacacgacgcactgtgcgtgattcggtgcttggtgaagaaacgggcgttgattgccgggggaggcgcacccgaaatcgagctggctctgagactgaccgagtattctcgcactctttctggcatggaatcttattgcgtgcgggcttttgcagatgccatggaggtcatcccttcaacattggcagagaacgccggcttgaaccctatctccactgtgactgaattacgtaatcgccatgcacagggcgagaaaactgccggcataaatgttcgtaaaggtggaatcagtaatatactggaggagcttgtggtccagccgctgctggtgtcagtatccgcgctgacactcgctaccgaaaccgttcgttccatcctgaagatcgacgacgtcgtgaacacgagatag

SEQ ID NO: 91314 - DNA, 1170 bp, Artificial Sequence
  derived and/or modified sequence
atgagccggcccgtggagctgagcgaccgggagaccctgctgaacagtgctaccacaagtcttaatagcaaagtggtgagccagtattcaagcctgctctcccccatgtctgtcaatgccgtaatgaaagtgatagaccccgccacggcaacgtcggtggatcttcgggatatcaagatcgtaaagaagctaggaggaacaatcgatgactgcgagctggtcgagggtcttgtgttgacccaaaaagtgtctaactcaggtataacacgcgtggaaaaagcaaagataggactgatccagttctgtctttcagcacccaagactgatatggacaaccagatcgtggtctctgattatgcacagatggaccgggtgcttagagaggaaagagcatatatactgaatttggtgaaacagataaaaaagactggatgcaacgtcctgctcatccaaaagtccattttacgagacgcattatctgacttggccctgcattttctcaataagatgaaaataatggtgatcaaggatatcgagagggaggacattgagttcatctgtaagacaatagggacaaagcctgttgcccatatcgatcagtttaccgcagatatgttgggctctgcagagctggctgaagaagttaacttgaatggctcagggaagcttctgaagattaccgggtgcgcctccccagggaaaaccgtgacgatcgttgtgaggggatcaaacaaactggtgatcgaggaagccgagcggtcaattcatgatgctttgtgtgttattcgatgcttagtcaaaaaacgcgcacttatagccggaggcggggcgccagaaatagaacttgctttgcgactgacagaatacagccgaactcttagtggcatggagtcgtattgcgtgcgagcattcgcagatgcaatggaggtgatacctagcactctcgccgagaatgccggcctgaacccaatcagtacggtgaccgaactgcgcaaccgccacgcccagggcgagaagacagctgggatcaatgtcaggaaaggcggcatatctaacattttggaagagttggtggtccagcccctgctcgtgtcagtctcagcacttactctggcgactgaaaccgtcaggtcaatccttaagattgatgacgtagtgaacactcgttag

SEQ ID NO: 91315 - DNA, 1530 bp, Artificial Sequence
  derived and/or modified sequence
atgcccgaaaatgtcgctccacggtctggagcaactgcaggggcagccggagggagaggaaaaggggcatatcaggatcgagacaagcccgctcagataaggttctcaaatatctctgctgccaaggcagtggccgacgcaattcgcacttcattaggccctaagggaatggataaaatgctggtggagctaagcaaagcacaggacatcgaagctggagatggtaccacatccgtggtcattatcgcagggagccttttggattcttgcaccaaactgttgcagaaaggaattcatcctacaataattagcgaaagcttccagaaggccctggaaaaaggtattgagattcttacggacatgagccggcctgtcgagctgagcgatcgcgagacgctacttaacagtgcgaccacttctttgaactctaaagtcgtgtcccagtactccagcttattgagccccatgtctgtcaatgccgttatgaaggtgatcgaccctgctacagccacttccgtagacttaagagacattaaaatcgtgaaaaaactcggcggtacaatcgacgactgcgaactggtggaagggctggtgcttacacaaaaggtctcgaactcagggattactcgcgtcgagaaagcgaagatcgggttgattcaattctgcctttcagcacccaagaccgacatggataaccagattgttgttagtgattatgcacagatggatcgggtccttcgagaggagcgagcttacattctgaacttggttaagcagattaagaaaaccggatgcaatgttctgctcatccagaagagcatactccgcgatgccttatccgacttggccctacatttccttaacaaaatgaaaataatggtaattaaagatatagaacgtgaggacatagaatttatttgcaagactatcggaactaaacctgttgcccacatcgatcagtttactgccgatatgttgggctccgcggaactggcagaagaagtcaacctgaacggctccggtaagttactaaagattaccggatgcgcaagtcccggtaaaacagtgacgattgtcgtgcggggatctaataaattggtgatcgaggaagccgaaaggtccattcacgacgcattatgtgttatcagatgcctggtgaaaaagcgcgctttgatcgcgggtggcggagctcctgagattgaactggcgctgcgacttacggagtactctagaaccctttcaggtatggagtcctattgtgtccgagccttcgccgatgctatggaggtcatacccagcaccctcgccgaaaacgccggtcttaatcctatcagcacagtcaccgaactgcggaatcggcacgcccaaggtgagaagacggcagggattaatgttagaaagggtggcatttctaacatcctggaagagctcgttgtgcagcctctgttagtgagtgtcagtgccctgacactggccaccgaaacagttcggagcatactaaaaattgatgacgtcgtcaacaccaggtag

SEQ ID NO: 91316 - DNA, 1170 bp, Artificial Sequence
  derived and/or modified sequence
atgtctcgacccgtcgaattgagcgatcgcgagacactgttgaacagtgccacaacatcgctgaactccaaggtggtgtcacaatacagttcattgctgtcgcctatgagcgtgaatgctgtgatgaaggtgatcgatccagcaactgcgacctccgtcgatctgagggacattaagatcgtgaaaaaactcggagggaccatcgatgattgtgagctagtcgaaggtttggttctgacccagaaggtgtctaattcaggaatcactagagtggagaaggccaaaattgggctgatccaattctgcctgtctgccccaaaaaccgacatggacaaccaaatcgtggtgagcgactacgctcagatggatagggtcttgagagaggaaagggcgtacatattgaacctagtgaagcagataaagaagaccggctgtaacgttctgctcatccagaaatcaattctacgcgacgccttgtctgatctcgccctacacttcctgaacaaaatgaagatcatggtaataaaagatattgaacgcgaggacatcgagtttatctgcaaaaccatcggaaccaaacccgtggcacatatcgaccagttcactgcggatatgctgggctctgctgaactggcggaggaagtgaatctcaatggatcagggaaactgctgaaaatcaccggctgtgcgtctcctgggaagacagttaccatagtagtgcgaggcagtaataagctggtgatagaagaggctgaaaggtccatccacgacgcactgtgcgtgattcgctgcctcgtcaagaagagagccctgatcgccggagggggagcaccggagattgaactcgccctaagacttaccgaatactctcgtaccctgagcggtatggagtcttactgtgttcgagcatttgctgacgccatggaggtcattccctcaactctggccgaaaacgcaggcctcaaccccatctcgacagtcaccgaactgaggaacagacacgctcagggagaaaagactgccggaattaatgtgcgcaaagggggtatcagcaacatcctggaagagctggttgtgcagcctctgctggtcagcgtgtccgccttaacgctggccaccgaaaccgtgcgctctatcctgaagattgacgacgtggtgaacactcgatag

SEQ ID NO: 91317 - DNA, 1935 bp, Artificial Sequence
  derived and/or modified sequence
cttctccgcctccgcctcctcccgacgccggcgccgctttctggaaggttcgtgaaggcagtgagggcttaccgttattacactgcggccggccagaatccgggtccatccgtccttcccgagccaacccagacacagcggagtttgccatgcccgagaatgtggcaccccggagcggggcgactgccggggctgccggcggccgcgggaaaggcgcctatcaggaccgcgacaagccagcccagatccgcttcagcaacatttccgccgccaaagcggttgctgatgctattagaacaagccttggaccaaaaggaatggataaaatgctggtggagctgtctaaggctcaagatatagaagcaggagatggcaccacatcagtagtcatcattgctggctccctcttagattcttgtaccaagcttcttcagaaagggattcatccaaccatcatttctgagtcattccagaaggccctggaaaagggcattgaaatcttgactgacatgtctcgacctgtggaactgagtgacagagaaactttgttaaatagtgcaaccacttcactgaactcaaaggtggtttctcagtattcaagtctgctttctccaatgagtgtaaatgcagtgatgaaagtgattgacccagccacagccaccagtgtagatcttagagatattaaaatagttaagaagcttggtgggacaattgatgactgtgagttggtggaagggctggttctcacccaaaaagtgtcaaattctggcataaccagagttgaaaaggccaagattgggcttattcagttttgcttatctgctcccaaaacagacatggataatcaaatagtggtttctgactatgcccagatggaccgagtgctgcgagaagagagagcctatattttaaatttagtgaagcaaattaaaaaaacaggatgtaatgtccttctcatacagaaatctattctaagagatgctcttagtgatcttgcattacactttctgaataaaatgaagatcatggtgattaaggatattgaaagagaagacattgaattcatttgtaagacaattggaaccaagccagttgctcatattgaccaatttactgctgacatgctgggttctgctgagttagctgaggaggtcaatttaaatggttctggcaaactgctcaagattacaggctgtgccagccctggaaaaacagttacaattgttgttcgtggttctaacaaactggtgattgaagaagctgagcgctccattcatgatgccctatgtgttattcgttgtttagtgaagaagagggctcttattgcaggaggtggtgctccagaaatagagttggccctacgattaactgaatattcacgaacactgagtggtatggaatcctactgcgttcgtgcttttgcagatgctatggaggtcattccatctacactagctgaaaatgccggcctgaatcccatttctacagtaacagaactaagaaaccggcatgcccagggagaaaaaactgcaggcattaatgtccgaaagggtggtatttccaacattttggaggaactggttgtccagcctctgttggtatcagtcagtgctctgactcttgcaactgaaactgttcggagcattctgaaaatagatgatgtggtaaacactcgataatctggataactgactagcaccattatgatcaccagtattgtggctggaatggaagaagatcaccttggtgttccttgtttggaagattatttcctctgaatttctgggcttggtcttccagttggcatttgcctgaagttgtattgaaacaatttaatgaaaatattaaatatttggtttcaaaaggcagatttatcttctcccaacattctgttatttctgatacttttgaaaaactaataaaaactaataaaag

SEQ ID NO: 91318 - DNA, 1619 bp, Artificial Sequence
  derived and/or modified sequence
acacagcggagtttgccatgcccgagaatgtggcaccccggagcggggcgactgccggggctgccggcggccgcgggaaaggcgcctatcaggaccgcgacaagccagcccagatccgcttcagcaacatttccgccgccaaagcggttgctgatgctattagaacaagccttggaccaaaaggaatggataaaatgattcaagatggaaaaggtgatgtaaccattacaaatgatggtgctaccattctgaaacaaatgcaagtattacatccagcagccagaatgggattcatccaaccatcatttctgagtcattccagaaggccctggaaaagggcattgaaatcttgactgacatgtctcgacctgtggaactgagtgacagagaaactttgttaaatagtgcaaccacttcactgaactcaaaggtggtttctcagtattcaagtctgctttctccaatgagtgtaaatgcagtgatgaaagtgattgacccagccacagccaccagtgtagatcttagagatattaaaatagttaagaagcttggtgggacaattgatgactgtgagttggtggaagggctggttctcacccaaaaagtgtcaaattctggcataaccagagttgaaaaggccaagattgggcttattcagttttgcttatctgctcccaaaacagacatggataatcaaatagtggtttctgactatgcccagatggaccgagtgctgcgagaagagagagcctatattttaaatttagtgaagcaaattaaaaaaacaggatgtaatgtccttctcatacagaaatctattctaagagatgctcttagtgatcttgcattacactttctgaataaaatgaagatcatggtgattaaggatattgaaagagaagacattgaattcatttgtaagacaattggaaccaagccagttgctcatattgaccaatttactgctgacatgctgggttctgctgagttagctgaggaggtcaatttaaatggttctggcaaactgctcaagattacaggctgtgccagccctggaaaaacagttacaattgttgttcgtggttctaacaaactggtgattgaagaagctgagcgctccattcatgatgccctatgtgttattcgttgtttagtgaagaagagggctcttattgcaggaggtggtgctccagaaatagagttggccctacgattaactgaatattcacgaacactgagtggtatggaatcctactgcgttcgtgcttttgcagatgctatggaggtcattccatctacactagctgaaaatgccggcctgaatcccatttctacagtaacagaactaagaaaccggcatgcccagggagaaaaaactgcaggcattaatgtccgaaagggtggtatttccaacattttggaggaactggttgtccagcctctgttggtatcagtcagtgctctgactcttgcaactgaaactgttcggagcattctgaaaatagatgatgtggtaaacactcgataatctggataactgactagcaccattatgatcaccagtattgtggctggaatggaagaagatcaccttggtgttccttgtttggaagattatt

SEQ ID NO: 91319 - DNA, 1530 bp, Artificial Sequence
  derived and/or modified sequence
atgcccgagaacgtggcccccagaagcggcgccaccgccggcgccgccggcggcagaggcaagggcgcctaccaggacagagacaagcccgcccagatcagattcagcaacatcagcgccgccaaggccgtggccgacgccatcagaaccagcctgggccccaagggcatggacaagatgctggtggagctgagcaaggcccaggacatcgaggccggcgacggcaccaccagcgtggtgatcatcgccggcagcctgctggacagctgcaccaagctgctgcagaagggcatccaccccaccatcatcagcgagagcttccagaaggccctggagaagggcatcgagatcctgaccgacatgagcagacccgtggagctgagcgacagagagaccctgctgaacagcgccaccaccagcctgaacagcaaggtggtgagccagtacagcagcctgctgagccccatgagcgtgaacgccgtgatgaaggtgatcgaccccgccaccgccaccagcgtggacctgagagacatcaagatcgtgaagaagctgggcggcaccatcgacgactgcgagctggtggagggcctggtgctgacccagaaggtgagcaacagcggcatcaccagagtggagaaggccaagatcggcctgatccagttctgcctgagcgcccccaagaccgacatggacaaccagatcgtggtgagcgactacgcccagatggacagagtgctgagagaggagagagcctacatcctgaacctggtgaagcagatcaagaagaccggctgcaacgtgctgctgatccagaagagcatcctgagagacgccctgagcgacctggccctgcacttcctgaacaagatgaagatcatggtgatcaaggacatcgagagagaggacatcgagttcatctgcaagaccatcggcaccaagcccgtggcccacatcgaccagttcaccgccgacatgctgggcagcgccgagctggccgaggaggtgaacctgaacggcagcggcaagctgctgaagatcaccggctgcgccagccccggcaagaccgtgaccatcgtggtgagaggcagcaacaagctggtgatcgaggaggccgagagaagcatccacgacgccctgtgcgtgatcagatgcctggtgaagaagagagccctgatcgccggcggcggcgcccccgagatcgagctggccctgagactgaccgagtacagcagaaccctgagcggcatggagagctactgcgtgagagccttcgccgacgccatggaggtgatccccagcaccctggccgagaacgccggcctgaaccccatcagcaccgtgaccgagctgagaaacagacacgcccagggcgagaagaccgccggcatcaacgtgagaaagggcggcatcagcaacatcctggaggagctggtggtgcagcccctgctggtgagcgtgagcgccctgaccctggccaccgagaccgtgagaagcatcctgaagatcgacgacgtggtgaacaccagatag

SEQ ID NO: 91320 - DNA, 1170 bp, Artificial Sequence
  derived and/or modified sequence
atgagcagacccgtggagctgagcgacagagagaccctgctgaacagcgccaccaccagcctgaacagcaaggtggtgagccagtacagcagcctgctgagccccatgagcgtgaacgccgtgatgaaggtgatcgaccccgccaccgccaccagcgtggacctgagagacatcaagatcgtgaagaagctgggcggcaccatcgacgactgcgagctggtggagggcctggtgctgacccagaaggtgagcaacagcggcatcaccagagtggagaaggccaagatcggcctgatccagttctgcctgagcgcccccaagaccgacatggacaaccagatcgtggtgagcgactacgcccagatggacagagtgctgagagaggagagagcctacatcctgaacctggtgaagcagatcaagaagaccggctgcaacgtgctgctgatccagaagagcatcctgagagacgccctgagcgacctggccctgcacttcctgaacaagatgaagatcatggtgatcaaggacatcgagagagaggacatcgagttcatctgcaagaccatcggcaccaagcccgtggcccacatcgaccagttcaccgccgacatgctgggcagcgccgagctggccgaggaggtgaacctgaacggcagcggcaagctgctgaagatcaccggctgcgccagccccggcaagaccgtgaccatcgtggtgagaggcagcaacaagctggtgatcgaggaggccgagagaagcatccacgacgccctgtgcgtgatcagatgcctggtgaagaagagagccctgatcgccggcggcggcgcccccgagatcgagctggccctgagactgaccgagtacagcagaaccctgagcggcatggagagctactgcgtgagagccttcgccgacgccatggaggtgatccccagcaccctggccgagaacgccggcctgaaccccatcagcaccgtgaccgagctgagaaacagacacgcccagggcgagaagaccgccggcatcaacgtgagaaagggcggcatcagcaacatcctggaggagctggtggtgcagcccctgctggtgagcgtgagcgccctgaccctggccaccgagaccgtgagaagcatcctgaagatcgacgacgtggtgaacaccagatag

SEQ ID NO: 91321 - protein, 341 aa, Artificial Sequence
  derived and/or modified sequence
MYGKGKSNSSAVPSDSQAREKLALYVYEYLLHVGAQKSAQTFLSEIRWEKNITLGEPPGFLHSWWCVFWDLYCAAPERRETCEHSSEAKAFHDYSAAAAPSPVLGNIPPGDGMPVGPVPPGFFQALGGVPGSQPLLPSGMDPTRQQGHPNMGGPMQRMTPPRGMVPLGPQNYGGAMRPPLNALGGPGMPGMNMGPGGGRPWPNPTNANSIPYSSASPGNYVGPPGGGGPPGTPIMPSPADSTNSGDNMYTLMNAVPPGPNRPNFPMGPGSDGPMGGLGGMESHHMNGSLGSGDMDSISKNSPNNMSLSNQPGTPRDDGEMGGNFLNPFQSESYSPSMTMSV

SEQ ID NO: 91322 - DNA, 1026 bp, Artificial Sequence
  derived and/or modified sequence
atgtacgggaaggggaagtccaacagtagcgccgtgccctcagactcgcaagctcgggaaaagctggccctgtatgtctacgaatacttgctgcatgtgggtgcccagaagtcagcccagacgttcctgtcagagatcaggtgggagaaaaacataactttgggcgaaccccccggattcctgcattcttggtggtgtgtgttctgggatctatattgcgcagcgcccgagagaagggaaacctgcgaacattcttcagaggcaaaggcctttcatgattattccgcggcggcagcgccctctccagtcctggggaacatcccacctggcgacggaatgccagtgggtccagtccctcccgggttctttcaggctttggggggagttcctgggtcccagcctcttttacctagcggcatggatcctactagacagcagggccatcctaatatggggggtcctatgcagaggatgacacccccacgcggtatggtccccctgggcccccagaactacgggggggctatgaggccaccactcaacgccctcgggggaccaggcatgcctgggatgaatatggggcctggcggcggccgcccctggccaaaccccacaaacgctaactccatcccatatagttcagccagcccgggtaattatgtggggccacccggcggtgggggccccccaggcacacccatcatgcctagcccagccgacagcactaattcaggagacaacatgtataccttgatgaatgctgtgccccctggcccgaaccggccaaactttcctatgggccctggcagtgatggacctatggggggtctgggcggaatggagtcccatcacatgaatggatcactgggatccggtgatatggattccatctctaagaattctccaaataatatgagcttgtcaaatcaaccaggaacacctcgcgacgatggggagatggggggaaattttcttaaccctttccagagtgagtcctacagtccctctatgaccatgagcgtgtag

SEQ ID NO: 91323 - DNA, 1026 bp, Artificial Sequence
  derived and/or modified sequence
atgtatggcaagggcaagagcaacagcagcgctgtgcccagcgacagccaggcccgggagaagctggccctgtatgtgtatgagtacctgctgcacgtgggcgcccagaagagcgcccagaccttcctgtctgagatccgctgggagaagaacatcaccctgggggagcccccaggcttcctgcacagctggtggtgtgtgttctgggacctgtactgtgccgcccctgagcggcgggagacctgtgagcacagcagcgaggccaaggccttccatgactacagcgctgctgctgcccccagccctgtgctgggcaacatccccccaggagatggcatgcctgtgggccctgtgcccccaggcttcttccaggccctgggcggcgtgcccggcagccagcccctgctgcccagcggcatggaccccacccggcagcagggccaccccaacatgggcggccccatgcagaggatgaccccaccccggggcatggtgcccctgggcccccagaactacggcggggccatgaggcctcccctgaatgccctgggcggccctggcatgcctggcatgaacatgggccctgggggcggccggccctggcccaaccccaccaatgccaacagcatcccctacagcagcgccagccctggcaactacgtgggccccccaggcggcggcggccccccaggcacccccatcatgcccagccctgctgacagcaccaacagcggggacaacatgtacaccctgatgaatgctgtgcccccaggccccaaccggcccaacttccccatgggccctggcagtgatggccccatgggcggcctgggcggcatggagagccaccacatgaatggcagcctgggcagcggggacatggacagcatcagcaagaacagccccaacaacatgagcctgagcaaccagcccggcaccccaagagatgatggagagatgggcggcaacttcctgaaccccttccagagcgagagctacagccccagcatgaccatgtctgtgtag

SEQ ID NO: 91324 - DNA, 1026 bp, Artificial Sequence
  derived and/or modified sequence
atgtacggcaagggcaagagcaacagcagcgccgtgcccagcgactcccaggctagagagaagctggccctgtacgtgtacgaatatctgctacatgttggtgctcagaaatccgctcagacattccttagcgaaattagatgggagaagaatataaccttaggcgagccacctgggtttctccattcttggtggtgcgtgttctgggacctttattgcgccgcccccgaacggagggagacttgtgaacactcctccgaggctaaggcgtttcacgactactctgcagccgccgctccatctcccgtgctgggtaacatccctcctggcgacgggatgccagtgggccccgtgcccccaggcttttttcaggcccttggaggcgtgcctgggagtcagcccctgctccccagcggaatggaccccacacgacagcaggggcaccctaatatggggggacccatgcagagaatgacaccaccccgcggaatggttccactcggccctcagaactatgggggtgcgatgaggcctcctctgaacgccctgggcggtcccggtatgccaggcatgaacatgggcccaggcggcggacggccttggccaaatcccacgaatgctaatagtatcccttacagctctgcttctcctgggaattatgttggacccccaggggggggcggaccccctggcacgccaattatgccttcacccgccgattccactaacagcggagacaatatgtataccctaatgaacgccgtgccgccgggacctaatagacccaattttcctatggggcctggaagtgatggccctatgggcggtctcggcgggatggaaagccatcatatgaatggatctctgggctccggagatatggattcaatctctaaaaacagtccaaataacatgtctctttccaaccagcccgggactccccgtgacgatggggagatgggaggcaacttcctcaatccatttcagagcgaatcttattctccaagtatgaccatgtcagtttag

SEQ ID NO: 91325 - DNA, 1026 bp, Artificial Sequence
  derived and/or modified sequence
atgtatggaaagggaaaaagcaatagcagtgccgttccatctgacagtcaggcaagggaaaaactggcattgtacgtctacgagtacctcttacatgtgggcgctcagaagagtgctcagacctttctctctgagatcaggtgggaaaaaaacattacattgggcgaacccccaggattccttcacagctggtggtgtgtgttttgggatctgtattgtgccgctcccgagcgtagggagacttgtgagcactcgtctgaagccaaggcattccatgactattctgccgctgccgctccatccccagtgttgggtaatattcctcccggtgacggcatgcctgtgggtcccgtaccacccggattctttcaggccctggggggtgtcccagggtctcagcctctgcttccgagcggcatggacccaacccggcagcagggccacccaaacatgggaggaccaatgcagcggatgacaccccctcgcggaatggtccctctggggccacagaattatgggggagccatgcggccaccactcaacgccctaggtggccctggcatgcccggaatgaatatggggccaggcggtggcagaccatggcccaacccaactaacgcgaacagcattccctactcctcagcgtcccccggaaactatgttggacccccaggcggaggaggcccacctggcacacccatcatgccctcacccgcagacagtaccaatagcggggataatatgtatacattgatgaatgcagtccctcctggtcctaatcgccctaactttcccatgggaccagggagcgatggacccatgggaggcctagggggaatggagagtcaccacatgaacgggtccctcggaagtggcgatatggattcaatctccaagaactcacccaacaacatgtctctgtctaatcaaccaggtacgcccagggacgatggagaaatggggggtaacttcctgaatccattccagagcgagagctattcccccagtatgacaatgtctgtgtag

SEQ ID NO: 91326 - DNA, 1521 bp, Artificial Sequence
  derived and/or modified sequence
caagcatgtacggcaaaggcaagagtaacagcagcgccgtcccgtccgacagccaggcccgggagaagttagcactctacgtatatgaatatctgctccatgtaggagctcagaaatcagctcaaacatttttatcagagataagatgggaaaaaaacatcacattgggggaaccaccaggattcttacattcttggtggtgtgtattttgggatctctactgtgcagctccagagagacgtgaaacatgtgaacactcaagtgaagcaaaagccttccatgattacagtgctgcagcagctcccagtccagtgctaggaaacattcccccaggagatggcatgccagtaggtcctgtaccaccagggttctttcaggcacttggaggtgtcccaggaagtcagccattactccccagtggaatggatccaactcgacaacaaggacatccaaatatgggtgggccaatgcagagaatgactcctccaagaggaatggtgcccttaggaccacagaactatggaggtgcaatgagacccccactgaatgctttaggtggccctggaatgcctggaatgaacatgggtccaggtggtggtagaccttggccaaacccaacaaatgccaattcaataccatactcctcagcatctcctgggaattatgtaggtcctccaggaggtggagggccaccaggaacacccatcatgcctagtccagcagattcaaccaactctggtgataacatgtatactttaatgaatgcagtacctcctggacctaacagacctaattttccaatgggtcctgggtcagatggtcccatgggtggattaggaggaatggagtcacatcacatgaatggctctttaggctcaggagatatggacagtatttccaagaattctcccaataatatgagcctgagtaatcaaccgggcactccaagggatgatggcgaaatggggggaaatttcttaaatccttttcagagtgagagttactcccctagcatgacaatgagcgtgtgatccattaccaagtctcctcatgaaaaccacagtgagtcagcccttcacagaactactacggaagaaaattattcatcacagtgtacagttaaacaaaggaatctcagtcacaccaaaccaacctttttatttcctgctctctcccctcttttgtgaagaaagcgggtccaaatgtgattcaaacaactgtacggagtggcatattagaattgccctaaactgaactgcaaataattatgtgtgtatgtatatgtgtgggaaagagaatgtactgtatatgtgtatgttatacagacatatacacatacatacattgacccacaggacattgtaaaatattatcacatgacatcttaagtagaaataagtagggacttttattccatcctttttttcacgtttacattttaattattacaagttgctcctgccccctccctgaactattttgtgctgtgtatatcactgctttatataagttattttttaa

SEQ ID NO: 91327 - DNA, 1026 bp, Artificial Sequence
  derived and/or modified sequence
atgtacggcaagggcaagagcaacagcagcgccgtgcccagcgacagccaggccagagagaagctggccctgtacgtgtacgagtacctgctgcacgtgggcgcccagaagagcgcccagaccttcctgagcgagatcagatgggagaagaacatcaccctgggcgagccccccggcttcctgcacagctggtggtgcgtgttctgggacctgtactgcgccgcccccgagagaagagagacctgcgagcacagcagcgaggccaaggccttccacgactacagcgccgccgccgcccccagccccgtgctgggcaacatcccccccggcgacggcatgcccgtgggccccgtgccccccggcttcttccaggccctgggcggcgtgcccggcagccagcccctgctgcccagcggcatggaccccaccagacagcagggccaccccaacatgggcggccccatgcagagaatgaccccccccagaggcatggtgcccctgggcccccagaactacggcggcgccatgagaccccccctgaacgccctgggcggccccggcatgcccggcatgaacatgggccccggcggcggcagaccctggcccaaccccaccaacgccaacagcatcccctacagcagcgccagccccggcaactacgtgggcccccccggcggcggcggcccccccggcacccccatcatgcccagccccgccgacagcaccaacagcggcgacaacatgtacaccctgatgaacgccgtgccccccggccccaacagacccaacttccccatgggccccggcagcgacggccccatgggcggcctgggcggcatggagagccaccacatgaacggcagcctgggcagcggcgacatggacagcatcagcaagaacagccccaacaacatgagcctgagcaaccagcccggcacccccagagacgacggcgagatgggcggcaacttcctgaaccccttccagagcgagagctacagccccagcatgaccatgagcgtgtag

SEQ ID NO: 91328 - protein, 143 aa, Artificial Sequence
  derived and/or modified sequence
MARQKKMGQSVLRAVFFLVLGLLGHSHGGFPNTISIGGLFMRNTVQEHSAFRFAVQLYNTNQNTTEKPFHLNYHVDHLDSSNSFSVTNACPAERDYLPWPGSIRENNWTALPCCKDHGLLHLKCSPGGRQNWAYCIWGVTGEL

SEQ ID NO: 91329 - protein, 164 aa, Artificial Sequence
  derived and/or modified sequence
MARQKKMGQSVLRAVFFLVLGLLGHSHGGFPNTISIGGLFMRNTVQEHSAFRFAVQLYNTNQNTTEKPFHLNYHVDHLDSSNSFSVTNACPAERDYLPWPGSIRENNWTALPCCKDHGLLHLKCSPGGPAKTGPIVSGALQVNCKMRTRSQVSTTSSLLEFSTE

SEQ ID NO: 91330 - DNA, 432 bp, Artificial Sequence
  derived and/or modified sequence
atggcccgacagaagaaaatgggccagagcgtgctgcgagctgtcttttttctagtcttggggttactaggacacagccatggagggttccctaacacaatttccattggcgggctatttatgaggaatacggtccaggaacactcagccttcagattcgccgtgcaactgtacaataccaaccagaatacaacagagaaaccatttcacctcaattaccatgtggatcatctggacagcagtaatagcttcagcgtgaccaacgcctgccctgccgagcgcgactacctaccatggcctgggtccattagagaaaacaattggactgcgctgccctgctgcaaggaccatggattactccaccttaaatgcagtcccggcggcaggcagaattgggcctattgcatctggggagtcaccggcgagctttag

SEQ ID NO: 91331 - DNA, 495 bp, Artificial Sequence
  derived and/or modified sequence
atggcccgacagaagaaaatggggcagtctgtgctccgcgccgttttttttctggtattggggctcttggggcactcccatggaggattccccaacactataagtatcggcgggctatttatgagaaataccgttcaggagcattctgcctttaggtttgccgttcagctctataacactaatcaaaacaccacagagaagcctttccacctgaattaccatgtcgaccacctggacagctccaactccttctcagttaccaacgcgtgccctgccgagagagattacctgccctggcctggcagcattagggaaaacaattggacagccctcccttgttgcaaggaccacggtttactgcacctaaagtgttctccgggagggccggctaagaccggacccatagtctccggggcactgcaagtgaattgtaagatgagaacacggtcccaagtttctacaacttcctcgttactggagtttagtacggagtag

SEQ ID NO: 91332 - DNA, 495 bp, Artificial Sequence
  derived and/or modified sequence
atggctaggcaaaaaaagatgggccagagcgtgctgagggcagtcttcttcctggtcctgggcctcttgggccactcacacggagggtttccgaataccattagtatcggcggcctgtttatgaggaatacagtccaggagcatagcgcttttagattcgctgttcagttgtataatacaaaccagaacacgacagagaagcccttccacttgaattatcacgtagatcatcttgatagttctaattcctttagcgtgactaatgcctgtccagccgagcgcgattacctgccatggcccggatctattcgcgagaataactggacggcccttccctgttgtaaggaccatggactgctccacttgaaatgtagcccgggcggtccagccaaaaccggtccgattgtgtcaggagctctgcaggtgaattgtaaaatgagaacacgttcacaggtgagtaccacctcatccttactggaattctctactgagtag

SEQ ID NO: 91333 - DNA, 596 bp, Artificial Sequence
  derived and/or modified sequence
agcggaggaggaggaggactagtgtggggtggaaaggaagagtgagcgagagcaagttaaggggagggggtgtaagagccagcgaattctttttctttttctattattattttgacgactcctgagttgcgcccatgctcttgtcagcttcgttttaggcgtacatggccaggcagaagaaaatggggcaaagcgtgctccgggcggtcttctttttagtcctggggcttttgggtcattctcacggaggattccccaacaccatcagcataggtggacttttcatgagaaacacagtgcaggagcacagcgctttccgctttgccgtgcagttatacaacaccaaccagaacaccaccgagaagcccttccatttgaattaccacgtagatcacttggattcctccaatagtttttccgtgacaaatgcttgtcctgctgaaagggactacctgccttggccaggaagcatcagggaaaacaattggacagctctgccgtgctgcaaagatcatgggctgctgcacctaaaatgttcaccaggtgggcgccaaaactgggcctattgtatctggggcgttacaggtgaactgtaa

SEQ ID NO: 91334 - DNA, 934 bp, Artificial Sequence
  derived and/or modified sequence
cgagagagagcgagcgaataagagagagagtaagagggagagagaagaagaggaagaagaggaggcggcggcagcggaggaggaggaggactagtgtggggtggaaaggaagagtgagcgagagcaagttaaggggagggggtgtaagagccagcgaattctttttctttttctattattattttgacgactcctgagttgcgcccatgctcttgtcagcttcgttttaggcgtacatggccaggcagaagaaaatggggcaaagcgtgctccgggcggtcttctttttagtcctggggcttttgggtcattctcacggaggattccccaacaccatcagcataggtggacttttcatgagaaacacagtgcaggagcacagcgctttccgctttgccgtgcagttatacaacaccaaccagaacaccaccgagaagcccttccatttgaattaccacgtagatcacttggattcctccaatagtttttccgtgacaaatgcttgtcctgctgaaagggactacctgccttggccaggaagcatcagggaaaacaattggacagctctgccgtgctgcaaagatcatgggctgctgcacctaaaatgttcaccaggtgggcccgccaaaactgggcctattgtatctggggcgttacaggtgaactgtaagatgagaacaagatcacaagtcagcactacctcctcccttcttgagttctcaactgagtgagcatcatggagggagaagaaagaaagaagttcagcctgggtgtgtgaagctgtaaagttgcaggttgaacccaaacccattttagagacagaagaaactaccctctggagataaaataaaaagatgaagctgagatgggacaggatcaaagttgatgaaatatcaagagaggttaataaaggaacattaatttattcctcaaa

SEQ ID NO: 91335 - DNA, 782 bp, Artificial Sequence
  derived and/or modified sequence
cgctttggcaaacccagcttgcagccaatgaacccgccttccagattggtgtgaagacagaagtgagcttcgttttaggcgtacatggccaggcagaagaaaatggggcaaagcgtgctccgggcggtcttctttttagtcctggggcttttgggtcattctcacggaggattccccaacaccatcagcataggtggacttttcatgagaaacacagtgcaggagcacagcgctttccgctttgccgtgcagttatacaacaccaaccagaacaccaccgagaagcccttccatttgaattaccacgtagatcacttggattcctccaatagtttttccgtgacaaatgcttgtcctgctgaaagggactacctgccttggccaggaagcatcagggaaaacaattggacagctctgccgtgctgcaaagatcatgggctgctgcacctaaaatgttcaccaggtgggcccgccaaaactgggcctattgtatctggggcgttacaggtgaactgtaagatgagaacaagatcacaagtcagcactacctcctcccttcttgagttctcaactgagtgagcatcatggagggagaagaaagaaagaagttcagcctgggtgtgtgaagctgtaaagttgcaggttgaacccaaacccattttagagacagaagaaactaccctctggagataaaataaaaagatgaagctgagatgggacaggatcaaagttgatgaaatatcaagagaggttaataaaggaacattaatttattcctcaaa

SEQ ID NO: 91336 - DNA, 432 bp, Artificial Sequence
  derived and/or modified sequence
atggcccggcagaagaagatgggccagagcgtgctgcgggctgtgttcttcctggtgctgggcctgctgggccacagccatggaggcttccccaacaccatcagcatcggcggcctcttcatgaggaacacagtgcaggagcacagcgccttccgctttgctgtgcagctgtacaacaccaaccagaacaccacagagaagcccttccacctgaactaccacgtggaccacctggacagcagcaacagcttctctgtgaccaatgcctgcccagctgagcgggactacctgccctggccaggcagcatccgggagaacaactggacagccctgccctgctgcaaggaccacggcctgctgcacctgaagtgcagccctgggggccggcagaactgggcctactgcatctggggcgtgactggagagctgtag

SEQ ID NO: 91337 - DNA, 495 bp, Artificial Sequence
  derived and/or modified sequence
atggcccggcagaagaagatgggccagagcgtgctgcgggctgtgttcttcctggtgctgggcctgctgggccacagccatggaggcttccccaacaccatcagcatcggcggcctcttcatgaggaacacagtgcaggagcacagcgccttccgctttgctgtgcagctgtacaacaccaaccagaacaccacagagaagcccttccacctgaactaccacgtggaccacctggacagcagcaacagcttctctgtgaccaatgcctgcccagctgagcgggactacctgccctggccaggcagcatccgggagaacaactggacagccctgccctgctgcaaggaccacggcctgctgcacctgaagtgcagccctgggggccctgccaagacaggccccatcgtgtctggggccctgcaggtgaactgcaagatgaggaccaggagccaggtgtccaccaccagcagcctgctggagttcagcacagaatag

SEQ ID NO: 91338 - DNA, 432 bp, Artificial Sequence
  derived and/or modified sequence
atggcccggcagaagaagatgggccagagcgtgctgcgggccgtgttctttcttgttctcggcttgctgggccacagtcatgggggctttcccaatacaatttctattggggggctattcatgcggaacactgtgcaagaacatagtgcttttcggttcgcagtccaattgtacaataccaatcaaaacacaaccgagaaacccttccacctgaactaccacgtagaccacttggacagctcaaattcattctccgtgacgaacgcctgccctgccgagagagattatctaccctggcctggttccattagagaaaacaactggactgcacttccgtgctgtaaggaccacggcctccttcaccttaaatgcagccccggagggcggcagaactgggcgtattgtatctggggggttacaggagagctctag

SEQ ID NO: 91339 - DNA, 495 bp, Artificial Sequence
  derived and/or modified sequence
atggcccggcagaagaagatgggccagagcgtgctgcgggccgtgtttttcctcgtgctgggtcttctgggacattcacacggcgggtttcccaacaccatttccatagggggcttgttcatgagaaacactgtgcaggagcactctgcttttcgttttgccgtgcagctgtataatacaaaccagaatactactgaaaaaccttttcacctgaattaccacgttgatcaccttgacagctctaattcttttagcgtgacaaacgcctgtcctgctgagagagactacttaccctggcccggctcgattagggagaacaactggacagccctaccgtgctgcaaggatcacggtttgctccacctaaaatgtagtcctggtggccccgctaagactgggcctatagtgagtggagctctgcaggtcaattgcaagatgcggactcgctcccaggtttcaaccacctcatcactgctggagttcagtaccgaatag

SEQ ID NO: 91340 - DNA, 495 bp, Artificial Sequence
  derived and/or modified sequence
atggcccggcagaagaagatgggccagagcgtgctgcgggccgtgttcttcctagtgttgggcctgttaggccatagccatggcggttttccgaacactatcagcattggagggttgtttatgaggaacacagtgcaggagcactcagccttcagattcgctgtccagctctacaatactaaccagaatacaactgagaagccattccatctcaattatcacgttgatcatctggattcttcgaacagcttcagcgttacaaatgcatgccccgccgagcgggattacctcccatggcccggcagcatccgcgaaaacaactggaccgccctgccttgttgcaaggatcatggtctgttgcatctcaaatgtagccctgggggacccgccaaaaccggccccatagtgagtggcgccctccaggtgaactgcaagatgaggacacggtcccaggtttcaacaaccagttctctcctggagttttccactgagtag

SEQ ID NO: 91341 - DNA, 432 bp, Artificial Sequence
  derived and/or modified sequence
atggcccgacagaagaaaatggggcagagtgtgctgagagcggttttctttctggtcctgggattacttggccacagccatggcggatttcctaatacgatttccattgggggactgtttatgcgcaatacagttcaggagcattctgcctttcgcttcgccgtccagctttataataccaatcaaaacaccacagagaagccttttcacctcaactaccacgtggaccatctggactcatctaactctttttcagtgacaaatgcatgccccgcagagcgtgattatctaccttggccagggagcatccgcgaaaataactggacggcccttccatgttgcaaagaccacggcctgcttcacttgaagtgctcccctggtggacgccagaactgggcctactgtatatggggggttactggcgaattatag

SEQ ID NO: 91342 - DNA, 495 bp, Artificial Sequence
  derived and/or modified sequence
atggcacgtcaaaagaagatgggacagtctgttcttcgcgctgtcttttttttggtgctggggctgcttgggcacagccacggaggcttcccgaacaccatcagcatcggcggactttttatgaggaatactgtccaggagcacagcgcgttcagatttgccgtccagctgtacaacaccaaccaaaacactacagagaaaccattccacctaaattatcatgtcgatcacctcgactcttcgaactcattcagtgttactaacgcctgcccagccgaaagggactatttgccttggccgggttccatccgcgagaacaactggactgcgttgccttgttgtaaagaccatggtctgctgcacctgaaatgttctcccggaggacccgctaagacgggtcccattgtgagcggggctctgcaggtgaattgcaaaatgcgaactagatcacaggtgagcaccaccagtagcctgctcgagttttctactgaatag

SEQ ID NO: 91343 - DNA, 495 bp, Artificial Sequence
  derived and/or modified sequence
atggctcggcagaaaaagatgggtcagtctgtcctgcgggcagtcttcttcctggtgttgggactgctgggccattctcatggcggtttccccaacactatatcgatcggaggcctgttcatgaggaataccgttcaagagcattcagccttcaggtttgccgtgcaactgtataacaccaatcaaaatactaccgaaaaacccttccacctgaattaccatgtggaccatctggatagctctaatagtttttctgtcacaaacgcatgtccagctgagcgggattatctgccgtggccgggaagcattcgcgagaataattggaccgctctcccttgctgtaaagaccatggactgctgcacctcaaatgctctccgggagggcctgctaaaaccggccctatcgtatctggggcactacaggtgaactgtaaaatgaggactcggagccaagtgagcacgaccagctccctcctggaatttagcacagagtag

SEQ ID NO: 91344 - DNA, 432 bp, Artificial Sequence
  derived and/or modified sequence
atggccagacagaagaagatgggccagagcgtgctgagagccgtgttcttcctggtgctgggcctgctgggccacagccacggcggcttccccaacaccatcagcatcggcggcctgttcatgagaaacaccgtgcaggagcacagcgccttcagattcgccgtgcagctgtacaacaccaaccagaacaccaccgagaagcccttccacctgaactaccacgtggaccacctggacagcagcaacagcttcagcgtgaccaacgcctgccccgccgagagagactacctgccctggcccggcagcatcagagagaacaactggaccgccctgccctgctgcaaggaccacggcctgctgcacctgaagtgcagccccggcggcagacagaactgggcctactgcatctggggcgtgaccggcgagctgtag

SEQ ID NO: 91345 - DNA, 495 bp, Artificial Sequence
  derived and/or modified sequence
atggccagacagaagaagatgggccagagcgtgctgagagccgtgttcttcctggtgctgggcctgctgggccacagccacggcggcttccccaacaccatcagcatcggcggcctgttcatgagaaacaccgtgcaggagcacagcgccttcagattcgccgtgcagctgtacaacaccaaccagaacaccaccgagaagcccttccacctgaactaccacgtggaccacctggacagcagcaacagcttcagcgtgaccaacgcctgccccgccgagagagactacctgccctggcccggcagcatcagagagaacaactggaccgccctgccctgctgcaaggaccacggcctgctgcacctgaagtgcagccccggcggccccgccaagaccggccccatcgtgagcggcgccctgcaggtgaactgcaagatgagaaccagaagccaggtgagcaccaccagcagcctgctggagttcagcaccgagtag

SEQ ID NO: 91346 - protein, 375 aa, Artificial Sequence
  derived and/or modified sequence
MDRDLNEDDSVVDLSFEAESPLAPPTELLERLPSYDWLLQGGRGQIFFPPLEAPGRPQEQRSWPSFLEHRVPAMTEEVAREALLSFVDSKCCYSSTVAGDLVIQELKRQTLCRYRLETFSESRISEWTFQPFTNHSVDGPQRGASPRLWDIKVQGPPMFQEDTRKFQVPHSSLVKECHKCHGRGRYKCSGCHGAGTVRCPSCCGAKRKAKQSRRCQLCAGSGRRRCSTCSGRGNKTCATCKGEKKLLHFIQLVIMWKNSLFEFVSEHRLNCPRELLAKAKGENLFKDENSVVYPIVDFPLRDISLASQRGIAEHSAALASRARVLQQRQTIELIPLTEVHYWYQGKTYVYYIYGTDHQVYAVDYPERYCCGCTIV

SEQ ID NO: 91347 - DNA, 1182 bp, Artificial Sequence
  derived and/or modified sequence
actcgaagggcagacatctctttggcaggacgtctggaacatggacagggatctgaatgaagatgacagtgtggtggacctcagttttgaggccgagagtcctctggcgccccccacagagctcctggagagactgcccagctatgactggcttcttcaagggggcagaggacagatattcttcccacctttggaggccccagggaggccccaggagcaaaggtcctggccctcgttcctggaacacagagtccctgcgatgacggaggaggtggcccgggaagccctcctcagctttgtggactctaagtgctgctacagcagcacggtggctggagacctcgtcatccaggagctgaagcggcagaccctctgcaggtaccgtctggagacctttagtgaatccaggataagcgagtggacatttcaaccctttactaaccactctgtggatgggccgcaaagaggcgcctcccccaggctctgggacatcaaggttcaaggtcctccgatgtttcaggaagacaccaggaagttccaggtccctcactcgtcactggtcaaggaatgccacaaatgccatgggcgtgggcggtacaagtgcagcggctgccacggggcgggcacggtgcggtgcccatcctgctgcggagccaagcgcaaagccaagcagtcccggagatgtcagctgtgcgcggggtccggcaggcgaagatgcagcacttgctcagggagagggaacaagacctgcgccacctgcaagggggagaagaagctgttgcacttcatccagcttgtcatcatgtggaagaacagcttgtttgagtttgtgtctgagcaccggctcaactgccccagggagctccttgctaaagccaaaggagaaaacctctttaaggatgaaaactcggtggtgtaccccatcgtggacttccctctgcgagacatctctcttgcctcccagaggggcattgcagagcacagcgctgccttggcctcccgtgcccgcgtcctgcagcagcgccagaccattgagctgatccccctcacagaagttcactattggtaccaaggaaagacttatgtctactacatctatggcactgaccaccaggtgtatgcggtggactatcctgagcggtattgctgtggctgtaccatcgtgtgacatagcatggctgt

SEQ ID NO: 91348 - DNA, 1128 bp, Artificial Sequence
  derived and/or modified sequence
atggacagagacctgaacgaggacgacagcgtggtggacctgagcttcgaggccgagagccccctggccccccccaccgagctgctggagagactgcccagctacgactggctgctgcagggcggcagaggccagatcttcttcccccccctggaggcccccggcagaccccaggagcagagaagctggcccagcttcctggagcacagagtgcccgccatgaccgaggaggtggccagagaggccctgctgagcttcgtggacagcaagtgctgctacagcagcaccgtggccggcgacctggtgatccaggagctgaagagacagaccctgtgcagatacagactggagaccttcagcgagagcagaatcagcgagtggaccttccagcccttcaccaaccacagcgtggacggcccccagagaggcgccagccccagactgtgggacatcaaggtgcagggcccccccatgttccaggaggacaccagaaagttccaggtgccccacagcagcctggtgaaggagtgccacaagtgccacggcagaggcagatacaagtgcagcggctgccacggcgccggcaccgtgagatgccccagctgctgcggcgccaagagaaaggccaagcagagcagaagatgccagctgtgcgccggcagcggcagaagaagatgcagcacctgcagcggcagaggcaacaagacctgcgccacctgcaagggcgagaagaagctgctgcacttcatccagctggtgatcatgtggaagaacagcctgttcgagttcgtgagcgagcacagactgaactgccccagagagctgctggccaaggccaagggcgagaacctgttcaaggacgagaacagcgtggtgtaccccatcgtggacttccccctgagagacatcagcctggccagccagagaggcatcgccgagcacagcgccgccctggccagcagagccagagtgctgcagcagagacagaccatcgagctgatccccctgaccgaggtgcactactggtaccagggcaagacctacgtgtactacatctacggcaccgaccaccaggtgtacgccgtggactaccccgagagatactgctgcggctgcaccatcgtgtag

SEQ ID NO: 91349 - DNA, 1128 bp, Artificial Sequence
  derived and/or modified sequence
atggaccgagatctgaatgaagacgatagtgttgtggacctgtccttcgaggcagagtcacctctggcaccccccaccgagctgctggagaggctgccgtcttacgactggctgctgcaaggcggacgtgggcaaatcttcttcccccctctggaagcgccaggaagaccccaggagcaaagaagctggccgagctttctggaacaccgggtgccagctatgactgaagaagttgcccgagaagccctgctgagctttgtggattctaaatgttgttactcctctactgttgctggcgacctggtgatccaggagctcaagcgtcagaccctatgtagataccggttagaaaccttcagcgaaagcaggatcagcgaatggacatttcagccctttacgaaccactcagtcgacggcccccagaggggagcctcacccaggctgtgggacatcaaggtccaggggccgccaatgttccaggaagatacacgcaagttccaggtcccccatagctccctcgtgaaggagtgccacaaatgccacggcagggggaggtacaagtgctcaggatgtcacggtgctggcacggtgcggtgccctagttgttgcggagccaagcgaaaggccaaacagtcacggagatgtcagctgtgtgccgggtctggtaggcgtcggtgtagcacatgttctggaagagggaacaaaacctgtgcaacatgtaaaggtgagaagaagctgctgcacttcatccagcttgtcatcatgtggaagaattccttgttcgagtttgtaagcgagcataggcttaattgcccgagagagctcctggccaaggctaaaggggaaaacctctttaaggacgaaaatagtgtcgtttaccctatcgtggacttcccacttcgcgatattagtctggcttcacagaggggcattgcagagcactctgccgcgctggcctcacgggctagggtcttgcagcagagacagacaatcgagctgatcccattgactgaggttcactactggtaccaaggcaaaacctacgtgtattacatctacggcacggatcaccaggtctatgccgtcgattaccccgagaggtattgttgcggttgtacgattgtatag

SEQ ID NO: 91350 - DNA, 1128 bp, Artificial Sequence
  derived and/or modified sequence
atggaccgggacctgaatgaagatgacagcgtggtggacctgagctttgaggccgagagccccctggccccacccacagagctgctggagcggctgcccagctatgactggctgctgcagggcggccggggccagatcttcttcccccccctggaggcccctggccggccccaggagcagaggtcctggcccagcttcctggagcaccgggtgcctgccatgacagaggaggtggcccgggaggccctgctgagctttgtggacagcaagtgctgctacagcagcacagtggccggggacctggtgatccaggagctgaagaggcagaccctgtgccgctaccgcctggagaccttcagcgagagccgcatcagcgagtggaccttccagcccttcaccaaccacagcgtggatggcccccagagaggagccagcccccggctgtgggacatcaaggtgcagggcccccccatgttccaggaggacaccaggaagttccaggtgccccacagcagcctggtgaaggagtgccacaagtgccacggccggggccgctacaagtgcagcggctgccacggggccggcaccgtgcgctgccccagctgctgcggggccaagaggaaggccaagcagagccgccgctgccagctgtgtgccggcagcggcagaagacgctgcagcacctgcagcggccggggcaacaagacctgtgccacctgcaagggggagaagaagctgctgcacttcatccagctggtgatcatgtggaagaacagcctgtttgaatttgtgtctgagcaccggctgaactgcccccgggagctgctggccaaggccaagggggagaacctcttcaaggatgagaacagcgtggtgtaccccatcgtggacttccccctgcgggacatcagcctggccagccagaggggcattgctgagcacagcgctgccctggccagccgggcccgggtgctgcagcagaggcagaccatcgagctgatccccctgacagaggtgcactactggtaccagggcaagacctacgtgtactacatctatggaacagaccaccaggtgtatgctgtggactacccagagcgctactgctgcggctgcaccatcgtgtag

SEQ ID NO: 91351 - DNA, 120 bp, Artificial Sequence
  derived and/or modified sequence
atgacaggcttcttcaagggagcagaagatcgctacagcagccacctgtggaggccccagggcggccccaggagcaagggccctggccccaggtcctggaacacagagagcctgaggtag

SEQ ID NO: 91352 - DNA, 1128 bp, Artificial Sequence
  derived and/or modified sequence
atggaccgggacctgaacgaggacgacagcgtggtggacctgagcttcgaggccgaaagccccctggcaccacccacagagctcctggagcggttaccctcctacgactggctactacagggtggacggggtcaaattttctttccgccactcgaggctcccggcagacctcaggagcagcgctcctggccttctttcctcgagcaccgcgttccagccatgactgaagaggtggcccgcgaagctctgctctccttcgtcgactcaaagtgctgctattcttccaccgttgccggcgacctcgtcatccaggaactgaagcgccagactttgtgcaggtatagactggaaactttttcagaatcccgcattagtgaatggacgttccagccgttcaccaaccactcagttgatggtcctcagcgtggcgcctctccccgcctgtgggacataaaggtgcagggccctccaatgtttcaggaggacacaagaaaattccaggtgccgcattcaagcctggtcaaggagtgtcataaatgccatggacggggaagatacaaatgctccgggtgccatggtgctgggacggtacgatgtcctagctgctgtggcgcaaagcggaaagcaaagcagtccaggaggtgtcagttgtgcgccggttccggccgccggagatgttccacttgttcaggacggggcaataagacctgcgccacatgtaaaggcgagaaaaagcttctccactttatccagcttgtgatcatgtggaaaaactccctcttcgaatttgtgtcagagcaccggctgaactgtcctagagagcttctggctaaagcaaaaggggagaatctcttcaaggacgagaacagtgtggtatatccaatcgtggacttccccctccgggatatatcactggcatcacagagagggattgcagagcactcggcagcactggcttcccgtgccagggttctgcaacagcgtcagactatcgagttgattcccttgacagaggtacactattggtatcagggaaagacatatgtgtattatatttacgggacagatcatcaggtctacgctgtggactacccagaacgatattgctgtggatgtactatcgtgtag

SEQ ID NO: 91353 - DNA, 1128 bp, Artificial Sequence
  derived and/or modified sequence
atggatagagaccttaatgaggacgacagcgtcgtggacctcagtttcgaagctgagtccccgttggcccctcctaccgagttgctcgagcgcctacccagttacgattggctgctgcaggggggaaggggccagatatttttccctccgctggaggccccaggtcgcccacaggagcagcgctcctggccaagctttttggagcatcgagtgcccgcaatgactgaggaggtagcacgggaagctctgctaagcttcgtagactctaagtgttgctatagctcaacagtagctggagacctggtgatccaggagttaaagcgccagacgctgtgcagatacagacttgaaaccttttccgaatcccgcattagcgaatggacctttcagccttttacaaatcacagtgtggacgggcctcagagaggcgcatcaccaaggttgtgggatattaaggttcagggcccaccaatgtttcaagaagacacacggaaattccaggttccacattcctcccttgtgaaggaatgccacaaatgtcatggcagggggcgttacaagtgctcaggctgtcacggcgcaggcactgtacgctgccctagctgctgcggtgccaaaaggaaggcgaagcagagtagaaggtgtcagctgtgcgcgggatccggacgcaggaggtgcagcacatgctctggtcgagggaataaaacttgtgctacatgcaaaggtgagaagaagctactgcactttatacagttggtcatcatgtggaagaattccctgtttgaattcgtgagcgagcataggctaaactgccctagggagttattggccaaggccaagggagaaaacctgtttaaagatgagaactcagtcgtttaccctattgtggactttccactacgggacatctctctggcatctcaacggggaattgcagagcactcagccgctctcgcatctcgggcaagggtgttgcaacagcggcagaccatcgaactcatcccactgacagaggtgcattactggtaccaaggcaaaacttacgtttattatatatacggcaccgaccaccaggtgtatgctgtggactatccagaaagatactgttgtggttgcactatagtttag

SEQ ID NO: 91354 - DNA, 1634 bp, Artificial Sequence
  derived and/or modified sequence
tgtagaacagctcacactggctggcactgctaagcaggtgcggaggggagtcagagacccccggatggaggggtgtggtggacctcagttttgaggccgagagtcctctggcgccccccacagagctcctggagagactgcccagctatgactggcttcttcaagggggcagaggacagatattcttcccacctttggaggccccagggaggccccaggagcaaaggtcctggccctcgttcctggaacacagagtccctgcgatgacggaggaggtggcccgggaagccctcctcagctttgtggactctaagtgctgctacagcagcacggtggctggagacctcgtcatccaggagctgaagcggcagaccctctgcaggtaccgtctggagacctttagtgaatccaggataagcgagtggacatttcaaccctttactaaccactctgtggatgggccgcaaagaggcgcctcccccaggctctgggacatcaaggttcaaggtcctccgatgtttcaggaagacaccaggaagttccaggtccctcactcgtcactggtcaaggaatgccacaaatgccatgggcgtgggcggtacaagtgcagcggctgccacggggcgggcacggtgcggtgcccatcctgctgcggagccaagcgcaaagccaagcagtcccggagatgtcagctgtgcgcggggtccggcaggcgaagatgcagcacttgctcagggagagggaacaagacctgcgccacctgcaagggggagaagaagctgttgcacttcatccagcttgtcatcatgtggaagaacagcttgtttgagtttgtgtctgagcaccggctcaactgccccagggagctccttgctaaagccaaaggagaaaacctctttaaggatgaaaactcggtggtgtaccccatcgtggacttccctctgcgagacatctctcttgcctcccagaggggcattgcagagcacagcgctgccttggcctcccgtgcccgcgtcctgcagcagcgccagaccattgagctgatccccctcacagaagttcactattggtaccaaggaaagacttatgtctactacatctatggcactgaccaccaggtgtatgcggtggactatcctgagcggtattgctgtggctgtaccatcgtgtgacatagcatggctgtccccagagcctgccattcacgtttgccaaggaagatggccgacactctctgagtgtgttcactgttggctgcattggacaatcacatacaaaccctggcatgtccttccagaaaaaccagcttatcatctatcaagctccaaccccttatacagctcctctggtggaatccatgactcatatgtttaacctacaataattcagctatacacattcctgtagaacaaatgagagaaataatttaaatggcaaggactttgcctctggtctccaagttaatgccccgatgatgcgtgtgatttgattttgctttttccctttgtcggtcttggttctggtgtgcttcttctagtgggagcctcttgacgatctgagtattactgaaatgttcaaggatacacacaaatatctggccctaatgcacaataaatactgcacttaggcataaa

SEQ ID NO: 91355 - protein, 624 aa, Artificial Sequence
  derived and/or modified sequence
MYQGHMQVVGVTLKKKWHCLQKSDLTLALGKGSRAADKAVAMVMKEIPREESAEEKPLLTMTSQLVNEQQESRPLLSPSIDDFLCETKSEAIARPVTSNTAVLTTGLDLLDLSEPVSQTQTKAKKSEPSSKTSSLKKKADGSDLISTDAEQRGQPLRVPETSSLDLDIQTQLEKWDDVKFHGDRNTKGHPMAERKSSSSRTGSKELLWSSEHRSQPELSGGKSALNSESASELELVAPTQARLTKEHRWGSALLSRNHSLEEEFERAKAAVESDTEFWDKMQAEWEEMARRNWISENQEAQNQVTISASEKGYYFHTENPFKDWPGAFEEGLKRLKEGDLPVTILFMEAAILQDPGDAEAWQFLGITQAENENEQAAIVALQRCLELQPNNLKALMALAVSYTNTGHQQDACDALKNWIKQNPKYKYLVKSKKGSPGLTRRMSKSPVDSSVLEGVKELYLEAAHQNGDMIDPDLQTGLGVLFHLSGEFNRAIDAFNAALTVRPEDYSLWNRLGATLANGDRSEEAVEAYTRALEIQPGFIRSRYNLGISCINLGAYREAVSNFLTALSLQRKSRNQQQVPHPAISGNIWAALRIALSLMDQPELFQAANLGDLDVLLRAFNLDP

SEQ ID NO: 91356 - protein, 624 aa, Artificial Sequence
  derived and/or modified sequence
MHQNGSQVVGVTLKKKWHCLQKSDLTLALGKGSRAADKAVAMVMKEIPREESAEEKPLLTMTSQLVNEQQESRPLLSPSIDDFLCETKSEAIARPVTSNTAVLTTGLDLLDLSEPVSQTQTKAKKSEPSSKTSSLKKKADGSDLISTDAEQRGQPLRVPETSSLDLDIQTQLEKWDDVKFHGDRNTKGHPMAERKSSSSRTGSKELLWSSEHRSQPELSGGKSALNSESASELELVAPTQARLTKEHRWGSALLSRNHSLEEEFERAKAAVESDTEFWDKMQAEWEEMARRNWISENQEAQNQVTISASEKGYYFHTENPFKDWPGAFEEGLKRLKEGDLPVTILFMEAAILQDPGDAEAWQFLGITQAENENEQAAIVALQRCLELQPNNLKALMALAVSYTNTGHQQDACDALKNWIKQNPKYKYLVKSKKGSPGLTRRMSKSPVDSSVLEGVKELYLEAAHQNGDMIDPDLQTGLGVLFHLSGEFNRAIDAFNAALTVRPEDYSLWNRLGATLANGDRSEEAVEAYTRALEIQPGFIRSRYNLGISCINLGAYREAVSNFLTALSLQRKSRNQQQVPHPAISGNIWAALRIALSLMDQPELFQAANLGDLDVLLRAFNLDP

SEQ ID NO: 91357 - DNA, 1875 bp, Artificial Sequence
  derived and/or modified sequence
atgtatcagggccacatgcaagtggtgggcgttacattaaaaaagaaatggcactgcctccagaaatctgatctcaccctggcattagggaaaggatcgcgcgcagcagacaaagccgtggccatggtcatgaaggaaatcccccgcgaggagagtgccgaggaaaaaccccttctcactatgacttcccaattagttaatgaacagcaggagagccgcccactgctcagtccttcgatagatgactttctgtgtgagaccaaatccgaagctattgccagacccgtcacttccaacacagcagtgttgactacaggacttgacctacttgacctgagtgagcctgtctcccagacccagaccaaggctaagaagtccgagccatcatctaaaacatcctctctcaaaaaaaaagcggacgggtcagatctcatcagcaccgacgccgaacagcgcggccagcccttacgagtccccgagactagctccctggatcttgacatacagactcagctcgaaaaatgggatgatgtcaaattccacggagatcgaaacactaaaggtcatccgatggccgagagaaagagttcatcctcacgtaccgggtctaaagaactgttgtggagttccgaacatcgatctcagcccgaactctctggagggaagtcggccctcaactcggaaagcgctagcgagttggaactggtggctcccacccaggcaaggctaacaaaagagcatcggtggggaagcgctttactatccaggaaccactcactcgaagaggagttcgagagggccaaggcagcagtagagtcagacacagagttctgggacaagatgcaggccgaatgggaggaaatggcccggcgaaattggatttctgagaaccaggaagcgcaaaaccaggtcaccatctctgcctcggagaaaggttactatttccacacggaaaatccgtttaaggactggccaggtgccttcgaggagggattgaagcggctcaaggagggagatctgcccgttactattctgttcatggaggctgcaatcctgcaggatcctggagatgccgaggcttggcaatttttgggaatcacacaggctgagaacgaaaatgaacaagcagccatagtcgcattgcagcggtgcctggagctgcagccaaataacttgaaagccctcatggcactggccgtcagctatacaaatacgggtcatcagcaggacgcatgtgatgcacttaagaattggatcaaacagaacccgaagtacaaatatctcgtgaagtcgaagaaagggagcccaggcctcactaggcgtatgtctaagtcccctgtagactcttcagtcttggagggggttaaagaactgtaccttgaagccgcacatcaaaacggcgacatgatcgaccccgacttgcagaccggactgggggtgctgttccacctgagcggcgagtttaatcgtgcaatcgatgcatttaatgccgcactgacagtgcggcccgaagactattctctgtggaaccggctaggagcaacccttgccaatggggaccgctctgaggaagcagtcgaggcctatacgcgcgcacttgaaattcagcctgggtttatccggtcacgctataacctgggcatttcttgcattaacctgggcgcttaccgcgaagcggtttctaactttctcacggccttgagcctccaacggaagagccgcaaccagcaacaggtgcctcaccccgcgatctccggtaatatatgggccgctttacgcatcgcgcttagcttgatggaccagccggagctcttccaggccgctaacctcggtgacctggacgtgctcctgcgagcctttaatctggacccgtag

SEQ ID NO: 91358 - DNA, 1875 bp, Artificial Sequence
  derived and/or modified sequence
atgcaccagaatggaagtcaggtcgtaggggtcacccttaaaaagaaatggcattgcttacagaaatcagatcttacactggcgcttggaaagggatcacgagccgccgataaggcagtggccatggtgatgaaggaaattccacgcgaagagtccgccgaggagaagcccttgctgaccatgaccagccagttggttaatgaacagcaggaatcacgacctcttctctccccatcaattgacgacttcctctgcgagacgaagtccgaagctatcgcaagacccgtgacatcaaatacggctgtgttgactacaggactggacctgctcgacttgtctgagccggtctcccagacgcagactaaagccaagaagtcagaaccttctagtaaaactagctctcttaaaaagaaggctgacggatctgacctaatctcgaccgacgccgaacagcggggccagccactgagggtgcctgaaacctcctccctggatcttgatatccagactcagcttgagaagtgggacgatgtgaaatttcacggcgatagaaacaccaaaggccaccctatggcggagaggaagtccagtagttcgcgcaccgggagtaaagaactcctttggagtagcgagcatcgatctcagcctgagctgtcaggcggaaagtccgccctcaactccgaaagtgcatctgaactggagctggtggcacccacacaggcacggctgacaaaggagcatcggtgggggtccgctcttctgtcccgcaatcacagcttggaggaggaattcgagcgcgccaaggccgcggttgagagtgacacagaattttgggataaaatgcaggccgaatgggaagaaatggcaaggaggaattggatcagcgaaaaccaggaggcccagaatcaggtaaccatatccgcttccgaaaaggggtactattttcatactgagaatcctttcaaagattggcccggcgcgtttgaggaggggctgaaacgtctcaaggagggcgatctgcccgtcaccatcctgtttatggaggccgcaattttacaggaccctggcgatgcggaagcatggcaatttcttgggataacacaggctgaaaacgaaaatgaacaggctgcgatcgtcgccctccagcgctgtctggaattacagcctaacaacttgaaggccctgatggccctggcagtatcgtacaccaacaccggccaccagcaggacgcgtgcgatgcactgaaaaactggatcaagcagaacccaaagtacaagtatttggtgaagtccaaaaagggttccccaggcctgaccagacgaatgtctaaatctccagtggactccagcgtcctcgagggcgtcaaggagctgtacctcgaagccgcccatcagaatggggacatgattgaccctgacctccagactggcctcggagtactttttcacctgagtggcgagttcaatcgcgccatcgatgcctttaacgcagccctgactgtcaggcccgaggactattctctctggaaccgtctaggagcaaccctagccaacggggaccggtccgaagaggctgtggaggcttatacccgcgcactggagatacagcccgggtttatcagatcccggtacaatttgggtattagttgtatcaatctgggcgcgtatcgggaggctgtatccaactttctgacagcactctctctccagcgcaagagtagaaatcagcagcaggtgccacatcctgctattagcgggaacatatgggctgctctcaggatagctcttagcttgatggatcaacctgaactgttccaggcggccaatcttggagacctcgatgtgttgctccgcgcctttaacctggatccgtag

SEQ ID NO: 91359 - DNA, 1752 bp, Artificial Sequence
  derived and/or modified sequence
atggtaatgaaggaaattccgagagaggaatcggctgaggaaaagcctttgctcacaatgacctcccagctggtgaatgagcaacaagagtcgagaccactgttgtccccaagtatcgatgactttctgtgtgagacaaaatccgaggccattgcccgacccgtgacatccaataccgctgtcctgacaaccggccttgacttactcgatttgtccgaaccagtaagtcaaacccagacaaaagctaaaaagagcgaacctagctcgaagacatctagccttaagaagaaagctgacggcagtgatctcatctcaactgatgcagagcagcgcgggcaacccttgagggtccccgagaccagttctctggatctggacatccagacccaacttgaaaaatgggacgacgtcaagtttcatggcgaccgcaatactaaggggcaccctatggctgaaagaaagagctccagctcgaggaccgggtctaaagagcttctgtggagttcagagcacaggtcccagcccgaactgagtggcgggaaatccgcactgaactccgaatcagccagcgaactcgaactggttgctcctacgcaggctaggttaacaaaagaacatcggtggggatccgccctactgagcagaaaccatagtctggaagaagaatttgaacgcgctaaagccgccgtggaaagtgatactgagttttgggacaagatgcaagcggagtgggaggaaatggcccgcaggaactggatttccgagaaccaggaagctcagaaccaggtgacaatttctgcctctgagaaaggctattactttcacacagagaacccctttaaagattggcccggcgccttcgaggagggtctgaagcgtctgaaggagggcgatctccctgttaccattcttttcatggaggccgccatcttacaggaccccggagacgcagaggcctggcagttcctgggtattacccaagcagagaacgagaacgagcaagctgcaatagtcgccttgcagagatgccttgagctccagcccaacaacctgaaagcccttatggctctggcagtgagctacacaaacaccggccaccagcaggacgcctgcgatgctttgaaaaattggattaagcagaaccctaagtataagtacttggtgaagtcgaagaagggaagtccaggactgacgcgtcgaatgtccaagtccccagttgattcatcagtgcttgagggtgtaaaagaattgtatcttgaagccgctcaccagaatggagatatgatcgaccctgatttgcagactgggctgggagtactcttccatctcagtggcgaattcaacagggcgatcgacgcctttaacgctgctctgaccgtgcggccagaagactatagcctgtggaatcggctcggagccaccctggccaacggtgaccgctcagaggaggcagtggaggcttatacacgtgccctggagattcagcccggttttatcagatccaggtacaatcttggcatctcctgtataaatctgggcgcgtatcgggaagctgtaagtaatttcctcaccgctctctctttgcagagaaagagccggaatcagcagcaggttcctcatccagccatcagcggaaatatatgggccgcgttgagaatcgcattatccttaatggaccagcccgagctattccaggccgcaaacctcggagacttggatgttctgctccgcgcctttaaccttgacccgtag

SEQ ID NO: 91360 - DNA, 1875 bp, Artificial Sequence
  derived and/or modified sequence
atgtaccagggccacatgcaggtggtgggcgtgaccctgaagaagaagtggcactgcctgcagaagagtgacctgaccctggccctgggcaagggcagcagagctgctgacaaggctgtggccatggtgatgaaggagatcccccgggaggagagcgctgaggagaagcccctgctgaccatgaccagccagctggtgaatgagcagcaggagagccggcccctgctgagccccagcattgatgacttcctgtgtgagaccaagtctgaggccatcgcccggcctgtgaccagcaacacagctgtgctgaccaccggcctggacctgctggacctgtctgagcctgtgtcccagacccagaccaaggccaagaagtctgagcccagcagcaagaccagcagcctgaagaagaaggcagatggcagtgacctgatcagcacagatgctgagcagaggggccagcccctgcgggtgcctgagaccagcagcctggacctggacatccagacccagctggagaagtgggatgatgtgaagttccatggagacaggaacaccaagggccaccccatggccgagaggaagagcagcagcagcaggacaggcagcaaggagctgctgtggagcagcgagcacaggagccagcctgagctgagcggcggcaagagcgccctgaacagcgagagcgccagcgagctggagctggtggcccccacccaggcccggctgaccaaggagcaccgctggggcagcgccctgctgagcaggaaccacagcctggaggaggagtttgagcgggccaaggctgctgtggagagtgacacagagttctgggacaagatgcaggccgagtgggaggagatggcccggaggaactggatcagcgagaaccaggaggcccagaaccaggtgaccatcagcgccagcgagaagggctactacttccacacagagaaccccttcaaggactggccaggggcctttgaggagggcctgaagaggctgaaggagggggacctgcctgtgaccatcctcttcatggaggccgccatcctgcaggaccctggagatgctgaggcctggcagttcctgggcatcacccaggccgagaatgaaaatgagcaggccgccatcgtggccctgcagcgctgcctggagctgcagcccaacaacctgaaggccctgatggccctggccgtgtcctacaccaacacaggccaccagcaggatgcctgtgatgccctgaagaactggatcaagcagaaccccaagtacaagtacctggtgaagagcaagaagggcagccctggcctgaccaggaggatgagcaagagccctgtggacagctctgtgctggagggcgtgaaggagctgtacctggaggccgcccaccagaatggagacatgattgatcctgacctgcagacaggcctgggcgtgctcttccacctgtctggagagttcaacagagccattgatgccttcaatgctgccctgactgtgcggcctgaggactacagcctgtggaaccggctgggcgccaccctggccaacggggacagaagtgaggaggccgtggaggcctacacccgggccctggagatccagcccggcttcatccgcagccgctacaacctgggcatcagctgcatcaacctgggcgcctaccgggaggccgtgagcaacttcctgacagccctgagcctgcagaggaagagcaggaaccagcagcaggtgccccacccagccatcagcggcaacatctgggccgccctgcgcatcgccctgagcctgatggaccagcctgagctgttccaggccgccaacctgggggacctggatgtgctgctgcgggccttcaacctggacccctag

SEQ ID NO: 91361 - DNA, 1875 bp, Artificial Sequence
  derived and/or modified sequence
atgcaccagaatggcagccaggtggtgggcgtgaccctgaagaagaagtggcactgcctgcagaagagtgacctgaccctggccctgggcaagggcagcagagctgctgacaaggctgtggccatggtgatgaaggagatcccccgggaggagagcgctgaggagaagcccctgctgaccatgaccagccagctggtgaatgagcagcaggagagccggcccctgctgagccccagcattgatgacttcctgtgtgagaccaagtctgaggccatcgcccggcctgtgaccagcaacacagctgtgctgaccaccggcctggacctgctggacctgtctgagcctgtgtcccagacccagaccaaggccaagaagtctgagcccagcagcaagaccagcagcctgaagaagaaggcagatggcagtgacctgatcagcacagatgctgagcagaggggccagcccctgcgggtgcctgagaccagcagcctggacctggacatccagacccagctggagaagtgggatgatgtgaagttccatggagacaggaacaccaagggccaccccatggccgagaggaagagcagcagcagcaggacaggcagcaaggagctgctgtggagcagcgagcacaggagccagcctgagctgagcggcggcaagagcgccctgaacagcgagagcgccagcgagctggagctggtggcccccacccaggcccggctgaccaaggagcaccgctggggcagcgccctgctgagcaggaaccacagcctggaggaggagtttgagcgggccaaggctgctgtggagagtgacacagagttctgggacaagatgcaggccgagtgggaggagatggcccggaggaactggatcagcgagaaccaggaggcccagaaccaggtgaccatcagcgccagcgagaagggctactacttccacacagagaaccccttcaaggactggccaggggcctttgaggagggcctgaagaggctgaaggagggggacctgcctgtgaccatcctcttcatggaggccgccatcctgcaggaccctggagatgctgaggcctggcagttcctgggcatcacccaggccgagaatgaaaatgagcaggccgccatcgtggccctgcagcgctgcctggagctgcagcccaacaacctgaaggccctgatggccctggccgtgtcctacaccaacacaggccaccagcaggatgcctgtgatgccctgaagaactggatcaagcagaaccccaagtacaagtacctggtgaagagcaagaagggcagccctggcctgaccaggaggatgagcaagagccctgtggacagctctgtgctggagggcgtgaaggagctgtacctggaggccgcccaccagaatggagacatgattgatcctgacctgcagacaggcctgggcgtgctcttccacctgtctggagagttcaacagagccattgatgccttcaatgctgccctgactgtgcggcctgaggactacagcctgtggaaccggctgggcgccaccctggccaacggggacagaagtgaggaggccgtggaggcctacacccgggccctggagatccagcccggcttcatccgcagccgctacaacctgggcatcagctgcatcaacctgggcgcctaccgggaggccgtgagcaacttcctgacagccctgagcctgcagaggaagagcaggaaccagcagcaggtgccccacccagccatcagcggcaacatctgggccgccctgcgcatcgccctgagcctgatggaccagcctgagctgttccaggccgccaacctgggggacctggatgtgctgctgcgggccttcaacctggacccctag

SEQ ID NO: 91362 - DNA, 1752 bp, Artificial Sequence
  derived and/or modified sequence
atggtgatgaaggagatcccccgggaggagagcgctgaggagaagcccctgctgaccatgaccagccagctggtgaatgagcagcaggagagccggcccctgctgagccccagcattgatgacttcctgtgtgagaccaagtctgaggccatcgcccggcctgtgaccagcaacacagctgtgctgaccaccggcctggacctgctggacctgtctgagcctgtgtcccagacccagaccaaggccaagaagtctgagcccagcagcaagaccagcagcctgaagaagaaggcagatggcagtgacctgatcagcacagatgctgagcagaggggccagcccctgcgggtgcctgagaccagcagcctggacctggacatccagacccagctggagaagtgggatgatgtgaagttccacggggacaggaacaccaagggccaccccatggccgagaggaagagcagcagcagcaggacaggcagcaaggagctgctgtggagcagcgagcacaggagccagcctgagctgagcggcggcaagagcgccctgaacagcgagagcgccagcgagctggagctggtggcccccacccaggcccggctgaccaaggagcaccgctggggcagcgccctgctgagcaggaaccacagcctggaggaggagtttgagcgggccaaggctgctgtggagagtgacacagagttctgggacaagatgcaggccgagtgggaggagatggcccggaggaactggatcagcgagaaccaggaggcccagaaccaggtgaccatcagcgccagcgagaagggctactacttccacacagagaaccccttcaaggactggccaggggcctttgaggagggcctgaagaggctgaaggagggggacctgcctgtgaccatcctcttcatggaggccgccatcctgcaggaccctggagatgctgaggcctggcagttcctgggcatcacccaggctgaaaatgaaaatgagcaggccgccatcgtggccctgcagcgctgcctggagctgcagcccaacaacctgaaggccctgatggccctggccgtgtcctacaccaacacaggccaccagcaggatgcctgtgatgccctgaagaactggatcaagcagaaccccaagtacaagtacctggtgaagagcaagaagggcagccctggcctgaccaggaggatgagcaagagccctgtggacagctctgtgctggagggcgtgaaggagctgtacctggaggccgcccaccagaatggagacatgattgatcctgacctgcagacaggcctgggcgtgctcttccacctgagcggggagttcaacagagccattgatgccttcaatgctgccctgactgtgcggcctgaggactacagcctgtggaaccggctgggcgccaccctggccaatggagacagaagtgaggaggccgtggaggcctacacccgggccctggagatccagcccggcttcatccgcagccgctacaacctgggcatcagctgcatcaacctgggcgcctaccgggaggccgtgagcaacttcctgacagccctgagcctgcagaggaagagcaggaaccagcagcaggtgccccacccagccatcagcggcaacatctgggccgccctgagaattgccctgagcctgatggaccagcctgagctgttccaggccgccaacctgggggacctggatgtgctgctgcgggccttcaacctggacccctag

SEQ ID NO: 91363 - DNA, 1875 bp, Artificial Sequence
  derived and/or modified sequence
atgtaccagggccacatgcaggtggtgggcgtgaccctgaagaagaaatggcattgtctgcagaaaagcgatctcacactggccctgggcaaaggctctagagcagctgacaaggccgtagcaatggtgatgaaggaaatcccaagagaggagtccgcagaggagaagccactccttacaatgactagtcaactcgtgaatgagcagcaagaatccaggcctctgctgtccccaagcatcgatgatttcctttgtgaaactaagagcgaagcaatcgctcggcccgttacatcaaacacggcagtattgactactggcctggacctcctggacctctccgaacctgtgagtcaaacccagactaaagccaaaaaatctgaaccatcctcaaagacctcttctcttaagaagaaagcagatggctcagatctgataagcaccgatgcagagcagcgtggtcagccacttcgcgtccctgagacctcatcactggacttagatatccagacccagctggaaaaatgggatgatgtgaagttccacggtgatcgcaacaccaaggggcaccctatggccgagagaaaaagttcctcaagccggacggggtcaaaggaactcctgtggagttctgagcaccgctcccagccagagctatcaggggggaaaagtgcccttaattcagagtctgcgtctgagctcgaactcgtcgcaccgactcaggcacggctaaccaaggagcatcggtggggcagtgcacttttgtctcgcaatcacagcctcgaggaagaatttgaaagagccaaggcagccgtggagtctgacacagaattttgggataagatgcaggcggagtgggaggagatggcaaggcgaaattggattagcgagaaccaggaagcgcagaaccaggtgacgataagcgcatcagagaagggatactatttccataccgagaatccctttaaggactggcctggcgcattcgaggagggacttaagcggttgaaagagggcgatctccctgtgaccattctgttcatggaagctgcaattttacaggaccccggtgacgctgaggcttggcaatttcttgggataacacaagctgagaatgagaatgagcaagccgcaatcgttgccctccagaggtgccttgagctccagccaaataacctcaaggcactaatggcccttgctgtcagttacaccaatacggggcaccaacaggatgcttgcgacgcgcttaagaactggattaagcagaatccaaagtacaaatatctagtaaaaagtaagaaaggctctcctgggctgaccaggagaatgtccaagagtcctgtagacagctccgtgctcgagggggttaaggagctgtacctggaagcggcacatcagaacggcgatatgattgacccagacctgcagactggccttggtgtgctcttccacttatctggagagtttaatcgggccatagatgcttttaatgccgctttgacagtgcgtccagaggattattccctgtggaatcggctcggtgcaactcttgctaatggcgacagaagcgaggaagccgtggaggcctacaccagggcactggaaatccagccgggttttatccgtagccggtataatctgggtatttcctgtatcaatctaggtgcctaccgagaagccgtgtctaactttctaactgcgctgagccttcagcggaaatccagaaaccaacagcaagttcctcatccagccatcagcgggaacatttgggccgcgcttcgcattgctctgtccctgatggatcaacccgagctattccaggcagctaacttaggggatttggacgttctgttgcgcgccttcaacttggatccttag

SEQ ID NO: 91364 - DNA, 1875 bp, Artificial Sequence
  derived and/or modified sequence
atgcaccagaacggcagccaggtggtgggcgtgaccctgaagaagaaatggcactgcctgcagaagtcggatctcaccctcgccctgggcaaaggctctcgtgccgctgataaggcagttgcaatggtgatgaaagaaattcccagagaagagagcgcagaagaaaagcccctcttaactatgacaagccagctggtaaacgaacagcaggaatctcggcctcttctgagcccatctatagacgatttcttgtgcgagacaaagtctgaagccatcgcaagacctgttactagcaatacagctgtcctgaccacaggccttgatttgctagacctttcggagcctgtctcccagacacaaaccaaagcaaagaagtccgagcctagtagcaagacttcctcactgaaaaagaaggctgacggctcagacctgatcagtaccgatgctgaacagcggggtcaacctctccgggtccccgaaacttcttcccttgacctcgacatacagactcaactcgaaaagtgggacgacgtcaagttccatggggacaggaatactaagggtcacccgatggctgaaagaaaatccagctccagccggaccggctcgaaagaactgctgtggtcatcggagcaccgctcccagcctgagttgagcgggggaaagagtgccctgaactctgagagtgccagtgagctggagcttgtcgccccaacacaagcgagactcacaaaagagcatcgctgggggtccgcgctcttaagtcgaaaccacagtctcgaagaggagtttgagagagccaaggcggcagttgaaagcgacaccgagttttgggacaaaatgcaggccgagtgggaggaaatggccaggcgcaactggatatcagaaaaccaggaggcacagaaccaggtcactatatcagcttccgagaagggttactatttccatacagagaaccccttcaaggattggcctggcgcatttgaggagggtctaaagcgcctgaaagaaggcgatctacccgtcaccatactatttatggaagccgccatcctccaggacccgggagacgctgaagcgtggcagtttctgggcataacccaggcagagaacgaaaatgaacaagcggccattgtggccttgcagcggtgtctggaactccagccaaacaacctcaaagccctgatggccctggctgtgtcctatacaaacactgggcaccagcaggatgcctgtgacgcactgaaaaattggatcaagcaaaatcctaagtataaatatctggtgaagagcaaaaaaggctcaccaggccttactcggaggatgagtaaatctccggtagattcttctgtgctagagggagtaaaggagctttatctggaggcagcccaccagaatggcgatatgatcgatccggacctccagacgggcttgggtgtgttgttccacctgagcggcgagtttaacagggccatagacgcatttaacgccgcactgaccgtacgacccgaagattactctttgtggaatcggctaggcgctacactcgcaaatggagatcgcagtgaggaagctgtggaggcctacacacgagcactggagattcagccaggattcatacggtcccggtacaaccttggtattagttgtatcaacttgggggcctacagggaagccgtgtccaatttcttaactgcactgtccctgcagaggaaaagccgaaatcaacaacaggtgcctcaccccgcaatctcaggaaacatttgggccgcactcagaatcgcactgtcgttgatggaccaacccgaactgtttcaggctgctaatctgggggacctggatgtactactcagagcttttaacttagatccttag

SEQ ID NO: 91365 - DNA, 1752 bp, Artificial Sequence
  derived and/or modified sequence
atggtgatgaaggagatcccccgggaggagagcgccgaggagaagcccctcctgactatgacatctcagctcgtgaacgaacaacaagaatcccgcccccttctcagccctagcatcgatgatttcctttgtgaaaccaagtccgaggctatagcccgccctgtgacctcaaacactgccgtgctgacaaccggcctcgatctcctggacctctcagaacccgtgagccaaactcagaccaaagctaaaaagtcggagccatcctcgaagacatcatctcttaaaaagaaggccgacggatccgacctgatttctacggacgcagaacagcgcggacagccattacgggtccccgaaacgagcagccttgatttagacatccagactcagcttgaaaaatgggatgatgtgaagttccatggagaccgaaatacgaaagggcatccgatggctgaaagaaaatcctctagttctcgaaccgggtcaaaggaattactttggtcgtcggagcacaggagccagccggagctgagtgggggcaaatcagccctgaattctgagtctgcctccgagctggaacttgtggccccaacacaggcccgcctcaccaaggagcatcggtggggatccgcccttcttagccgaaaccacagcctcgaggaggaatttgagagagcaaaggcagctgtcgaatcagacactgagttctgggacaaaatgcaggctgagtgggaggagatggcaagacgcaattggatctctgagaaccaggaagctcagaaccaagtgactattagcgccagcgaaaaggggtactactttcatacggaaaaccccttcaaagactggcccggggcgtttgaggaggggttgaagaggctgaaggagggtgatctgcctgtcacgattctttttatggaggcggcaattctccaggaccctggggacgccgaggcttggcagttcctgggtatcacgcaggctgagaatgaaaatgagcaggccgcaatcgtagctctgcaacgttgtcttgagctccaacccaacaacctgaaggcccttatggccctggctgtttcttatacaaacaccggccaccagcaagacgcctgcgatgccctgaagaattggatcaaacagaatcctaaatataaatacctagtgaagtccaagaaaggaagtcctggactcaccagacgaatgtctaagtcacccgtggactcatctgtactggaaggagtaaaggagctctaccttgaggctgctcatcagaacggggatatgattgacccagacctgcaaactggcctgggcgtcctgttccacctctctggcgagttcaacagggctatcgatgcctttaacgctgcccttacggtgagacccgaggattattctctatggaacaggctcggagctacactagccaatggtgacaggagcgaggaggcagtcgaggcatacacacgcgccctggaaatacaacctggattcattcgctctagatacaatttgggaatatcctgtatcaatctgggcgcttacagggaagccgtttctaattttcttactgcgctctctctgcaacgcaagagtagaaatcagcagcaagtaccacatcccgctatctccggaaacatatgggcggccctgagaatcgctctgagcctgatggaccagccagaactgttccaggctgcaaatctgggtgacctcgatgtgctgctgagggcctttaacctcgacccatag

SEQ ID NO: 91366 - DNA, 2818 bp, Artificial Sequence
  derived and/or modified sequence
cagcgctgccgagtggccgccggccggccgagtacccggagctccagggggctcaggagcaccctctgagaacccgctgtgcacccaccttttcccctcttttggtgggcaagtaagcacgggggaaaagcatccggtggcctcagggagccctgaagaaaccgaagcagaatgtaccagggacacatgcaggtagtaggtgtaaccttgaagaaaaagtggcactgtcttcaaaaaagtgacctgaccctggctttgggaaaaggctctagggcggcagataaggctgttgccatggtgatgaaggagataccgagggaggagtctgctgaagaaaagcccctccttactatgacatcacagctggtgaatgagcaacaagaaagcagacccctcctgagtccctccatcgatgactttctctgtgaaaccaaatcggaagcaatagcaaggccagtaacatccaatacagctgtattgaccactggcttagatctcctcgacctgagtgaaccagtctctcaaacccaaaccaaagccaagaagtcagagccctcatcaaaaacctcatccctcaagaaaaaggccgatggatctgacctcatcagcacggatgctgagcagagaggccagcctctcagagtcccggagacttcatccttagatctagacattcaaacacaactggaaaaatgggacgatgttaagtttcatggagatcgaaataccaagggacatccaatggcagagagaaaatcatcctcatctagaactggatcaaaagagctcttatggtcctcagaacacagatctcaaccagaactgagtggtggaaaaagcgccctcaactctgagtcggcttcagaattggaattagtggctccgactcaggctcgactgaccaaagaacatcgctggggaagcgcattactttctagaaaccactccttagaagaagagtttgaaagggcaaaagcagcagtggagtcagatacagagttttgggataagatgcaagcagaatgggaagaaatggctcggaggaactggatatctgagaaccaagaagcccagaaccaagtaaccatctcggctagtgagaagggatattactttcacactgaaaaccccttcaaggactggcctggagcatttgaagaaggcttaaaaaggctgaaggaaggggatctgccagtcaccatcctgttcatggaagcagcaattcttcaggaccctggagatgcagaggcatggcagttcctcgggataacccaggcggagaatgaaaatgaacaagcagctattgtcgccctccagaggtgcttagaattacagcccaacaacttaaaagctttgatggccttggctgtgagttatactaacactggccatcagcaggatgcctgtgacgctctgaagaattggattaagcaaaatccaaagtacaaataccttgtgaaaagcaagaagggatctccaggcctcacccggcggatgtctaagtccccagttgatagctctgttctggaaggggtgaaggaattatatctggaagctgcccaccaaaatggagatatgatcgacccagacctgcagacaggtctaggggttctgttccacctgagtggagaatttaatagagcaatagatgcatttaacgctgccttaactgttcggccagaggactattcactatggaaccgcctcggggcgaccttggcgaacggagaccgcagcgaggaagccgtggaggcctatacgcgagcactggagattcagccaggattcatccggtccagatacaacctaggaataagctgcatcaacctgggcgcctacagagaagcggtcagcaattttctcactgccctcagtttgcaaagaaagagcaggaatcagcagcaagttcctcatcctgcaatctctgggaatatctgggctgccctcagaattgcgctctctctgatggaccaaccagaactcttccaggcggctaatcttggtgacctggatgtcctcttaagagctttcaacttggatccttgaagaaagaataataccagtactaataatccctgatctgtgtgattgtactgaaaaatcaaaaactattttattatgaatttcaaaaggataaatcaaatattcaaaaggccatggtcatatagcccaaggaaattaattcctgtggacaatgcccagtctctgttcagatccaaaagcacaaaatgttgtatatagagtcaaagtcaggctcaaaagaagaattaagagactcaagacaaaccaagataaagtaactgtgtgttgaatactctttccacaagttgcaagcatattgcaacacatgttctttgggttttttgtctccccttgcagctgatgacacatctgaggaacttgttcatgggaaacatggaaaaagcactgcctcagattgggaaattctgactgtttctgaactgtcttcttttgcaagactgaacatagtttgggccattggtgcatgcacatatattaacttgtgactaaagacagacattgcttaaacctgttccaattttaacttttactgtagccctttgattccagagagggagctttgctggcaaaagcagtttttgcactagaaatttttgctgttcccaatctaaacttttctggtattgtatatatgcactttaatatcttatttatgccttgctggagttttgttttgttgctccaatttttaacttgggggtgaaagatttaagaactcagcctcactagatcaacggaccaaataaacaattcctgaagacagtttttcatagtg

SEQ ID NO: 91367 - DNA, 2637 bp, Artificial Sequence
  derived and/or modified sequence
atgcaccaaaacggatctcaagtagtaggtgtaaccttgaagaaaaagtggcactgtcttcaaaaaagtgacctgaccctggctttgggaaaaggctctagggcggcagataaggctgttgccatggtgatgaaggagataccgagggaggagtctgctgaagaaaagcccctccttactatgacatcacagctggtgaatgagcaacaagaaagcagacccctcctgagtccctccatcgatgactttctctgtgaaaccaaatcggaagcaatagcaaggccagtaacatccaatacagctgtattgaccactggcttagatctcctcgacctgagtgaaccagtctctcaaacccaaaccaaagccaagaagtcagagccctcatcaaaaacctcatccctcaagaaaaaggccgatggatctgacctcatcagcacggatgctgagcagagaggccagcctctcagagtcccggagacttcatccttagatctagacattcaaacacaactggaaaaatgggacgatgttaagtttcatggagatcgaaataccaagggacatccaatggcagagagaaaatcatcctcatctagaactggatcaaaagagctcttatggtcctcagaacacagatctcaaccagaactgagtggtggaaaaagcgccctcaactctgagtcggcttcagaattggaattagtggctccgactcaggctcgactgaccaaagaacatcgctggggaagcgcattactttctagaaaccactccttagaagaagagtttgaaagggcaaaagcagcagtggagtcagatacagagttttgggataagatgcaagcagaatgggaagaaatggctcggaggaactggatatctgagaaccaagaagcccagaaccaagtaaccatctcggctagtgagaagggatattactttcacactgaaaaccccttcaaggactggcctggagcatttgaagaaggcttaaaaaggctgaaggaaggggatctgccagtcaccatcctgttcatggaagcagcaattcttcaggaccctggagatgcagaggcatggcagttcctcgggataacccaggcggagaatgaaaatgaacaagcagctattgtcgccctccagaggtgcttagaattacagcccaacaacttaaaagctttgatggccttggctgtgagttatactaacactggccatcagcaggatgcctgtgacgctctgaagaattggattaagcaaaatccaaagtacaaataccttgtgaaaagcaagaagggatctccaggcctcacccggcggatgtctaagtccccagttgatagctctgttctggaaggggtgaaggaattatatctggaagctgcccaccaaaatggagatatgatcgacccagacctgcagacaggtctaggggttctgttccacctgagtggagaatttaatagagcaatagatgcatttaacgctgccttaactgttcggccagaggactattcactatggaaccgcctcggggcgaccttggcgaacggagaccgcagcgaggaagccgtggaggcctatacgcgagcactggagattcagccaggattcatccggtccagatacaacctaggaataagctgcatcaacctgggcgcctacagagaagcggtcagcaattttctcactgccctcagtttgcaaagaaagagcaggaatcagcagcaagttcctcatcctgcaatctctgggaatatctgggctgccctcagaattgcgctctctctgatggaccaaccagaactcttccaggcggctaatcttggtgacctggatgtcctcttaagagctttcaacttggatccttgaagaaagaataataccagtactaataatccctgatctgtgtgattgtactgaaaaatcaaaaactattttattatgaatttcaaaaggataaatcaaatattcaaaaggccatggtcatatagcccaaggaaattaattcctgtggacaatgcccagtctctgttcagatccaaaagcacaaaatgttgtatatagagtcaaagtcaggctcaaaagaagaattaagagactcaagacaaaccaagataaagtaactgtgtgttgaatactctttccacaagttgcaagcatattgcaacacatgttctttgggttttttgtctccccttgcagctgatgacacatctgaggaacttgttcatgggaaacatggaaaaagcactgcctcagattgggaaattctgactgtttctgaactgtcttcttttgcaagactgaacatagtttgggccattggtgcatgcacatatattaacttgtgactaaagacagacattgcttaaacctgttccaattttaacttttactgtagccctttgattccagagagggagctttgctggcaaaagcagtttttgcactagaaatttttgctgttcccaatctaaacttttctggtattgtatatatgcactttaatatcttatttatgccttgctggagttttgttttgttgctccaatttttaacttgggggtgaaagatttaagaactcagcctcactagatcaacggaccaaataaacaattcctgaagacagtt

SEQ ID NO: 91368 - DNA, 1875 bp, Artificial Sequence
  derived and/or modified sequence
atgtaccagggccatatgcaagttgttggggttacattgaagaagaagtggcattgtttgcagaagtccgatctgactctcgctctgggaaagggatcccgggcagcagacaaagccgtggctatggtgatgaaagagatccccagggaagagtcggcggaggagaaacccttgctgacaatgacaagtcagcttgtgaacgaacagcaggagtccaggcccctactgtcccctagcatagacgacttcttgtgtgagacaaaatccgaagccatcgcccgtcccgtcacaagcaatactgcagtgctgaccaccgggttggacttgttagatctgagtgagcccgtgagccagactcagacaaaggcgaagaagtctgaaccaagctcaaaaactagctccttgaagaaaaaagcagatggatccgatctgatctctactgatgccgagcagagggggcaacccctgcgggttcctgaaacctccagcctagatctcgacatccaaacacagctggagaaatgggacgatgtaaaatttcacggggaccgcaacactaaaggtcaccctatggccgaaaggaagagttcatcttctcgtactggctcaaaagaactcctctggagcagtgagcatcgctcccagccagagctatctgggggtaaaagcgccctgaactcagagagcgctagcgaactggaactcgtggcacctacccaggccaggcttacaaaggagcatagatggggctctgccctgctttctaggaaccactccctggaggaagagttcgagcgtgccaaagccgctgtcgaatccgatacagaattttgggacaagatgcaggctgaatgggaggaaatggcaagacggaattggatatcggaaaatcaggaagcacaaaatcaagtgaccatctcagcgtcggaaaagggttattatttccacaccgaaaatccttttaaagactggcccggagcattcgaagagggactcaagagactgaaggagggcgatctgccggtcactattctgtttatggaagcagccattttgcaggacccgggtgacgcggaggcatggcagtttctgggcatcacccaggcagagaatgagaacgaacaggcggctatcgttgccctccagcgatgccttgagttacaacctaataatcttaaagccctgatggccttagccgtgtcatacactaatacaggccaccagcaggacgcctgcgacgccctgaaaaactggatcaaacaaaaccccaagtacaagtatctcgtgaaatccaaaaaaggaagccctggcctcactcggcgtatgtccaagtctcccgttgattccagcgttttagagggagtgaaggaattatatctggaggctgctcatcagaacggagacatgatagaccccgaccttcaaactggcttgggggtgctgttccacctgtccggtgagttcaacagggcgatagacgcattcaatgctgccctgaccgtgcggcctgaggactactcgctgtggaaccggctcggagcaacacttgccaacggcgataggagtgaagaggcagtcgaagcttatactcgtgccctggagatacagcctggctttatcaggagccgctacaatctaggcatctcctgtattaacctaggcgcatacagggaggctgttagcaattttctcacagccctctccctgcagcggaagagtagaaatcagcagcaagtcccccacccagctatcagcggaaatatttgggctgctcttcggatcgctctgtctctgatggatcaaccagaactgtttcaagccgctaacctaggcgacctcgacgtactgctcagagccttcaatttagatccctag

SEQ ID NO: 91369 - DNA, 1875 bp, Artificial Sequence
  derived and/or modified sequence
atgcaccagaacgggtcgcaagtcgttggcgtcactctgaagaagaagtggcattgcctgcagaaaagcgacctgacacttgctctgggcaagggttctcgggctgcagataaagccgttgccatggtgatgaaagaaatccctcgcgaagagtccgcagaagagaagccactgctcacaatgacatcgcagttggtgaatgaacagcaggagagcaggcctctgctgtccccatccattgatgattttctgtgcgaaacgaaaagcgaagccattgcacggccagtgacctccaatacagccgtcctgacgactggcctagaccttcttgatctgtcagaacctgtgagccagacacaaacaaaggccaaaaagtctgagcccagctctaagacatcatcactgaaaaagaaagccgatggatccgatttaataagtaccgacgccgaacagagaggccaacccttaagggtcccagagacatcatctctggacctcgatattcagacccagcttgaaaagtgggacgatgttaaattccatggggaccggaatactaaaggacaccctatggccgaaagaaagagtagttccagcagaacaggcagcaaggaactgctgtggtccagcgaacatagatctcaacccgaactcagcggcggaaagagtgctctgaatagtgagtctgcttccgagctggagctggtggcacccactcaggctcgcctgactaaagaacataggtgggggtccgcattgctatcaagaaaccacagtctggaagaggaattcgaacgagccaaagcagccgtggagtccgacaccgagttctgggacaagatgcaggcagagtgggaggaaatggccagacgtaattggatcagtgagaaccaagaggctcagaatcaggtgaccattagtgccagcgagaaagggtattacttccatactgaaaacccatttaaggattggcctggcgcattcgaggagggactaaaaaggctgaaggagggagacctgcccgttactattctgtttatggaagcggctattctgcaagaccctggcgatgccgaggcttggcagttcctcggcattacccaggccgagaacgaaaatgagcaggctgcaatcgtggcactccaacggtgcctggaattacaaccaaacaacctgaaggcactgatggccctggccgtatcctatacaaataccggacaccagcaggatgcatgtgacgctttgaagaattggatcaaacagaatccaaaatataagtatcttgtaaaaagtaagaaggggagccctggcctgacacgaagaatgtctaagtctcctgtggactcctcagtgctagaaggtgtaaaagaactgtatctggaggctgcccatcagaacggtgacatgatcgatcccgacctgcagacaggtctgggagtcctcttccatctgtctggggagtttaaccgggcaatcgacgcttttaacgccgcattgacggtgaggcccgaggattactccctgtggaataggctgggcgcaaccctggcaaatggcgacagaagtgaggaagctgtagaggcttacacgcgagctctcgaaatccaacccggtttcatcagatccaggtataacctgggtatcagctgtatcaatcttggcgcatatcgcgaggccgttagcaactttcttactgccttgagcctgcaacgaaaatctcgaaaccagcagcaggtcccgcatcccgcaatatcaggcaatatctgggctgctcttagaattgctctgtctctgatggatcagcccgagttgttccaggccgctaatctgggtgatctggacgtgctgctgcgcgctttcaaccttgacccgtag

SEQ ID NO: 91370 - DNA, 1752 bp, Artificial Sequence
  derived and/or modified sequence
atggttatgaaagagatcccacgggaagaaagcgcagaggagaagccgctcctgacaatgacatcacaactggtcaatgagcagcaggaaagccggccactcctgtctccctccattgacgacttcttatgtgagactaaatcagaggcaatcgcaaggcctgtaacttccaataccgcagtgctgacaaccggattagatctgctggatttgagtgaacctgtgtctcagacccagactaaggctaaaaaatccgaaccttctagcaaaacatctagcctgaagaaaaaagctgatggcagtgatcttatttctactgacgccgaacaacgcggacagcccctcagagttcctgaaacatcctccctagaccttgatatacagactcaattggagaaatgggatgacgtgaaatttcatggcgaccgaaacacaaaaggtcaccctatggctgaacgaaagagctcctcatcaagaacaggaagcaaagaactgttgtggagctctgaacacaggtctcaacctgagctgtcaggtgggaaatcagccctcaacagtgaaagcgcctcagagctggagctggtcgcccctacccaggctaggctgaccaaggaacaccgatgggggagtgcactgctctcccgtaatcattcgcttgaagaagagttcgaacgagctaaagccgcagttgagtcagacaccgagttttgggacaaaatgcaggccgagtgggaggaaatggctagaaggaattggatttctgaaaaccaagaggcccagaaccaagtcacaatctctgcctcggaaaagggctattatttccatacggagaatcctttcaaggactggccaggggcttttgaagaagggctgaaacgcctcaaggaaggtgatctgcccgtaacaatactgttcatggaagcggctatcctccaggacccaggcgacgcggaagcttggcagtttctgggaataacacaggcagagaacgaaaatgagcaggccgctatcgtggctctgcagcgctgtttagaactgcaacccaacaacttaaaggctctgatggcactggccgtttcctacactaacaccggccaccagcaggatgcttgtgacgcactaaagaattggatcaaacaaaatcccaagtacaagtacctggtcaaatccaagaaagggtcgccaggactgacgagacggatgtccaagagtcccgtggactcatcagtcttggagggcgtcaaggagttgtatctggaagctgcacatcagaatggggatatgatcgatccagacctgcaaaccggcctcggagttctatttcatctgtccggcgagtttaaccgggctattgacgcctttaatgctgcactgacagttagaccagaggattatagtctgtggaacagattgggggcaactctggcaaacggagaccggtcggaggaggccgtggaggcctacacacgggctctggagattcaacctggctttattagaagtcgatataatctgggtatttcttgcattaatctgggcgcataccgagaagccgtttctaattttctgaccgctctgtcattacaaagaaaatcgaggaatcagcagcaagtaccccaccccgcaatcagtggcaacatctgggctgcacttagaatcgctctctccctgatggaccaacctgaactgttccaggcagccaatctcggcgacctggacgtgcttctccgtgcgttcaatctggacccatag

SEQ ID NO: 91371 - DNA, 1875 bp, Artificial Sequence
  derived and/or modified sequence
atgtaccagggccacatgcaggtggtgggcgtgaccctgaagaagaagtggcactgcctgcagaagagcgacctgaccctggccctgggcaagggcagcagagccgccgacaaggccgtggccatggtgatgaaggagatccccagagaggagagcgccgaggagaagcccctgctgaccatgaccagccagctggtgaacgagcagcaggagagcagacccctgctgagccccagcatcgacgacttcctgtgcgagaccaagagcgaggccatcgccagacccgtgaccagcaacaccgccgtgctgaccaccggcctggacctgctggacctgagcgagcccgtgagccagacccagaccaaggccaagaagagcgagcccagcagcaagaccagcagcctgaagaagaaggccgacggcagcgacctgatcagcaccgacgccgagcagagaggccagcccctgagagtgcccgagaccagcagcctggacctggacatccagacccagctggagaagtgggacgacgtgaagttccacggcgacagaaacaccaagggccaccccatggccgagagaaagagcagcagcagcagaaccggcagcaaggagctgctgtggagcagcgagcacagaagccagcccgagctgagcggcggcaagagcgccctgaacagcgagagcgccagcgagctggagctggtggcccccacccaggccagactgaccaaggagcacagatggggcagcgccctgctgagcagaaaccacagcctggaggaggagttcgagagagccaaggccgccgtggagagcgacaccgagttctgggacaagatgcaggccgagtgggaggagatggccagaagaaactggatcagcgagaaccaggaggcccagaaccaggtgaccatcagcgccagcgagaagggctactacttccacaccgagaaccccttcaaggactggcccggcgccttcgaggagggcctgaagagactgaaggagggcgacctgcccgtgaccatcctgttcatggaggccgccatcctgcaggaccccggcgacgccgaggcctggcagttcctgggcatcacccaggccgagaacgagaacgagcaggccgccatcgtggccctgcagagatgcctggagctgcagcccaacaacctgaaggccctgatggccctggccgtgagctacaccaacaccggccaccagcaggacgcctgcgacgccctgaagaactggatcaagcagaaccccaagtacaagtacctggtgaagagcaagaagggcagccccggcctgaccagaagaatgagcaagagccccgtggacagcagcgtgctggagggcgtgaaggagctgtacctggaggccgcccaccagaacggcgacatgatcgaccccgacctgcagaccggcctgggcgtgctgttccacctgagcggcgagttcaacagagccatcgacgccttcaacgccgccctgaccgtgagacccgaggactacagcctgtggaacagactgggcgccaccctggccaacggcgacagaagcgaggaggccgtggaggcctacaccagagccctggagatccagcccggcttcatcagaagcagatacaacctgggcatcagctgcatcaacctgggcgcctacagagaggccgtgagcaacttcctgaccgccctgagcctgcagagaaagagcagaaaccagcagcaggtgccccaccccgccatcagcggcaacatctgggccgccctgagaatcgccctgagcctgatggaccagcccgagctgttccaggccgccaacctgggcgacctggacgtgctgctgagagccttcaacctggacccctag

SEQ ID NO: 91372 - DNA, 1875 bp, Artificial Sequence
  derived and/or modified sequence
atgcaccagaacggcagccaggtggtgggcgtgaccctgaagaagaagtggcactgcctgcagaagagcgacctgaccctggccctgggcaagggcagcagagccgccgacaaggccgtggccatggtgatgaaggagatccccagagaggagagcgccgaggagaagcccctgctgaccatgaccagccagctggtgaacgagcagcaggagagcagacccctgctgagccccagcatcgacgacttcctgtgcgagaccaagagcgaggccatcgccagacccgtgaccagcaacaccgccgtgctgaccaccggcctggacctgctggacctgagcgagcccgtgagccagacccagaccaaggccaagaagagcgagcccagcagcaagaccagcagcctgaagaagaaggccgacggcagcgacctgatcagcaccgacgccgagcagagaggccagcccctgagagtgcccgagaccagcagcctggacctggacatccagacccagctggagaagtgggacgacgtgaagttccacggcgacagaaacaccaagggccaccccatggccgagagaaagagcagcagcagcagaaccggcagcaaggagctgctgtggagcagcgagcacagaagccagcccgagctgagcggcggcaagagcgccctgaacagcgagagcgccagcgagctggagctggtggcccccacccaggccagactgaccaaggagcacagatggggcagcgccctgctgagcagaaaccacagcctggaggaggagttcgagagagccaaggccgccgtggagagcgacaccgagttctgggacaagatgcaggccgagtgggaggagatggccagaagaaactggatcagcgagaaccaggaggcccagaaccaggtgaccatcagcgccagcgagaagggctactacttccacaccgagaaccccttcaaggactggcccggcgccttcgaggagggcctgaagagactgaaggagggcgacctgcccgtgaccatcctgttcatggaggccgccatcctgcaggaccccggcgacgccgaggcctggcagttcctgggcatcacccaggccgagaacgagaacgagcaggccgccatcgtggccctgcagagatgcctggagctgcagcccaacaacctgaaggccctgatggccctggccgtgagctacaccaacaccggccaccagcaggacgcctgcgacgccctgaagaactggatcaagcagaaccccaagtacaagtacctggtgaagagcaagaagggcagccccggcctgaccagaagaatgagcaagagccccgtggacagcagcgtgctggagggcgtgaaggagctgtacctggaggccgcccaccagaacggcgacatgatcgaccccgacctgcagaccggcctgggcgtgctgttccacctgagcggcgagttcaacagagccatcgacgccttcaacgccgccctgaccgtgagacccgaggactacagcctgtggaacagactgggcgccaccctggccaacggcgacagaagcgaggaggccgtggaggcctacaccagagccctggagatccagcccggcttcatcagaagcagatacaacctgggcatcagctgcatcaacctgggcgcctacagagaggccgtgagcaacttcctgaccgccctgagcctgcagagaaagagcagaaaccagcagcaggtgccccaccccgccatcagcggcaacatctgggccgccctgagaatcgccctgagcctgatggaccagcccgagctgttccaggccgccaacctgggcgacctggacgtgctgctgagagccttcaacctggacccctag

SEQ ID NO: 91373 - DNA, 1752 bp, Artificial Sequence
  derived and/or modified sequence
atggtgatgaaggagatccccagagaggagagcgccgaggagaagcccctgctgaccatgaccagccagctggtgaacgagcagcaggagagcagacccctgctgagccccagcatcgacgacttcctgtgcgagaccaagagcgaggccatcgccagacccgtgaccagcaacaccgccgtgctgaccaccggcctggacctgctggacctgagcgagcccgtgagccagacccagaccaaggccaagaagagcgagcccagcagcaagaccagcagcctgaagaagaaggccgacggcagcgacctgatcagcaccgacgccgagcagagaggccagcccctgagagtgcccgagaccagcagcctggacctggacatccagacccagctggagaagtgggacgacgtgaagttccacggcgacagaaacaccaagggccaccccatggccgagagaaagagcagcagcagcagaaccggcagcaaggagctgctgtggagcagcgagcacagaagccagcccgagctgagcggcggcaagagcgccctgaacagcgagagcgccagcgagctggagctggtggcccccacccaggccagactgaccaaggagcacagatggggcagcgccctgctgagcagaaaccacagcctggaggaggagttcgagagagccaaggccgccgtggagagcgacaccgagttctgggacaagatgcaggccgagtgggaggagatggccagaagaaactggatcagcgagaaccaggaggcccagaaccaggtgaccatcagcgccagcgagaagggctactacttccacaccgagaaccccttcaaggactggcccggcgccttcgaggagggcctgaagagactgaaggagggcgacctgcccgtgaccatcctgttcatggaggccgccatcctgcaggaccccggcgacgccgaggcctggcagttcctgggcatcacccaggccgagaacgagaacgagcaggccgccatcgtggccctgcagagatgcctggagctgcagcccaacaacctgaaggccctgatggccctggccgtgagctacaccaacaccggccaccagcaggacgcctgcgacgccctgaagaactggatcaagcagaaccccaagtacaagtacctggtgaagagcaagaagggcagccccggcctgaccagaagaatgagcaagagccccgtggacagcagcgtgctggagggcgtgaaggagctgtacctggaggccgcccaccagaacggcgacatgatcgaccccgacctgcagaccggcctgggcgtgctgttccacctgagcggcgagttcaacagagccatcgacgccttcaacgccgccctgaccgtgagacccgaggactacagcctgtggaacagactgggcgccaccctggccaacggcgacagaagcgaggaggccgtggaggcctacaccagagccctggagatccagcccggcttcatcagaagcagatacaacctgggcatcagctgcatcaacctgggcgcctacagagaggccgtgagcaacttcctgaccgccctgagcctgcagagaaagagcagaaaccagcagcaggtgccccaccccgccatcagcggcaacatctgggccgccctgagaatcgccctgagcctgatggaccagcccgagctgttccaggccgccaacctgggcgacctggacgtgctgctgagagccttcaacctggacccctag

SEQ ID NO: 91374 - protein, 602 aa, Artificial Sequence
  derived and/or modified sequence
MYQGHMQGKGSRAADKAVAMVMKEIPREESAEEKPLLTMTSQLVNEQQESRPLLSPSIDDFLCETKSEAIARPVTSNTAVLTTGLDLLDLSEPVSQTQTKAKKSEPSSKTSSLKKKADGSDLISTDAEQRGQPLRVPETSSLDLDIQTQLEKWDDVKFHGDRNTKGHPMAERKSSSSRTGSKELLWSSEHRSQPELSGGKSALNSESASELELVAPTQARLTKEHRWGSALLSRNHSLEEEFERAKAAVESDTEFWDKMQAEWEEMARRNWISENQEAQNQVTISASEKGYYFHTENPFKDWPGAFEEGLKRLKEGDLPVTILFMEAAILQDPGDAEAWQFLGITQAENENEQAAIVALQRCLELQPNNLKALMALAVSYTNTGHQQDACDALKNWIKQNPKYKYLVKSKKGSPGLTRRMSKSPVDSSVLEGVKELYLEAAHQNGDMIDPDLQTGLGVLFHLSGEFNRAIDAFNAALTVRPEDYSLWNRLGATLANGDRSEEAVEAYTRALEIQPGFIRSRYNLGISCINLGAYREAVSNFLTALSLQRKSRNQQQVPHPAISGNIWAALRIALSLMDQPELFQAANLGDLDVLLRAFNLDP

SEQ ID NO: 91375 - DNA, 1809 bp, Artificial Sequence
  derived and/or modified sequence
atgtaccagggtcacatgcagggaaaaggttctcgggctgctgataaggcagtcgccatggtgatgaaagagatccctcgtgaagagtccgccgaagagaaacccctccttaccatgacatcccagctggttaacgagcagcaggagtccagacctctcctttctcccagtatagacgattttctttgcgagaccaagagcgaagccatcgcccgaccagtgacatcaaatactgctgtgttgacgaccggactagacctcctggacctgtcggaacccgtgtcccagacccagacaaaagcaaagaagtcagaaccaagttctaagacaagcagtctcaagaagaaggctgacggatccgatctcataagcacggacgccgagcagcgagggcaaccactacgagtgcccgagacttcttccctcgacttagacatccagacacaactggagaagtgggacgacgtgaagttccacggcgataggaatacaaaaggccaccccatggctgaaaggaaatccagtagttcacgcacgggaagtaaggagctcctgtggtcaagcgagcatcgcagtcagcctgagctgtcgggcgggaagtctgcacttaactccgagtcagcatctgaactcgagttggtcgcgccgacccaggccagactgactaaagagcacagatggggctccgcccttttaagccgcaatcattccctggaggaagagttcgaacgtgcaaaggctgccgtcgagagcgatactgaattctgggataaaatgcaggcagagtgggaggaaatggcccggcggaattggatatctgagaatcaagaagctcagaaccaagttacaatctccgcctcggaaaaaggatattactttcacacagagaatccctttaaggactggcccggagcgttcgaagagggactgaaacggctgaaagagggtgatctgcccgtgacgattttatttatggaggctgcgattctccaggaccccggcgacgccgaggcatggcagtttctggggattacgcaggccgagaacgaaaacgaacaagctgccattgtcgcactccagaggtgtctcgagttacagccaaataacctgaaagcgcttatggcgctggccgtgtcctacacaaatactgggcaccagcaagacgcatgcgacgcccttaagaattggataaagcagaacccaaagtacaaatacctggtgaagtccaaaaaagggtcaccggggctcactcgccggatgagcaagtctcccgtggatagctcagtgcttgagggcgtgaaagaactatatttggaggccgcgcatcagaatggtgacatgatcgatcccgacttacagaccggccttggagttctgtttcatctgagtggcgaattcaaccgagcaatagacgcgttcaatgcagccctgacggttcgaccagaggactactccctctggaatcggctgggcgccacgctggccaatggagaccggtctgaggaagccgtggaggcctatacgcgcgctctcgagatccaaccaggttttattcgctcacgctacaaccttggtatttcatgcatcaacttgggggcatacagagaggcagtcagtaactttctcacagccttgtctttacagaggaaatctcggaaccagcagcaggttcctcatcctgccatctctggcaatatttgggcagccctgagaattgcccttagcctcatggatcagcccgagctgtttcaggccgcaaacctcggggatctagacgtgctcctccgcgctttcaacctggacccatag

SEQ ID NO: 91376 - DNA, 1809 bp, Artificial Sequence
  derived and/or modified sequence
atgtaccagggccacatgcagggcaagggcagcagagctgctgacaaggctgtggccatggtgatgaaggagatcccccgggaggagagcgctgaggagaagcccctgctgaccatgaccagccagctggtgaatgagcagcaggagagccggcccctgctgagccccagcattgatgacttcctgtgtgagaccaagtctgaggccatcgcccggcctgtgaccagcaacacagctgtgctgaccaccggcctggacctgctggacctgtctgagcctgtgtcccagacccagaccaaggccaagaagtctgagcccagcagcaagaccagcagcctgaagaagaaggcagatggcagtgacctgatcagcacagatgctgagcagaggggccagcccctgcgggtgcctgagaccagcagcctggacctggacatccagacccagctggagaagtgggatgatgtgaagttccatggagacaggaacaccaagggccaccccatggccgagaggaagagcagcagcagcaggacaggcagcaaggagctgctgtggagcagcgagcacaggagccagcctgagctgagcggcggcaagagcgccctgaacagcgagagcgccagcgagctggagctggtggcccccacccaggcccggctgaccaaggagcaccgctggggcagcgccctgctgagcaggaaccacagcctggaggaggagtttgagcgggccaaggctgctgtggagagtgacacagagttctgggacaagatgcaggccgagtgggaggagatggcccggaggaactggatcagcgagaaccaggaggcccagaaccaggtgaccatcagcgccagcgagaagggctactacttccacacagagaaccccttcaaggactggccaggggcctttgaggagggcctgaagaggctgaaggagggggacctgcctgtgaccatcctcttcatggaggccgccatcctgcaggaccctggagatgctgaggcctggcagttcctgggcatcacccaggccgagaatgaaaatgagcaggccgccatcgtggccctgcagcgctgcctggagctgcagcccaacaacctgaaggccctgatggccctggccgtgtcctacaccaacacaggccaccagcaggatgcctgtgatgccctgaagaactggatcaagcagaaccccaagtacaagtacctggtgaagagcaagaagggcagccctggcctgaccaggaggatgagcaagagccctgtggacagctctgtgctggagggcgtgaaggagctgtacctggaggccgcccaccagaatggagacatgattgatcctgacctgcagacaggcctgggcgtgctcttccacctgtctggagagttcaacagagccattgatgccttcaatgctgccctgactgtgcggcctgaggactacagcctgtggaaccggctgggcgccaccctggccaacggggacagaagtgaggaggccgtggaggcctacacccgggccctggagatccagcccggcttcatccgcagccgctacaacctgggcatcagctgcatcaacctgggcgcctaccgggaggccgtgagcaacttcctgacagccctgagcctgcagaggaagagcaggaaccagcagcaggtgccccacccagccatcagcggcaacatctgggccgccctgcgcatcgccctgagcctgatggaccagcctgagctgttccaggccgccaacctgggggacctggatgtgctgctgcgggccttcaacctggacccctag

SEQ ID NO: 91377 - DNA, 1809 bp, Artificial Sequence
  derived and/or modified sequence
atgtaccagggccacatgcagggcaagggcagccgggccgccgacaaggccgtggccatggttatgaaagaaattcctcgcgaagagagcgcagaagaaaagccccttctgaccatgacaagccagctggttaatgaacagcaggaaagcaggccccttttatctccgagtatcgacgactttctatgtgaaactaagagcgaggcaatcgcacggcccgtcaccagtaacaccgcagttctgacaactggattagaccttctggacctgagcgaacctgtctcccaaacccaaaccaaagcaaaaaaatccgagccctcctccaaaacaagcagcctcaaaaagaaggccgatggctcagacctgatttctaccgatgccgagcaacggggacaacctctgcgcgtacccgaaacctcgagcctggatctagacatccagactcaactggaaaaatgggatgatgttaaatttcacggcgacaggaacacaaaaggccacccaatggcagagaggaagtccagcagtagtcggaccggttcaaaggaactgctatggagctcagagcatcgaagtcagcctgagctgagtggtggaaagtccgcactcaactccgaatctgcatccgaactggaactggtcgctccgactcaagctaggctcaccaaggagcacaggtgggggtcagctttgttgagccgaaaccattccctggaagaggagtttgagcgtgccaaggctgctgtggagagtgacaccgaattctgggataaaatgcaggctgagtgggaggaaatggctagacgtaactggatctccgagaaccaggaagcacagaaccaggtcactatctccgctagcgagaaaggatactacttccatactgaaaacccatttaaagactggcctggagcctttgaagagggacttaagaggctcaaagagggggatctgcccgtgacgattctgtttatggaagcagccattttacaggacccgggtgatgcagaagcctggcagttcctgggtataacccaggctgagaacgaaaacgagcaggccgccatcgtggcactacagagatgcctcgaactgcagcctaataacctgaaggcattgatggccctcgctgtgtcatacactaacacaggacaccaacaggatgcttgtgacgccctcaaaaactggattaagcagaatccaaagtataaatacttggtgaaatcaaaaaagggaagtcccgggttgactagaagaatgagcaagagccctgttgatagcagtgtcctcgaaggcgtcaaggagctgtacttagaagctgcccatcagaacggcgatatgattgacccagacctgcagacaggtctgggcgtcctgtttcacttaagtggtgaatttaaccgggcgatcgacgctttcaatgctgcccttacagtgcgaccagaggactattcactgtggaaccggctcggggctactttagctaatggcgaccgcagtgaggaggccgttgaggcatataccagagcgttggaaattcaaccaggattcatccggtcccggtataatctggggatcagttgcataaacttaggtgcttaccgcgaagctgtgagcaacttcttaaccgcgcttagtctgcagagaaagagcaggaaccagcagcaagtgcctcatcccgcaattagcggaaacatctgggcggctctccgtatcgccctgtccctcatggatcagcctgagctgttccaggctgcgaacctaggtgatctggatgtgttgttgagggcctttaacctggacccttag

SEQ ID NO: 91378 - DNA, 2147 bp, Artificial Sequence
  derived and/or modified sequence
aagagttcggcgaagaaggagtgagttctagagacgccccgcgagcaggacccgcgcctgcaggagagcctggccgacccggctcctcgccttctctgcgcgctctcccgcgtccgctttcagcaccccgagcggagaacagttcccggcagcccgcagcgctgccgagtggccgccggccggccgagtacccggagctccagggggctcaggagcaccctctgagaacccgctgtgcacccaccttttcccctcttttggtgggcaagtaagcacgggggaaaagcatccggtggcctcagggagccctgaagaaaccgaagcagaatgtaccagggacacatgcagggaaaaggctctagggcggcagataaggctgttgccatggtgatgaaggagataccgagggaggagtctgctgaagaaaagcccctccttactatgacatcacagctggtgaatgagcaacaagaaagcagacccctcctgagtccctccatcgatgactttctctgtgaaaccaaatcggaagcaatagcaaggccagtaacatccaatacagctgtattgaccactggcttagatctcctcgacctgagtgaaccagtctctcaaacccaaaccaaagccaagaagtcagagccctcatcaaaaacctcatccctcaagaaaaaggccgatggatctgacctcatcagcacggatgctgagcagagaggccagcctctcagagtcccggagacttcatccttagatctagacattcaaacacaactggaaaaatgggacgatgttaagtttcatggagatcgaaataccaagggacatccaatggcagagagaaaatcatcctcatctagaactggatcaaaagagctcttatggtcctcagaacacagatctcaaccagaactgagtggtggaaaaagcgccctcaactctgagtcggcttcagaattggaattagtggctccgactcaggctcgactgaccaaagaacatcgctggggaagcgcattactttctagaaaccactccttagaagaagagtttgaaagggcaaaagcagcagtggagtcagatacagagttttgggataagatgcaagcagaatgggaagaaatggctcggaggaactggatatctgagaaccaagaagcccagaaccaagtaaccatctcggctagtgagaagggatattactttcacactgaaaaccccttcaaggactggcctggagcatttgaagaaggcttaaaaaggctgaaggaaggggatctgccagtcaccatcctgttcatggaagcagcaattcttcaggaccctggagatgcagaggcatggcagttcctcgggataacccaggcggagaatgaaaatgaacaagcagctattgtcgccctccagaggtgcttagaattacagcccaacaacttaaaagctttgatggccttggctgtgagttatactaacactggccatcagcaggatgcctgtgacgctctgaagaattggattaagcaaaatccaaagtacaaataccttgtgaaaagcaagaagggatctccaggcctcacccggcggatgtctaagtccccagttgatagctctgttctggaaggggtgaaggaattatatctggaagctgcccaccaaaatggagatatgatcgacccagacctgcagacaggtctaggggttctgttccacctgagtggagaatttaatagagcaatagatgcatttaacgctgccttaactgttcggccagaggactattcactatggaaccgcctcggggcgaccttggcgaacggagaccgcagcgaggaagccgtggaggcctatacgcgagcactggagattcagccaggattcatccggtccagatacaacctaggaataagctgcatcaacctgggcgcctacagagaagcggtcagcaattttctcactgccctcagtttgcaaagaaagagcaggaatcagcagcaagttcctcatcctgcaatctctgggaatatctgggctgccctcagaattgcgctctctctgatggaccaaccagaactcttccaggcggctaatcttggtgacctggatgtcctcttaagagctttcaacttggatccttgaagaaagaataa

SEQ ID NO: 91379 - DNA, 1809 bp, Artificial Sequence
  derived and/or modified sequence
atgtatcagggtcatatgcaggggaagggaagcagagcagcagataaagcggtggcaatggtgatgaaagagattccaagggaagaaagcgccgaggaaaaacctctgctaaccatgacgtctcagttggtcaatgagcagcaggagtcccgccctttgctctccccatcaatcgacgactttctctgcgaaactaaaagtgaggcgatagctcgcccagtgacatcaaacactgcagtattgacaacagggttagatttgctcgatctctctgagcccgtgagccagacgcagacaaaggctaaaaagtcagagcctagctcaaagacaagttccctgaaaaagaaagcagatgggagcgatctcatcagcacagatgcagagcagcgcggacagcctctgcgagtgccagagacttcatcactggacctcgatatccagacacagctcgagaagtgggatgatgttaagtttcatggagaccgcaacactaagggccacccaatggcagaaaggaagagctcttctagccgcaccgggagcaaggagctgttgtggagctctgagcaccggtcacagcccgagctgtccggcggtaagagtgccctgaatagtgagtctgcctcagagctggagctcgtggctcccacacaggccagattaactaaggagcacaggtgggggtccgccttgctgtcacgaaatcacagtcttgaagaggagttcgagcgggcaaaggccgctgtagaatcagatacagaattttgggataaaatgcaagccgaatgggaggagatggccagacgaaattggatctccgaaaatcaggaggcacagaatcaggtgacaatctccgcctcagaaaagggatactactttcatacggaaaacccattcaaagactggcccggagccttcgaagagggcttaaagaggctgaaagaaggggatctgccagtcactatcctatttatggaagctgccatcctgcaggacccgggagatgcagaggcctggcagttcttgggaattacccaagcggagaacgagaacgagcaggccgcaatcgtcgcccttcagcgatgcctggagctgcaacctaataaccttaaggcactgatggccctggcagtgtcctacacaaacaccggacatcaacaagatgcctgcgatgcgttaaaaaactggatcaaacagaatccgaaatacaaatacctcgtcaaaagcaaaaagggatctcccggtttgacccgtcggatgtccaaatctccggtggattcttctgtactggaaggagtgaaggaactgtacctggaggctgcccatcagaacggggatatgatcgacccggatctgcagactggtttaggggtgctgttccatctctcgggcgaattcaatagagcgattgacgccttcaacgccgcacttactgtgcgccctgaagattattcgctgtggaaccgcctgggagcaaccctggcgaatggggatcgcagcgaggaagctgttgaagcatacactcgagccctggagatccagcccggattcatcaggtcacgttataatctcggtatatcctgcattaatctgggagcttacagagaggcagtatcaaacttcctgactgcactaagccttcagcgcaagtcccgaaaccagcagcaggtaccacaccctgcgatttcgggcaacatctgggccgctcttcggatcgcactctctcttatggatcaacccgaattgtttcaggccgctaacttgggggaccttgacgtccttcttcgggcttttaatctggacccctag

SEQ ID NO: 91380 - DNA, 1809 bp, Artificial Sequence
  derived and/or modified sequence
atgtaccagggccacatgcagggcaagggcagcagagccgccgacaaggccgtggccatggtgatgaaggagatccccagagaggagagcgccgaggagaagcccctgctgaccatgaccagccagctggtgaacgagcagcaggagagcagacccctgctgagccccagcatcgacgacttcctgtgcgagaccaagagcgaggccatcgccagacccgtgaccagcaacaccgccgtgctgaccaccggcctggacctgctggacctgagcgagcccgtgagccagacccagaccaaggccaagaagagcgagcccagcagcaagaccagcagcctgaagaagaaggccgacggcagcgacctgatcagcaccgacgccgagcagagaggccagcccctgagagtgcccgagaccagcagcctggacctggacatccagacccagctggagaagtgggacgacgtgaagttccacggcgacagaaacaccaagggccaccccatggccgagagaaagagcagcagcagcagaaccggcagcaaggagctgctgtggagcagcgagcacagaagccagcccgagctgagcggcggcaagagcgccctgaacagcgagagcgccagcgagctggagctggtggcccccacccaggccagactgaccaaggagcacagatggggcagcgccctgctgagcagaaaccacagcctggaggaggagttcgagagagccaaggccgccgtggagagcgacaccgagttctgggacaagatgcaggccgagtgggaggagatggccagaagaaactggatcagcgagaaccaggaggcccagaaccaggtgaccatcagcgccagcgagaagggctactacttccacaccgagaaccccttcaaggactggcccggcgccttcgaggagggcctgaagagactgaaggagggcgacctgcccgtgaccatcctgttcatggaggccgccatcctgcaggaccccggcgacgccgaggcctggcagttcctgggcatcacccaggccgagaacgagaacgagcaggccgccatcgtggccctgcagagatgcctggagctgcagcccaacaacctgaaggccctgatggccctggccgtgagctacaccaacaccggccaccagcaggacgcctgcgacgccctgaagaactggatcaagcagaaccccaagtacaagtacctggtgaagagcaagaagggcagccccggcctgaccagaagaatgagcaagagccccgtggacagcagcgtgctggagggcgtgaaggagctgtacctggaggccgcccaccagaacggcgacatgatcgaccccgacctgcagaccggcctgggcgtgctgttccacctgagcggcgagttcaacagagccatcgacgccttcaacgccgccctgaccgtgagacccgaggactacagcctgtggaacagactgggcgccaccctggccaacggcgacagaagcgaggaggccgtggaggcctacaccagagccctggagatccagcccggcttcatcagaagcagatacaacctgggcatcagctgcatcaacctgggcgcctacagagaggccgtgagcaacttcctgaccgccctgagcctgcagagaaagagcagaaaccagcagcaggtgccccaccccgccatcagcggcaacatctgggccgccctgagaatcgccctgagcctgatggaccagcccgagctgttccaggccgccaacctgggcgacctggacgtgctgctgagagccttcaacctggacccctag

SEQ ID NO: 91381 - protein, 591 aa, Artificial Sequence
  derived and/or modified sequence
MYQGHMQKSKEQGYGKLSSDEDLEIIVDQKQLVNEQQESRPLLSPSIDDFLCETKSEAIARPVTSNTAVLTTGLDLLDLSEPVSQTQTKAKKSEPSSKTSSLKKKADGSDLISTDAEQRGQPLRVPETSSLDLDIQTQLEKWDDVKFHGDRNTKGHPMAERKSSSSRTGSKELLWSSEHRSQPELSGGKSALNSESASELELVAPTQARLTKEHRWGSALLSRNHSLEEEFERAKAAVESDTEFWDKMQAEWEEMARRNWISENQEAQNQVTISASEKGYYFHTENPFKDWPGAFEEGLKRLKEGDLPVTILFMEAAILQDPGDAEAWQFLGITQAENENEQAAIVALQRCLELQPNNLKALMALAVSYTNTGHQQDACDALKNWIKQNPKYKYLVKSKKGSPGLTRRMSKSPVDSSVLEGVKELYLEAAHQNGDMIDPDLQTGLGVLFHLSGEFNRAIDAFNAALTVRPEDYSLWNRLGATLANGDRSEEAVEAYTRALEIQPGFIRSRYNLGISCINLGAYREAVSNFLTALSLQRKSRNQQQVPHPAISGNIWAALRIALSLMDQPELFQAANLGDLDVLLRAFNLDP

SEQ ID NO: 91382 - DNA, 1776 bp, Artificial Sequence
  derived and/or modified sequence
atgtaccagggacatatgcagaaatctaaagagcaggggtacggtaagctgtccagcgacgaggacctcgaaataatcgttgatcagaagcagctggtgaatgagcaacaggagtcaagaccgcttctcagcccttccattgatgacttcctgtgtgagaccaagtcagaggccatcgcacggcccgttactagcaataccgccgtgctcaccacgggcctcgacctcctggaccttagcgagcctgtgtcccaaacccagacaaaagccaaaaagtcggagccaagcagcaaaactagtagcttgaagaagaaggctgacggaagcgatcttatctctactgatgctgaacagcggggacagccactgagggtgccagagacatctagcctggatctcgatattcagactcaactcgagaagtgggacgacgtgaagttccatggcgatcgtaacactaaggggcacccaatggcagagcggaagtcctcctcatctagaaccgggagcaaagagctactttggtcttcagagcaccgaagccaacccgaactaagcgggggcaagtccgctttaaacagtgaatcagcctccgagctcgaattagtggcacctacccaggcgaggttaaccaaggagcatcgctggggatctgcactgcttagtaggaaccacagcctagaagaagaatttgaacgggccaaagcagccgtggaatcggatacagagttttgggacaaaatgcaggccgagtgggaggaaatggcccggaggaattggatcagcgaaaaccaggaagcacagaatcaagtcaccatcagtgcttcagaaaaaggatattattttcacacagaaaatccattcaaggattggccaggtgcttttgaagagggtctcaaaaggctaaaagagggggacttacccgtcaccatcttatttatggaggccgcgatattgcaggaccctggcgatgctgaggcctggcagttcttgggtattactcaggcggaaaacgaaaatgagcaggcagcaatcgtggctctccagaggtgtctagaactgcaacctaacaacttgaaagctctcatggcccttgccgtgtcctacaccaacaccggccaccagcaggacgcgtgtgatgccctgaagaattggattaaacagaaccctaagtataagtatctggtcaagagcaaaaagggaagtccaggacttaccagaagaatgagtaaaagccccgtggatagttccgtgctggagggagtaaaggaactctacctggaggcagcacatcagaatggcgatatgatcgaccctgacctacaaaccggcttaggcgtgctgtttcacctgtccggtgagtttaatcgggcaatcgacgctttcaacgccgcactcacggtcagaccggaggattactcactgtggaatcgtctaggggctactctggctaatggtgataggtctgaagaagcagtcgaagcatacactcgcgccttggaaattcaacccggatttatcaggtctaggtataacttaggcattagctgtatcaacctgggggcataccgagaggccgtcagtaatttcctgactgcgcttagcctgcagcgaaaaagtagaaatcagcagcaagttccccaccctgccatctctggcaatatttgggcagccctccgcatcgccctgagcctgatggaccagcctgagctgtttcaggcggcaaacctgggggatcttgacgtgcttctgcgagcatttaacctagatccctag

SEQ ID NO: 91383 - DNA, 1776 bp, Artificial Sequence
  derived and/or modified sequence
atgtaccagggccacatgcagaagagcaaggagcagggctacggcaagctgagcagtgatgaggacctggagatcatcgtggaccagaagcagctggtgaatgagcagcaggagagccggcccctgctgagccccagcattgatgacttcctgtgtgagaccaagtctgaggccatcgcccggcctgtgaccagcaacacagctgtgctgaccaccggcctggacctgctggacctgtctgagcctgtgtcccagacccagaccaaggccaagaagtctgagcccagcagcaagaccagcagcctgaagaagaaggcagatggcagtgacctgatcagcacagatgctgagcagaggggccagcccctgcgggtgcctgagaccagcagcctggacctggacatccagacccagctggagaagtgggatgatgtgaagttccacggggacaggaacaccaagggccaccccatggccgagaggaagagcagcagcagcaggacaggcagcaaggagctgctgtggagcagcgagcacaggagccagcctgagctgagcggcggcaagagcgccctgaacagcgagagcgccagcgagctggagctggtggcccccacccaggcccggctgaccaaggagcaccgctggggcagcgccctgctgagcaggaaccacagcctggaggaggagtttgagcgggccaaggctgctgtggagagtgacacagagttctgggacaagatgcaggccgagtgggaggagatggcccggaggaactggatcagcgagaaccaggaggcccagaaccaggtgaccatcagcgccagcgagaagggctactacttccacacagagaaccccttcaaggactggccaggggcctttgaggagggcctgaagaggctgaaggagggggacctgcctgtgaccatcctcttcatggaggccgccatcctgcaggaccctggagatgctgaggcctggcagttcctgggcatcacccaggctgaaaatgaaaatgagcaggccgccatcgtggccctgcagcgctgcctggagctgcagcccaacaacctgaaggccctgatggccctggccgtgtcctacaccaacacaggccaccagcaggatgcctgtgatgccctgaagaactggatcaagcagaaccccaagtacaagtacctggtgaagagcaagaagggcagccctggcctgaccaggaggatgagcaagagccctgtggacagctctgtgctggagggcgtgaaggagctgtacctggaggccgcccaccagaatggagacatgattgatcctgacctgcagacaggcctgggcgtgctcttccacctgagcggggagttcaacagagccattgatgccttcaatgctgccctgactgtgcggcctgaggactacagcctgtggaaccggctgggcgccaccctggccaatggagacagaagtgaggaggccgtggaggcctacacccgggccctggagatccagcccggcttcatccgcagccgctacaacctgggcatcagctgcatcaacctgggcgcctaccgggaggccgtgagcaacttcctgacagccctgagcctgcagaggaagagcaggaaccagcagcaggtgccccacccagccatcagcggcaacatctgggccgccctgagaattgccctgagcctgatggaccagcctgagctgttccaggccgccaacctgggggacctggatgtgctgctgcgggccttcaacctggacccctag

SEQ ID NO: 91384 - DNA, 1776 bp, Artificial Sequence
  derived and/or modified sequence
atgtaccagggccacatgcagaagagcaaggagcagggctacggcaagctcagttccgacgaggatctggagatcatcgtggaccagaagcagctagtgaatgagcagcaagaatcaaggcccctgctctctccttccattgatgatttcttgtgtgagaccaagtctgaagcaattgcccgtccagtcacctctaatactgccgtcctgaccacagggctagacctgctagacctgtctgaaccagtgagccaaacacaaacaaaggccaaaaagagcgagccgtcatcgaaaacgagttctctaaaaaaaaaagccgatggctcagatttaatctcaacagatgcagagcagcgcgggcaacctttgagggtgccagagacaagcagcctggatcttgatattcagacgcagctggagaagtgggatgacgtgaagttccatggcgaccgaaacaccaaagggcatccaatggccgagcgaaaatcatccagctcacggacgggtagcaaagagttgctttggagctcagagcataggtcacagcccgagctgagtgggggcaagagcgccttgaacagcgagagtgcctcagaattggagctcgtggcgccaactcaggcacgtctaaccaaagagcacagatgggggtcggccctgttgtctcggaaccatagccttgaggaggaattcgagcgagccaaggccgcagtggaatctgacactgagttttgggacaaaatgcaggccgaatgggaggaaatggctcgcagaaactggatttccgagaaccaggaggctcaaaaccaggtcacgatctcagcgagcgaaaaaggttattatttccacacagaaaacccatttaaggactggcctggagcctttgaggaaggactgaaacggcttaaagagggcgatctgcccgtgaccatcttgtttatggaggccgcgattttgcaggaccctggtgacgccgaagcttggcaattcctggggatcacccaggcagaaaacgagaatgagcaggctgccatcgtggccctgcagaggtgcttggagctgcagcctaataacctcaaagccctgatggccttagcagttagttacacgaacactggccaccagcaagatgcatgtgatgctcttaaaaattggattaaacaaaaccctaaatataaatatctagttaagtctaaaaaagggagccccggcctgacgagacggatgagcaaatctccagtggactcctccgtactggaaggcgtgaaggagctctatctagaggcagctcatcagaacggcgatatgatcgaccccgatctgcaaactgggctcggggtgctgttccacctctccggcgagttcaatagagcgatagacgctttcaacgccgccctgacggtccgccccgaagattactccctctggaatcggttgggggcaacactcgctaacggcgacagatccgaggaggccgtcgaagcctacacacgcgcactggagatacaacccggctttataaggtctcgttacaacctcgggatttcctgcattaatttaggagcctaccgcgaagcagtaagtaacttcctaaccgccctgtcactgcagagaaaatccagaaatcagcagcaggttcctcacccggctataagcggcaacatctgggccgccctaaggattgctctgagcctgatggatcaaccggagctgttccaagccgccaatttaggcgatctggacgtcctactgcgcgccttcaacctcgacccttag

SEQ ID NO: 91385 - DNA, 2992 bp, Artificial Sequence
  derived and/or modified sequence
gagaacggcgcgcgccccgctcggcagctgcggcggcggctggtgtaggcgctcacgtcagggctgggaggagggggttcgcagctcagagagagagagacatgaggcaacctggcaggaagcgagaaagagttcggcgaagaaggagtgagttctagagacgccccgcgagcaggacccgcgcctgcaggagagcctggccgacccggctcctcgccttctctgcgcgctctcccgcgtccgctttcagcaccccgagcggagaacagttcccggcagcccgcagcgctgccgagtggccgccggccggccgagtacccggagctccagggggctcaggagcaccctctgagaacccgctgtgcacccaccttttcccctcttttggtgggcaagtaagcacgggggaaaagcatccggtggcctcagggagccctgaagaaaccgaagcagaatgtaccagggacacatgcagaaaagtaaagaacaaggatatggaaaactaagcagtgatgaagacctcgaaataattgttgatcaaaagcagctggtgaatgagcaacaagaaagcagacccctcctgagtccctccatcgatgactttctctgtgaaaccaaatcggaagcaatagcaaggccagtaacatccaatacagctgtattgaccactggcttagatctcctcgacctgagtgaaccagtctctcaaacccaaaccaaagccaagaagtcagagccctcatcaaaaacctcatccctcaagaaaaaggccgatggatctgacctcatcagcacggatgctgagcagagaggccagcctctcagagtcccggagacttcatccttagatctagacattcaaacacaactggaaaaatgggacgatgttaagtttcatggagatcgaaataccaagggacatccaatggcagagagaaaatcatcctcatctagaactggatcaaaagagctcttatggtcctcagaacacagatctcaaccagaactgagtggtggaaaaagcgccctcaactctgagtcggcttcagaattggaattagtggctccgactcaggctcgactgaccaaagaacatcgctggggaagcgcattactttctagaaaccactccttagaagaagagtttgaaagggcaaaagcagcagtggagtcagatacagagttttgggataagatgcaagcagaatgggaagaaatggctcggaggaactggatatctgagaaccaagaagcccagaaccaagtaaccatctcggctagtgagaagggatattactttcacactgaaaaccccttcaaggactggcctggagcatttgaagaaggcttaaaaaggctgaaggaaggggatctgccagtcaccatcctgttcatggaagcagcaattcttcaggaccctggagatgcagaggcatggcagttcctcgggataacccaggcggagaatgaaaatgaacaagcagctattgtcgccctccagaggtgcttagaattacagcccaacaacttaaaagctttgatggccttggctgtgagttatactaacactggccatcagcaggatgcctgtgacgctctgaagaattggattaagcaaaatccaaagtacaaataccttgtgaaaagcaagaagggatctccaggcctcacccggcggatgtctaagtccccagttgatagctctgttctggaaggggtgaaggaattatatctggaagctgcccaccaaaatggagatatgatcgacccagacctgcagacaggtctaggggttctgttccacctgagtggagaatttaatagagcaatagatgcatttaacgctgccttaactgttcggccagaggactattcactatggaaccgcctcggggcgaccttggcgaacggagaccgcagcgaggaagccgtggaggcctatacgcgagcactggagattcagccaggattcatccggtccagatacaacctaggaataagctgcatcaacctgggcgcctacagagaagcggtcagcaattttctcactgccctcagtttgcaaagaaagagcaggaatcagcagcaagttcctcatcctgcaatctctgggaatatctgggctgccctcagaattgcgctctctctgatggaccaaccagaactcttccaggcggctaatcttggtgacctggatgtcctcttaagagctttcaacttggatccttgaagaaagaataataccagtactaataatccctgatctgtgtgattgtactgaaaaatcaaaaactattttattatgaatttcaaaaggataaatcaaatattcaaaaggccatggtcatatagcccaaggaaattaattcctgtggacaatgcccagtctctgttcagatccaaaagcacaaaatgttgtatatagagtcaaagtcaggctcaaaagaagaattaagagactcaagacaaaccaagataaagtaactgtgtgttgaatactctttccacaagttgcaagcatattgcaacacatgttctttgggttttttgtctccccttgcagctgatgacacatctgaggaacttgttcatgggaaacatggaaaaagcactgcctcagattgggaaattctgactgtttctgaactgtcttcttttgcaagactgaacatagtttgggccattggtgcatgcacatatattaacttgtgactaaagacagacattgcttaaacctgttccaattttaacttttactgtagccctttgattccagagagggagctttgctggcaaaagcagtttttgcactagaaatttttgctgttcccaatctaaacttttctggtattgtatatatgcactttaatatcttatttatgccttgctggagttttgttttgttgctccaatttttaacttgggggtgaaagatttaagaactcagcctcactagatcaacggaccaaataaacaattcctgaagacagtt

SEQ ID NO: 91386 - DNA, 1776 bp, Artificial Sequence
  derived and/or modified sequence
atgtaccagggccatatgcaaaaatccaaggaacagggttacggtaagttatcatccgatgaggatctcgagattattgtggatcaaaagcagctggtgaatgaacagcaggagagcaggccactactgtccccatcaattgacgacttcctgtgtgagacgaaatccgaggcaatcgctcgacctgtaaccagtaatactgccgtgctgactacaggattggacctcctggacctctctgagcccgtctcccaaacccagaccaaggccaaaaagtccgaaccctcttccaagaccagcagtctcaagaagaaggcggatggctctgatttaatctcgaccgacgccgagcaacggggacagccactcagggtgcccgaaacgtcaagcctggatctggatatacaaacccagttagagaagtgggatgatgtgaaattccatggagaccggaatactaaagggcacccaatggccgagcggaaatcttcctcatctagaaccggaagtaaagaacttttgtggtcctccgagcacagaagtcagcctgaactgtctggaggtaagtccgctctgaattccgaatcggctagcgagctcgaactggttgctcctactcaggcaaggcttaccaaagagcatcggtggggttcagcgctgctgtctcggaaccactctctggaggaggagttcgagagagccaaggcggctgtcgagagtgacactgagttctgggacaagatgcaagcagagtgggaagaaatggcaaggcgcaactggatcagtgaaaaccaagaggctcagaatcaggtgacaatatcagcctcagaaaagggttactactttcatacagagaatccgttcaaggattggcctggcgcttttgaggaggggctcaagagactgaaggagggcgacctgcctgtgactatattgtttatggaggcggctatcttgcaggatcccggtgatgctgaggcctggcaatttctgggcattacacaggccgagaatgagaatgaacaagccgctatcgtggcacttcaaagatgtcttgagctacagcccaacaatttgaaggctctcatggccctggcagtctcatatacaaatactggtcatcaacaggacgcttgtgatgcccttaaaaattggataaagcaaaacccaaaatataaatacctggtaaagagcaaaaaagggagtcccggactgacccgcagaatgtccaaaagcccggtggattcttctgtattagagggggttaaggaactgtacctggaggccgcacaccagaatggtgatatgatcgacccagacctgcagacgggcctaggcgtgctgtttcacctcagcggagagtttaatcgggctattgatgcctttaatgctgctctcaccgtgagacccgaggactactctctgtggaacaggttgggggcaacgctggctaatggggatagatcagaggaggcggttgaggcatacacaagagctcttgagattcagcctgggtttataagatcaaggtataatctgggcatctcttgtatcaacctgggcgcttatagagaggccgtgtcaaatttcctgaccgcgctgagcctacaacgcaagagtcgcaatcaacagcaggtgccccaccctgctatttcaggcaatatatgggccgctttacgtatagccctgtctttgatggaccagcctgagctcttccaggccgcaaatctgggggacctggatgtcctgctcagagccttcaatttagatccttag

SEQ ID NO: 91387 - DNA, 1776 bp, Artificial Sequence
  derived and/or modified sequence
atgtaccagggccacatgcagaagagcaaggagcagggctacggcaagctgagcagcgacgaggacctggagatcatcgtggaccagaagcagctggtgaacgagcagcaggagagcagacccctgctgagccccagcatcgacgacttcctgtgcgagaccaagagcgaggccatcgccagacccgtgaccagcaacaccgccgtgctgaccaccggcctggacctgctggacctgagcgagcccgtgagccagacccagaccaaggccaagaagagcgagcccagcagcaagaccagcagcctgaagaagaaggccgacggcagcgacctgatcagcaccgacgccgagcagagaggccagcccctgagagtgcccgagaccagcagcctggacctggacatccagacccagctggagaagtgggacgacgtgaagttccacggcgacagaaacaccaagggccaccccatggccgagagaaagagcagcagcagcagaaccggcagcaaggagctgctgtggagcagcgagcacagaagccagcccgagctgagcggcggcaagagcgccctgaacagcgagagcgccagcgagctggagctggtggcccccacccaggccagactgaccaaggagcacagatggggcagcgccctgctgagcagaaaccacagcctggaggaggagttcgagagagccaaggccgccgtggagagcgacaccgagttctgggacaagatgcaggccgagtgggaggagatggccagaagaaactggatcagcgagaaccaggaggcccagaaccaggtgaccatcagcgccagcgagaagggctactacttccacaccgagaaccccttcaaggactggcccggcgccttcgaggagggcctgaagagactgaaggagggcgacctgcccgtgaccatcctgttcatggaggccgccatcctgcaggaccccggcgacgccgaggcctggcagttcctgggcatcacccaggccgagaacgagaacgagcaggccgccatcgtggccctgcagagatgcctggagctgcagcccaacaacctgaaggccctgatggccctggccgtgagctacaccaacaccggccaccagcaggacgcctgcgacgccctgaagaactggatcaagcagaaccccaagtacaagtacctggtgaagagcaagaagggcagccccggcctgaccagaagaatgagcaagagccccgtggacagcagcgtgctggagggcgtgaaggagctgtacctggaggccgcccaccagaacggcgacatgatcgaccccgacctgcagaccggcctgggcgtgctgttccacctgagcggcgagttcaacagagccatcgacgccttcaacgccgccctgaccgtgagacccgaggactacagcctgtggaacagactgggcgccaccctggccaacggcgacagaagcgaggaggccgtggaggcctacaccagagccctggagatccagcccggcttcatcagaagcagatacaacctgggcatcagctgcatcaacctgggcgcctacagagaggccgtgagcaacttcctgaccgccctgagcctgcagagaaagagcagaaaccagcagcaggtgccccaccccgccatcagcggcaacatctgggccgccctgagaatcgccctgagcctgatggaccagcccgagctgttccaggccgccaacctgggcgacctggacgtgctgctgagagccttcaacctggacccctag

SEQ ID NO: 91388 - protein, 518 aa, Artificial Sequence
  derived and/or modified sequence
MVMKEIPREESAEEKPLLTMTSQLVNEQQESRPLLSPSIDDFLCETKSEAIARPVTSNTADIQTQLEKWDDVKFHGDRNTKGHPMAERKSSSSRTGSKELLWSSEHRSQPELSGGKSALNSESASELELVAPTQARLTKEHRWGSALLSRNHSLEEEFERAKAAVESDTEFWDKMQAEWEEMARRNWISENQEAQNQVTISASEKGYYFHTENPFKDWPGAFEEGLKRLKEGDLPVTILFMEAAILQDPGDAEAWQFLGITQAENENEQAAIVALQRCLELQPNNLKALMALAVSYTNTGHQQDACDALKNWIKQNPKYKYLVKSKKGSPGLTRRMSKSPVDSSVLEGVKELYLEAAHQNGDMIDPDLQTGLGVLFHLSGEFNRAIDAFNAALTVRPEDYSLWNRLGATLANGDRSEEAVEAYTRALEIQPGFIRSRYNLGISCINLGAYREAVSNFLTALSLQRKSRNQQQVPHPAISGNIWAALRIALSLMDQPELFQAANLGDLDVLLRAFNLDP

SEQ ID NO: 91389 - DNA, 1557 bp, Artificial Sequence
  derived and/or modified sequence
atggttatgaaggaaatcccccgagaagagagcgccgaggagaagcccctgctcactatgacttcccagttggtgaacgagcaacaggagtccagaccactgttatccccaagcattgacgatttcttgtgcgagaccaaatctgaggcaattgccaggcccgtgacatctaacacagccgacattcaaacacagctcgaaaagtgggatgatgtgaaattccacggagatcgcaataccaaggggcatcccatggccgaaaggaaaagcagcagtagtaggaccggatcgaaggaactgctctggtctagcgagcaccgcagtcagccagagctcagcggagggaaatccgccctgaactctgagagcgcaagcgagcttgagctcgtggcccccacccaagctcgccttactaaggaacatcggtggggatccgccctattatcccgcaaccatagcctagaggaggagtttgaaagggctaaagctgcagtggagagcgacacagaattttgggataagatgcaggcagagtgggaagagatggccaggaggaattggatcagtgagaaccaggaggcccagaaccaggtgacgatatccgcctctgagaaggggtactactttcacacagaaaacccattcaaggattggcctggagctttcgaggagggcctcaagagactgaaagaaggagacttgcctgtcactatcctctttatggaggctgccatccttcaggacccgggcgatgccgaggcgtggcagttcctggggattacccaggctgaaaacgagaacgagcaggccgctatcgtggcccttcagaggtgtctagagctgcagcctaacaacttaaaagccctgatggcattagcagtatcttacacaaataccgggcaccagcaggacgcatgcgatgctttgaaaaactggatcaagcaaaaccctaagtataaatatctggttaaatctaagaagggatctcctggcctgacccggcgcatgagtaaaagccccgtagatagcagcgtgttggagggagtgaaagagctctacctggaggctgctcatcagaacggcgacatgatagaccctgacctgcagactggattgggcgtgctcttccacctgtctggggaatttaaccgcgccatagatgccttcaacgctgcccttactgtgcggcctgaggattattcactatggaaccgactgggagccactctggctaatggggatcggagcgaggaagctgtcgaggcttataccagagcgctggagattcagcccggatttatacgctcccgctataaccttgggatcagctgcatcaacctgggcgcatacagagaggcggtgtctaattttctcacagcgctctccctccagcgcaaatctcgcaaccagcagcaggtaccacacccagccatcagcgggaatatttgggcagctctcaggatcgcactgtccctgatggaccagcctgaactgtttcaggctgcgaacctgggtgatctcgacgtgctgttgagagccttcaacctagatccgtag

SEQ ID NO: 91390 - DNA, 1557 bp, Artificial Sequence
  derived and/or modified sequence
atggtgatgaaggagatcccccgggaggagagcgctgaggagaagcccctgctgaccatgaccagccagctggtgaatgagcagcaggagagccggcccctgctgagccccagcattgatgacttcctgtgtgagaccaagtctgaggccatcgcccggcctgtgaccagcaacacagctgacatccagacccagctggagaagtgggatgatgtgaagttccatggagacaggaacaccaagggccaccccatggccgagaggaagagcagcagcagcaggacaggcagcaaggagctgctgtggagcagcgagcacaggagccagcctgagctgagcggcggcaagagcgccctgaacagcgagagcgccagcgagctggagctggtggcccccacccaggcccggctgaccaaggagcaccgctggggcagcgccctgctgagcaggaaccacagcctggaggaggagtttgagcgggccaaggctgctgtggagagtgacacagagttctgggacaagatgcaggccgagtgggaggagatggcccggaggaactggatcagcgagaaccaggaggcccagaaccaggtgaccatcagcgccagcgagaagggctactacttccacacagagaaccccttcaaggactggccaggggcctttgaggagggcctgaagaggctgaaggagggggacctgcctgtgaccatcctcttcatggaggccgccatcctgcaggaccctggagatgctgaggcctggcagttcctgggcatcacccaggccgagaatgaaaatgagcaggccgccatcgtggccctgcagcgctgcctggagctgcagcccaacaacctgaaggccctgatggccctggccgtgtcctacaccaacacaggccaccagcaggatgcctgtgatgccctgaagaactggatcaagcagaaccccaagtacaagtacctggtgaagagcaagaagggcagccctggcctgaccaggaggatgagcaagagccctgtggacagctctgtgctggagggcgtgaaggagctgtacctggaggccgcccaccagaatggagacatgattgatcctgacctgcagacaggcctgggcgtgctcttccacctgtctggagagttcaacagagccattgatgccttcaatgctgccctgactgtgcggcctgaggactacagcctgtggaaccggctgggcgccaccctggccaacggggacagaagtgaggaggccgtggaggcctacacccgggccctggagatccagcccggcttcatccgcagccgctacaacctgggcatcagctgcatcaacctgggcgcctaccgggaggccgtgagcaacttcctgacagccctgagcctgcagaggaagagcaggaaccagcagcaggtgccccacccagccatcagcggcaacatctgggccgccctgcgcatcgccctgagcctgatggaccagcctgagctgttccaggccgccaacctgggggacctggatgtgctgctgcgggccttcaacctggacccctag

SEQ ID NO: 91391 - DNA, 1557 bp, Artificial Sequence
  derived and/or modified sequence
atggtgatgaaggagatcccccgggaggagagcgccgaggagaagccactgctgacaatgaccagccagttggtaaacgagcagcaagaatcacgtcctcttctgtccccctcaatcgacgatttcttatgtgagaccaaaagcgaagcaatagcgcggcccgtcaccagcaatactgcagacatccaaacccagctggaaaagtgggacgatgtcaaatttcacggggaccgaaatactaagggacacccaatggcagaacgtaagtcgagctctagtaggactggatcgaaggagctcctgtggtcttccgagcatagatcccaacctgagctcagtggcgggaaaagcgccctcaacagtgagtctgcttcagagctggagctggtagcccccactcaggcgcgcctaaccaaggagcatcggtggggaagcgccctgctctcccgaaatcacagcctggaggaggagttcgaaagggccaaagctgccgtggaatccgacacagaattctgggacaaaatgcaggccgaatgggaggagatggcgagaaggaattggattagtgaaaatcaagaagcccagaaccaggtgaccattagcgcttctgagaagggctattattttcacaccgaaaaccctttcaaagattggccgggggctttcgaagaaggcctgaagcgtcttaaggagggtgatctccctgttactatcctgtttatggaagccgctattttgcaggatccaggcgacgctgaggcctggcagtttcttggcatcacccaggccgaaaacgagaatgagcaggcagcaatcgttgcattgcagcgctgcttggagctccagcctaacaacttgaaggcccttatggctttagctgtgtcttatactaataccgggcatcaacaagatgcatgcgacgccctaaagaattggatcaaacaaaacccaaaatacaagtaccttgttaaatctaaaaagggctcgccagggttgacaaggcgcatgtcaaaatccccagtcgactcttcagtactcgagggcgtgaaggaactgtacctggaggccgctcaccagaacggggacatgatcgatccagacctgcagactgggctgggagtcctttttcaccttagcggtgagttcaacagggcaattgatgctttcaacgctgcgctcactgtgcgccctgaggattattctctgtggaatcggctcggcgcaaccttggccaatggagatagaagcgaagaggccgtggaagcctatacacgggcactggaaattcagcccggcttcatacggagccggtacaacctgggtattagctgcattaacttaggcgcttacagggaagcagtctctaactttctgactgctctctcactccaaagaaagtcacggaatcagcagcaggtgccccatcccgccatttccgggaatatctgggctgctcttaggattgccctgagcctgatggaccaacctgagctgttccaagccgcgaacctcggcgatcttgacgtcctcctcagagccttcaacttggatccctag

SEQ ID NO: 91392 - DNA, 2319 bp, Artificial Sequence
  derived and/or modified sequence
atggtgatgaaggagataccgagggaggagtctgctgaagaaaagcccctccttactatgacatcacagctggtgaatgagcaacaagaaagcagacccctcctgagtccctccatcgatgactttctctgtgaaaccaaatcggaagcaatagcaaggccagtaacatccaatacagctgacattcaaacacaactggaaaaatgggacgatgttaagtttcatggagatcgaaataccaagggacatccaatggcagagagaaaatcatcctcatctagaactggatcaaaagagctcttatggtcctcagaacacagatctcaaccagaactgagtggtggaaaaagcgccctcaactctgagtcggcttcagaattggaattagtggctccgactcaggctcgactgaccaaagaacatcgctggggaagcgcattactttctagaaaccactccttagaagaagagtttgaaagggcaaaagcagcagtggagtcagatacagagttttgggataagatgcaagcagaatgggaagaaatggctcggaggaactggatatctgagaaccaagaagcccagaaccaagtaaccatctcggctagtgagaagggatattactttcacactgaaaaccccttcaaggactggcctggagcatttgaagaaggcttaaaaaggctgaaggaaggggatctgccagtcaccatcctgttcatggaagcagcaattcttcaggaccctggagatgcagaggcatggcagttcctcgggataacccaggcggagaatgaaaatgaacaagcagctattgtcgccctccagaggtgcttagaattacagcccaacaacttaaaagctttgatggccttggctgtgagttatactaacactggccatcagcaggatgcctgtgacgctctgaagaattggattaagcaaaatccaaagtacaaataccttgtgaaaagcaagaagggatctccaggcctcacccggcggatgtctaagtccccagttgatagctctgttctggaaggggtgaaggaattatatctggaagctgcccaccaaaatggagatatgatcgacccagacctgcagacaggtctaggggttctgttccacctgagtggagaatttaatagagcaatagatgcatttaacgctgccttaactgttcggccagaggactattcactatggaaccgcctcggggcgaccttggcgaacggagaccgcagcgaggaagccgtggaggcctatacgcgagcactggagattcagccaggattcatccggtccagatacaacctaggaataagctgcatcaacctgggcgcctacagagaagcggtcagcaattttctcactgccctcagtttgcaaagaaagagcaggaatcagcagcaagttcctcatcctgcaatctctgggaatatctgggctgccctcagaattgcgctctctctgatggaccaaccagaactcttccaggcggctaatcttggtgacctggatgtcctcttaagagctttcaacttggatccttgaagaaagaataataccagtactaataatccctgatctgtgtgattgtactgaaaaatcaaaaactattttattatgaatttcaaaaggataaatcaaatattcaaaaggccatggtcatatagcccaaggaaattaattcctgtggacaatgcccagtctctgttcagatccaaaagcacaaaatgttgtatatagagtcaaagtcaggctcaaaagaagaattaagagactcaagacaaaccaagataaagtaactgtgtgttgaatactctttccacaagttgcaagcatattgcaacacatgttctttgggttttttgtctccccttgcagctgatgacacatctgaggaacttgttcatgggaaacatggaaaaagcactgcctcagattgggaaattctgactgtttctgaactgtcttcttttgcaagactgaacatagtttgggccattggtgcatgcacatatattaacttgtgactaaagacagacattgcttaaacctgttccaattttaacttttactgtagccctttgattccagagagggagctttgctggcaaaagcagtttttgcactagaaatttttgctgttcccaatctaaacttttctggtattgtatatatgcactttaatatcttatttatgccttgctggagttttgttttgttgctccaatttttaacttgggggtgaaagatttaagaactcagcctcactagatcaacggaccaaataaacaattcctgaagacagtt

SEQ ID NO: 91393 - DNA, 1557 bp, Artificial Sequence
  derived and/or modified sequence
atggtcatgaaagagatcccccgtgaggagtctgctgaagagaagccgctgcttacaatgactagtcagttggtgaatgaacagcaggaatcacggcctctccttagcccctccattgatgactttctttgtgaaaccaaatctgaggctatagctaggcccgtgacctcgaacaccgcagacattcagactcagctagagaagtgggatgacgttaagtttcacggcgaccgtaatactaaaggtcaccctatggctgagcggaagtcatcgagtagcagaaccgggagcaaggaactcctctggtcctccgagcaccgatcacagcccgagttatccgggggaaaaagtgccctgaacagtgaaagtgcctcagaactagagctggtcgctcctacccaagctagactgacgaaggagcacaggtgggggtccgcactccttagtagaaatcactcccttgaggaagaatttgaacgtgcaaaggccgcagtggaatccgacactgaattctgggacaagatgcaggctgaatgggaagaaatggccagaagaaactggatctctgagaatcaggaagcccaaaaccaagtgaccatctcagcttcagagaaaggatattacttccataccgaaaatccatttaaggattggccgggagcgttcgaggaaggcttgaagagactgaaggagggagacttgcctgttaccatcttgttcatggaggcagctatcctgcaggatccaggagatgccgaggcatggcaattcctaggaattactcaggctgaaaacgaaaatgagcaggctgcaatcgtggccctgcagcggtgtctggagctgcagcccaacaatctgaaagcactgatggcgctggcggtgtcatatactaataccggccaccagcaggatgcctgtgacgcattgaagaattggataaaacagaatccaaagtataagtatttagtgaagtctaaaaaggggtcccccggactcaccaggcggatgtctaagagcccagtggatagcagcgtcctcgaaggcgttaaggagctgtacctagaggctgcccaccagaacggcgacatgattgatcccgatctccagaccggcctgggcgtgctgttccatctgtctggcgaatttaacagagcaatcgacgccttcaacgctgcactgaccgtgcgaccggaggactacagtctatggaacagattgggcgctactttggcaaatggcgatcggtcggaggaggctgtcgaggcttacacaagggctctcgagatacagcccggttttattcgttctaggtacaatttggggatttcttgtattaacctgggcgcatatagggaagccgtgtctaacttccttactgccttgtcattgcagaggaagtctagaaaccagcagcaagtgccccatccagctatcagcggaaatatctgggccgctctgcgaattgcgctctctttaatggaccagccagaactctttcaggcagccaacctgggcgatctggacgtgctgttgcgtgcattcaacctggacccctag

SEQ ID NO: 91394 - DNA, 1557 bp, Artificial Sequence
  derived and/or modified sequence
atggtgatgaaggagatccccagagaggagagcgccgaggagaagcccctgctgaccatgaccagccagctggtgaacgagcagcaggagagcagacccctgctgagccccagcatcgacgacttcctgtgcgagaccaagagcgaggccatcgccagacccgtgaccagcaacaccgccgacatccagacccagctggagaagtgggacgacgtgaagttccacggcgacagaaacaccaagggccaccccatggccgagagaaagagcagcagcagcagaaccggcagcaaggagctgctgtggagcagcgagcacagaagccagcccgagctgagcggcggcaagagcgccctgaacagcgagagcgccagcgagctggagctggtggcccccacccaggccagactgaccaaggagcacagatggggcagcgccctgctgagcagaaaccacagcctggaggaggagttcgagagagccaaggccgccgtggagagcgacaccgagttctgggacaagatgcaggccgagtgggaggagatggccagaagaaactggatcagcgagaaccaggaggcccagaaccaggtgaccatcagcgccagcgagaagggctactacttccacaccgagaaccccttcaaggactggcccggcgccttcgaggagggcctgaagagactgaaggagggcgacctgcccgtgaccatcctgttcatggaggccgccatcctgcaggaccccggcgacgccgaggcctggcagttcctgggcatcacccaggccgagaacgagaacgagcaggccgccatcgtggccctgcagagatgcctggagctgcagcccaacaacctgaaggccctgatggccctggccgtgagctacaccaacaccggccaccagcaggacgcctgcgacgccctgaagaactggatcaagcagaaccccaagtacaagtacctggtgaagagcaagaagggcagccccggcctgaccagaagaatgagcaagagccccgtggacagcagcgtgctggagggcgtgaaggagctgtacctggaggccgcccaccagaacggcgacatgatcgaccccgacctgcagaccggcctgggcgtgctgttccacctgagcggcgagttcaacagagccatcgacgccttcaacgccgccctgaccgtgagacccgaggactacagcctgtggaacagactgggcgccaccctggccaacggcgacagaagcgaggaggccgtggaggcctacaccagagccctggagatccagcccggcttcatcagaagcagatacaacctgggcatcagctgcatcaacctgggcgcctacagagaggccgtgagcaacttcctgaccgccctgagcctgcagagaaagagcagaaaccagcagcaggtgccccaccccgccatcagcggcaacatctgggccgccctgagaatcgccctgagcctgatggaccagcccgagctgttccaggccgccaacctgggcgacctggacgtgctgctgagagccttcaacctggacccctag

SEQ ID NO: 91395 - protein, 458 aa, Artificial Sequence
  derived and/or modified sequence
MVNLRNAVHSFLVHLIGLLVWQCDISVSPVAAIVTDIFNTSDGGRFKFPDGVQNWPALSIVIIIIMTIGGNILVIMAVSMEKKLHNATNYFLMSLAIADMLVGLLVMPLSLLAILYDYVWPLPRYLCPVWISLDVLFSTASIMHLCAISLDRYVAIRNPIEHSRFNSRTKAIMKIAIVWAISIGVSVPIPVIGLRDEEKVFVNNTTCVLNDPNFVLIGSFVAFFIPLTIMVITYCLTIYVLRRQALMLLHGHTEEPPGLSLDFLKCCKRNTAEEENSANPNQDQNARRRKKKERRPRGTMQAINNERKASKVLGIVFFVFLIMWCPFFITNILSVLCEKSCNQKLMEKLLNVFVWIGYVCSGINPLVYTLFNKIYRRAFSNYLRCNYKVEKKPPVRQIPRVAATALSGRELNVNIYRHTNEPVIEKASDNEPGIEMQVENLELPVNPSSVVSERISSV

SEQ ID NO: 91396 - DNA, 1377 bp, Artificial Sequence
  derived and/or modified sequence
atggtgaacctgaggaacgcggttcattctttcctggtacacctaatcggcctcctggtctggcagtgtgatatatccgtcagtccagtcgccgctatcgtcactgacatttttaataccagtgacgggggccgattcaagtttccagatggtgtgcagaattggccagcgctctctattgtcattatcatcatcatgacaatcggcggtaacatccttgtcataatggccgtgtccatggagaaaaagctgcataatgccactaattactttctaatgtctctggccatcgccgacatgctggtggggttactcgtaatgccactctcactgctggccatcttgtatgattacgtgtggcctctgccccggtatctctgtcccgtgtggatcagcctggatgtgctgtttagtacagcctctatcatgcatctttgtgccatttctttagaccgctacgtcgccatcagaaaccctatcgagcactcgaggtttaactctaggacgaaagccataatgaaaatagctatagtatgggctataagcatcggggtttccgttcccatacctgttatcggcctacgggacgaggaaaaagtgttcgtcaacaatacgacatgtgtcctcaatgatcccaactttgttctgatcggctccttcgtcgccttcttcatcccccttactattatggtgattacgtattgcctgacaatctacgtgcttcgccgacaggccctgatgctgttgcatggccatacagaggaacctccgggtctctccctggattttttgaagtgctgtaagagaaacaccgctgaagaggaaaattccgccaatccgaaccaggatcagaatgcaagaaggcgcaaaaaaaaggagaggcgaccacgaggcaccatgcaggccattaacaacgagagaaaagccagcaaagttttgggcattgtgtttttcgtgttcctgatcatgtggtgtcctttctttattacaaatatcctgtccgtcttgtgcgagaaaagctgcaatcagaaactcatggagaaattgctcaacgtgttcgtctggatcggctacgtgtgttctggcatcaatcctctggtgtatactctatttaacaagatttaccgccgtgccttctctaactacctgcggtgcaactataaggtggaaaagaaacctccagtgcgtcagatcccccgcgtggctgccactgccctgagcggccgggaattgaatgtgaacatttaccggcacactaatgaaccagtaatcgaaaaggcttccgataacgagcccgggatcgaaatgcaggtggaaaacctcgagctcccggttaatcctagcagcgtcgtgagtgagaggatatcttccgtatag

SEQ ID NO: 91397 - DNA, 1377 bp, Artificial Sequence
  derived and/or modified sequence
atggtcaacctgcggaatgcagttcacagcttcctagtgcacctcattggactgttagtgtggcaatgtgacatttccgtaagccctgtggctgcaatcgtaacggacatctttaatacatcagacggaggacggttcaagtttccggacggcgtccagaactggcctgcgctatccatcgtgattatcataatcatgactataggtggaaacatcctagtcatcatggcggtatcaatggaaaaaaaactgcataacgccaccaactattttttaatgtcactggccatcgcagatatgctggttggcctcctggtgatgcccctgagcttgttagcgatcctgtatgactacgtgtggcctctcccacggtatttgtgtcctgtctggataagcctcgatgtgctctttagtaccgccagtataatgcatctgtgcgccatatcactggatcgctatgtggccattcgaaaccccattgagcatagccgcttcaattccaggactaaggcaattatgaagatcgccatcgtgtgggccattagcatcggagtgtctgttccaattcctgtcataggcttgagggacgaggaaaaggtgtttgtgaataatacaacgtgcgtcctgaacgatcctaacttcgtactgatcggctctttcgtcgcattcttcatccccttaactataatggttatcacctattgcctcacaatctacgtgctgagacggcaggcactgatgctgttgcatggccacactgaggaacctccaggactctccctggattttctcaagtgctgcaagagaaataccgccgaggaagaaaattctgcgaatccgaatcaggaccaaaacgcccgcaggcggaagaagaaggaaaggcggccacgtggcacaatgcaggcaattaataatgagagaaaggcctctaaagtacttggcatcgtcttctttgtctttcttatcatgtggtgcccattttttatcacgaatatcctctccgtgctctgtgagaaaagctgcaatcagaagttgatggagaagctactgaatgtgtttgtgtggatcggatacgtctgcagcggcatcaaccccctggtttacactctcttcaataagatttacagacgggctttcagtaattacctccgctgcaactataaggttgaaaaaaaaccccctgtgcgccagattcccagagtagcagctactgcactttccggtcgcgagttaaacgtgaacatctacagacacacaaacgaaccagtgatcgaaaaagcaagtgacaacgaacccggcatcgaaatgcaggtggagaatctcgagctacccgtcaaccctagttcagtggtctccgagcggataagcagcgtgtag

SEQ ID NO: 91398 - DNA, 1377 bp, Artificial Sequence
  derived and/or modified sequence
atggtgaacctgagaaatgctgtgcacagcttcctggtgcacctgattggcctgctggtgtggcagtgtgacatctctgtgtcccctgtggccgccatcgtgacagacatcttcaacaccagtgatggcggccgcttcaagttcccagatggagtgcagaactggccagccctgagcatcgtcatcatcatcatcatgaccatcggcggcaacatcctggtgatcatggctgtgtccatggagaagaagctgcacaatgccaccaactacttcctgatgagcctggccatcgctgacatgctggtgggcctgctggtgatgcccctgagcctgctggccatcctgtatgactatgtgtggcccctgccccgctacctgtgccctgtgtggatcagcctggatgtgctcttcagcacagccagcatcatgcacctgtgtgccatcagcctggacagatatgtggccatccggaaccccatcgagcacagccgcttcaacagcaggaccaaggccatcatgaagatcgccatcgtgtgggccatcagcattggagtgtctgtgcccatccctgtgattggcctgagagatgaggagaaggtgtttgtgaacaacaccacctgtgtgctgaatgaccccaactttgtgctgattggcagctttgtggccttcttcatccccctgaccatcatggtgatcacctactgcctgaccatctacgtgctgcggcggcaggccctgatgctgctgcacggccacacagaggagcccccaggcctgagcctggacttcctgaagtgctgcaagaggaacacagctgaggaggagaacagcgccaaccccaaccaggaccagaatgcccggcggaggaagaagaaggagcggcggccccggggcaccatgcaggccatcaacaatgaaaggaaggccagcaaggtgctgggcatcgtgttctttgtgttcctgatcatgtggtgccccttcttcatcaccaacatcctgtctgtgctgtgtgagaagagctgcaaccagaagctgatggagaagctgctgaatgtgtttgtgtggattggctacgtgtgcagcggcatcaaccccctggtgtacaccctcttcaacaagatctaccgccgggccttcagcaactacctgcgctgcaactacaaggtggagaagaagccccctgtgcggcagatcccccgggtggccgccacagccctgagcggccgggagctgaatgtgaacatctaccgccacaccaatgagcccgtcatcgagaaggccagtgacaatgagcccggcatcgagatgcaggtggagaacctggagctgcctgtgaaccccagctctgtggtgtctgagcgcatcagctctgtgtag

SEQ ID NO: 91399 - DNA, 1377 bp, Artificial Sequence
  derived and/or modified sequence
atggtgaacctgcggaacgccgtgcacagcttcctggtgcacctgatagggctcctcgtatggcaatgcgatatttcagtatcccccgtggcagctatcgtcacggacattttcaacacgtcagacggggggcgcttcaagttcccagatggcgtccagaactggcccgctttgagcattgttatcatcatcatcatgacaatcggaggtaatattttagtaattatggccgtttctatggagaagaagctccataatgcgacaaattattttctaatgtcactagctatcgccgacatgctcgttggtctgctcgtgatgccgcttagcctcctagccatcctttacgattacgtgtggcctctgccaaggtatttgtgcccagtgtggatatccctcgatgtgctgttctctacagcaagcattatgcatttgtgtgccatatccctggaccggtacgtagctatacggaaccctattgaacactcaaggttcaacagtaggacgaaagcaattatgaaaattgcaattgtgtgggctatcagcattggtgtgtctgtccctatccccgttatcgggttaagagatgaggagaaggtcttcgtaaacaataccacctgtgtccttaatgatccaaactttgtgcttatcggatctttcgttgccttttttatacctctcactattatggtgatcacttactgcttaacaatatatgtgctgagacgtcaggctctgatgctactgcatggccacaccgaggagcctccaggactcagccttgactttctcaaatgttgcaaacggaacacagccgaggaagaaaacagtgccaaccctaatcaggatcagaatgcccgaagacgtaagaagaaggaaaggagaccgcggggcacaatgcaggccataaataatgagcgaaaagcctcaaaggtgttgggcatcgtgttttttgtctttctgatcatgtggtgcccattttttatcaccaacatcctaagcgtgctgtgcgagaagtcatgcaaccagaagctcatggagaagctgctgaacgtctttgtctggattggctatgtgtgttccgggattaatcctctcgtgtatacgctgttcaacaaaatctacagacgggcatttagcaactatcttagatgtaattataaggtggaaaagaagcctccggtccgtcagatccctagggtcgctgctactgccctgtcgggccgggagctcaatgtgaatatttacagacatacaaacgagccagtgatagaaaaggcatctgataacgagcctggcatcgaaatgcaggtggagaatcttgagcttcctgtgaacccgtccagtgtggtgagtgaacgaatctccagtgtctag

SEQ ID NO: 91400 - DNA, 1377 bp, Artificial Sequence
  derived and/or modified sequence
atggtgaacctgcggaacgccgtgcacagcttcctggtgcacctgatcggcctgctagtttggcagtgtgatatttctgttagtcccgtcgctgccatcgtgactgatattttcaacacttcggatggcggccggttcaagtttcccgacggtgtgcagaactggcctgctttgagtattgtcattattattatcatgacaatcggaggcaacatcctggtcattatggccgtgagtatggagaagaaactacataacgctactaactacttcttgatgagcctcgcaatagcagacatgctggtgggcttgctagtaatgcctctgagtcttctcgcaatcctatatgattacgtttggcctctacccagatatctctgccctgtctggatcagtttagatgtgcttttttccacagcgagcattatgcacctatgcgcaatatctttagacagatatgtcgctatacgaaatcccatcgagcacagtaggttcaactcgaggacaaaggctattatgaagattgccattgtgtgggccattagcatcggtgtgagcgtccctattccggtgatcggtcttcgggacgaagagaaggtgttcgtcaataatacaacttgcgtgttgaacgatcctaattttgtactgataggcagttttgtcgcttttttcattcctctaactattatggttattacttactgcctcactatctacgtattgcgcagacaggccctgatgctgctgcacgggcatacagaagagccccctgggcttagcctggatttcctgaagtgttgtaaaagaaataccgccgaagaagagaatagcgccaatcctaaccaggaccagaacgcccggagacgcaagaagaaggagagacgcccaaggggcactatgcaagcaattaacaacgagcgtaaagccagcaaggtactgggaatagtatttttcgtgttcctcataatgtggtgcccgttcttcattacaaatatcttaagcgttctgtgcgagaagtcatgcaatcaaaaattaatggaaaagctactgaacgtgttcgtgtggatcggatatgtctgctctggaatcaatcctctcgtatacacactcttcaacaagatatacagaagggccttttccaactacctgaggtgtaactacaaagtggagaagaaacctcccgtccgtcaaattccaagagtagccgccaccgcactgtctggacgtgaacttaatgtgaacatttaccggcatacgaatgagccagtcattgagaaagcctctgacaatgagcccgggatcgagatgcaggtggagaatcttgaactgccagttaaccccagttcagttgtgtctgaacggatatctagcgtctag

SEQ ID NO: 91401 - DNA, 1377 bp, Artificial Sequence
  derived and/or modified sequence
atggtgaatcttcgaaatgctgtgcacagcttcttggtgcaccttattggcctgctcgtttggcagtgcgatatctctgtgtcccctgttgccgcaattgtgaccgacattttcaatactagcgacgggggacggtttaaatttccggacggggtgcagaactggccagcactgagcatcgtgattatcatcatcatgactattggtggtaatatactggtgattatggctgtaagtatggagaaaaagttacacaatgcaaccaactactttttgatgtccctcgctattgccgacatgctggtaggcctcctcgtgatgcccctctccctgctagccatactttacgactacgtctggcccctgcccaggtatctgtgcccggtgtggattagtctagatgtgttgttcagcactgcatcaatcatgcatttgtgcgcgattagtctcgaccgctacgttgccatccgaaatcctattgaacactcaaggtttaatagtcggactaaagccattatgaaaatcgcaatagtctgggccatctctatcggggtgtcagtgccaatcccggtgattggccttagggacgaagaaaaggttttcgtcaacaataccacctgcgttcttaatgatcctaatttcgtgctgattggttcgttcgtcgcattctttatccccctgactattatggtgatcacctattgcctgactatctacgtgctaaggagacaggcgcttatgctgcttcacggacatacagaggagccccctgggctatccctggacttcctgaagtgctgcaagcggaataccgccgaagaagagaatagtgccaatccgaaccaggaccaaaacgcacggcgtaggaagaagaaagaacggagacctaggggcacaatgcaggctatcaacaacgaacgcaaggcaagtaaggtgctggggattgtattcttcgtttttctcataatgtggtgcccgttcttcattactaatattctatccgtgctttgcgagaagtcctgtaatcagaagcttatggagaagctgctcaacgtttttgtttggataggatatgtatgctccgggattaaccccctggtctacactctattcaacaaaatctatcgtcgcgctttcagcaactacctgcgttgcaactataaggtcgagaagaagccccctgtaagacagattcctcgcgtcgccgcaaccgccctaagtggccgagagcttaatgtgaacatttacaggcatacgaacgagcctgtgatcgagaaagcttctgataacgagcccggaatagaaatgcaagttgaaaacttagagctccctgtcaatcccagctcggtcgtgagcgaacgcattagcagtgtgtag

SEQ ID NO: 91402 - DNA, 1377 bp, Artificial Sequence
  derived and/or modified sequence
atggttaacctgaggaatgccgtgcattctttcctggtgcacctcatcggcctgttagtgtggcagtgcgatatcagtgtaagcccggtcgcagctattgtgacagacatcttcaacacctccgacgggggaaggtttaagtttcctgatggagtccagaattggcccgcactttcaatcgtgatcatcataatcatgactattggcggaaacatcttggtcataatggcggtgtctatggagaagaagctgcacaacgctactaactatttcctcatgtccctggccattgctgacatgctggtgggcctcctggtcatgcctctctcacttctggccatcctgtacgattacgtgtggcctttgcccaggtatttgtgccccgtgtggatatccctagacgtgcttttctcaacggctagcatcatgcacctttgcgccattagccttgaccgctacgtggcgatacgcaacccgatcgagcattcccgctttaactcacgcacgaaagcaatcatgaaaatcgccattgtatgggccatctccattggagtttctgtgccgataccagtgattggactgcgcgacgaggaaaaggtgttcgtcaacaataccacatgtgtgttgaatgatcccaatttcgtgctcattggaagctttgttgcctttttcattccactgaccattatggtgattacctactgtctgacaatctacgtcttgcggagacaggccctcatgctgttgcacggccacactgaagagccgcctggactgagtctggactttttgaagtgctgcaagagaaacaccgcagaggaagaaaactcagccaatccaaatcaagaccaaaacgccagacggcgtaagaaaaaagagcggaggcctagggggactatgcaggctataaataacgaaaggaaggcttcaaaggttctgggcatcgtcttttttgtgttcctgataatgtggtgcccattctttataaccaacatactgtcagtcctgtgtgaaaaaagttgtaatcagaagctcatggaaaaactgctcaatgtgtttgtttggatcggatacgtctgtagcggaatcaacccactcgtgtatacgctgttcaacaagatctacaggcgtgccttttccaattacctgcgttgcaactataaggtcgaaaaaaagccgcctgtccgacagattcctagggttgcagctaccgccctgagtggaagggaactcaacgttaatatatacagacacacgaatgaaccagtaatcgaaaaggcttccgacaacgaaccaggtatcgagatgcaggtggaaaacttggaactgcccgtcaaccctagctctgtggtttcggaaaggatctcctctgtgtag

SEQ ID NO: 91403 - DNA, 4751 bp, Artificial Sequence
  derived and/or modified sequence
acccgcgcgaggtaggcgctctggtgcttgcggaggacgcttccttcctcagatgcaccgatcttcccgatactgcctttggagcggctagattgctagccttggctgctccattggcctgccttgccccttacctgccgattgcatatgaactcttcttctgtctgtacatcgttgtcgtcggagtcgtcgcgatcgtcgtggcgctcgtgtgatggccttcgtccgtttagagtagtgtagttagttaggggccaacgaagaagaaagaagacgcgattagtgcagagatgctggaggtggtcagttactaagctagagtaagatagcggagcgaaaagagccaaacctagccggggggcgcacggtcacccaaaggaggtcgactcgccggcgcttcctatcgcgccgagctccctccattcctctccctccgccgaggcgcgaggttgcggcgcgcagcgcagcgcagctcagcgcaccgactgccgcgggctccgctgggcgattgcagccgagtccgtttctcgtctagctgccgccgcggcgaccgctgcctggtcttcctcccggacgctagtgggttatcagctaacacccgcgagcatctataacataggccaactgacgccatccttcaaaaacaactaaaggatgatatgatgaacctagcctgttaatttcgtcttctcaattttaaactttggttgcttaagactgaagcaatcatggtgaacctgaggaatgcggtgcattcattccttgtgcacctaattggcctattggtttggcaatgtgatatttctgtgagcccagtagcagctatagtaactgacattttcaatacctccgatggtggacgcttcaaattcccagacggggtacaaaactggccagcactttcaatcgtcatcataataatcatgacaataggtggcaacatccttgtgatcatggcagtaagcatggaaaagaaactgcacaatgccaccaattacttcttaatgtccctagccattgctgatatgctagtgggactacttgtcatgcccctgtctctcctggcaatcctttatgattatgtctggccactacctagatatttgtgccccgtctggatttctttagatgttttattttcaacagcgtccatcatgcacctctgcgctatatcgctggatcggtatgtagcaatacgtaatcctattgagcatagccgtttcaattcgcggactaaggccatcatgaagattgctattgtttgggcaatttctataggtgtatcagttcctatccctgtgattggactgagggacgaagaaaaggtgttcgtgaacaacacgacgtgcgtgctcaacgacccaaatttcgttcttattgggtccttcgtagctttcttcataccgctgacgattatggtgattacgtattgcctgaccatctacgttctgcgccgacaagctttgatgttactgcacggccacaccgaggaaccgcctggactaagtctggatttcctgaagtgctgcaagaggaatacggccgaggaagagaactctgcaaaccctaaccaagaccagaacgcacgccgaagaaagaagaaggagagacgtcctaggggcaccatgcaggctatcaacaatgaaagaaaagcttcgaaagtccttgggattgttttctttgtgtttctgatcatgtggtgcccatttttcattaccaatattctgtctgttctttgtgagaagtcctgtaaccaaaagctcatggaaaagcttctgaatgtgtttgtttggattggctatgtttgttcaggaatcaatcctctggtgtatactctgttcaacaaaatttaccgaagggcattctccaactatttgcgttgcaattataaggtagagaaaaagcctcctgtcaggcagattccaagagttgccgccactgctttgtctgggagggagcttaatgttaacatttatcggcataccaatgaaccggtgatcgagaaagccagtgacaatgagcccggtatagagatgcaagttgagaatttagagttaccagtaaatccctccagtgtggttagcgaaaggattagcagtgtgtgagaaagaacagcacagtcttttcctacggtacaagctacatatgtaggaaaattttcttctttaatttttctgttggtcttaactaatgtaaatattgctgtctgaaaaagtgtttttacatatagctttgcaaccttgtactttacaatcatgcctacattagtgagatttagggttctatatttactgtttataataggtggagactaacttattttgattgtttgatgaataaaatgtttatttttgctctccctcccttctttccttccttttttcctttcttccttcctttctctctttcttttgtgcatatggcaacgttcatgttcatctcaggtggcatttgcaggtgaccagaatgaggcacatgacagtggttatatttcaaccacacctaaattaacaaattcagtggacatttgttctgggttaacagtaaatatacactttacattcttgctctgctcatctacacatataaacacagtaagataggttctgctttctgatacatctgtcagtgagtcagaggcagaacctagtcttgttgttcatataggggcaaaaatttgacattgtcagaatgttgtgttggtatttactgcaatgtctgtccctaaacatagtggtattttaacatagcagctggttaaccgggactacagaagtggaaggataatgagatgtaatacaccaaatagcttttcacttcttaaggacagtgttcaaattctgattattacaacaagcaaactgaaattagtgttttcattctggtccttagtaaattcctaattctatgattaaactgggaaatgagatcccagagttatttcccaacccaggattcaacatcaattgggttttgatctcagcatcctggaaatttgtgtgcttcacacaaagtgaaattagtattttgagccttattaaaatattttcttaattatggtacctctgtctataggacttaatttagcagtccatttttgagtaaaacttgtattggaagtatagatggtagaaactttggaagttttacttgattaaggactacagaattgggcccttagaatgtgaaaaaaaaaagtaattaaaaagacacttttaccgaactcgggattacagaaacacggagtttccatttggattttaaacaaaatttatgtcattttcagatccttccaaactctctagtgcaggaaaaggctgcagctaatttgtgaaagtggcaagctcttcattgcactgcagttatttaccagaagtttaaatctttgttaaaatatagtgttgtgttacaataagtgttggccatcatttcattcgtgggcctgctgctctctaagaattcagtagcattttaatagtttctaaaccatgaaaagttttcaagcattgctaaagtcaggccattcagtctatgctgtgtgcagagtatacaagtgtttctagtaacagtatttccatacgtgcccatttcacacaactgtggataaattttggaagaattcatgatgctagttcttacgcttgacagttacttacacacctgagaatgtgcctctcagtatcttaaaattggttaatgaaaaatctgaatttctaaaacccttggtctgtgttctcaacacacagtatagataaatccaatagtctgccacaagggcagtggaagagctgctgtatttgaggaaactcatacagtctctatttgatttgcaacactgccaaacatcagtcaattgcttgagcatgcccaaatataacatgaaagtcaagtctacctgccttgcctgttaggtctgttgaagtgcatgttaaaataattatatgaagcagaatgagatgatttaattcttaccgaaatgaaaatggctgaagaaacacagcatgcatttagcatgagttctgcacatacagatggtgtcctgcatgtatgccatgtatgttgcatgaatccatcgatttgtattaatgtagggcagaatagctgatagaagaaggactgaagaaaatccttcagcaatccttaaaaagaccatgcattcagatctgaagtagtgtgagtgttagaaaaaactggaaacatctgatttctgaactatcagggcaagctcatagcacatgttttacaaagaaacaaaatataaatcacagatttccaaaagtactagcaataagttgaatgataatagctcacagcacatttgttaatgattcttgtgtcatcaagtagtagtacttaatagtacccaacctggtaattatcctcaagttgtgtgctattcgtaagttctgtgcagtttggtatgaaacaaatatactcatttggatataaatcttacccttcaatgttaaatctacaaacttttataaatgttttaaagaagtccatgtgataattgtaaaggtgatgaatttaccatcaaacaaatcattttgatgtattattatatatgtatatctgtgtaagacacgtgcaacagactgccttatattattttctgtaattcttctcctttgtcaaatggtattttttgtgaatggttgcaaagtgttgtcttattcctaattcctgtatgttatccactacaggttttatgagacttcctattaatttattaaatttattaaatgttg

SEQ ID NO: 91404 - DNA, 4652 bp, Artificial Sequence
  derived and/or modified sequence
gcgcgaggtaggcgctctggtgcttgcggaggacgcttccttcctcagatgcaccgatcttcccgatactgcctttggagcggctagattgctagccttggctgctccattggcctgccttgccccttacctgccgattgcatatgaactcttcttctgtctgtacatcgttgtcgtcggagtcgtcgcgatcgtcgtggcgctcgtgtgatggccttcgtccgtttagagtagtgtagttagttaggggccaacgaagaagaaagaagacgcgattagtgcagagatgctggaggtggtcagttactaagctagagtaagatagcggagcgaaaagagccaaacctagccggggggcgcacggtcacccaaaggaggtcgactcgccggcgcttcctatcgcgccgagctccctccattcctctccctccgccgaggcgcgaggttgcggcgcgcagcgcagcgcagctcagcgcaccgactgccgcgggctccgctgggcgattgcagccgagtccgtttctcgtctagctgccgccgcggcgaccgctgcctggtcttcctcccggacgctagtgggttatcagctaacacccgcgagcatctataacataggccaactgacgccatccttcaaaaacaactaaaggatgatatgatgaacctagcctgttaatttcgtcttctcaattttaaactttggttgcttaagactgaagcaatcatggtgaacctgaggaatgcggtgcattcattccttgtgcacctaattggcctattggtttggcaatgtgatatttctgtgagcccagtagcagctatagtaactgacattttcaatacctccgatggtggacgcttcaaattcccagacggggtacaaaactggccagcactttcaatcgtcatcataataatcatgacaataggtggcaacatccttgtgatcatggcagtaagcatggaaaagaaactgcacaatgccaccaattacttcttaatgtccctagccattgctgatatgctagtgggactacttgtcatgcccctgtctctcctggcaatcctttatgattatgtctggccactacctagatatttgtgccccgtctggatttctttagatgttttattttcaacagcgtccatcatgcacctctgcgctatatcgctggatcggtgtatcagttcctatccctgtgattggactgagggacgaagaaaaggtgttcgtgaacaacacgacgtgcgtgctcaacgacccaaatttcgttcttattgggtccttcgtagctttcttcataccgctgacgattatggtgattacgtattgcctgaccatctacgttctgcgccgacaagctttgatgttactgcacggccacaccgaggaaccgcctggactaagtctggatttcctgaagtgctgcaagaggaatacggccgaggaagagaactctgcaaaccctaaccaagaccagaacgcacgccgaagaaagaagaaggagagacgtcctaggggcaccatgcaggctatcaacaatgaaagaaaagcttcgaaagtccttgggattgttttctttgtgtttctgatcatgtggtgcccatttttcattaccaatattctgtctgttctttgtgagaagtcctgtaaccaaaagctcatggaaaagcttctgaatgtgtttgtttggattggctatgtttgttcaggaatcaatcctctggtgtatactctgttcaacaaaatttaccgaagggcattctccaactatttgcgttgcaattataaggtagagaaaaagcctcctgtcaggcagattccaagagttgccgccactgctttgtctgggagggagcttaatgttaacatttatcggcataccaatgaaccggtgatcgagaaagccagtgacaatgagcccggtatagagatgcaagttgagaatttagagttaccagtaaatccctccagtgtggttagcgaaaggattagcagtgtgtgagaaagaacagcacagtcttttcctacggtacaagctacatatgtaggaaaattttcttctttaatttttctgttggtcttaactaatgtaaatattgctgtctgaaaaagtgtttttacatatagctttgcaaccttgtactttacaatcatgcctacattagtgagatttagggttctatatttactgtttataataggtggagactaacttattttgattgtttgatgaataaaatgtttatttttgctctccctcccttctttccttccttttttcctttcttccttcctttctctctttcttttgtgcatatggcaacgttcatgttcatctcaggtggcatttgcaggtgaccagaatgaggcacatgacagtggttatatttcaaccacacctaaattaacaaattcagtggacatttgttctgggttaacagtaaatatacactttacattcttgctctgctcatctacacatataaacacagtaagataggttctgctttctgatacatctgtcagtgagtcagaggcagaacctagtcttgttgttcatataggggcaaaaatttgacattgtcagaatgttgtgttggtatttactgcaatgtctgtccctaaacatagtggtattttaacatagcagctggttaaccgggactacagaagtggaaggataatgagatgtaatacaccaaatagcttttcacttcttaaggacagtgttcaaattctgattattacaacaagcaaactgaaattagtgttttcattctggtccttagtaaattcctaattctatgattaaactgggaaatgagatcccagagttatttcccaacccaggattcaacatcaattgggttttgatctcagcatcctggaaatttgtgtgcttcacacaaagtgaaattagtattttgagccttattaaaatattttcttaattatggtacctctgtctataggacttaatttagcagtccatttttgagtaaaacttgtattggaagtatagatggtagaaactttggaagttttacttgattaaggactacagaattgggcccttagaatgtgaaaaaaaaaagtaattaaaaagacacttttaccgaactcgggattacagaaacacggagtttccatttggattttaaacaaaatttatgtcattttcagatccttccaaactctctagtgcaggaaaaggctgcagctaatttgtgaaagtggcaagctcttcattgcactgcagttatttaccagaagtttaaatctttgttaaaatatagtgttgtgttacaataagtgttggccatcatttcattcgtgggcctgctgctctctaagaattcagtagcattttaatagtttctaaaccatgaaaagttttcaagcattgctaaagtcaggccattcagtctatgctgtgtgcagagtatacaagtgtttctagtaacagtatttccatacgtgcccatttcacacaactgtggataaattttggaagaattcatgatgctagttcttacgcttgacagttacttacacacctgagaatgtgcctctcagtatcttaaaattggttaatgaaaaatctgaatttctaaaacccttggtctgtgttctcaacacacagtatagataaatccaatagtctgccacaagggcagtggaagagctgctgtatttgaggaaactcatacagtctctatttgatttgcaacactgccaaacatcagtcaattgcttgagcatgcccaaatataacatgaaagtcaagtctacctgccttgcctgttaggtctgttgaagtgcatgttaaaataattatatgaagcagaatgagatgatttaattcttaccgaaatgaaaatggctgaagaaacacagcatgcatttagcatgagttctgcacatacagatggtgtcctgcatgtatgccatgtatgttgcatgaatccatcgatttgtattaatgtagggcagaatagctgatagaagaaggactgaagaaaatccttcagcaatccttaaaaagaccatgcattcagatctgaagtagtgtgagtgttagaaaaaactggaaacatctgatttctgaactatcagggcaagctcatagcacatgttttacaaagaaacaaaatataaatcacagatttccaaaagtactagcaataagttgaatgataatagctcacagcacatttgttaatgattcttgtgtcatcaagtagtagtacttaatagtacccaacctggtaattatcctcaagttgtgtgctattcgtaagttctgtgcagtttggtatgaaacaaatatactcatttggatataaatcttacccttcaatgttaaatctacaaacttttataaatgttttaaagaagtccatgtgataattgtaaaggtgatgaatttaccatcaaacaaatcattttgatgtattattatatatgtatatctgtgtaagacacgtgcaacagactgccttatattattttctgtaattcttctcctttgtcaaatggtattttttgtgaatggttgcaaagtgttgtcttattcctaattcctgtatgttatccactacaggttttatgagacttcctattaatttattaaatttattaaatgttg

SEQ ID NO: 91405 - DNA, 3288 bp, Artificial Sequence
  derived and/or modified sequence
acccgcgcgaggtaggcgctctggtgcttgcggaggacgcttccttcctcagatgcaccgatcttcccgatactgcctttggagcggctagattgctagccttggctgctccattggcctgccttgccccttacctgccgattgcatatgaactcttcttctgtctgtacatcgttgtcgtcggagtcgtcgcgatcgtcgtggcgctcgtgtgatggccttcgtccgtttagagtagtgtagttagttaggggccaacgaagaagaaagaagacgcgattagtgcagagatgctggaggtggtcagttactaagctagagtaagatagcggagcgaaaagagccaaacctagccggggggcgcacggtcacccaaaggaggtcgactcgccggcgcttcctatcgcgccgagctccctccattcctctccctccgccgaggcgcgaggttgcggcgcgcagcgcagcgcagctcagcgcaccgactgccgcgggctccgctgggcgattgcagccgagtccgtttctcgtctagctgccgccgcggcgaccgctgcctggtcttcctcccggacgctagtgggttatcagctaacacccgcgagcatctataacataggccaactgacgccatccttcaaaaacaactgtctgggaaaaaaagaataaaaagtagtgtgagagcagaaaacgtgattgaaacacgaccaatctttcttcagtgccaaagggtggaaaagaaaggatgatatgatgaacctagcctgttaatttcgtcttctcaattttaaactttggttgcttaagactgaagcaatcatggtgaacctgaggaatgcggtgcattcattccttgtgcacctaattggcctattggtttggcaatgtgatatttctgtgagcccagtagcagctatagtaactgacattttcaatacctccgatggtggacgcttcaaattcccagacggggtacaaaactggccagcactttcaatcgtcatcataataatcatgacaataggtggcaacatccttgtgatcatggcagtaagcatggaaaagaaactgcacaatgccaccaattacttcttaatgtccctagccattgctgatatgctagtgggactacttgtcatgcccctgtctctcctggcaatcctttatgattatgtctggccactacctagatatttgtgccccgtctggatttctttagatgttttattttcaacagcgtccatcatgcacctctgcgctatatcgctggatcggtatgtagcaatacgtaatcctattgagcatagccgtttcaattcgcggactaaggccatcatgaagattgctattgtttgggcaatttctataggtgtatcagttcctatccctgtgattggactgagggacgaagaaaaggtgttcgtgaacaacacgacgtgcgtgctcaacgacccaaatttcgttcttattgggtccttcgtagctttcttcataccgctgacgattatggtgattacgtattgcctgaccatctacgttctgcgccgacaagctttgatgttactgcacggccacaccgaggaaccgcctggactaagtctggatttcctgaagtgctgcaagaggaatacggccgaggaagagaactctgcaaaccctaaccaagaccagaacgcacgccgaagaaagaagaaggagagacgtcctaggggcaccatgcaggctatcaacaatgaaagaaaagcttcgaaagtccttgggattgttttctttgtgtttctgatcatgtggtgcccatttttcattaccaatattctgtctgttctttgtgagaagtcctgtaaccaaaagctcatggaaaagcttctgaatgtgtttgtttggattggctatgtttgttcaggaatcaatcctctggtgtatactctgttcaacaaaatttaccgaagggcattctccaactatttgcgttgcaattataaggtagagaaaaagcctcctgtcaggcagattccaagagttgccgccactgctttgtctgggagggagcttaatgttaacatttatcggcataccaatgaaccggtgatcgagaaagccagtgacaatgagcccggtatagagatgcaagttgagaatttagagttaccagtaaatccctccagtgtggttagcgaaaggattagcagtgtgtgagaaagaacagcacagtcttttcctacggtacaagctacatatgtaggaaaattttcttctttaatttttctgttggtcttaactaatgtaaatattgctgtctgaaaaagtgtttttacatatagctttgcaaccttgtactttacaatcatgcctacattagtgagatttagggttctatatttactgtttataataggtggagactaacttattttgattgtttgatgaataaaatgtttatttttgctctccctcccttctttccttccttttttcctttcttccttcctttctctctttcttttgtgcatatggcaacgttcatgttcatctcaggtggcatttgcaggtgaccagaatgaggcacatgacagtggttatatttcaaccacacctaaattaacaaattcagtggacatttgttctgggttaacagtaaatatacactttacattcttgctctgctcatctacacatataaacacagtaagataggttctgctttctgatacatctgtcagtgagtcagaggcagaacctagtcttgttgttcatataggggcaaaaatttgacattgtcagaatgttgtgttggtatttactgcaatgtctgtccctaaacatagtggtattttaacatagcagctggttaaccgggactacagaagtggaaggataatgagatgtaatacaccaaatagcttttcacttcttaaggacagtgttcaaattctgattattacaacaagcaaactgaaattagtgttttcattctggtccttagtaaattcctaattctatgattaaactgggaaatgagatcccagagttatttcccaacccaggattcaacatcaattgggttttgatctcagcatcctggaaatttgtgtgcttcacacaaagtgaaattagtattttgagccttattaaaatattttcttaattatggtacctctgtctataggacttaatttagcagtccatttttgagtaaaacttgtattggaagtatagatggtagaaactttggaagttttacttgattaaggactacagaattgggcccttagaatgtgaaaaaaaaaa

SEQ ID NO: 91406 - DNA, 1377 bp, Artificial Sequence
  derived and/or modified sequence
atggtgaacctgagaaacgccgtgcacagcttcctggtgcacctgatcggcctgctggtgtggcagtgcgacatcagcgtgagccccgtggccgccatcgtgaccgacatcttcaacaccagcgacggcggcagattcaagttccccgacggcgtgcagaactggcccgccctgagcatcgtgatcatcatcatcatgaccatcggcggcaacatcctggtgatcatggccgtgagcatggagaagaagctgcacaacgccaccaactacttcctgatgagcctggccatcgccgacatgctggtgggcctgctggtgatgcccctgagcctgctggccatcctgtacgactacgtgtggcccctgcccagatacctgtgccccgtgtggatcagcctggacgtgctgttcagcaccgccagcatcatgcacctgtgcgccatcagcctggacagatacgtggccatcagaaaccccatcgagcacagcagattcaacagcagaaccaaggccatcatgaagatcgccatcgtgtgggccatcagcatcggcgtgagcgtgcccatccccgtgatcggcctgagagacgaggagaaggtgttcgtgaacaacaccacctgcgtgctgaacgaccccaacttcgtgctgatcggcagcttcgtggccttcttcatccccctgaccatcatggtgatcacctactgcctgaccatctacgtgctgagaagacaggccctgatgctgctgcacggccacaccgaggagccccccggcctgagcctggacttcctgaagtgctgcaagagaaacaccgccgaggaggagaacagcgccaaccccaaccaggaccagaacgccagaagaagaaagaagaaggagagaagacccagaggcaccatgcaggccatcaacaacgagagaaaggccagcaaggtgctgggcatcgtgttcttcgtgttcctgatcatgtggtgccccttcttcatcaccaacatcctgagcgtgctgtgcgagaagagctgcaaccagaagctgatggagaagctgctgaacgtgttcgtgtggatcggctacgtgtgcagcggcatcaaccccctggtgtacaccctgttcaacaagatctacagaagagccttcagcaactacctgagatgcaactacaaggtggagaagaagccccccgtgagacagatccccagagtggccgccaccgccctgagcggcagagagctgaacgtgaacatctacagacacaccaacgagcccgtgatcgagaaggccagcgacaacgagcccggcatcgagatgcaggtggagaacctggagctgcccgtgaaccccagcagcgtggtgagcgagagaatcagcagcgtgtag

SEQ ID NO: 91407 - protein, 248 aa, Artificial Sequence
  derived and/or modified sequence
MVNLRNAVHSFLVHLIGLLVWQCDISVSPVAAIVTDIFNTSDGGRFKFPDGVQNWPALSIVIIIIMTIGGNILVIMAVSMEKKLHNATNYFLMSLAIADMLVGLLVMPLSLLAILYDYVWPLPRYLCPVWISLDVLFSTASIMHLCAISLDRCISSYPCDWTEGRRKGVREQHDVRAQRPKFRSYWVLRSFLHTADDYGDYVLPDHLRSAPTSFDVTARPHRGTAWTKSGFPEVLQEEYGRGRELCKP

SEQ ID NO: 91408 - DNA, 747 bp, Artificial Sequence
  derived and/or modified sequence
atggtgaaccttaggaacgccgtgcattcattcctggtccaccttattggtctgctggtttggcagtgcgacatatcagtttcgccagtggccgccatcgttacagacattttcaacacatctgacgggggaaggtttaaattcccggatggcgtgcaaaactggccagctctttctatagtgattatcatcattatgactatcggcgggaatatactggttatcatggcagtcagcatggagaaaaaactccataatgccactaactactttttaatgtcccttgccatcgcagacatgctggtggggctcctggtgatgcccctaagcctactggcgatcctctacgactatgtgtggccactgccgagatatctgtgtcccgtatggatctcactggacgtgttgttctctaccgcgagcattatgcacctatgcgccatcagtttggataggtgtatctcctcatacccgtgtgattggacagaaggcaggcgtaagggcgttcgggagcagcacgacgtccgagcccaacgtcccaagttccggtcctattgggtgctgcgctccttcctacacaccgcagatgactacggagactatgtgctcccggatcacctgcggagtgctccaacgtctttcgacgtcacagcgcggccacacaggggaactgcgtggaccaagagtggattccctgaggttctgcaggaagaatacgggcgaggcagggaattatgtaagccctag

SEQ ID NO: 91409 - DNA, 747 bp, Artificial Sequence
  derived and/or modified sequence
atggtgaacctgagaaatgctgtgcacagcttcctggtgcacctgattggcctgctggtgtggcagtgtgacatctctgtgtcccctgtggccgccatcgtgacagacatcttcaacaccagtgatggcggccgcttcaagttcccagatggagtgcagaactggccagccctgagcatcgtcatcatcatcatcatgaccatcggcggcaacatcctggtgatcatggctgtgtccatggagaagaagctgcacaatgccaccaactacttcctgatgagcctggccatcgctgacatgctggtgggcctgctggtgatgcccctgagcctgctggccatcctgtatgactatgtgtggcccctgccccgctacctgtgccctgtgtggatcagcctggatgtgctcttcagcacagccagcatcatgcacctgtgtgccatcagcctggaccgctgcatcagcagctacccctgtgactggacagagggcagaagaaaaggagtgcgggagcagcatgatgtgcgggcccagaggcccaagttccgcagctactgggtgctgcggagcttcctgcacacagcagatgattatggagactatgtgctgcctgaccacctgcggagcgcccccaccagctttgatgtgacagcccggccccaccggggcacagcctggaccaagagcggcttccctgaggtgctgcaggaggagtatggccggggccgggagctgtgcaagccctag

SEQ ID NO: 91410 - DNA, 747 bp, Artificial Sequence
  derived and/or modified sequence
atggtgaacctgcggaacgccgtgcacagcttcctggtgcacctgatcgggctgctggtatggcagtgtgatatctccgtctcacccgttgccgcgatcgtcacagatatcttcaatacatccgacgggggtaggttcaaatttccggacggggtgcaaaattggccagcattatccatagttataatcataattatgaccataggaggaaatatattggtcattatggcggtgtcgatggaaaagaagctccacaacgctactaactatttcctcatgtcacttgcaatcgccgacatgctagtgggacttctggtgatgccactgtccctcttggccatcctctatgattatgtgtggccattgccaaggtacctttgtcctgtttggatttctttggacgtgctattctcaaccgccagtatcatgcacttgtgcgcaattagcttggaccgctgcattagctcctatccctgcgattggaccgaagggcgacgcaagggcgttcgcgagcaacacgatgtgagggcgcagcgcccaaaattccgctcctattgggtcctgcgctcttttctgcacactgctgacgactatggcgattacgtcctgccagaccatctcaggtcggctcctacctcctttgatgtgacagccagaccccaccggggcaccgcttggaccaagagcggcttcccggaagtcctccaggaagaatatggacgaggtcgggagttgtgcaagccgtag

SEQ ID NO: 91411 - DNA, 747 bp, Artificial Sequence
  derived and/or modified sequence
atggttaaccttcgcaatgccgtgcattcattcctggtacatctgatagggttgctggtctggcagtgcgacatctccgtctctcccgttgccgcaatagtgactgacattttcaatacaagtgacggcggtcgttttaagtttcctgacggtgtgcaaaactggccagccctgagcattgtcatcattattatcatgaccataggaggtaacattcttgttatcatggcagtttctatggagaaaaaactccacaacgcaactaattacttccttatgtccctcgcgattgccgacatgcttgttggtctgcttgtgatgccactgtccctgttagcaatactgtacgactacgtgtggccactgccaaggtatctctgcccagtttggataagcctggacgtgctcttctccaccgcaagcattatgcatttgtgtgcgatttccctggatcgttgcattagctcgtatccatgtgattggactgagggcaggagaaagggagttagagaacagcacgacgtgagggcccagcgccctaaatttaggtcgtattgggtccttagatccttcctgcatacggcggacgactacggcgattacgtcctccctgaccacctgagaagcgctcctacttcatttgacgtgacagctcgtccccataggggtacagcatggaccaagagcgggttccctgaagtacttcaggaagaatatggaagaggacgagagctctgcaaaccctag

SEQ ID NO: 91412 - DNA, 747 bp, Artificial Sequence
  derived and/or modified sequence
atggtgaacctgagaaacgccgtgcacagcttcctggtgcacctgatcggcctgctggtgtggcagtgcgacatcagcgtgagccccgtggccgccatcgtgaccgacatcttcaacaccagcgacggcggcagattcaagttccccgacggcgtgcagaactggcccgccctgagcatcgtgatcatcatcatcatgaccatcggcggcaacatcctggtgatcatggccgtgagcatggagaagaagctgcacaacgccaccaactacttcctgatgagcctggccatcgccgacatgctggtgggcctgctggtgatgcccctgagcctgctggccatcctgtacgactacgtgtggcccctgcccagatacctgtgccccgtgtggatcagcctggacgtgctgttcagcaccgccagcatcatgcacctgtgcgccatcagcctggacagatgcatcagcagctacccctgcgactggaccgagggcagaagaaagggcgtgagagagcagcacgacgtgagagcccagagacccaagttcagaagctactgggtgctgagaagcttcctgcacaccgccgacgactacggcgactacgtgctgcccgaccacctgagaagcgcccccaccagcttcgacgtgaccgccagaccccacagaggcaccgcctggaccaagagcggcttccccgaggtgctgcaggaggagtacggcagaggcagagagctgtgcaagccctag

SEQ ID NO: 91413 - protein, 324 aa, Artificial Sequence
  derived and/or modified sequence
MGNLLKVLTCTDLEQGPNFFLDFENAQPTESEKEIYNQVNVVLKDAEGILEDLQSYRGAGHEIREAIQHPADEKLQEKAWGAVVPLVGKLKKFYEFSQRLEAALRGLLGALTSTPYSPTQHLEREQALAKQFAEILHFTLRFDELKMTNPAIQNDFSYYRRTLSRMRINNVPAEGENEVNNELANRMSLFYAEATPMLKTLSDATTKFVSENKNLPIENTTDCLSTMASVCRVMLETPEYRSRFTNEETVSFCLRVMVGVIILYDHVHPVGAFAKTSKIDMKGCIKVLKDQPPNSVEGLLNALRYTTKHLNDETTSKQIKSMLQ

SEQ ID NO: 91414 - protein, 63 aa, Artificial Sequence
  derived and/or modified sequence
MGNLLKVLTCTDLEQGPNFFLDFENAQPTESEKEIYNQVNVVLKDAEGILEDLQSYRGAGHEI

SEQ ID NO: 91415 - protein, 65 aa, Artificial Sequence
  derived and/or modified sequence
MGNLLKVLTCTDLEQGPNFFLDFENAQPTESEKEIYNQVNVVLKDAEGILEDLQSYRGAGHEIRE

SEQ ID NO: 91416 - protein, 98 aa, Artificial Sequence
  derived and/or modified sequence
MGNLLKVLTCTDLEQGPNFFLDFENAQPTESEKEIYNQVNVVLKDAEGILEDLQSYRGAGHEIREAIQHPADEKLQEKAWGAVVPLVGKLKKFYEFSQ

SEQ ID NO: 91417 - protein, 68 aa, Artificial Sequence
  derived and/or modified sequence
MGNLLKVLTCTDLEQGPNFFLDFENAQPTESEKEIYNQVNVVLKDAEGILEDLQSYRGAGHEIREAIQ

SEQ ID NO: 91418 - protein, 48 aa, Artificial Sequence
  derived and/or modified sequence
MGNLLKVLTCTDLEQGPNFFLDFENAQPTESEKEIYNQVNVVLKDAEG

SEQ ID NO: 91419 - protein, 155 aa, Artificial Sequence
  derived and/or modified sequence
MGNLLKVLTCTDLEQGPNFFLDFENAQPTESEKEIYNQVNVVLKDAEGILEDLQSYRGAGHEIREAIQHPADEKLQEKAWGAVVPLVGKLKKFYEFSQRLEAALRGLLGALTSTPYSPTQHLEREQALAKQFAEILHFTLRFDELKVELSIGPDC

SEQ ID NO: 91420 - protein, 100 aa, Artificial Sequence
  derived and/or modified sequence
MGNLLKVLTCTDLEQGPNFFLDFENAQPTESEKEIYNQVNVVLKDAEGILEDLQSYRGAGHEIREAIQHPADEKLQEKAWGAVVPLVGKLKKFYEFSQRL

SEQ ID NO: 91421 - protein, 79 aa, Artificial Sequence
  derived and/or modified sequence
MGNLLKVLTCTDLEQGPNFFLDFENAQPTESEKEIYNQVNVVLKDAEGILEDLQSYRGAGHEIREAIQHPADEKLQEKA

SEQ ID NO: 91422 - protein, 46 aa, Artificial Sequence
  derived and/or modified sequence
MGNLLKVLTCTDLEQGPNFFLDFENAQPTESEKEIYNQVNVVLKDA

SEQ ID NO: 91423 - protein, 93 aa, Artificial Sequence
  derived and/or modified sequence
MGNLLKVLTCTDLEQGPNFFLDFENAQPTESEKEIYNQVNVVLKDAEGILEDLQSYRGAGHEIREAIQHPADEKLQEKAWGAVVPLVGKLKKF

SEQ ID NO: 91424 - DNA, 654 bp, Artificial Sequence
  derived and/or modified sequence
atgcagaaggccagctggagaacctgcagccacaccgaggagctggccaccaagtacgagagagccatccagcaccccgccgacgagaagctgcaggagaaggcctggggcgccgtggtgcccctggtgggcaaggagatcctgagaatcttcagcgaggtgagaagcagcatcaagagaagcagcggcagcctgaacaagtaccccatcttcagccaccccgccagcagagccagacaggccctggccaagcagttcgccgagatcctgcacttcaccctgagattcgacgagctgaagatgaccaaccccgccatccagaacgacttcagctactacagaagaaccctgagcagaatgagaatcaccatgtacagagccgagggcgagaacgaggtgaacaacgagctggccaacagaatgagcctgttctacgccgaggccacccccatgctgaagaccctgagcgacgccaccaccaagttcgtgagcgagaacaagaacctgcccatcgagaacaccaccgactgcctgagcaccatggccagcgtgtgcagagtgatgctggagacccccgagtacagaagcagattcaccaacgaggagaccgtgagcttcctggagggcaacggcggctgccacaacaccctgtag

SEQ ID NO: 91425 - DNA, 975 bp, Artificial Sequence
  derived and/or modified sequence
atgggcaacctgctgaaggtgctgacctgcaccgacctggagcagggccccaacttcttcctggacttcgagaacgcccagcccaccgagagcgagaaggagatctacaaccaggtgaacgtggtgctgaaggacgccgagggcatcctggaggacctgcagagctacagaggcgccggccacgagatcagagaggccatccagcaccccgccgacgagaagctgcaggagaaggcctggggcgccgtggtgcccctggtgggcaagctgaagaagttctacgagttcagccagagactggaggccgccctgagaggcctgctgggcgccctgaccagcaccccctacagccccacccagcacctggagagagagcaggccctggccaagcagttcgccgagatcctgcacttcaccctgagattcgacgagctgaagatgaccaaccccgccatccagaacgacttcagctactacagaagaaccctgagcagaatgagaatcaacaacgtgcccgccgagggcgagaacgaggtgaacaacgagctggccaacagaatgagcctgttctacgccgaggccacccccatgctgaagaccctgagcgacgccaccaccaagttcgtgagcgagaacaagaacctgcccatcgagaacaccaccgactgcctgagcaccatggccagcgtgtgcagagtgatgctggagacccccgagtacagaagcagattcaccaacgaggagaccgtgagcttctgcctgagagtgatggtgggcgtgatcatcctgtacgaccacgtgcaccccgtgggcgccttcgccaagaccagcaagatcgacatgaagggctgcatcaaggtgctgaaggaccagccccccaacagcgtggagggcctgctgaacgccctgagatacaccaccaagcacctgaacgacgagaccaccagcaagcagatcaagagcatgctgcagtag

SEQ ID NO: 91426 - DNA, 192 bp, Artificial Sequence
  derived and/or modified sequence
atgggcaacctgctgaaggtgctgacctgcaccgacctggagcagggccccaacttcttcctggacttcgagaacgcccagcccaccgagagcgagaaggagatctacaaccaggtgaacgtggtgctgaaggacgccgagggcatcctggaggacctgcagagctacagaggcgccggccacgagatctag

SEQ ID NO: 91427 - DNA, 198 bp, Artificial Sequence
  derived and/or modified sequence
atgggcaacctgctgaaggtgctgacctgcaccgacctggagcagggccccaacttcttcctggacttcgagaacgcccagcccaccgagagcgagaaggagatctacaaccaggtgaacgtggtgctgaaggacgccgagggcatcctggaggacctgcagagctacagaggcgccggccacgagatcagagagtag

SEQ ID NO: 91428 - DNA, 297 bp, Artificial Sequence
  derived and/or modified sequence
atgggcaacctgctgaaggtgctgacctgcaccgacctggagcagggccccaacttcttcctggacttcgagaacgcccagcccaccgagagcgagaaggagatctacaaccaggtgaacgtggtgctgaaggacgccgagggcatcctggaggacctgcagagctacagaggcgccggccacgagatcagagaggccatccagcaccccgccgacgagaagctgcaggagaaggcctggggcgccgtggtgcccctggtgggcaagctgaagaagttctacgagttcagccagtag

SEQ ID NO: 91429 - DNA, 207 bp, Artificial Sequence
  derived and/or modified sequence
atgggcaacctgctgaaggtgctgacctgcaccgacctggagcagggccccaacttcttcctggacttcgagaacgcccagcccaccgagagcgagaaggagatctacaaccaggtgaacgtggtgctgaaggacgccgagggcatcctggaggacctgcagagctacagaggcgccggccacgagatcagagaggccatccagtag

SEQ ID NO: 91430 - DNA, 147 bp, Artificial Sequence
  derived and/or modified sequence
atgggcaacctgctgaaggtgctgacctgcaccgacctggagcagggccccaacttcttcctggacttcgagaacgcccagcccaccgagagcgagaaggagatctacaaccaggtgaacgtggtgctgaaggacgccgagggctag

SEQ ID NO: 91431 - DNA, 468 bp, Artificial Sequence
  derived and/or modified sequence
atgggcaacctgctgaaggtgctgacctgcaccgacctggagcagggccccaacttcttcctggacttcgagaacgcccagcccaccgagagcgagaaggagatctacaaccaggtgaacgtggtgctgaaggacgccgagggcatcctggaggacctgcagagctacagaggcgccggccacgagatcagagaggccatccagcaccccgccgacgagaagctgcaggagaaggcctggggcgccgtggtgcccctggtgggcaagctgaagaagttctacgagttcagccagagactggaggccgccctgagaggcctgctgggcgccctgaccagcaccccctacagccccacccagcacctggagagagagcaggccctggccaagcagttcgccgagatcctgcacttcaccctgagattcgacgagctgaaggtggagctgagcatcggccccgactgctag

SEQ ID NO: 91432 - DNA, 303 bp, Artificial Sequence
  derived and/or modified sequence
atgggcaacctgctgaaggtgctgacctgcaccgacctggagcagggccccaacttcttcctggacttcgagaacgcccagcccaccgagagcgagaaggagatctacaaccaggtgaacgtggtgctgaaggacgccgagggcatcctggaggacctgcagagctacagaggcgccggccacgagatcagagaggccatccagcaccccgccgacgagaagctgcaggagaaggcctggggcgccgtggtgcccctggtgggcaagctgaagaagttctacgagttcagccagagactgtag

SEQ ID NO: 91433 - DNA, 240 bp, Artificial Sequence
  derived and/or modified sequence
atgggcaacctgctgaaggtgctgacctgcaccgacctggagcagggccccaacttcttcctggacttcgagaacgcccagcccaccgagagcgagaaggagatctacaaccaggtgaacgtggtgctgaaggacgccgagggcatcctggaggacctgcagagctacagaggcgccggccacgagatcagagaggccatccagcaccccgccgacgagaagctgcaggagaaggcctag

SEQ ID NO: 91434 - DNA, 141 bp, Artificial Sequence
  derived and/or modified sequence
atgggcaacctgctgaaggtgctgacctgcaccgacctggagcagggccccaacttcttcctggacttcgagaacgcccagcccaccgagagcgagaaggagatctacaaccaggtgaacgtggtgctgaaggacgcctag

SEQ ID NO: 91435 - DNA, 282 bp, Artificial Sequence
  derived and/or modified sequence
atgggcaacctgctgaaggtgctgacctgcaccgacctggagcagggccccaacttcttcctggacttcgagaacgcccagcccaccgagagcgagaaggagatctacaaccaggtgaacgtggtgctgaaggacgccgagggcatcctggaggacctgcagagctacagaggcgccggccacgagatcagagaggccatccagcaccccgccgacgagaagctgcaggagaaggcctggggcgccgtggtgcccctggtgggcaagctgaagaagttctag

SEQ ID NO: 91436 - DNA, 654 bp, Artificial Sequence
  derived and/or modified sequence
atgcagaaggctagctggagaacttgttctcataccgaggagctggcaaccaaatatgagcgcgcaatccagcatcccgcagacgagaagcttcaagaaaaagcctggggtgcagtcgtcccactggtgggcaaggaaattctgcgaatttttagcgaagtaaggtcttcgatcaagcgatcgtctggcagcctcaataagtatcctattttcagtcaccccgcaagccgcgctcgccaggctctggcaaagcagttcgccgaaatcctgcatttcacacttagattcgatgaattaaaaatgaccaaccccgctattcaaaatgatttcagctactaccgccggactctttcgcggatgagaattaccatgtaccgagctgaaggagaaaacgaggtgaataatgaacttgccaacaggatgtctctcttttatgctgaagccaccccaatgcttaagaccttgtccgacgctacgaccaagttcgtctctgaaaacaagaacttgccaatcgagaacacaaccgactgcctctcaaccatggccagcgtttgccgcgtcatgctagaaaccccagagtaccggtcacgcttcacaaatgaagagacagtcagtttcctcgaaggaaacggggggtgtcacaataccttgtag

SEQ ID NO: 91437 - DNA, 975 bp, Artificial Sequence
  derived and/or modified sequence
atgggaaatcttttgaaagtcctgacctgtacagaccttgagcaaggccccaacttctttcttgactttgaaaacgcacagcctaccgaaagcgagaaagagatttacaatcaggtcaacgtcgtgttgaaagacgccgagggcattctggaggacctgcaatcttatcggggtgcgggacatgagatccgtgaggccatccaacatcccgcggacgagaaactgcaggagaaggcatggggcgccgttgtgccactggtcggaaagctgaagaagttctacgaattctctcagcgcttggaggctgccctgcgaggactgcttggagcactgactagtacaccttacagccccactcagcacctggaacgcgagcaagcactggcgaagcagtttgcagaaattctccatttcactcttagatttgacgagcttaagatgactaaccccgccatccaaaacgattttagttactaccggcggaccctgtccagaatgcggatcaacaatgtaccagccgagggagaaaatgaagttaacaatgagctggctaatcgaatgtctttattttacgctgaggccacgccaatgctaaagaccctgagcgacgctaccaccaagttcgtttcagaaaacaagaaccttcctattgaaaatacaacagactgcttgtccaccatggctagcgtgtgtagggtgatgttggagacaccggagtaccgctctagatttacaaacgaggagacagtgtcattctgcttgagggtcatggtgggcgtcatcatactgtatgatcacgtccacccagtgggggcgttcgccaaaacatctaagatagatatgaaaggctgcattaaagtactcaaagatcagccccccaactcagtggaaggcctcctaaacgctctccgctataccaccaaacacttgaacgacgagacaacatccaagcaaatcaaaagcatgctacagtag

SEQ ID NO: 91438 - DNA, 975 bp, Artificial Sequence
  derived and/or modified sequence
atgggaaacctgctcaaggtgctcacctgtacggatctggagcagggcccgaactttttcctggatttcgagaatgctcaacccacagaatcagagaaggagatttacaaccaggtgaatgtggtgctcaaagacgcggagggcatcctggaggacctacagtcgtatcggggagcaggtcatgaaatcagagaggcaatccagcacccagccgacgaaaagctccaggaaaaggcttggggtgccgtagttcccctggtggggaaactcaagaagttctatgaattcagtcagcgcctggaggcagcattaaggggacttcttggcgctctgacatccacaccttattcgccaacccaacacctcgaacgcgagcaggcgctcgccaaacagtttgcggagatccttcacttcaccttgagattcgatgagctgaaaatgacaaaccccgctattcaaaatgacttttcttactataggaggacattgtcccgtatgcgcataaacaatgtgcctgcagagggagagaacgaagtaaataacgaacttgcgaacagaatgtccctattctacgcagaggccaccccgatgctcaaaactctgtccgacgctacgaccaagtttgtatccgagaataaaaaccttcctatcgagaatacaacagactgtttgagcacgatggccagcgtctgtcgtgtgatgctggagacgccagagtatcgcagcaggtttacaaatgaggaaacagtaagcttttgtctaagagttatggtgggcgtgatcattctttatgatcatgtccacccagtcggggcatttgctaagacatcaaaaatcgacatgaagggttgcattaaagtgttgaaggaccagccacccaattcagtggaaggactccttaacgctctaaggtatacaaccaagcatttgaacgatgaaaccactagcaaacaaatcaagtcaatgctgcagtag

SEQ ID NO: 91439 - DNA, 192 bp, Artificial Sequence
  derived and/or modified sequence
atgggaaatctccttaaggtcctaacatgcactgatctcgagcagggaccgaacttctttcttgacttcgagaatgcccagcccactgagagtgaaaaggagatctacaatcaggtgaatgttgtccttaaggatgctgagggtattcttgaggatcttcagtcatacagaggcgccggccatgagatatag

SEQ ID NO: 91440 - DNA, 198 bp, Artificial Sequence
  derived and/or modified sequence
atggggaacttgctcaaagttctcacctgtaccgacctggagcaggggcccaacttcttcttggatttcgaaaatgcccagcccacagaatccgagaaagaaatctacaaccaggtcaatgtggtgctgaaggatgccgagggcattctagaggatctgcagtcctatcggggtgctggacatgaaatcagggaatag

SEQ ID NO: 91441 - DNA, 297 bp, Artificial Sequence
  derived and/or modified sequence
atggggaacttgttgaaagtactaacctgtaccgatctggagcaggggcccaacttttttctcgacttcgagaatgcccaacctacagaaagcgagaaagaaatatataatcaggtgaacgttgttctgaaagatgccgagggaatcctcgaggacctccagtcatatagaggagcaggacacgaaatacgtgaggcaattcagcatcctgctgacgagaaattgcaagagaaagcctggggggccgtggtgcccctcgtaggcaagttgaagaaattctacgagttcagccagtag

SEQ ID NO: 91442 - DNA, 207 bp, Artificial Sequence
  derived and/or modified sequence
atgggtaatttacttaaagtgctcacatgcaccgatttagagcaagggccgaattttttcctggactttgagaatgcacagcctacagaatctgagaaagagatctataatcaggtcaacgttgtgctgaaagacgctgagggcatcttagaggacttacagagttaccggggcgccgggcatgaaatacgggaagcaatccagtag

SEQ ID NO: 91443 - DNA, 147 bp, Artificial Sequence
  derived and/or modified sequence
atgggaaatctgctcaaagtgctgacttgtacagatctcgagcagggaccaaatttttttcttgacttcgagaacgcccagccaaccgagtcagagaaagagatctataatcaagttaacgtggtcctcaaggatgctgaaggatag

SEQ ID NO: 91444 - DNA, 975 bp, Artificial Sequence
  derived and/or modified sequence
atggggaacctgttgaaagtcttgacctgcactgacctggagcagggcccaaatttctttctggatttcgagaacgcccagcccacagaatccgagaaggagatttacaatcaggtgaatgtcgtcctgaaagatgccgaaggcatactcgaggatttacagagctaccggggtgctggtcatgagatcagggaagccatccagcacccagccgatgaaaaactacaggagaaagcttggggtgccgtagttccactcgtgggaaagctcaagaaattctatgagttcagccagcggctagaggctgctctgagaggactgttaggagcactcacctctactccatactcccccacacagcacctcgagagagaacaagcgttggctaagcagtttgccgagatccttcattttacactacgattcgatgaattaaaaatgactaaccccgccatccagaatgacttctcctactataggcgtactctcagccgcatgcgcataaacaatgttcccgcagagggagagaacgaggtaaacaacgagttagcaaataggatgtccttattttacgcggaagccaccccaatgttaaaaaccttatcagatgccaccaccaaatttgtttcagagaataaaaacttgccaattgaaaacacaactgattgcctgagtactatggccagcgtatgccgcgtaatgttggagacacccgaatataggagccgcttcaccaatgaggaaactgttagcttttgtctgcgggtaatggtaggcgtgatcatcctgtacgaccacgtacacccagtgggggcgttcgctaaaacctctaaaattgatatgaagggctgcataaaagttctgaaggaccagccaccaaattccgtagaaggccttctgaacgcgttgcgctatactaccaagcacctaaatgacgagactacctctaagcagatcaaatccatgctgcagtag

SEQ ID NO: 91445 - DNA, 468 bp, Artificial Sequence
  derived and/or modified sequence
atggggaatttgctaaaggtgcttacttgtacggacctcgagcaaggccctaacttcttcctcgactttgaaaacgctcaacccacagaatcagaaaaggagatctacaaccaagtcaatgtcgtccttaaggatgcagagggtatcttggaagacctgcagagctatcggggcgccggccacgaaatcagagaggcgattcagcatcctgccgacgaaaagttacaggagaaagcctggggtgctgtggtgccgctcgtgggcaagctgaagaagttctacgaattctcacagaggctggaagctgctcttcgaggtctgttaggagcactcacctctactccttattcccccacgcagcacctggagagagaacaggccttagctaagcagttcgccgagatcctgcacttcacgctgcggtttgacgagcttaaggtggagttgtccatcggacccgattgttag

SEQ ID NO: 91446 - DNA, 975 bp, Artificial Sequence
  derived and/or modified sequence
atgggtaacttgctaaaggtcttaacctgcaccgatctggagcagggccccaactttttcctggattttgagaatgcccagccgaccgagagcgaaaaggaaatttataatcaggtgaacgtcgtgctcaaggacgctgagggaattctcgaggatctccagtcctacagaggggccggccacgagatcagggaggcaatccaacaccccgccgacgagaaactccaggagaaggcctggggcgcagtggtaccgttggtgggcaagttaaagaaattctatgagtttagccagaggctcgaggccgcccttcgaggactgctgggcgccctcacatcaaccccttacagcccaacgcagcatctcgagcgcgaacaggcgctcgccaaacaattcgcagaaatccttcacttcactttacggttcgatgaacttaagatgaccaatcccgcaattcagaatgacttctcctattacagacgaaccctgagcaggatgcgcatcaataacgtgcccgccgaaggggaaaacgaggtgaataatgaactggctaaccggatgtcactcttctatgccgaggcgacgcccatgctgaagacccttagcgatgcaaccaccaaatttgtctcggaaaataaaaacctgcccatagagaataccactgactgtctctcgaccatggcatccgtgtgtcgagtgatgctggagactccagagtaccgatctaggtttactaacgaggaaactgtgtctttttgtcttcgggtcatggtgggtgtcataatcctgtacgatcacgtccatccggtgggcgcgttcgccaaaaccagtaaaatagatatgaagggctgcattaaagtattaaaagatcagccccccaatagcgtcgagggtctgctaaacgctctgagatacactacaaagcatctcaacgacgaaactacatcaaagcaaatcaagtctatgctgcaatag

SEQ ID NO: 91447 - DNA, 975 bp, Artificial Sequence
  derived and/or modified sequence
atgggaaatttactgaaggtgctcacgtgtactgatcttgagcagggtcccaatttttttcttgatttcgagaacgcacagcctaccgagtccgaaaaggagatctataaccaagtgaatgtggtattgaaggacgctgagggcattctagaggacctacagtcttaccgcggcgccggccatgaaattagagaggcaatacagcatcccgcagacgaaaaactgcaagagaaagcatggggggctgtagttccactggtcggaaagctgaaaaaattttatgagttctcccagaggctagaagctgccctacgagggctgcttggagcactcacgagcacgccttactcccctacacagcacctggagagagagcaggcgttggctaaacaattcgccgagattttgcatttcaccctgaggtttgatgaactgaagatgactaaccccgctattcagaatgatttctcttactatcggaggactctgagccgaatgagaattaacaatgtacccgccgaaggagaaaatgaagtgaataacgaactggcgaatcgcatgtctcttttttacgctgaggccacacccatgctaaaaactctgtccgacgcgaccactaaattcgttagcgaaaataagaacctgcccatcgaaaacacaacagattgtctcagcacaatggcgtccgtgtgtagagtgatgctggaaacaccagaatatcgctccaggttcacaaacgaagagacagtctcattttgccttcgggtcatggtgggtgtgattatcctatatgatcacgtgcacccggtcggggcattcgccaagacttcaaaaattgacatgaagggctgcattaaagttttgaaggaccagccgccaaactctgtggaaggcctgttaaatgccctgcgctataccacaaagcatctcaatgacgagacaacctctaaacaaatcaaaagcatgttacaatag

SEQ ID NO: 91448 - DNA, 303 bp, Artificial Sequence
  derived and/or modified sequence
atggggaatctccttaaagtcctcacttgcacggacctggaacagggaccaaactttttccttgatttcgagaacgctcagcctaccgaatccgagaaggagatctacaaccaggtgaatgtcgtgctgaaggatgctgagggtatcctggaggatctgcagtcctaccgtggcgctggccacgaaattagagaggctatccagcatcccgcagatgaaaagctccaagaaaaggcctggggtgccgtggttcctctggtgggaaagctgaaaaagttctatgaattctcacagcgactgtag

SEQ ID NO: 91449 - DNA, 240 bp, Artificial Sequence
  derived and/or modified sequence
atgggtaacctcttgaaggtcttaacctgtactgacttggagcagggacccaactttttcctggattttgagaatgctcagcctacagaatccgaaaaggaaatctataatcaagtgaacgtcgttctcaaggatgccgaaggaattcttgaggacttacagtcctataggggagcgggtcacgagattcgcgaagctatccagcatccagctgatgagaaacttcaggaaaaggcttag

SEQ ID NO: 91450 - DNA, 141 bp, Artificial Sequence
  derived and/or modified sequence
atggggaatctgctaaaagtgttgacatgtaccgatttggaacagggtcccaatttcttcctggattttgaaaacgctcagcctacggaaagcgaaaaagagatttacaaccaggtgaacgttgtactcaaggatgcatag

SEQ ID NO: 91451 - DNA, 975 bp, Artificial Sequence
  derived and/or modified sequence
atgggcaatctcctcaaggtcttgacgtgcacggatctggaacaaggcccaaacttctttctggatttcgagaacgcccaacccaccgaaagcgagaaagagatctacaatcaggttaatgtggtgcttaaagacgccgaaggaatcttggaagaccttcagagctaccgaggagcaggtcacgagatcagggaagccattcagcaccccgccgacgaaaagttgcaggagaaggcttggggcgccgtggttcctctcgtgggtaagctaaaaaagttttatgaattttctcagagattggaggccgccctgcggggactcctgggggcacttactagcacaccatattcaccgactcagcaccttgagcgagagcaggctcttgcaaaacagtttgccgagatcctccatttcactctccgatttgatgaactgaaaatgacaaaccccgccatccagaacgatttctcttattacagacgcaccctgagtagaatgcgaattaataacgtgcctgccgagggcgagaatgaggtgaataacgaactggccaatcggatgagtctgttctatgccgaagctacacccatgttgaagaccctcagcgacgcaacaacaaaattcgtgtccgagaataagaacctgccaatcgagaatacaaccgattgtctgtcaactatggcctcagtttgccgagtgatgctcgaaactccagagtataggtcgaggttcacaaacgaggaaaccgtttccttctgcctgagggtgatggtgggcgtcatcattctctatgaccacgtacatccagttggcgcctttgctaagacaagtaagatagacatgaaaggctgtatcaaggtgctcaaagatcaaccgcctaattcagtggagggcttattaaacgccctcaggtataccaccaaacacttgaacgacgagaccactagtaaacagataaaatcaatgctgcaatag

SEQ ID NO: 91452 - DNA, 975 bp, Artificial Sequence
  derived and/or modified sequence
atgggcaacctcttaaaagttctgacatgtaccgacttggagcaggggcccaatttctttctcgattttgaaaacgcacaacctacggaatcggagaaagaaatctacaaccaagtgaacgtcgtgcttaaggatgctgagggaatcctcgaagatctgcagtcttaccgtggtgctgggcatgagattagagaggcaattcagcacccagccgacgagaaattgcaagaaaaagcgtggggtgccgtggtgcccttggtgggcaagctgaaaaaattttatgagttctcgcagcgactggaggcagcccttcgaggactgctgggtgccctgacaagtactccttattctccaactcagcacctcgagcgcgaacaggcacttgcaaaacagtttgctgagatcttacacttcactttgcgcttcgacgaactgaaaatgaccaatccagccattcagaatgatttcagctactacagaagaaccctgagtcgcatgcgaattaacaacgtgcccgctgagggcgagaacgaggtgaataatgagttggccaatcggatgtctctgttttatgccgaggctaccccaatgctgaaaacgttgtcagacgctacaaccaaattcgtgtccgagaataaaaacctgcccatcgagaacaccaccgattgtcttagcaccatggctagcgtgtgtcgtgtcatgctggagacacccgaatatcggtccagatttacgaacgaggagacagtgagcttctgcctgcgcgtgatggtgggcgtgatcatactgtacgaccatgtacatcctgttggtgcttttgctaagacgagtaagatagatatgaaggggtgcattaaggtactcaaagaccagccgcctaattccgtcgaaggcctcctgaatgctcttaggtacaccactaagcacctcaatgacgagacaactagtaagcagataaaatcaatgctacagtag

SEQ ID NO: 91453 - DNA, 282 bp, Artificial Sequence
  derived and/or modified sequence
atgggtaacctgctcaaagttctgacatgtactgacttggagcaggggcctaattttttcctggacttcgaaaatgcccagcccaccgagagcgagaaagagatttataatcaggtgaatgttgtgttgaaggacgcagagggtattcttgaggacctccaatcctacaggggcgccggtcacgaaatccgggaagccatccaacaccccgccgatgagaaattgcaggaaaaggcttggggggctgtggtgccactcgtcggaaagttaaagaagttttag

SEQ ID NO: 91454 - DNA, 2024 bp, Artificial Sequence
  derived and/or modified sequence
aaacggcggcggcggcggcaccggaggctccgaggctcctgcgctcccgcgccgcgctcccctcgcccgcccgggccgccaggagaagaaactgaggcctggaatttgattaactcattcaaggttacccagttggtaattcatttgcacacctgttagcaagaaacagaagttgaaggactggaacaagtgaactaggaaagagggaacgccaatccaaggatagaaggacaaggacagaatcaccagcactggctgaaggcctcctgtttcctgcgctttctccttttcctgtgaaatctccgaggagaagaaagaatgatggacagtttatcctttcactgccacaaggcctgtttacttggcagtaccttaacatggggaatcttcttaaagttttgacatgcacagaccttgagcaggggccaaattttttccttgattttgaaaatgcccagcctacagagtctgagaaggaaatttataatcaggtgaatgtagtattaaaagatgcagaaggcatcttggaggacttgcagtcatacagaggagctggccacgaaatacgagaggcaatccagcatccagcagatgagaagttgcaagagaaggcatggggtgcagttgttccactagtaggcaaattaaagaaattttacgaattttctcagaggttagaagcagcattaagaggtcttctgggagccttaacaagtaccccatattctcccacccagcatctagagcgagagcaggctcttgctaaacagtttgcagaaattcttcatttcacactccggtttgatgaactcaagatgacaaatcctgccatacagaatgatttcagctattatagaagaacattgagtcgtatgaggattaacaatgtaccggcagaaggagaaaatgaagtaaataatgaattggcaaatcgaatgtctttgttttatgctgaggcaactccaatgctgaaaaccttgagtgatgccacaacaaaatttgtatcagagaataaaaatttaccaatagaaaataccacagattgtttaagcacaatggctagtgtatgcagagtcatgctggaaacaccggaatacagaagcagatttacaaatgaagagacagtgtcattctgcttgagggtaatggtgggtgtcataatactctatgaccacgtacatccagtgggagcatttgctaaaacttccaaaattgatatgaaaggttgtatcaaagttcttaaggaccaacctcctaatagtgtggaaggtcttctaaatgctctcaggtacacaacaaaacatttgaatgatgagactacctccaagcaaattaaatccatgctgcaataacaattctggaataagcacctgctgtagacagaagacagtattctgcaatgactgagaatgcagttttttagtgattgcaattactatctcatttattcttgcttttatttctttcctctgttcctcttccctcttttttaatcatgttcttaagacttcttttctgtgccaaaatcagtaaagttacactctgaagggatatcatcctttcaaacgggccatctaaggcagctaattatgcattgcattggggtctctactgagaaaaattctgtgacttgaactaaatatttttaaatgtggattttttttgaaactaatatttaatattgcttctcctgcatggcaaaactgcctattctgctatttaaaaaccctcaatgactttattttctactgccgcctttttcatgtgcaaccaaaatgaaaatgtttaaattaactgtgttgtacaaatggtacccaacacaaactttttttaaattagtaatacttttgtttaaagttttaagtttgcattttgactttttttgtaaggatgtatgttgtgtgtttaacctttattaactaacgttaaaagctgtgatgtgtgcgtagaatattacgtatgcatgttcatgtctaaagaatggctgttgatgataaaataaaaatcagctttcatttttctaa

SEQ ID NO: 91455 - DNA, 1817 bp, Artificial Sequence
  derived and/or modified sequence
aaacggcggcggcggcggcaccggaggctccgaggctcctgcgctcccgcgccgcgctcccctcgcccgcccgggccgccaggagaagaaactgaggcctggaatttgattaactcattcaaggttacccagttgatagaaggacaaggacagaatcaccagcactggctgaaggtaccttaacatggggaatcttcttaaagttttgacatgcacagaccttgagcaggggccaaattttttccttgattttgaaaatgcccagcctacagagtctgagaaggaaatttataatcaggtgaatgtagtattaaaagatgcagaaggcatcttggaggacttgcagtcatacagaggagctggccacgaaatacgagaggcaatccagcatccagcagatgagaagttgcaagagaaggcatggggtgcagttgttccactagtaggcaaattaaagaaattttacgaattttctcagaggttagaagcagcattaagaggtcttctgggagccttaacaagtaccccatattctcccacccagcatctagagcgagagcaggctcttgctaaacagtttgcagaaattcttcatttcacactccggtttgatgaactcaagatgacaaatcctgccatacagaatgatttcagctattatagaagaacattgagtcgtatgaggattaacaatgtaccggcagaaggagaaaatgaagtaaataatgaattggcaaatcgaatgtctttgttttatgctgaggcaactccaatgctgaaaaccttgagtgatgccacaacaaaatttgtatcagagaataaaaatttaccaatagaaaataccacagattgtttaagcacaatggctagtgtatgcagagtcatgctggaaacaccggaatacagaagcagatttacaaatgaagagacagtgtcattctgcttgagggtaatggtgggtgtcataatactctatgaccacgtacatccagtgggagcatttgctaaaacttccaaaattgatatgaaaggttgtatcaaagttcttaaggaccaacctcctaatagtgtggaaggtcttctaaatgctctcaggtacacaacaaaacatttgaatgatgagactacctccaagcaaattaaatccatgctgcaataacaattctggaataagcacctgctgtagacagaagacagtattctgcaatgactgagaatgcagttttttagtgattgcaattactatctcatttattcttgcttttatttctttcctctgttcctcttccctcttttttaatcatgttcttaagacttcttttctgtgccaaaatcagtaaagttacactctgaagggatatcatcctttcaaacgggccatctaaggcagctaattatgcattgcattggggtctctactgagaaaaattctgtgacttgaactaaatatttttaaatgtggattttttttgaaactaatatttaatattgcttctcctgcatggcaaaactgcctattctgctatttaaaaaccctcaatgactttattttctactgccgcctttttcatgtgcaaccaaaatgaaaatgtttaaattaactgtgttgtacaaatggtacccaacacaaactttttttaaattagtaatacttttgtttaaagttttaagtttgcattttgactttttttgtaaggatgtatgttgtgtgtttaacctttattaactaacgttaaaagctgtgatgtgtgcgtagaatattacgtatgcatgttcatgtctaaagaatggctgttgatgataaaataaaaatcagc

SEQ ID NO: 91456 - DNA, 548 bp, Artificial Sequence
  derived and/or modified sequence
ttgattaactcattcaaggttacccagttggtaattcatttgcacacctgttagcaagaaacagaagttgaaggactggaacaagtgaactaggaaagagggaacgccaatccaaggatagaaggacaaggacagaatcaccagcactggctgaagaatattagcactattggaatacttaaagaatttttcattataaggccattaatgaaacttgtcttgggagaattttgagaagaattagagcaacagttgtgccattgtgtacaggaaaaccacatttcacctctaggtcctacatatcaacaccttgagaacccgttttgctgtctgccagagcacagtctgggtaccttaacatggggaatcttcttaaagttttgacatgcacagaccttgagcaggggccaaattttttccttgattttgaaaatgcccagcctacagagtctgagaaggaaatttataatcaggtgaatgtagtattaaaagatgcagaaggcatcttggaggacttgcagtcatacagaggagctggccacgaaata

SEQ ID NO: 91457 - DNA, 421 bp, Artificial Sequence
  derived and/or modified sequence
ccgccaacccggaaacggcggcggcggcggcaccggaggctccgaggctcctgcgctcccgcgccgcgctcccctcgcccgcccgggccgccagatagaaggacaaggacagaatcaccagcactggctgaaggtttgctggcatgggtaatctcattaaggtgctaaccagggacatagaccacaatgcagcacattttttcttggactttgaaagtaccttaacatggggaatcttcttaaagttttgacatgcacagaccttgagcaggggccaaattttttccttgattttgaaaatgcccagcctacagagtctgagaaggaaatttataatcaggtgaatgtagtattaaaagatgcagaaggcatcttggaggacttgcagtcatacagaggagctggccacgaaatacgagag

SEQ ID NO: 91458 - DNA, 574 bp, Artificial Sequence
  derived and/or modified sequence
gtgcgagcgccggcggctcggcttctcgaaggagaagaaactgaggcctggaatttgattaactcattcaaggttacccagttgataactgcagcattggactagaggtggagagagtggtactgggggagtggtgaagcaggtaattcatttgcacacctgttagcaagaaacagaagttgaaggactggaacaagtgaactaggaaagagggaacgccaatccaaggatagaaggacaaggacagaatcaccagcactggctgaaggtaccttaacatggggaatcttcttaaagttttgacatgcacagaccttgagcaggggccaaattttttccttgattttgaaaatgcccagcctacagagtctgagaaggaaatttataatcaggtgaatgtagtattaaaagatgcagaaggcatcttggaggacttgcagtcatacagaggagctggccacgaaatacgagaggcaatccagcatccagcagatgagaagttgcaagagaaggcatggggtgcagttgttccactagtaggcaaattaaagaaattttacgaattttctcagag

SEQ ID NO: 91459 - DNA, 573 bp, Artificial Sequence
  derived and/or modified sequence
ttatttctcgcctggcactcgcccgggctgctgctgctgctgctgctgccgccgcggcgggggcagctcgcaaacctgtggcggtgacgtgagccccgccaacccggaaacggcggcggcggcggcaccggaggctccgaggctcctgcgctcccgcgccgcgctcccctcgcccgcccgggccgccaggagaagaaactgaggcctggaatttgattaactcattcaaggttacccagttgatagaaggacaaggacagaatcaccagcactggctgaagttcctcctaacaggaacccagctggcaaagatgtctgggaaatgtcatttgcattctcagccccagcagtgcagaaaggtaccttaacatggggaatcttcttaaagttttgacatgcacagaccttgagcaggggccaaattttttccttgattttgaaaatgcccagcctacagagtctgagaaggaaatttataatcaggtgaatgtagtattaaaagatgcagaaggcatcttggaggacttgcagtcatacagaggagctggccacgaaatacgagaggcaatccag

SEQ ID NO: 91460 - DNA, 561 bp, Artificial Sequence
  derived and/or modified sequence
ttgccctccccgctcggagctgccgcctggcttgtcgcggctctgccacaggggcaggtgttgaggggctcccggtccggctgccgccgctcccccgctccggacccggggctccccctagcgccgctgaggagccgcctctgcggctccaggagggcgcaggagcgggactgagagcgcctggaggctcgagcggagggtaattcatttgcacacctgttagcaagaaacagaagttgaaggactggaacaagtgaactaggaaagagggaacgccaatccaaggatagaaggacaaggacagaatcaccagcactggctgaaggtttgctggcatgggtaatctcattaaggtgctaaccagggacatagaccacaatgcagcacattttttcttggactttgaaagtaccttaacatggggaatcttcttaaagttttgacatgcacagaccttgagcaggggccaaattttttccttgattttgaaaatgcccagcctacagagtctgagaaggaaatttataatcaggtgaatgtagtattaaaagatgcagaagg

SEQ ID NO: 91461 - DNA, 1902 bp, Artificial Sequence
  derived and/or modified sequence
ggggaggcgcgtcgcgaggcgagcgtcctccttttgtgcgagcgccggcggctcggcttctcgaaggagaagaaactgaggcctggaatttgattaactcattcaaggttacccagttggtaattcatttgcacacctgttagcaagaaacagaagttgaaggactggaacaagtgaactaggaaagagggaacgccaatccaaggatagaaggacaaggacagaatcaccagcactggctgaaggtaccttaacatggggaatcttcttaaagttttgacatgcacagaccttgagcaggggccaaattttttccttgattttgaaaatgcccagcctacagagtctgagaaggaaatttataatcaggtgaatgtagtattaaaagatgcagaaggcatcttggaggacttgcagtcatacagaggagctggccacgaaatacgagaggcaatccagcatccagcagatgagaagttgcaagagaaggcatggggtgcagttgttccactagtaggcaaattaaagaaattttacgaattttctcagaggttagaagcagcattaagaggtcttctgggagccttaacaagtaccccatattctcccacccagcatctagagcgagagcaggctcttgctaaacagtttgcagaaattcttcatttcacactccggtttgatgaactcaagatgacaaatcctgccatacagaatgatttcagctattatagaagaacattgagtcgtatgaggattaacaatgtaccggcagaaggagaaaatgaagtaaataatgaattggcaaatcgaatgtctttgttttatgctgaggcaactccaatgctgaaaaccttgagtgatgccacaacaaaatttgtatcagagaataaaaatttaccaatagaaaataccacagattgtttaagcacaatggctagtgtatgcagagtcatgctggaaacaccggaatacagaagcagatttacaaatgaagagacagtgtcattctgcttgagggtaatggtgggtgtcataatactctatgaccacgtacatccagtgggagcatttgctaaaacttccaaaattgatatgaaaggttgtatcaaagttcttaaggaccaacctcctaatagtgtggaaggtcttctaaatgctctcaggtacacaacaaaacatttgaatgatgagactacctccaagcaaattaaatccatgctgcaataacaattctggaataagcacctgctgtagacagaagacagtattctgcaatgactgagaatgcagttttttagtgattgcaattactatctcatttattcttgcttttatttctttcctctgttcctcttccctcttttttaatcatgttcttaagacttcttttctgtgccaaaatcagtaaagttacactctgaagggatatcatcctttcaaacgggccatctaaggcagctaattatgcattgcattggggtctctactgagaaaaattctgtgacttgaactaaatatttttaaatgtggattttttttgaaactaatatttaatattgcttctcctgcatggcaaaactgcctattctgctatttaaaaaccctcaatgactttattttctactgccgcctttttcatgtgcaaccaaaatgaaaatgtttaaattaactgtgttgtacaaatggtacccaacacaaactttttttaaattagtaatacttttgtttaaagttttaagtttgcattttgactttttttgtaaggatgtatgttgtgtgtttaacctttattaactaacgttaaaagctgtgatgtgtgcgtagaatattacgtatgcatgttcatgtctaaagaatggctgttgatgataaaataaaaatcagctttcatttttctaa

SEQ ID NO: 91462 - DNA, 696 bp, Artificial Sequence
  derived and/or modified sequence
gaaactgaggcctggaatttgattaactcattcaaggttacccagttgggtggtgaaaacagtaggtattctgaaccaaccttgcacttctcaggtaattcatttgcacacctgttagcaagaaacagaagttgaaggactggaacaagtgaactaggaaagagggaacgccaatccaaggatagaaggacaaggacagaatcaccagcactggctgaaggtaccttaacatggggaatcttcttaaagttttgacatgcacagaccttgagcaggggccaaattttttccttgattttgaaaatgcccagcctacagagtctgagaaggaaatttataatcaggtgaatgtagtattaaaagatgcagaaggcatcttggaggacttgcagtcatacagaggagctggccacgaaatacgagaggcaatccagcatccagcagatgagaagttgcaagagaaggcatggggtgcagttgttccactagtaggcaaattaaagaaattttacgaattttctcagaggttagaagcagcattaagaggtcttctgggagccttaacaagtaccccatattctcccacccagcatctagagcgagagcaggctcttgctaaacagtttgcagaaattcttcatttcacactccggtttgatgaactcaaggtagaattatctattggccctgattgtt

SEQ ID NO: 91463 - DNA, 2021 bp, Artificial Sequence
  derived and/or modified sequence
cggcgccctcacttcctggcattccctcctccccctccccgtcgttaccctgtacatccgggtcacttgccctccccgctcggagctgccgcctggcttgtcgcggctctgccacaggggcaggtgttgaggggctcccggtccggctgccgccgctcccccgctccggacccggggctccccctagcgccgctgaggagccgcctctgcggctccaggagggcgcaggagcgggactgagagcgcctggaggctcgagcggagggtaattcatttgcacacctgttagcaagaaacagaagttgaaggactggaacaagtgaactaggaaagagggaacgccaatccaaggatagaaggacaaggacagaatcaccagcactggctgaaggtaccttaacatggggaatcttcttaaagttttgacatgcacagaccttgagcaggggccaaattttttccttgattttgaaaatgcccagcctacagagtctgagaaggaaatttataatcaggtgaatgtagtattaaaagatgcagaaggcatcttggaggacttgcagtcatacagaggagctggccacgaaatacgagaggcaatccagcatccagcagatgagaagttgcaagagaaggcatggggtgcagttgttccactagtaggcaaattaaagaaattttacgaattttctcagaggttagaagcagcattaagaggtcttctgggagccttaacaagtaccccatattctcccacccagcatctagagcgagagcaggctcttgctaaacagtttgcagaaattcttcatttcacactccggtttgatgaactcaagatgacaaatcctgccatacagaatgatttcagctattatagaagaacattgagtcgtatgaggattaacaatgtaccggcagaaggagaaaatgaagtaaataatgaattggcaaatcgaatgtctttgttttatgctgaggcaactccaatgctgaaaaccttgagtgatgccacaacaaaatttgtatcagagaataaaaatttaccaatagaaaataccacagattgtttaagcacaatggctagtgtatgcagagtcatgctggaaacaccggaatacagaagcagatttacaaatgaagagacagtgtcattctgcttgagggtaatggtgggtgtcataatactctatgaccacgtacatccagtgggagcatttgctaaaacttccaaaattgatatgaaaggttgtatcaaagttcttaaggaccaacctcctaatagtgtggaaggtcttctaaatgctctcaggtacacaacaaaacatttgaatgatgagactacctccaagcaaattaaatccatgctgcaataacaattctggaataagcacctgctgtagacagaagacagtattctgcaatgactgagaatgcagttttttagtgattgcaattactatctcatttattcttgcttttatttctttcctctgttcctcttccctcttttttaatcatgttcttaagacttcttttctgtgccaaaatcagtaaagttacactctgaagggatatcatcctttcaaacgggccatctaaggcagctaattatgcattgcattggggtctctactgagaaaaattctgtgacttgaactaaatatttttaaatgtggattttttttgaaactaatatttaatattgcttctcctgcatggcaaaactgcctattctgctatttaaaaaccctcaatgactttattttctactgccgcctttttcatgtgcaaccaaaatgaaaatgtttaaattaactgtgttgtacaaatggtacccaacacaaactttttttaaattagtaatacttttgtttaaagttttaagtttgcattttgactttttttgtaaggatgtatgttgtgtgtttaacctttattaactaacgttaaaagctgtgatgtgtgcgtagaatattacgtatgcatgttcatgtctaaagaatggctgttgatgataa

SEQ ID NO: 91464 - DNA, 1907 bp, Artificial Sequence
  derived and/or modified sequence
gtcgttaccctgtacatccgggtcacttgccctccccgctcggagctgccgcctggcttgtcgcggctctgccacaggggcaggtgttgaggggctcccggtccggctgccgccgctcccccgctccggacccggggctccccctagcgccgctgaggagccgcctctgcggctccaggagggcgcaggagcgggactgagagcgcctggaggctcgagcggaggatagaaggacaaggacagaatcaccagcactggctgaaggtaccttaacatggggaatcttcttaaagttttgacatgcacagaccttgagcaggggccaaattttttccttgattttgaaaatgcccagcctacagagtctgagaaggaaatttataatcaggtgaatgtagtattaaaagatgcagaaggcatcttggaggacttgcagtcatacagaggagctggccacgaaatacgagaggcaatccagcatccagcagatgagaagttgcaagagaaggcatggggtgcagttgttccactagtaggcaaattaaagaaattttacgaattttctcagaggttagaagcagcattaagaggtcttctgggagccttaacaagtaccccatattctcccacccagcatctagagcgagagcaggctcttgctaaacagtttgcagaaattcttcatttcacactccggtttgatgaactcaagatgacaaatcctgccatacagaatgatttcagctattatagaagaacattgagtcgtatgaggattaacaatgtaccggcagaaggagaaaatgaagtaaataatgaattggcaaatcgaatgtctttgttttatgctgaggcaactccaatgctgaaaaccttgagtgatgccacaacaaaatttgtatcagagaataaaaatttaccaatagaaaataccacagattgtttaagcacaatggctagtgtatgcagagtcatgctggaaacaccggaatacagaagcagatttacaaatgaagagacagtgtcattctgcttgagggtaatggtgggtgtcataatactctatgaccacgtacatccagtgggagcatttgctaaaacttccaaaattgatatgaaaggttgtatcaaagttcttaaggaccaacctcctaatagtgtggaaggtcttctaaatgctctcaggtacacaacaaaacatttgaatgatgagactacctccaagcaaattaaatccatgctgcaataacaattctggaataagcacctgctgtagacagaagacagtattctgcaatgactgagaatgcagttttttagtgattgcaattactatctcatttattcttgcttttatttctttcctctgttcctcttccctcttttttaatcatgttcttaagacttcttttctgtgccaaaatcagtaaagttacactctgaagggatatcatcctttcaaacgggccatctaaggcagctaattatgcattgcattggggtctctactgagaaaaattctgtgacttgaactaaatatttttaaatgtggattttttttgaaactaatatttaatattgcttctcctgcatggcaaaactgcctattctgctatttaaaaaccctcaatgactttattttctactgccgcctttttcatgtgcaaccaaaatgaaaatgtttaaattaactgtgttgtacaaatggtacccaacacaaactttttttaaattagtaatacttttgtttaaagttttaagtttgcattttgactttttttgtaaggatgtatgttgtgtgtttaacctttattaactaacgttaaaagctgtgatgtgtgcgtagaatattacgtatgcatgttcatgtctaaagaatggctgttgatgataaaataaaaatcagc

SEQ ID NO: 91465 - DNA, 699 bp, Artificial Sequence
  derived and/or modified sequence
tgccacaggggcaggtgttgaggggctcccggtccggctgccgccgctcccccgctccggacccggggctccccctagcgccgctgaggagccgcctctgcggctccaggagggcgcaggagcgggactgagagcgcctggaggctcgagcggaggatagaaggacaaggacagaatcaccagcactggctgaagaatattagcactattggaatacttaaagaatttttcattataaggccattaatgaaacttgtcttgggagaattttgagaagaattagagcaacagttgtgccattgtgtacaggaaaaccacatttcacctctaggtcctacatatcaacaccttgagaacccgttttgctgtctgccagagcacagtctgggtaccttaacatggggaatcttcttaaagttttgacatgcacagaccttgagcaggggccaaattttttccttgattttgaaaatgcccagcctacagagtctgagaaggaaatttataatcaggtgaatgtagtattaaaagatgcagaaggcatcttggaggacttgcagtcatacagaggagctggccacgaaatacgagaggcaatccagcatccagcagatgagaagttgcaagagaaggcatggggtgcagttgttccactagtaggcaaattaaagaaattttacgaattttctcagaggttag

SEQ ID NO: 91466 - DNA, 579 bp, Artificial Sequence
  derived and/or modified sequence
catccgggtcacttgccctccccgctcggagctgccgcctggcttgtcgcggctctgccacaggggcaggtgttgaggggctcccggtccggctgccgccgctcccccgctccggacccggggctccccctagcgccgctgaggagccgcctctgcggctccaggagggcgcaggagcgggactgagagcgcctggaggctcgagcggaggatagaaggacaaggacagaatcaccagcactggctgaaggtttgctggcatgggtaatctcattaaggtgctaaccagggacatagaccacaatgcagcacattttttcttggactttgaaagtaccttaacatggggaatcttcttaaagttttgacatgcacagaccttgagcaggggccaaattttttccttgattttgaaaatgcccagcctacagagtctgagaaggaaatttataatcaggtgaatgtagtattaaaagatgcagaaggcatcttggaggacttgcagtcatacagaggagctggccacgaaatacgagaggcaatccagcatccagcagatgagaagttgcaagagaaggc

SEQ ID NO: 91467 - DNA, 367 bp, Artificial Sequence
  derived and/or modified sequence
aaacggcggcggcggcggcaccggaggctccgaggctcctgcgctcccgcgccgcgctcccctcgcccgcccgggccgccaggagaagaaactgaggcctggaatttgattaactcattcaaggttacccagttgggtggtgaaaacagtaggtattctgaaccaaccttgcacttctcagatagaaggacaaggacagaatcaccagcactggctgaaggtaccttaacatggggaatcttcttaaagttttgacatgcacagaccttgagcaggggccaaattttttccttgattttgaaaatgcccagcctacagagtctgagaaggaaatttataatcaggtgaatgtagtattaaaagatgc

SEQ ID NO: 91468 - DNA, 2196 bp, Artificial Sequence
  derived and/or modified sequence
ggcaggtgttgaggggctcccggtccggctgccgccgctcccccgctccggacccggggctccccctagcgccgctgaggagccgcctctgcggctccaggagggcgcaggagcgggactgagagcgcctggaggctcgagcggagggtaattcatttgcacacctgttagcaagaaacagaagttgaaggactggaacaagtgaactaggaaagagggaacgccaatccaaggatagaaggacaaggacagaatcaccagcactggctgaaggcctcctgtttcctgcgctttctccttttcctgtgaaatctccgaggagaagaaagaatgatggacagtttatcctttcactgccacaaggcctgtttacttggcagtaggtccttaagttccttgcttttttgctgctgtttggtgactggaagaggcaccagagactctcactctggggaggtttgctggcatgggtaatctcattaaggtgctaaccagggacatagaccacaatgcagcacattttttcttggactttgaaagtaccttaacatggggaatcttcttaaagttttgacatgcacagaccttgagcaggggccaaattttttccttgattttgaaaatgcccagcctacagagtctgagaaggaaatttataatcaggtgaatgtagtattaaaagatgcagaaggcatcttggaggacttgcagtcatacagaggagctggccacgaaatacgagaggcaatccagcatccagcagatgagaagttgcaagagaaggcatggggtgcagttgttccactagtaggcaaattaaagaaattttacgaattttctcagaggttagaagcagcattaagaggtcttctgggagccttaacaagtaccccatattctcccacccagcatctagagcgagagcaggctcttgctaaacagtttgcagaaattcttcatttcacactccggtttgatgaactcaagatgacaaatcctgccatacagaatgatttcagctattatagaagaacattgagtcgtatgaggattaacaatgtaccggcagaaggagaaaatgaagtaaataatgaattggcaaatcgaatgtctttgttttatgctgaggcaactccaatgctgaaaaccttgagtgatgccacaacaaaatttgtatcagagaataaaaatttaccaatagaaaataccacagattgtttaagcacaatggctagtgtatgcagagtcatgctggaaacaccggaatacagaagcagatttacaaatgaagagacagtgtcattctgcttgagggtaatggtgggtgtcataatactctatgaccacgtacatccagtgggagcatttgctaaaacttccaaaattgatatgaaaggttgtatcaaagttcttaaggaccaacctcctaatagtgtggaaggtcttctaaatgctctcaggtacacaacaaaacatttgaatgatgagactacctccaagcaaattaaatccatgctgcaataacaattctggaataagcacctgctgtagacagaagacagtattctgcaatgactgagaatgcagttttttagtgattgcaattactatctcatttattcttgcttttatttctttcctctgttcctcttccctcttttttaatcatgttcttaagacttcttttctgtgccaaaatcagtaaagttacactctgaagggatatcatcctttcaaacgggccatctaaggcagctaattatgcattgcattggggtctctactgagaaaaattctgtgacttgaactaaatatttttaaatgtggattttttttgaaactaatatttaatattgcttctcctgcatggcaaaactgcctattctgctatttaaaaaccctcaatgactttattttctactgccgcctttttcatgtgcaaccaaaatgaaaatgtttaaattaactgtgttgtacaaatggtacccaacacaaactttttttaaattagtaatacttttgtttaaagttttaagtttgcattttgactttttttgtaaggatgtatgttgtgtgtttaacctttattaactaacgttaaaagctgtgatgtgtgcgtagaatattacgtatgcatgttcatgtctaaagaatggctgttgatgataaaataaaaatcagctttcatttttctaa

SEQ ID NO: 91469 - DNA, 1968 bp, Artificial Sequence
  derived and/or modified sequence
ccgcgccgcgctcccctcgcccgcccgggccgccaggagaagaaactgaggcctggaatttgattaactcattcaaggttacccagttgatagaaggacaaggacagaatcaccagcactggctgaaggcctcctgtttcctgcgctttctccttttcctgtgaaatctccgaggagaagaaagaatgatggacagtttatcctttcactgccacaaggcctgtttacttggcagtaggtccttaagttccttgcttttttgctgctgtttggtgactggaagaggcaccagagactctcactctggggaggtaccttaacatggggaatcttcttaaagttttgacatgcacagaccttgagcaggggccaaattttttccttgattttgaaaatgcccagcctacagagtctgagaaggaaatttataatcaggtgaatgtagtattaaaagatgcagaaggcatcttggaggacttgcagtcatacagaggagctggccacgaaatacgagaggcaatccagcatccagcagatgagaagttgcaagagaaggcatggggtgcagttgttccactagtaggcaaattaaagaaattttacgaattttctcagaggttagaagcagcattaagaggtcttctgggagccttaacaagtaccccatattctcccacccagcatctagagcgagagcaggctcttgctaaacagtttgcagaaattcttcatttcacactccggtttgatgaactcaagatgacaaatcctgccatacagaatgatttcagctattatagaagaacattgagtcgtatgaggattaacaatgtaccggcagaaggagaaaatgaagtaaataatgaattggcaaatcgaatgtctttgttttatgctgaggcaactccaatgctgaaaaccttgagtgatgccacaacaaaatttgtatcagagaataaaaatttaccaatagaaaataccacagattgtttaagcacaatggctagtgtatgcagagtcatgctggaaacaccggaatacagaagcagatttacaaatgaagagacagtgtcattctgcttgagggtaatggtgggtgtcataatactctatgaccacgtacatccagtgggagcatttgctaaaacttccaaaattgatatgaaaggttgtatcaaagttcttaaggaccaacctcctaatagtgtggaaggtcttctaaatgctctcaggtacacaacaaaacatttgaatgatgagactacctccaagcaaattaaatccatgctgcaataacaattctggaataagcacctgctgtagacagaagacagtattctgcaatgactgagaatgcagttttttagtgattgcaattactatctcatttattcttgcttttatttctttcctctgttcctcttccctcttttttaatcatgttcttaagacttcttttctgtgccaaaatcagtaaagttacactctgaagggatatcatcctttcaaacgggccatctaaggcagctaattatgcattgcattggggtctctactgagaaaaattctgtgacttgaactaaatatttttaaatgtggattttttttgaaactaatatttaatattgcttctcctgcatggcaaaactgcctattctgctatttaaaaaccctcaatgactttattttctactgccgcctttttcatgtgcaaccaaaatgaaaatgtttaaattaactgtgttgtacaaatggtacccaacacaaactttttttaaattagtaatacttttgtttaaagttttaagtttgcattttgactttttttgtaaggatgtatgttgtgtgtttaacctttattaactaacgttaaaagctgtgatgtgtgcgtagaatattacgtatgcatgttcatgtctaaagaatggctgttgatgataaaataaaaatcagctttcatttttctaa

SEQ ID NO: 91470 - DNA, 581 bp, Artificial Sequence
  derived and/or modified sequence
aggcccagtaagtatctgcgggagggctgaatgggtgcgtggacagcattcctctcactgaccccgctgcgaggtgagccaggcaggggctgtcaccattcctgaagtccaggagaagaaactgaggcctggaatttgattaactcattcaaggttacccagttggtaattcatttgcacacctgttagcaagaaacagaagttgaaggactggaacaagtgaactaggaaagagggaacgccaatccaaggatagaaggacaaggacagaatcaccagcactggctgaaggtaccttaacatggggaatcttcttaaagttttgacatgcacagaccttgagcaggggccaaattttttccttgattttgaaaatgcccagcctacagagtctgagaaggaaatttataatcaggtgaatgtagtattaaaagatgcagaaggcatcttggaggacttgcagtcatacagaggagctggccacgaaatacgagaggcaatccagcatccagcagatgagaagttgcaagagaaggcatggggtgcagttgttccactagtaggcaaattaaagaaatttt

SEQ ID NO: 91471 - DNA, 654 bp, Artificial Sequence
  derived and/or modified sequence
atgcagaaggcctcctggaggacctgcagccacacagaggagctggccaccaagtatgagcgggccatccagcacccagcagatgagaagctgcaggagaaggcctggggcgctgtggtgcccctggtgggcaaggagatcctgcgcatcttcagcgaggtgcgcagcagcatcaagaggagcagcggcagcctgaacaagtaccccatcttcagccacccagccagccgggcccggcaggccctggccaagcagtttgctgagatcctgcacttcaccctgcgctttgatgagctgaagatgaccaacccagccatccagaatgacttctcctactacagaaggaccctgagcaggatgaggatcaccatgtacagagctgagggggagaatgaggtgaacaatgagctggccaacaggatgagcctcttctacgccgaggccacccccatgctgaagaccctgagtgatgccaccaccaagtttgtgtctgagaacaagaacctgcccatcgagaacaccacagactgcctgagcaccatggcctctgtgtgccgggtgatgctggagaccccagagtaccgcagccgcttcaccaatgaggagaccgtgtccttcctggagggcaatggaggctgccacaacaccctgtag

SEQ ID NO: 91472 - DNA, 975 bp, Artificial Sequence
  derived and/or modified sequence
atgggcaacctgctgaaggtgctgacctgcacagacctggagcagggccccaacttcttcctggactttgaaaatgcccagcccacagaaagtgagaaggagatctacaaccaggtgaatgtggtgctgaaggatgctgagggcatcctggaggacctgcagagctacagaggagctggccacgagatccgggaggccatccagcacccagcagatgagaagctgcaggagaaggcctggggcgctgtggtgcccctggtgggcaagctgaagaagttctatgagttcagccagaggctggaggccgccctgcggggcctgctgggcgccctgaccagcaccccctacagccccacccagcacctggagcgggagcaggccctggccaagcagtttgctgagatcctgcacttcaccctgcgctttgatgagctgaagatgaccaacccagccatccagaatgacttctcctactacagaaggaccctgagcaggatgaggatcaacaacgtgcctgctgagggggagaatgaggtgaacaatgagctggccaacaggatgagcctcttctacgccgaggccacccccatgctgaagaccctgagtgatgccaccaccaagtttgtgtctgagaacaagaacctgcccatcgagaacaccacagactgcctgagcaccatggcctctgtgtgccgggtgatgctggagaccccagagtaccgcagccgcttcaccaatgaggagaccgtgtccttctgcctgcgggtgatggtgggcgtcatcatcctgtatgaccacgtgcaccctgtgggcgcctttgccaagaccagcaagattgacatgaagggctgcatcaaggtgctgaaggaccagccccccaacagcgtggagggcctgctgaatgccctgcgctacaccaccaagcacctgaatgatgagaccaccagcaagcagatcaagtccatgctgcagtag

SEQ ID NO: 91473 - DNA, 192 bp, Artificial Sequence
  derived and/or modified sequence
atgggcaacctgctgaaggtgctgacctgcacagacctggagcagggccccaacttcttcctggactttgaaaatgcccagcccacagaaagtgagaaggagatctacaaccaggtgaatgtggtgctgaaggatgctgagggcatcctggaggacctgcagagctacagaggagctggccacgagatctag

SEQ ID NO: 91474 - DNA, 198 bp, Artificial Sequence
  derived and/or modified sequence
atgggcaacctgctgaaggtgctgacctgcacagacctggagcagggccccaacttcttcctggactttgaaaatgcccagcccacagaaagtgagaaggagatctacaaccaggtgaatgtggtgctgaaggatgctgagggcatcctggaggacctgcagagctacagaggagctggccacgagatccgggagtag

SEQ ID NO: 91475 - DNA, 297 bp, Artificial Sequence
  derived and/or modified sequence
atgggcaacctgctgaaggtgctgacctgcacagacctggagcagggccccaacttcttcctggactttgaaaatgcccagcccacagaaagtgagaaggagatctacaaccaggtgaatgtggtgctgaaggatgctgagggcatcctggaggacctgcagagctacagaggagctggccacgagatccgggaggccatccagcacccagcagatgagaagctgcaggagaaggcctggggcgctgtggtgcccctggtgggcaagctgaagaagttctatgagttcagccagtag

SEQ ID NO: 91476 - DNA, 207 bp, Artificial Sequence
  derived and/or modified sequence
atgggcaacctgctgaaggtgctgacctgcacagacctggagcagggccccaacttcttcctggactttgaaaatgcccagcccacagaaagtgagaaggagatctacaaccaggtgaatgtggtgctgaaggatgctgagggcatcctggaggacctgcagagctacagaggagctggccacgagatccgggaggccatccagtag

SEQ ID NO: 91477 - DNA, 147 bp, Artificial Sequence
  derived and/or modified sequence
atgggcaacctgctgaaggtgctgacctgcacagacctggagcagggccccaacttcttcctggactttgaaaatgcccagcccacagaaagtgagaaggagatctacaaccaggtgaatgtggtgctgaaggatgctgagggctag

SEQ ID NO: 91478 - DNA, 468 bp, Artificial Sequence
  derived and/or modified sequence
atgggcaacctgctgaaggtgctgacctgcacagacctggagcagggccccaacttcttcctggactttgaaaatgcccagcccacagaaagtgagaaggagatctacaaccaggtgaatgtggtgctgaaggatgctgagggcatcctggaggacctgcagagctacagaggagctggccacgagatccgggaggccatccagcacccagcagatgagaagctgcaggagaaggcctggggcgctgtggtgcccctggtgggcaagctgaagaagttctatgagttcagccagaggctggaggccgccctgcggggcctgctgggcgccctgaccagcaccccctacagccccacccagcacctggagcgggagcaggccctggccaagcagtttgctgagatcctgcacttcaccctgcgctttgatgagctgaaggtggagctgagcattggaccagactgctag

SEQ ID NO: 91479 - DNA, 303 bp, Artificial Sequence
  derived and/or modified sequence
atgggcaacctgctgaaggtgctgacctgcacagacctggagcagggccccaacttcttcctggactttgaaaatgcccagcccacagaaagtgagaaggagatctacaaccaggtgaatgtggtgctgaaggatgctgagggcatcctggaggacctgcagagctacagaggagctggccacgagatccgggaggccatccagcacccagcagatgagaagctgcaggagaaggcctggggcgctgtggtgcccctggtgggcaagctgaagaagttctatgagttcagccagaggctgtag

SEQ ID NO: 91480 - DNA, 240 bp, Artificial Sequence
  derived and/or modified sequence
atgggcaacctgctgaaggtgctgacctgcacagacctggagcagggccccaacttcttcctggactttgaaaatgcccagcccacagaaagtgagaaggagatctacaaccaggtgaatgtggtgctgaaggatgctgagggcatcctggaggacctgcagagctacagaggagctggccacgagatccgggaggccatccagcacccagcagatgagaagctgcaggagaaggcctag

SEQ ID NO: 91481 - DNA, 141 bp, Artificial Sequence
  derived and/or modified sequence
atgggcaacctgctgaaggtgctgacctgcacagacctggagcagggccccaacttcttcctggactttgaaaatgcccagcccacagaaagtgagaaggagatctacaaccaggtgaatgtggtgctgaaggatgcctag

SEQ ID NO: 91482 - DNA, 282 bp, Artificial Sequence
  derived and/or modified sequence
atgggcaacctgctgaaggtgctgacctgcacagacctggagcagggccccaacttcttcctggactttgaaaatgcccagcccacagaaagtgagaaggagatctacaaccaggtgaatgtggtgctgaaggatgctgagggcatcctggaggacctgcagagctacagaggagctggccacgagatccgggaggccatccagcacccagcagatgagaagctgcaggagaaggcctggggcgctgtggtgcccctggtgggcaagctgaagaagttctag

SEQ ID NO: 91483 - DNA, 654 bp, Artificial Sequence
  derived and/or modified sequence
atgcagaaggccagctggcggacctgcagccacaccgaggagctggccactaaatatgagcgggctatccagcatcccgcagacgagaaattgcaggagaaagcttggggtgccgtggtgcccctggtcggcaaagagatactgagaatatttagtgaagttaggtccagcattaaacgctcttctggatcgcttaataagtatcccattttttcccatcctgcttcccgggcaagacaggcgctggccaagcagtttgctgaaatcctgcactttactctacggttcgacgaactgaaaatgactaatcccgccatccagaatgacttctcctactaccggagaaccttgagtcggatgcgtatcactatgtatagagccgaaggcgaaaacgaggtgaacaatgagctagcgaataggatgagtcttttctatgccgaagctactcccatgttgaaaaccctgtccgacgccaccacaaagtttgtgagcgagaacaagaatcttccgattgagaataccaccgattgtctgtccaccatggcgagtgtctgccgtgttatgcttgaaaccccagaatatcggtctcgttttaccaacgaggaaactgtcagcttcctggagggcaatggtgggtgccacaatacgctgtag

SEQ ID NO: 91484 - DNA, 975 bp, Artificial Sequence
  derived and/or modified sequence
atgggcaacctgctgaaggtgctgacctgcaccgacctggagcagggccctaacttttttctggacttcgaaaacgctcagcctacagaatctgaaaaagaaatatacaaccaggtgaatgtggttttgaaggatgccgaaggaatactggaagacctccaatcatatcgcggagctggccatgaaatcagggaagctattcaacaccccgcagacgagaaactgcaggaaaaggcttggggcgcagttgtgccacttgttggtaagttgaagaagttttacgagttctctcaaaggctggaagccgcccttcggggtctcctcggtgccctgacctcgaccccctattcacctactcagcatctggagagagaacaggcgttggccaagcagttcgcagagatcctgcacttcactctgcggttcgacgaactgaaaatgacgaatccagcgatccagaacgatttctcctattatcgaagaactctgtcgcggatgagaatcaacaacgtcccggccgagggcgaaaacgaggttaataatgaattggccaataggatgtctcttttctacgctgaggcaacaccaatgttgaagacgctgagcgatgcaactactaagtttgtgtccgaaaacaagaatctgcctatcgaaaacaccacggactgtctgagtaccatggcatcagtgtgccgggtcatgctggagacccccgaatacagaagcagattcactaacgaagagaccgtcagcttctgcctacgggtcatggtgggcgtcatcatactgtacgaccatgtccatccagtgggggcattcgcaaagacatccaaaattgacatgaaaggctgcattaaggtcttgaaagaccagcctcctaattctgtggagggattgctcaacgccctgcggtacacaaccaagcacctgaacgatgagaccactagtaagcagataaaatccatgttgcagtag

SEQ ID NO: 91485 - DNA, 975 bp, Artificial Sequence
  derived and/or modified sequence
atgggcaacctgctgaaggtgctgacctgcaccgacctggagcaggggcccaatttttttctggacttcgaaaatgcacaaccaactgagtctgaaaaagaaatttataatcaggtcaacgtggtgctaaaggacgccgagggtatactggaggacctccaatcctacagaggtgctgggcatgagattcgtgaggcaattcagcatcctgcagacgaaaagctccaggagaaggcctggggcgctgttgtgccactggtaggaaaactgaaaaaattctatgagttcagccaacggctggaggccgctctgagagggctgctgggcgctcttacaagcacaccctactctcccacacagcacctggagcgagagcaggcactcgccaagcagtttgccgagatcctccacttcaccctgagatttgacgaacttaagatgaccaacccggctattcagaatgacttttcttactaccgccggacgttgtccagaatgcgcatcaataatgtcccagcagaaggtgaaaacgaggtgaataatgagttggcaaataggatgtctctcttctacgcagaagctacccctatgttgaagactctgtctgacgcgacgactaagttcgtgagcgagaataaaaacctcccaatcgagaataccaccgactgtctatccaccatggcctcagtgtgccgggttatgctcgagacccccgagtatcgatcgcgcttcacaaacgaggagactgtgtcattttgcctgagagtaatggtcggtgtcatcatcttatacgaccacgtgcatccagttggtgcgtttgccaagactagcaagatcgacatgaagggatgtattaaggtcctgaaagaccagccaccaaatagcgtggaaggcttacttaatgccctgaggtatacaacaaagcatttaaatgatgagacaaccagcaagcagattaaatcaatgctccagtag

SEQ ID NO: 91486 - DNA, 192 bp, Artificial Sequence
  derived and/or modified sequence
atgggcaacctgctgaaggtgctgacctgcaccgacctggagcaggggcctaatttctttctggacttcgaaaatgctcaacctactgagagcgagaaggaaatctacaaccaggtcaacgtggtcctgaaagatgcagaaggcatcttggaggacctgcagtcttaccgtggcgctgggcacgagatctag

SEQ ID NO: 91487 - DNA, 198 bp, Artificial Sequence
  derived and/or modified sequence
atgggcaacctgctgaaggtgctgacctgcaccgacctggagcagggtccaaatttttttcttgacttcgaaaatgcccagcccactgagtccgagaaagaaatctataatcaggtcaatgtcgtactcaaggatgctgagggtatcctggaagacctgcaatcttaccggggggctgggcacgagatccgcgagtag

SEQ ID NO: 91488 - DNA, 297 bp, Artificial Sequence
  derived and/or modified sequence
atgggcaacctgctgaaggtgctgacctgcaccgacctggagcagggaccaaacttcttcttagactttgaaaatgcccaaccaacggaaagcgagaaagagatctacaaccaggtgaacgtggtgctcaaggacgcagaagggatcctggaagatctccagtcataccggggagccggacacgagattagggaagcaatccaacaccctgccgacgagaaacttcaggagaaagcttggggcgctgttgtcccactggtggggaagctgaagaaattttacgaattttcacagtag

SEQ ID NO: 91489 - DNA, 207 bp, Artificial Sequence
  derived and/or modified sequence
atgggcaacctgctgaaggtgctgacctgcaccgacctggagcagggacccaattttttcctcgactttgagaacgcacagccgactgaatcagagaaagagatctacaaccaggtcaacgtggtcttaaaggatgccgaggggatcctagaggaccttcagtcttacagaggtgctggccacgagataagagaggctattcaatag

SEQ ID NO: 91490 - DNA, 147 bp, Artificial Sequence
  derived and/or modified sequence
atgggcaacctgctgaaggtgctgacctgcaccgacctggagcaggggcctaactttttcctcgatttcgaaaacgcacaacccaccgagtctgagaaggaaatctacaaccaggtgaatgtcgttctcaaggacgcggaggggtag

SEQ ID NO: 91491 - DNA, 975 bp, Artificial Sequence
  derived and/or modified sequence
atgggcaacctgctgaaggtgctgacctgcaccgacctggagcagggccctaacttctttttggatttcgaaaatgcccagcctaccgagtccgaaaaggaaatttataaccaggtgaacgtcgttctgaaagatgcagagggtattctggaagacctgcagtcctacaggggagctgggcacgagatcagagaagctatacaacatcctgcagatgaaaaactgcaagaaaaggcatggggcgcggtggtcccactggtgggcaagctaaaaaagttttacgaattctctcagaggctggaagctgcgctgcgggggctgttaggagccctcacaagcaccccctactccccaacacagcaccttgagagggaacaggccctggccaaacagtttgccgaaatattacatttcacattgaggttcgacgagctgaagatgaccaaccccgcgatacaaaacgatttcagctattatcggcgcacactgtcgcggatgcgcatcaacaatgtgcccgccgaaggggaaaacgaggtgaacaacgagctggcaaatcgcatgagtctgttttacgcggaagcaacccccatgctcaagactctgtcagacgccaccactaagtttgtgagcgaaaacaagaacctccctattgaaaatacgacagactgtctgtctactatggcaagcgtgtgtcgggtgatgctggaaacccccgaatacagatctcggttcaccaatgaggagaccgtctccttctgcctgagggtgatggtcggggtcattatcctgtatgatcacgtgcatccagtgggcgccttcgccaagacctctaagattgacatgaaggggtgtataaaggtgctgaaggaccagccacctaatagcgttgaagggctgcttaacgctcttagatacaccaccaaacatctgaatgacgaaactactagcaaacagatcaaaagcatgctacagtag

SEQ ID NO: 91492 - DNA, 468 bp, Artificial Sequence
  derived and/or modified sequence
atgggcaacctgctgaaggtgctgacctgcaccgacctggagcagggccccaatttcttcctggattttgagaacgcccagcctacagagagtgaaaaggaaatctataaccaagttaacgtggtcctgaaggacgcggagggcattctggaggatctgcagtcatacagaggagcgggtcacgagattagagaggcaatacagcatcccgccgacgaaaagctgcaggaaaaggcttggggcgccgtcgttcccctggtggggaaactcaagaagttttatgagttcagccaaagacttgaagcggccttaagaggcctgctgggtgccttgacatctaccccctattctccaacacagcacttggagcgagagcaagcattggctaaacagttcgccgagatcttgcatttcactctgagatttgacgaactcaaagtcgagttgagcattggacccgactgttag

SEQ ID NO: 91493 - DNA, 975 bp, Artificial Sequence
  derived and/or modified sequence
atgggcaacctgctgaaggtgctgacctgcaccgacctggagcagggcccaaacttcttcctggacttcgaaaacgcacagcccaccgagtcagaaaaggaaatctacaaccaggtgaatgtggtgctgaaagatgcagaaggtatacttgaggacctgcagtcgtatcgcggggccggtcacgaaatccgggaggctatccagcatccagctgatgagaaactgcaggagaaggcatggggcgcagtcgtgccgcttgtggggaagctgaagaagttctacgagtttagccaacgcctcgaggccgcactgaggggcctcctgggtgccttgacgtctactccttactcccctacccagcacctcgagcgggagcaagcattggctaaacagtttgccgagatcctccacttcacgttgcgattcgacgagctgaagatgaccaatcccgctattcagaatgacttctcctattatcggaggacactgagccggatgagaattaacaacgtccctgcagaaggcgagaacgaggtgaacaacgagctcgccaaccgcatgtcactcttttacgcagaagccacccctatgcttaaaacgctttccgacgctactacaaagttcgtttctgaaaacaagaatctacccattgagaacactacggattgcctctccaccatggcctccgtctgccgcgttatgctggagacgcccgagtacaggagtagatttactaacgaagaaacggtttctttctgtctaagggtaatggtcggagtcatcatcctgtacgaccacgttcacccagtgggggcgtttgccaagactagtaaaatagacatgaaagggtgcatcaaagtcttaaaagatcagccgcccaattctgtggaaggactgctaaacgccttaagatatacaacgaagcacttaaacgacgagactacatcaaagcaaataaagtctatgctacagtag

SEQ ID NO: 91494 - DNA, 975 bp, Artificial Sequence
  derived and/or modified sequence
atgggcaacctgctgaaggtgctgacctgcaccgacctggagcagggcccaaacttctttctggacttcgaaaatgctcagccgactgaatcagagaaggaaatttataatcaggtcaacgtggtactgaaagatgctgagggcatcctcgaagatctccaatcctacagaggggccgggcacgaaattagggaggcaatccaacatccagccgacgagaaactccaggagaaagcctggggcgccgttgtgccgctggtaggcaaactcaagaaattttatgaattcagccagcgcctggaggctgctttgcgcgggctgctgggtgctctgactagtactccctactcccctactcagcacttagaaagagaacaggcgctggccaagcagtttgccgagattctgcattttaccctgcgcttcgacgaactgaaaatgacaaacccagcaatccagaacgatttttcttattaccgaaggaccctatcccgaatgcgaattaacaatgtgcctgctgaaggagaaaacgaagtcaacaacgagctcgcaaatcgcatgtctctgttttacgcagaggcaacgcccatgctgaagacactgagtgacgctactactaagtttgttagcgaaaacaagaatctgcctatagagaacactacggattgcctcagcaccatggccagtgtatgccgcgtcatgctcgagacacctgaatatagatcgaggtttaccaacgaggagacggtgtcgttctgcctgcgcgtcatggttggagtgattattctgtatgaccacgttcatcctgtcggggccttcgccaagacaagcaaaatcgacatgaagggctgcatcaaggtgttgaaagaccaaccccccaactcggtcgaaggtttgctaaacgcgctacgatatacaaccaagcatctgaacgatgagaccacctccaagcagattaagtctatgctgcagtag

SEQ ID NO: 91495 - DNA, 303 bp, Artificial Sequence
  derived and/or modified sequence
atgggcaacctgctgaaggtgctgacctgcaccgacctggagcagggcccaaattttttcttggatttcgagaacgcacaacctaccgagtccgaaaaggagatatacaatcaggttaatgtggtgcttaaggacgccgaaggcatcctggaggacctccaaagctacagaggcgcaggtcacgaaattcgtgaagcgattcaacaccctgcggacgagaagctgcaggagaaagcctggggtgctgtagtcccattggtgggaaaattaaagaagttttatgagtttagtcagcggctctag

SEQ ID NO: 91496 - DNA, 240 bp, Artificial Sequence
  derived and/or modified sequence
atgggcaacctgctgaaggtgctgacctgcaccgacctggagcagggaccgaactttttcttggactttgagaacgcacagcctacagagagcgaaaaggagatttataatcaggtgaacgtggtcttaaaggacgcagagggcatcctcgaggacctacaatcctataggggcgctggccatgagattcgcgaagcgatccagcaccccgcagacgagaaactacaggaaaaggcctag

SEQ ID NO: 91497 - DNA, 141 bp, Artificial Sequence
  derived and/or modified sequence
atgggcaacctgctgaaggtgctgacctgcaccgacctggagcagggcccgaacttctttttggactttgaaaatgcccagccaaccgagtccgaaaaagaaatttacaatcaggtgaatgttgttctcaaggacgcatag

SEQ ID NO: 91498 - DNA, 975 bp, Artificial Sequence
  derived and/or modified sequence
atgggcaacctgctgaaggtgctgacctgcaccgacctggagcagggacccaatttctttctggatttcgaaaacgcgcagcctactgagtccgagaaggagatttacaaccaggtcaacgtggtgctcaaggatgcagaaggtattctcgaagacctgcagagctaccgtggagccggacacgagattagggaggctatacaacacccggctgatgagaagctgcaggagaaggcttggggggccgtggtgccactggtggggaagttaaagaaattctatgaattttcacagaggctggaggcggccctgcgtggccttctgggggctctcacttccactccctactctcctacgcagcacctggagcgtgaacaggccctcgccaaacagttcgccgaaattttacattttacactccgttttgacgaattgaaaatgacgaaccctgcaattcagaatgacttttcatattacagaaggaccttgtcccgaatgcggatcaataacgttccagccgagggagaaaacgaagtgaacaacgagctggctaatcgtatgtccctattctacgccgaggctaccccaatgctgaagacgctaagcgatgctacgacaaagtttgtatccgaaaacaagaatctaccaattgagaacactacagattgcttgtccaccatggcatcagtgtgtagagttatgctggagacccctgagtaccgctcccggttcaccaatgaggagacggtgtcgttctgcctaagggtgatggtcggcgtaataattctctacgaccacgtgcatcccgtcggagcttttgccaaaaccagtaagattgatatgaaaggctgtatcaaggtcctgaaggaccagccccctaactctgttgagggcctgctcaatgctctgaggtacaccaccaaacacctaaacgatgagacaactagcaagcagatcaagagcatgctgcagtag

SEQ ID NO: 91499 - DNA, 975 bp, Artificial Sequence
  derived and/or modified sequence
atgggcaacctgctgaaggtgctgacctgcaccgacctggagcaggggccaaactttttcctggatttcgagaatgcacagcctacagaaagcgagaaggagatttacaaccaggtgaatgtggttctgaaggatgccgagggcatcctggaagatctccagtcttaccggggggccggacacgaaattagggaagctatccagcatcctgctgatgaaaagctccaggaaaaggcttggggagccgtggtacctctggtaggtaagctcaagaagttttacgaattttctcagaggttagaagccgcattgcggggcctcctgggagccttaacatctaccccatactcgccgacccaacacctcgagcgggaacaagccctggccaaacaattcgccgagattctccactttaccctaaggtttgatgagctaaaaatgactaaccccgccattcagaatgattttagctactaccggagaactctctcccggatgcgaattaacaacgtgccagctgagggggagaacgaagttaataatgagcttgcaaataggatgtccctgttttacgccgaggcgacccctatgctgaagacactgagcgacgcgactactaagttcgtgtccgagaataaaaacctcccgatcgagaacaccacggattgcctgagtactatggccagtgtctgtcgagttatgctggagactcccgagtataggtctagatttacgaatgaggagacggtgtcgttctgtctgcgagttatggtgggcgtcatcatcctgtatgaccacgtgcacccagtcggcgcctttgcaaagactagtaaaatcgatatgaagggttgtatcaaggttctgaaggaccagccacccaacagtgtcgaagggcttctgaacgctctgcgatacactaccaagcatctaaacgacgaaacgacgagtaaacagataaaatcaatgcttcagtag

SEQ ID NO: 91500 - DNA, 282 bp, Artificial Sequence
  derived and/or modified sequence
atgggcaacctgctgaaggtgctgacctgcaccgacctggagcagggacccaacttctttcttgactttgagaatgctcagcccaccgaatccgagaaagaaatatacaaccaagtgaatgtcgttctcaaggacgccgagggaatactggaagacctgcagtcctacaggggagctgggcacgagatccgagaggctatccagcaccccgctgatgagaagcttcaagaaaaggcttggggcgcagtggttccactggtgggaaaactcaaaaaattctag

SEQ ID NO: 91501 - DNA, 654 bp, Artificial Sequence
  derived and/or modified sequence
atgcagaaagcgagttggagaacctgttcccacacagaggagcttgcaactaagtacgagcgcgctatacagcatcccgctgatgagaagttgcaggagaaagcatggggggcagtggtgcccttagtcgggaaagaaatactcagaatcttctctgaggtgcgcagcagcataaagagatcatctggctctctgaacaagtatcctattttctctcatcccgcttctagggctcgacaggccctggcaaagcagttcgccgagatcctacactttaccctcaggtttgatgaactgaaaatgaccaacccggctatccagaacgacttttcatactacaggcgcaccctatccaggatgagaattacaatgtatcgagccgaaggggagaatgaagtgaataacgagctggctaaccgaatgagcctcttttatgctgaagccacacccatgttgaagaccctttctgacgcgaccacaaagttcgtgtctgagaacaagaacctcccaattgagaataccacagattgtctgtctaccatggcatccgtgtgtagagttatgctagagacacctgagtaccggagcaggtttacaaacgaggaaactgtatccttcctggaaggcaacggagggtgccacaacaccctttag

SEQ ID NO: 91502 - DNA, 975 bp, Artificial Sequence
  derived and/or modified sequence
atgggcaatctgttaaaggttttgacgtgtacagacctggagcagggccctaactttttcctcgacttcgaaaatgcacagcccacggaatctgagaaagagatttacaatcaggtcaatgtggtgctgaaagatgccgagggaattctggaagaccttcagagctatagaggggcaggacatgaaattcgtgaggccatccagcacccggcagatgagaagttgcaggaaaaggcctggggcgcagtggtccctctagtagggaaactgaaaaaattctatgaatttagccaaagactggaggcagcattgcgtggcctgcttggagccctgaccagcaccccatatagcccgactcagcatctagagagagagcaggctctggctaagcagtttgcagaaattctacacttcacactgcgctttgacgagctaaagatgacaaatcctgccattcagaacgacttctcttactatcgcaggaccctttcccgcatgaggatcaataatgttcccgcagaaggtgaaaacgaagtcaataacgaactcgcgaatcgcatgtcattattttatgctgaagctacaccgatgctgaaaaccttatcagatgctaccacgaagttcgtctctgagaacaaaaatctcccaatcgaaaacaccaccgattgcctgtctaccatggcatcagtttgtcgggtcatgctggagaccccggaatatcgcagcaggttcactaatgaagagacagttagcttttgtctacgggtgatggtgggtgtaattatcctttacgaccatgtgcaccccgtcggagctttcgcaaagacctcaaaaatcgacatgaagggctgtatcaaagtcctgaaagatcagccacccaactctgtggaaggccttctgaatgctctgaggtacactaccaagcacctgaatgacgaaacaacgtccaaacagataaaatctatgctccagtag

SEQ ID NO: 91503 - DNA, 975 bp, Artificial Sequence
  derived and/or modified sequence
atgggcaatctgctcaaggtgctgacctgcactgatctggaacagggcccaaacttcttcctcgactttgagaatgcacagcctactgagtctgaaaaggagatctacaaccaggtcaacgtggtgctcaaagatgccgagggaattcttgaagacttacaatcttatagaggggcagggcatgaaattcgtgaagctatacagcaccccgctgatgagaagctccaggagaaagcgtggggggctgtagtccccttggtcggcaaattgaagaaattctatgaattctctcagcgcctggaggccgcactgcgcggtctgctcggcgcactcaccagcacaccatacagccccacgcaacatcttgagcgcgagcaggcactagccaaacagttcgcggaaattctacacttcacacttaggtttgatgaactgaagatgaccaacccggctatccagaacgacttctcctactacagacggacactgtcgagaatgagaattaataacgttcctgcagagggagaaaacgaggtaaataacgagttggcaaaccgaatgagtctgttttatgccgaggccacccccatgctcaagaccctctccgacgcaacaaccaaattcgtatccgagaacaaaaatctgccgatcgaaaacacaacagactgtctttccacgatggctagcgtgtgccgggtgatgttggagacccctgaataccgctccaggttcaccaacgaagaaacagtcagcttctgcctgcgcgttatggtgggagtcataatcttgtatgatcacgtgcacccagtcggtgcctttgctaaaacttctaaaatcgatatgaaagggtgcattaaggtgctgaaagaccagcccccaaactccgtggagggattgctaaacgccctccggtacaccaccaaacatttgaatgatgaaacgaccagcaaacagatcaaaagcatgcttcaatag

SEQ ID NO: 91504 - DNA, 192 bp, Artificial Sequence
  derived and/or modified sequence
atggggaatcttttgaaagtccttacttgcacagatcttgagcagggcccaaactttttccttgattttgagaacgctcaaccgaccgaaagcgagaaggaaatttacaatcaggttaatgtcgtcttgaaagacgctgaaggtatcctcgaggacctgcagtcgtatcgcggagccggtcatgaaatctag

SEQ ID NO: 91505 - DNA, 198 bp, Artificial Sequence
  derived and/or modified sequence
atgggcaacctgttgaaggttctgacgtgtacagaccttgagcagggtccaaacttctttctggatttcgaaaacgcccagcccaccgagagcgaaaaggagatttataaccaggtcaatgtcgtgttgaaggatgccgaaggcatcctcgaagacctccaaagttatagaggcgcaggtcacgaaatcagagaatag

SEQ ID NO: 91506 - DNA, 297 bp, Artificial Sequence
  derived and/or modified sequence
atgggcaatcttctgaaggtccttacatgcacagacttagaacagggccctaatttttttctggactttgaaaacgctcagccaacagagagcgagaaagagatctacaatcaggtgaacgtggtgcttaaggatgctgaagggattctcgaagatctccagagctatagaggtgccggacacgagatccgggaagccatccagcatccagcagacgagaagttgcaggaaaaagcttggggcgcagtggttccgctagtgggcaagttgaagaagttctacgaattctctcagtag

SEQ ID NO: 91507 - DNA, 207 bp, Artificial Sequence
  derived and/or modified sequence
atggggaatctgcttaaagtgctaacctgtacggatctggagcagggcccaaacttcttcctggatttcgagaacgcacagcctaccgagtctgaaaaagagatttacaaccaggtaaacgtggtgctcaaggatgctgaaggcattctggaagacttgcagagctataggggagccggacacgaaattagagaagccatccaatag

SEQ ID NO: 91508 - DNA, 147 bp, Artificial Sequence
  derived and/or modified sequence
atgggtaacctcctcaaggtcctaacttgtaccgatctcgagcagggacccaatttctttctcgattttgaaaacgctcagccaactgagagcgaaaaggagatttataaccaggtcaacgtggtcctcaaagacgcagagggctag

SEQ ID NO: 91509 - DNA, 975 bp, Artificial Sequence
  derived and/or modified sequence
atgggtaatctgttaaaagtgctgacatgcaccgatctcgagcagggcccaaacttcttcttagacttcgagaacgctcagcccactgagagcgagaaggaaatttacaatcaagtgaatgtcgtactaaaagatgcggagggtattcttgaagatcttcagtcctaccgtggagcgggtcacgagatacgggaggccattcagcaccctgccgatgaaaaacttcaagagaaagcttggggcgctgttgttcccctggtaggtaagctcaagaagttctacgaattctcacagcgcttggaggccgcactcaggggccttctaggcgctctcacatccaccccctacagtcctacacagcaccttgaaagggagcaggccctcgcaaaacaattcgccgagatcttacactttaccctgaggttcgacgaactgaaaatgaccaaccccgctattcagaatgattttagttactatcgtaggaccctgtccagaatgagaatcaataatgttccagcagagggcgagaatgaagtgaacaacgagcttgcaaataggatgtctctattctatgcagaggcaacgcccatgttgaagaccctcagcgacgctacaaccaaattcgtgagtgagaataaaaacctgccgattgagaacaccaccgactgtctgtcgactatggcatctgtgtgtcgagtcatgctggagaccccggagtacaggagtagatttacaaatgaggagacggttagtttctgtctgagggtcatggttggggtgattatcctctacgaccatgttcacccagtcggtgctttcgctaaaacatctaagattgatatgaaggggtgtatcaaggtcctgaaagatcaacccccaaattctgttgaggggctgctgaacgcgctcaggtacaccaccaaacatctgaacgatgagaccacgtcgaagcagatcaaatcaatgttacagtag

SEQ ID NO: 91510 - DNA, 468 bp, Artificial Sequence
  derived and/or modified sequence
atgggcaatttactgaaggtgctaacatgtaccgacctcgagcaaggcccaaacttcttcttggattttgaaaatgcacagcccacagaatcggaaaaggaaatttacaaccaggtcaatgtcgttctaaaagatgccgagggcatattagaggatctgcagagctatcgcggagcaggacacgaaattagagaggctatacagcacccagcagatgagaagctccaggaaaaggcctggggcgctgtcgtaccactggtgggtaagctgaaaaagttctatgaattctcacagagactggaggccgctctgaggggactcctaggcgcactgacatctaccccttacagtccaacgcaacatctggagcgagagcaggctctagcgaaacagttcgccgagatcctgcactttaccttaagatttgacgagttaaaggtggaactgtctataggcccagactgctag

SEQ ID NO: 91511 - DNA, 975 bp, Artificial Sequence
  derived and/or modified sequence
atgggtaatctgctgaaggtcctaacatgtacagatctggagcagggtcccaatttctttttggattttgagaatgcccaacccacggagagcgaaaaagagatatataaccaggtgaacgtcgtcctcaaggatgccgaggggattctcgaggatctgcagtcttataggggggctggacacgagatccgcgaagccatccagcacccagcagatgagaagctccaggagaaggcctggggagctgtcgtgccgctggtggggaaacttaagaagttctatgaattcagccagcgcctggaagccgctctgcggggtctactaggtgctctgacaagtacaccatactcgccaacccagcacttggagagagagcaagccctcgccaagcagtttgccgaaatacttcactttaccttaaggtttgacgaactgaaaatgacaaatcctgccatccagaacgacttcagttattatagaaggacactgtcccgcatgcggataaacaacgttccagctgaaggagagaacgaagttaacaacgaattggctaatagaatgtctttattctacgccgaggccaccccaatgttaaagactttgtctgatgcgaccactaagttcgtgagcgagaacaagaaccttccaatcgaaaataccaccgattgtttatctacaatggcatcagtatgcagagttatgttggaaacacctgagtatagaagtagattcaccaatgaggaaaccgtttccttctgcctcagggtgatggtaggagtcatcatcctctacgatcacgtgcatcccgtgggtgccttcgcaaaaacctccaaaattgatatgaagggctgcatcaaggtgctaaaggaccagccacccaacagtgtggagggactgctgaatgctttacggtacactaccaagcacctgaatgatgagaccaccagcaagcaaataaagtcgatgctgcagtag

SEQ ID NO: 91512 - DNA, 975 bp, Artificial Sequence
  derived and/or modified sequence
atggggaaccttctgaaggttttgacctgtaccgacctagagcaggggcctaacttttttctggatttcgagaacgcccagcccactgaatctgaaaaggagatctataatcaggtgaatgttgtacttaaagacgccgaggggattctagaggatttgcagtcctatcgcggtgctgggcacgaaattagggaggccatccagcaccccgcagacgagaaactgcaggaaaaggcatggggggcagtggtcccgctcgtgggcaagctgaagaaattttacgaatttagtcaacggctggaagcagcattgaggggcttgctcggcgctttgaccagcaccccatacagccccacgcagcacctggagcgtgaacaggccctggcaaaacagtttgccgagatacttcacttcaccttacggttcgatgagcttaagatgaccaaccctgctatccagaacgatttcagctattatagacgcactctgagtagaatgagaatcaacaatgtaccagccgagggggaaaatgaggtgaataacgaactcgcaaatcgcatgagcctgttctacgcagaggctacacccatgcttaaaacgctgtcggacgccaccacgaaattcgtgagtgagaacaaaaacctacctatcgagaataccaccgactgtctcagcaccatggccagcgtgtgcagagtaatgctggaaactccggagtaccggagtcgattcacaaacgaggagaccgtttcgttctgcctgagagtcatggttggcgtcataattctctacgatcacgtccaccctgtgggagcgttcgccaagacttctaagattgacatgaagggctgcataaaggtgctgaaagatcagcctccgaatagcgtggagggcctcctgaatgccctaagatacaccactaaacacctcaatgatgaaaccacctcaaaacagataaagagcatgttgcagtag

SEQ ID NO: 91513 - DNA, 303 bp, Artificial Sequence
  derived and/or modified sequence
atgggcaatctgttaaaggtcttgacttgcacggacctagagcagggtcctaacttttttcttgactttgaaaacgcccagccaaccgagtcagagaaagagatttataaccaagtgaacgtcgtgctcaaagatgcagagggcattttggaggaccttcagtcctacaggggggctggccacgagatcagggaggccatccaacaccccgctgatgagaaactacaggagaaagcctggggcgcagttgtcccactcgttgggaagttgaaaaagttttatgaattttctcagaggctctag

SEQ ID NO: 91514 - DNA, 240 bp, Artificial Sequence
  derived and/or modified sequence
atgggcaatcttctgaaggtcctcacatgcacggacctggaacagggcccaaattttttcctggattttgagaacgctcagcctactgagtctgagaaggagatttataatcaggtgaatgttgttttaaaagacgcggaaggtatcctggaagacctgcaatcctatcggggtgccggacacgagattcgggaagctattcagcaccccgcagatgagaagcttcaggagaaagcatag

SEQ ID NO: 91515 - DNA, 141 bp, Artificial Sequence
  derived and/or modified sequence
atggggaaccttctcaaggtgttgacgtgtaccgatctagagcagggccctaatttctttttagacttcgagaacgcgcagcccacggagtctgaaaaggagatatacaaccaggtgaacgtagttctgaaggacgcgtag

SEQ ID NO: 91516 - DNA, 975 bp, Artificial Sequence
  derived and/or modified sequence
atggggaatctgctaaaggtgctcacttgcaccgatctcgaacaggggcctaacttctttctcgactttgagaatgcccagcctaccgagtcagaaaaggagatatataaccaggtgaatgtcgtgttgaaggacgcagaaggaatcttggaggacctgcaatcttacaggggagccggacatgagattcgagaggccatccagcaccccgctgacgagaagctgcaggagaaggcttggggcgctgtggtgccactcgttggaaaattgaagaagttttatgagttttctcaaaggttggaggccgctctgagagggctgcttggcgcactgactagtactccctactcccccacacagcatctggaaagggaacaggctttggccaaacaatttgcagagattctccattttaccttgcgattcgacgagctgaagatgactaaccctgctatccaaaatgactttagttactatcgcagaactctgtccaggatgcggattaacaatgtgccagcagagggagaaaacgaggtgaataatgaactagctaatcgaatgtctcttttctatgcggaagccactcctatgttaaaaaccctgagcgacgctaccaccaaattcgtgtctgaaaacaaaaatttgccaatcgagaacactacagactgcctgagtactatggcaagcgtgtgtcgagtgatgttggagactccagaatacagatcaagattcactaatgaagaaacagtctccttttgcctgagggtgatggtgggggtgattattctgtatgaccatgtgcaccctgtgggagctttcgctaagacaagcaagatcgacatgaaggggtgtattaaggtgctgaaggaccagccacctaacagcgtggagggattgctcaacgcccttaggtatacaacgaaacatctgaatgacgaaacaacctcaaagcaaatcaaatcaatgttgcaatag

SEQ ID NO: 91517 - DNA, 975 bp, Artificial Sequence
  derived and/or modified sequence
atgggaaatctgctgaaggtcttgacctgtacggatttagaacaaggtcctaatttttttctggactttgagaacgcccaaccgactgagtccgagaaagagatttacaaccaggtgaacgtagtgctcaaagacgccgaagggatcctcgaagacctccagtcctatagaggggctggacatgaaattcgagaggccatccaacacccggctgacgagaaactgcaggagaaagcatggggtgccgtggtgcctcttgtcggaaaactcaagaaattctacgagttttctcaacgcttagaggctgcccttcggggactgctgggcgcactcaccagtacaccttattcaccaacacagcacttggaaagggaacaagccctggccaaacagttcgcagagattcttcactttaccctgagattcgatgaactgaagatgacaaaccccgctattcagaacgatttttcttattaccgcaggacactttccagaatgcggattaataatgtacccgctgagggggagaacgaggtcaacaacgagctggccaacagaatgagcctcttttatgcggaggccacacccatgctcaagaccctttctgacgcaactacaaagtttgtgtctgagaataagaaccttccgatagagaacaccacggactgtctcagcactatggcgagtgtgtgccgcgtcatgctcgaaacgcctgagtaccgatctcgcttcactaacgaggagaccgtgagcttctgtctgagagtgatggtaggggtgatcatcctgtatgaccatgtccaccctgttggtgccttcgccaagaccagcaaaatcgatatgaaggggtgcatcaaggtgttgaaagaccagcctcctaactcggttgaaggtctccttaatgcactgcggtatacgacaaaacacctaaatgacgaaactaccagcaagcagattaagagcatgttacagtag

SEQ ID NO: 91518 - DNA, 282 bp, Artificial Sequence
  derived and/or modified sequence
atggggaacttactgaaagtgctcacctgcactgaccttgaacagggccctaacttcttcctggacttcgaaaatgctcagcctaccgagagcgaaaaggagatctacaaccaggttaatgttgtcctgaaagatgcagagggaatcctcgaagatctccagtcgtaccgaggggcaggccacgaaattcgcgaggccattcagcatcctgccgatgagaaacttcaggagaaggcctggggcgctgtcgtcccactggtgggaaaactgaagaagttctag

SEQ ID NO: 91519 - protein, 492 aa, Artificial Sequence
  derived and/or modified sequence
YSSPALFSSRAAPQKPRKEGSQAAGLLVFSDSLEIKRFLEDTTDDGELSKFVKDFSGNASCHPPEAKTWASRPQVPEPRPQAPDLYDDDLEFRPPSRPQSSDNQQYFCAPAPLSPSARPRSPWGKLDPYDSSEDDKEYVGFATLPNQVHRKSVKKGFDFTLMVAGESGLGKSTLVNSLFLTDLYRDRKLLGAEERIMQTVEITKHAVDIEEKGVRLRLTIVDTPGFGDAVNNTECWKPVAEYIDQQFEQYFRDESGLNRKNIQDNRVHCCLYFISPFGHGLRPLDVEFMKALHQRVNIVPILAKADTLTPPEVDHKKRKIREEIEHFGIKIYQFPDCDSDEDEDFKLQDQALKESIPFAVIGSNTVVEARGRRVRGRLYPWGIVEVENPGHCDFVKLRTMLVRTHMQDLKDVTRETHYENYRAQCIQSMTRLVVKERNRNKLTRESGTDFPIPAVPPGTDPETEKLIREKDEELRRMQEMLHKIQKQMKENY

SEQ ID NO: 91520 - DNA, 1479 bp, Artificial Sequence
  derived and/or modified sequence
tacagcagccccgccctgttcagcagcagagccgccccccagaagcccagaaaggagggcagccaggccgccggcctgctggtgttcagcgacagcctggagatcaagagattcctggaggacaccaccgacgacggcgagctgagcaagttcgtgaaggacttcagcggcaacgccagctgccacccccccgaggccaagacctgggccagcagaccccaggtgcccgagcccagaccccaggcccccgacctgtacgacgacgacctggagttcagaccccccagcagaccccagagcagcgacaaccagcagtacttctgcgcccccgcccccctgagccccagcgccagacccagaagcccctggggcaagctggacccctacgacagcagcgaggacgacaaggagtacgtgggcttcgccaccctgcccaaccaggtgcacagaaagagcgtgaagaagggcttcgacttcaccctgatggtggccggcgagagcggcctgggcaagagcaccctggtgaacagcctgttcctgaccgacctgtacagagacagaaagctgctgggcgccgaggagagaatcatgcagaccgtggagatcaccaagcacgccgtggacatcgaggagaagggcgtgagactgagactgaccatcgtggacacccccggcttcggcgacgccgtgaacaacaccgagtgctggaagcccgtggccgagtacatcgaccagcagttcgagcagtacttcagagacgagagcggcctgaacagaaagaacatccaggacaacagagtgcactgctgcctgtacttcatcagccccttcggccacggcctgagacccctggacgtggagttcatgaaggccctgcaccagagagtgaacatcgtgcccatcctggccaaggccgacaccctgaccccccccgaggtggaccacaagaagagaaagatcagagaggagatcgagcacttcggcatcaagatctaccagttccccgactgcgacagcgacgaggacgaggacttcaagctgcaggaccaggccctgaaggagagcatccccttcgccgtgatcggcagcaacaccgtggtggaggccagaggcagaagagtgagaggcagactgtacccctggggcatcgtggaggtggagaaccccggccactgcgacttcgtgaagctgagaaccatgctggtgagaacccacatgcaggacctgaaggacgtgaccagagagacccactacgagaactacagagcccagtgcatccagagcatgaccagactggtggtgaaggagagaaacagaaacaagctgaccagagagagcggcaccgacttccccatccccgccgtgccccccggcaccgaccccgagaccgagaagctgatcagagagaaggacgaggagctgagaagaatgcaggagatgctgcacaagatccagaagcagatgaaggagaactactag

SEQ ID NO: 91521 - DNA, 1479 bp, Artificial Sequence
  derived and/or modified sequence
tattcttcaccagctctatttagttcccgggctgcaccacagaaaccgcgcaaagagggctcccaagccgctggcctcttggtttttagcgatagccttgagataaagcgtttcctcgaggacaccactgatgatggcgaactgtccaaattcgtgaaggatttcagcgggaacgcctcctgtcacccgcctgaggccaagacttgggcatctaggccacaagttccagagcccaggccccaggcccctgacttatatgatgacgaccttgagttccgaccaccttcaaggccacagtccagcgacaaccaacagtacttttgtgcacctgcgcccctctctccgtccgctaggccaagatccccatggggcaagctcgacccttatgacagcagcgaagatgataaggaatacgtgggtttcgccaccctgccaaatcaagtgcacagaaaatccgtgaaaaagggatttgatttcacactgatggtcgccggcgagtcagggctgggtaagagtacacttgtgaatagtctgttcctcacagacctgtatcgagacaggaaactgctaggtgccgaggagcgcatcatgcagaccgttgaaataacaaaacacgcagttgacatcgaagagaagggagtgcggctgcgcctcacaattgtggatacccctggcttcggcgacgccgtgaacaatactgagtgttggaaacccgtggccgaatacattgaccagcaattcgaacaatattttagagatgaatctggcctgaaccgaaagaacattcaggataatagggtacattgctgcctctactttatctccccttttgggcacgggttacggccactggatgttgaattcatgaaggcactacaccaaagagtgaacatcgtgccaattctggctaaggcggatacgctaacaccgccggaggttgatcataagaaaagaaagatcagggaagaaattgagcattttggcataaagatttaccagttcccagactgcgacagcgacgaagatgaagactttaagctccaagaccaggctctgaaggagtctattccgttcgctgtcattggcagcaacacagtggtcgaggccaggggcagacgggtgcgagggcggctctacccatggggcatcgtggaggtagagaatcccggtcactgtgatttcgtgaaattgagaaccatgctcgtgagaacccacatgcaagacctgaaagacgtgacccgcgagactcattatgaaaattaccgagcccagtgcattcagagtatgacgcgtctggtcgtaaaggagcgcaaccggaataaactcactcgggagagtggaacggactttcctattcctgcagtaccaccaggtacggatccagagacagagaaactgattcgggagaaagacgaggagctcagacggatgcaggagatgctacataaaatccaaaagcaaatgaaagagaactactag

SEQ ID NO: 91522 - DNA, 1479 bp, Artificial Sequence
  derived and/or modified sequence
tacagcagccctgccctcttcagcagcagagctgccccccagaagcccaggaaggagggcagccaggccgccggcctgctggtgttcagtgacagcctggagatcaagcgcttcctggaggacaccacagatgatggagagctgagcaagtttgtgaaggacttctctggaaatgccagctgccaccccccagaggccaagacctgggccagccggccccaggtgcctgagccccggccccaggccccagacctgtatgatgatgacctggagttccggccccccagccggccccagagcagtgacaaccagcagtacttctgtgccccagcccccctgagccccagcgcccggcccaggagcccctggggcaagctggacccctatgacagcagtgaagatgacaaggagtatgtgggctttgccaccctgcccaaccaggtgcacaggaagtctgtgaagaagggctttgacttcaccctgatggtggccggggagagcggcctgggcaagagcaccctggtgaacagcctcttcctgacagacctgtacagagacaggaagctgctgggcgctgaggagcgcatcatgcagacagtggagatcaccaagcatgctgtggacatcgaggagaagggcgtgcggctgcggctgaccatcgtggacaccccaggctttggagatgctgtgaacaacacagagtgctggaagcctgtggccgagtacatcgaccagcagtttgagcagtacttcagagatgaaagtggcctgaacaggaagaacatccaggacaacagagtgcactgctgcctgtacttcatcagcccctttggacatggcctgcggcccctggatgtggagttcatgaaggccctgcaccagagggtgaacatcgtgcccatcctggccaaggctgacaccctgaccccacctgaggtggaccacaagaagaggaagatccgggaggagattgagcacttcggcatcaagatctaccagttcccagactgtgacagtgatgaagatgaggacttcaagctgcaggaccaggccctgaaggagagcatcccctttgctgtgattggcagcaacacagtggtggaggcccggggccggcgggtgcggggccgcctgtacccctggggcatcgtggaggtggagaaccctggccactgtgactttgtgaagctgcggaccatgctggtgaggacccacatgcaggacctgaaggatgtgacccgggagacccactatgagaactaccgggcccagtgcatccagagcatgacccggctggtggtgaaggagaggaacagaaacaagctgacccgggagagcggcacagacttccccatcccagctgtgcccccaggcacagatcctgagacagagaagctgatccgggagaaggatgaggagctgcggaggatgcaggagatgctgcacaagatccagaagcagatgaaggagaactactag

SEQ ID NO: 91523 - DNA, 1479 bp, Artificial Sequence
  derived and/or modified sequence
tacagcagccccgccctgttcagcagccgggccgccccccagaagccgaggaaagaaggcagccaggcggccggactgttggttttttctgactctctggagattaagaggttcctcgaagacaccaccgacgatggagagctgtctaagttcgtgaaggatttttcaggcaatgcctcttgccatccacccgaagcaaaaacctgggcctcccgcccccaggttcccgaaccccgcccacaggctccagacttgtacgatgatgatctggagttcagaccaccatcacgaccccagtcttctgataaccagcaatacttttgcgctcccgccccactgagtccgtccgctagaccccgcagcccctggggcaagttagacccctatgattcttctgaagacgacaaagaatatgtcggtttcgctaccctacccaatcaggttcatcgcaagtctgttaagaagggcttcgacttcacgctcatggtcgctggcgaatccgggctaggcaagagtactctggtaaacagcctgtttctcactgacctgtaccgagaccggaagttgttaggggcggaagaacggattatgcagacggtggaaatcaccaaacacgccgtcgacattgaagagaaaggggtgaggctgcgccttaccatcgtcgacacgccaggttttggagacgccgtgaataacacagaatgttggaagccagtggccgagtatatagaccaacagtttgagcaatattttagggacgagagtggactgaaccgcaagaatattcaggataaccgcgttcactgttgtctctatttcataagtccttttgggcatggcttgcgaccgctcgatgtggagtttatgaaagctttacatcagcgcgtgaacattgttcccatcttggccaaagccgataccctgacacctcctgaggtggatcacaagaaaaggaagatccgtgaggaaatcgagcatttcggcattaaaatatatcagtttccagactgtgactcagacgaggatgaagactttaagctgcaagaccaggctctgaaggaaagcatcccctttgcagttattgggtctaatacagttgtggaggctagagggaggcgcgtgcgggggagactgtatccgtggggaatcgtcgaagtggaaaacccaggacattgtgattttgtcaaactgcgtacaatgctcgtgaggacgcatatgcaggacttgaaggacgtgacgagggaaactcactacgaaaattatcgtgctcagtgcatccagagcatgacacggcttgtagtgaaggaaagaaatagaaacaagctaaccagggagagcggcacggatttcccaatccctgctgttccgcctggcactgaccccgaaactgaaaagctgatccgcgaaaaagacgaagaactgcgccgtatgcaggagatgctgcacaagattcagaagcagatgaaggagaactattag

SEQ ID NO: 91524 - DNA, 1479 bp, Artificial Sequence
  derived and/or modified sequence
tactcttccccggcactcttctcatcaagagcggctcctcagaagcctaggaaggagggatcccaggccgctgggttacttgtgtttagcgatagtctggagattaagcgattcctggaagacacaaccgatgacggggagttaagtaagttcgtgaaggatttttccgggaatgccagctgccatccacccgaagctaaaacttgggcgtcccggccacaggtccctgaacccagacctcaggcaccagacttgtacgacgacgatctggagttcaggccaccatcacgcccacagtccagtgataaccagcagtacttctgcgccccagccccactgtcaccatcggctcgcccaagatccccctggggaaagctcgatccatatgactcctctgaggatgacaaagaatatgtggggtttgctacgctgcctaatcaggttcatcggaaatctgtaaaaaagggttttgactttaccctgatggtggccggtgaaagtggacttggtaagagtaccctcgtgaattccctgtttctgacagatctgtaccgggaccgcaaactgttgggagccgaggaaagaatcatgcagacagtagagattacaaaacatgccgtggatatcgaggagaaaggcgtgcgcctccggttgaccatcgttgatacccctggcttcggagacgcagtgaacaacacggagtgctggaagcctgtggccgagtatatcgaccagcaattcgagcagtacttccgggatgagtccggtttgaataggaagaatatccaagataaccgcgttcattgctgtctgtattttataagcccattcggtcatggactccggccacttgatgttgaatttatgaaggcgcttcaccaacgagtgaatatcgttccaatcctcgccaaagcggatacccttactcctcccgaggtcgaccataaaaagcgcaagatcagggaggaaatagaacatttcggaatcaaaatataccagtttcctgactgtgactctgacgaggacgaggacttcaagttgcaggatcaagcgctcaaagaaagtattccgttcgcggtgatcgggtctaacaccgtcgtggaagcaagaggcaggagggtgagaggcagactgtatccttggggtatcgtcgaagtggaaaacccaggacactgtgactttgttaagcttcggacaatgctggtaagaactcacatgcaggatctgaaggacgtcacgagggagacccattacgagaattaccgcgctcagtgcatccagagcatgactcgacttgtggtaaaggagaggaatcgcaacaagctgactcgggagagcggaactgactttcccatacccgcagtgccaccgggaaccgacccagagacagaaaagctgatcagagaaaaggacgaggagctgcgcagaatgcaggagatgctgcacaagatacaaaagcaaatgaaggagaactactag

SEQ ID NO: 91525 - DNA, 1650 bp, Artificial Sequence
  derived and/or modified sequence
tacagctctccagccctgttcagcagcagagctgctccccagaagccaagaaaagaaggctcccaagcagctgggctgctggtcttctctgactctctggagatcaagcgtttcctggaggacaccacggatgatggagaactgagcaagttcgtgaaggatttctcaggaaatgcgagctgccacccaccagaggctaagacctgggcatccaggccccaagtcccggagccaaggccccaggccccggacctctatgatgatgacctggagttcagacccccctcgcggccccagtcctctgacaaccagcagtacttctgtgccccagcccctctcagcccatctgccaggccccgcagcccatggggcaagcttgatccctatgattcctctgaggatgacaaggagtatgtgggctttgcaaccctccccaaccaagtccaccgaaagtccgtgaagaaaggctttgactttaccctcatggtggcaggagagtctggcctgggcaaatccacacttgtcaatagcctcttcctcactgatctgtaccgggaccggaaacttcttggtgctgaagagaggatcatgcaaactgtggagatcactaagcatgcagtggacatagaagagaagggtgtgaggctgcggctcaccattgtggacacaccaggttttggggatgcagtcaacaacacagagtgctggaagcctgtggcagaatacattgatcagcagtttgagcagtatttccgagacgagagtggcctgaaccgaaagaacatccaagacaacagggtgcactgctgcctgtacttcatctcacccttcggccatgggctccggccattggatgttgaattcatgaaggccctgcatcagcgggtcaacatcgtgcctatcctggctaaggcagacacactgacacctcccgaagtggaccacaagaaacgcaaaatccgggaggagattgagcattttggaatcaagatctatcaattcccagactgtgactctgatgaggatgaggacttcaaattgcaggaccaagccctaaaggaaagcatcccatttgcagtaattggcagcaacactgtagtagaggccagagggcggcgagttcggggtcgactctacccctggggcatcgtggaagtggaaaacccagggcactgcgactttgtgaagctgaggacaatgctggtacgtacccacatgcaggacctgaaggatgtgacacgggagacacattatgagaactaccgggcacagtgcatccagagcatgacccgcctggtggtgaaggaacggaatcgcaacaaactgactcgggaaagtggtaccgacttccccatccctgctgtcccaccagggacagatccagaaactgagaagcttatccgagagaaagatgaggagctgcggcggatgcaggagatgctacacaaaatacaaaaacagatgaaggagaactattaactggctttcagccctggatatttaaatctcctcctcttcttcctgtccatgccggcccctcccagcaccagctctgctcaggccccttcagctactgccacttcgccttacatccctgctgactgcccagagactcagaggaaataaagtttaataaatctgtaggtggct

SEQ ID NO: 91526 - DNA, 1479 bp, Artificial Sequence
  derived and/or modified sequence
atgcgcagcagccccgccctgttcagcagccgcgccgccccccagaagccccgcaaggagggcagccaggccgccggcctgctggtgttcagcgacagcctggagatcaagcgcttcctggaggacaccaccgacgacggcgagctgagcaagttcgtgaaggacttcagcggcaacgccagctgccacccccccgaggccaagacctgggccagccgcccccaggtgcccgagccccgcccccaggcccccgacctgtacgacgacgacctggagttccgcccccccagccgcccccagagcagcgacaaccagcagtacttctgcgcccccgcccccctgagccccagcgcccgcccccgcagcccctggggcaagctggacccctacgacagcagcgaggacgacaaggagtacgtgggcttcgccaccctgcccaaccaggtgcaccgcaagagcgtgaagaagggcttcgacttcaccctgatggtggccggcgagagcggcctgggcaagagcaccctggtgaacagcctgttcctgaccgacctgtaccgcgaccgcaagctgctgggcgccgaggagcgcatcatgcagaccgtggagatcaccaagcacgccgtggacatcgaggagaagggcgtgcgcctgcgcctgaccatcgtggacacccccggcttcggcgacgccgtgaacaacaccgagtgctggaagcccgtggccgagtacatcgaccagcagttcgagcagtacttccgcgacgagagcggcctgaaccgcaagaacatccaggacaaccgcgtgcactgctgcctgtacttcatcagccccttcggccacggcctgcgccccctggacgtggagttcatgaaggccctgcaccagcgcgtgaacatcgtgcccatcctggccaaggccgacaccctgaccccccccgaggtggaccacaagaagcgcaagatccgcgaggagatcgagcacttcggcatcaagatctaccagttccccgactgcgacagcgacgaggacgaggacttcaagctgcaggaccaggccctgaaggagagcatccccttcgccgtgatcggcagcaacaccgtggtggaggcccgcggccgccgcgtgcgcggccgcctgtacccctggggcatcgtggaggtggagaaccccggccactgcgacttcgtgaagctgcgcaccatgctggtgcgcacccacatgcaggacctgaaggacgtgacccgcgagacccactacgagaactaccgcgcccagtgcatccagagcatgacccgcctggtggtgaaggagcgcaaccgcaacaagctgacccgcgagagcggcaccgacttccccatccccgccgtgccccccggcaccgaccccgagaccgagaagctgatccgcgagaaggacgaggagctgcgccgcatgcaggagatgctgcacaagatccagaagcagatgaaggagaactac

SEQ ID NO: 91527 - protein, 1098 aa, Artificial Sequence
  derived and/or modified sequence
MTSEEKKERPISMINEASNYNVTSDYAVHPMSPVGRTSRASKKVHNFGKRSNSIKRNPNAPVVRRGWLYKQDSTGMKLWKKRWFVLSDLCLFYYRDEKEEGILGSILLPSFQIALLTSEDHINRKYAFKAAHPNMRTYYFCTDTGKEMELWMKAMLDAALVQTEPVKRVDKITSENAPTKETNNIPNHRVLIKPEIQNNQKNKEMSKIEEKKALEAEKYGFQKDGQDRPLTKINSVKLNSLPSEYESGSACPAQTVHYRPINLSSSENKIVNVSLADLRGGNRPNTGPLYTEADRVIQRTNSMQQLEQWIKIQKGRGHEEETRGVISYQTLPRNMPSHRAQIMARYPEGYRTLPRNSKTRPESICSVTPSTHDKTLGPGAEEKRRSMRDDTMWQLYEWQQRQFYNKQSTLPRHSTLSSPKTMVNISDQTMHSIPTSPSHGSIAAYQGYSPQRTYRSEVSSPIQRGDVTIDRRHRAHHPKHVYVPDRRSVPAGLTLQSVSPQSLQGKTMKENEPIITMVHTMIENSALRPQLYQQLSQDEGRGTLYKYRPEEVDIDAKLSRLCEQDKVVHALEEKLQQLHKEKYTLEQALLSASQEIEMHADNPAAIQTVVLQRDDLQNGLLSTCRELSRATAELERAWREYDKLEYDVTVTRNQMQEQLDHLGEVQTESAGIQRAQIQKELWRIQDVMEGLSKHKQQRGTTEIGMIGSKPFSTVKYKNEEEEVVPPRPPLPRSYDFTEQPPIIPPLPSDSSSLLCYSRGPVHLPEEKKMYQVQGYPRNGSHCGPDYRLYKSEPELTTVAEVDESNGEEKSEPVSEIETSVVKGSHFPVGVVPPRAKSPTPESSTIASYVTLRKTKKMMDLRTERPRSAVEQLCLAESTRPRMTVEEQMERIRRHQQACLREKKKGLNVIGASDQSPLQSPSNLRDNPFRTTQTRRRDDKELDTAIRENDVKPDHETPATEIVQLKETEPQNVDFSKELKKTENISYEMLFEPEPNGVNSVEMMDKERNKDKMPEDVTFSPQDETQTANHKPEEHPEENTKNSVDEQEETVISYESTPEVSRGNQTMAVKSLSPSPESSASPVPSTQPQLTEGSHFMCV

SEQ ID NO: 91528 - DNA, 3297 bp, Artificial Sequence
  derived and/or modified sequence
atgaccagcgaggagaagaaggagagacccatcagcatgatcaacgaggccagcaactacaacgtgaccagcgactacgccgtgcaccccatgagccccgtgggcagaaccagcagagccagcaagaaggtgcacaacttcggcaagagaagcaacagcatcaagagaaaccccaacgcccccgtggtgagaagaggctggctgtacaagcaggacagcaccggcatgaagctgtggaagaagagatggttcgtgctgagcgacctgtgcctgttctactacagagacgagaaggaggagggcatcctgggcagcatcctgctgcccagcttccagatcgccctgctgaccagcgaggaccacatcaacagaaagtacgccttcaaggccgcccaccccaacatgagaacctactacttctgcaccgacaccggcaaggagatggagctgtggatgaaggccatgctggacgccgccctggtgcagaccgagcccgtgaagagagtggacaagatcaccagcgagaacgcccccaccaaggagaccaacaacatccccaaccacagagtgctgatcaagcccgagatccagaacaaccagaagaacaaggagatgagcaagatcgaggagaagaaggccctggaggccgagaagtacggcttccagaaggacggccaggacagacccctgaccaagatcaacagcgtgaagctgaacagcctgcccagcgagtacgagagcggcagcgcctgccccgcccagaccgtgcactacagacccatcaacctgagcagcagcgagaacaagatcgtgaacgtgagcctggccgacctgagaggcggcaacagacccaacaccggccccctgtacaccgaggccgacagagtgatccagagaaccaacagcatgcagcagctggagcagtggatcaagatccagaagggcagaggccacgaggaggagaccagaggcgtgatcagctaccagaccctgcccagaaacatgcccagccacagagcccagatcatggccagataccccgagggctacagaaccctgcccagaaacagcaagaccagacccgagagcatctgcagcgtgacccccagcacccacgacaagaccctgggccccggcgccgaggagaagagaagaagcatgagagacgacaccatgtggcagctgtacgagtggcagcagagacagttctacaacaagcagagcaccctgcccagacacagcaccctgagcagccccaagaccatggtgaacatcagcgaccagaccatgcacagcatccccaccagccccagccacggcagcatcgccgcctaccagggctacagcccccagagaacctacagaagcgaggtgagcagccccatccagagaggcgacgtgaccatcgacagaagacacagagcccaccaccccaagcacgtgtacgtgcccgacagaagaagcgtgcccgccggcctgaccctgcagagcgtgagcccccagagcctgcagggcaagaccatgaaggagaacgagcccatcatcaccatggtgcacaccatgatcgagaacagcgccctgagaccccagctgtaccagcagctgagccaggacgagggcagaggcaccctgtacaagtacagacccgaggaggtggacatcgacgccaagctgagcagactgtgcgagcaggacaaggtggtgcacgccctggaggagaagctgcagcagctgcacaaggagaagtacaccctggagcaggccctgctgagcgccagccaggagatcgagatgcacgccgacaaccccgccgccatccagaccgtggtgctgcagagagacgacctgcagaacggcctgctgagcacctgcagagagctgagcagagccaccgccgagctggagagagcctggagagagtacgacaagctggagtacgacgtgaccgtgaccagaaaccagatgcaggagcagctggaccacctgggcgaggtgcagaccgagagcgccggcatccagagagcccagatccagaaggagctgtggagaatccaggacgtgatggagggcctgagcaagcacaagcagcagagaggcaccaccgagatcggcatgatcggcagcaagcccttcagcaccgtgaagtacaagaacgaggaggaggaggtggtgccccccagaccccccctgcccagaagctacgacttcaccgagcagccccccatcatcccccccctgcccagcgacagcagcagcctgctgtgctacagcagaggccccgtgcacctgcccgaggagaagaagatgtaccaggtgcagggctaccccagaaacggcagccactgcggccccgactacagactgtacaagagcgagcccgagctgaccaccgtggccgaggtggacgagagcaacggcgaggagaagagcgagcccgtgagcgagatcgagaccagcgtggtgaagggcagccacttccccgtgggcgtggtgccccccagagccaagagccccacccccgagagcagcaccatcgccagctacgtgaccctgagaaagaccaagaagatgatggacctgagaaccgagagacccagaagcgccgtggagcagctgtgcctggccgagagcaccagacccagaatgaccgtggaggagcagatggagagaatcagaagacaccagcaggcctgcctgagagagaagaagaagggcctgaacgtgatcggcgccagcgaccagagccccctgcagagccccagcaacctgagagacaaccccttcagaaccacccagaccagaagaagagacgacaaggagctggacaccgccatcagagagaacgacgtgaagcccgaccacgagacccccgccaccgagatcgtgcagctgaaggagaccgagccccagaacgtggacttcagcaaggagctgaagaagaccgagaacatcagctacgagatgctgttcgagcccgagcccaacggcgtgaacagcgtggagatgatggacaaggagagaaacaaggacaagatgcccgaggacgtgaccttcagcccccaggacgagacccagaccgccaaccacaagcccgaggagcaccccgaggagaacaccaagaacagcgtggacgagcaggaggagaccgtgatcagctacgagagcacccccgaggtgagcagaggcaaccagaccatggccgtgaagagcctgagccccagccccgagagcagcgccagccccgtgcccagcacccagccccagctgaccgagggcagccacttcatgtgcgtgtag

SEQ ID NO: 91529 - DNA, 3297 bp, Artificial Sequence
  derived and/or modified sequence
atgacatccgaagagaaaaaggagcggcctatcagcatgatcaatgaggcctcaaattataatgtaaccagcgactatgccgtccatcctatgagccccgtagggagaactagccgggccagcaagaaggtccataacttcgggaaacgctctaacagcattaagcgtaatcctaatgcacccgtggttagaagaggatggttgtacaaacaggactcaacaggaatgaagctgtggaagaagaggtggttcgttctgtccgatctttgtctgttttactatagggacgaaaaagaggagggtattctaggctcaatcctgctgccctcttttcagattgccttgctgacttccgaggaccacatcaatagaaaatacgctttcaaagcggctcatccaaacatgcggacttactatttttgtactgataccggcaaggaaatggaactatggatgaaagcgatgctggacgcggcattggtgcagacggaaccggtgaagagggttgacaaaataacctcggagaacgctccaactaaggagaccaataatatccctaatcaccgggtgctcataaaaccagaaatacagaataatcagaaaaacaaggagatgtcaaaaatagaagagaagaaggccctcgaagccgagaagtatggcttccagaaggatggacaggatagaccactcacaaagatcaatagcgtgaagttgaactccctcccgtccgaatatgaatccggatctgcttgcccagcacagaccgtccactataggccgatcaacctgagctcatctgagaataaaatcgtcaatgtgagcctggcggacctgaggggggggaaccggccaaacacaggccccttgtatacagaagcggatcgggtaatccagaggactaattccatgcagcaactcgagcagtggataaagatccagaaaggccgaggacacgaggaggagacccgtggagtaatttcatatcagactcttccaaggaacatgcctagccaccgggcccagatcatggcccggtaccccgaaggttacaggacattgccaaggaatagcaaaactagacctgagtccatctgctcagttaccccttcaacgcacgacaagacattgggccccggggctgaggaaaagcggcggtcgatgcgcgacgataccatgtggcagctgtacgaatggcagcagagacagttctataataagcagagcacactgccccgccactcgacgctgagttcacctaagaccatggttaatatctcagatcagaccatgcactctatcccaacatcgccttcccacggatcaattgctgcttaccaagggtattctccccagcgcacttatagatcagaggtgagtagtccaatacaaaggggtgacgtaaccattgaccgaagacatcgtgcacatcacccgaaacacgtgtatgtcccagatcgtaggtccgtgccagccggcctgacactccagtccgtctcccctcaatcacttcaaggtaaaacgatgaaagagaatgaacccataatcaccatggtccatactatgatcgagaactcagcccttagaccacaattgtatcagcagctgagccaagacgagggacgcggcactctttacaaataccgaccagaagaggtagatattgacgccaaactctctagactgtgtgagcaggataaagtagttcacgctttagaagagaagctgcagcaacttcataaggagaagtacaccctcgaacaggctctgctctctgcaagccaagagatcgagatgcacgctgacaaccctgctgctattcagacagtggtgttacaaagggatgacctccagaacggcctgctttctacctgcagggagctttcacgggcgaccgcggagctcgagagagcttggagggagtatgataagctcgagtatgacgttacagttacccgcaatcagatgcaggaacagttggaccacttgggggaggttcaaacagaatccgctggcatccagcgggcacaaattcagaaggaactgtggcggatccaggacgtgatggagggactctccaagcacaaacaacaacgggggaccacagaaatcggtatgatcggctcaaaacccttcagcacagtgaaatataaaaatgaggaggaagaggtggtcccacccaggccaccactgccccgatcttacgacttcaccgagcagcctcctatcataccacctcttccctctgattcaagttctctgctctgctactctcgtggaccagttcacctccctgaagagaagaaaatgtaccaggtgcagggctacccccggaacggctcgcactgtggtcctgattataggctgtacaaatccgaacctgaactgaccactgtagctgaagtagacgaatccaacggcgaggagaaatcagaaccggtatccgagattgaaaccagcgtcgtgaaaggctcccatttccctgtgggcgtcgtccctcctcgcgctaagtcacccacccccgaatcctccaccatcgcctcatatgtgacactgcgcaaaaccaagaaaatgatggacttaaggacagaaaggcctcgctcagccgtggaacagctctgcctggcagagtccacacgccccaggatgactgttgaggagcagatggagcgaatcagaaggcaccagcaggcctgtctgagagagaaaaagaaaggcttaaacgtgatcggggcctccgaccagtctcctctccagtcacccagcaatctgcgggacaacccatttcgcaccacccagacaagacggcgtgatgataaggaactggacacggccatccgggagaatgatgtcaaacccgaccatgagacaccggccacagagattgtgcagctgaaagagaccgaaccccaaaacgtagatttttccaaagagctgaagaaaacggaaaacatcagctatgagatgctgttcgagcctgaaccaaacggcgtgaactcagttgagatgatggacaaggagaggaataaggacaagatgcctgaagacgtaacgttctctccgcaggacgaaacccaaacagccaaccataaacccgaggaacatccagaagaaaataccaaaaacagcgtagatgaacaagaggagacggttattagctacgaatctactccagaagtgtcccgaggaaatcagaccatggctgtgaaaagcctgtcccctagccctgagtccagcgcctcgccagtcccaagtacgcaacctcaacttacggaaggctctcactttatgtgcgtttag

SEQ ID NO: 91530 - DNA, 3297 bp, Artificial Sequence
  derived and/or modified sequence
atgaccagcgaggagaagaaggagcggcccatctccatgatcaatgaggccagcaactacaacgtgaccagtgactatgctgtgcaccccatgagccctgtgggccgcaccagccgggccagcaagaaggtgcacaactttgggaagaggagcaacagcatcaagaggaaccccaatgcccctgtggtgcggcggggctggctgtacaagcaggacagcacaggcatgaagctgtggaagaagcgctggtttgtgctgagtgacctgtgcctcttctactacagagatgagaaggaggagggcatcctgggcagcatcctgctgcccagcttccagatcgccctgctgaccagcgaggaccacatcaacagaaaatatgccttcaaggccgcccaccccaacatgaggacctactacttctgcacagacaccgggaaggagatggagctgtggatgaaggccatgctggatgctgccctggtgcagacagagcctgtgaagagggtggacaagatcaccagtgaaaatgcccccaccaaggagaccaacaacatccccaaccaccgggtgctgatcaagccagagatccagaacaaccagaagaacaaggagatgagcaagattgaggagaagaaggccctggaggccgagaagtatggcttccagaaggatggccaggaccggcccctgaccaagatcaacagcgtgaagctgaacagcctgcccagtgaatatgaaagtggcagcgcctgcccagcccagacagtgcactaccggcccatcaacctgagcagcagcgagaacaagatcgtgaatgtgtccctggccgacctgcggggcggcaaccggcccaacacaggccccctgtacacagaagctgacagagtcatccagaggaccaacagcatgcagcagctggagcagtggatcaagatccagaagggccggggccacgaggaggagacccggggcgtcatctcctaccagaccctgcccaggaacatgcccagccaccgggcccagatcatggcccgctacccagagggctaccgcaccctgcccaggaacagcaagaccaggcctgagagcatctgcagcgtgacccccagcacccatgacaagaccctgggccctggagctgaggagaagaggaggtccatgagagatgacaccatgtggcagctgtatgagtggcagcagaggcagttctacaacaagcagagcaccctgcccaggcacagcaccctgagcagccccaagaccatggtgaacatcagtgaccagaccatgcacagcatccccaccagccccagccacggcagcattgctgcctaccagggctacagcccccagaggacctacagaagtgaggtgagcagccccatccagagaggagatgtgaccatcgacagaagacaccgggcccaccaccccaagcacgtgtatgtgcctgaccggcgctctgtgcctgctggcctgaccctgcagagcgtgagcccccagagcctgcagggcaagaccatgaaggaaaatgagcccatcatcaccatggtgcacaccatgattgaaaattctgccctgcggccccagctgtaccagcagctgagccaggatgagggccggggcaccctgtacaagtacagacctgaggaggtggacattgatgccaagctgagccggctgtgtgagcaggacaaggtggtgcacgccctggaggagaagctgcagcagctgcacaaggagaagtacaccctggagcaggccctgctgagcgccagccaggagattgagatgcacgccgacaacccagctgccatccagacagtggtgctgcagagagatgacctgcagaatggcctgctgagcacctgccgggagctgagccgggccacagctgagctggagcgggcctggagagaatatgacaagctggagtatgatgtgacagtgaccaggaaccagatgcaggagcagctggaccacctgggggaggtgcagacagaatctgctggcatccagagggcccagatccagaaggagctgtggaggatccaggatgtgatggagggcctgagcaagcacaagcagcagaggggcaccacagaaattggcatgattggcagcaagcccttcagcacagtgaagtacaagaatgaggaggaggaggtggtgcccccccggccccccctgcccaggagctatgacttcacagagcagccccccatcatcccccccctgcccagcgacagcagcagcctgctgtgctacagccggggccctgtgcacctgcctgaggagaagaagatgtaccaggtgcagggctaccccagaaatggcagccactgcggccctgactaccgcctgtacaagtctgagcctgagctgaccaccgtggccgaggtggatgagagcaatggagaggagaagtctgagcctgtgtctgaaattgagacctctgtggtgaagggcagccacttccctgtgggcgtggtgcccccccgggccaagagccccaccccagagagcagcaccatcgccagctatgtgaccctgaggaagaccaagaagatgatggacctgaggacagagcggcccaggtctgctgtggagcagctgtgcctggccgagagcacccggcccaggatgacagtggaggagcagatggagcgcatccgccgccaccagcaggcctgcctgcgggagaagaagaagggcctgaatgtgattggagccagtgaccagagccccctgcagagccccagcaacctgcgggacaaccccttccgcaccacccagaccaggagaagagatgacaaggagctggacacagccatcagagaaaatgatgtgaagccagaccacgagaccccagccacagaaattgtgcagctgaaggagacagagccccagaatgtggacttcagcaaggagctgaagaagacagagaacatctcctatgagatgctgtttgagcctgagcccaatggagtgaacagcgtggagatgatggacaaggagaggaacaaggacaagatgccagaagatgtgaccttcagcccccaggatgagacccagacagccaaccacaagccagaggagcaccctgaggagaacaccaagaacagcgtggatgagcaggaggagaccgtcatctcctatgagagcaccccagaggtgtcccggggcaaccagaccatggctgtgaagagcctgagccccagccctgagagcagcgccagccctgtgcccagcacccagccccagctgacagagggcagccacttcatgtgtgtgtag

SEQ ID NO: 91531 - DNA, 3297 bp, Artificial Sequence
  derived and/or modified sequence
atgaccagcgaggagaagaaggagcggcccatcagcatgatcaacgaagccagcaactataatgttactagtgactacgcagtgcaccctatgtcacccgtgggccggacaagcagagcttcaaaaaaagtgcataactttggtaaacgatctaatagtatcaaacggaaccccaacgcaccagtagtgcgaagaggctggctgtataaacaggattccaccggaatgaaactgtggaaaaagcggtggttcgttctgtcggacctctgcctgttctattaccgagatgagaaagaagagggcattttaggatctattcttctcccctcgttccaaattgctttactcacttctgaggatcacatcaatagaaagtacgcttttaaagccgcacacccaaatatgcggacttactatttttgtacagacaccggaaaagagatggagttgtggatgaaagcaatgttggatgcagccctggttcagacagaacccgttaagagggtggataagataaccagcgagaatgcgccaactaaggagacaaataatatccccaaccaccgggtattgataaagccagagatccaaaataatcagaaaaataaggaaatgtcaaagattgaggagaagaaggccttggaagccgagaaatatggctttcagaaagatggccaggatcgcccattaaccaagatcaatagcgtcaagttaaactcccttccctccgagtatgagtccgggtcagcttgcccagctcagacggttcattacagacctataaacctcagcagtagtgaaaacaaaatcgtgaatgtctctttggcggatttgcgggggggcaatcgccctaacactgggcccctgtacaccgaagctgacagagtgattcaacgaactaattctatgcagcaactcgagcagtggattaagatccagaagggtaggggccacgaggaggagacaagaggagtaatctcataccagacgttgccacggaatatgccaagccacagagcccagatcatggcgcgttaccccgaaggctatagaaccctgcctcggaattctaaaactagaccagaatcaatttgcagcgtgactcctagtacacacgacaagactttggggccgggagccgaagaaaagaggcgctctatgcgggacgacaccatgtggcagttatatgagtggcagcagcggcagttctataacaagcagtcaactctgcctcggcacagcacactcagctcccctaagactatggttaacatctcggaccaaaccatgcacagcatacctacaagcccttcccacggctccattgctgcctaccaaggctactctccccagaggacctatagatcagaggtatctagcccgatccagcggggtgacgttacgattgaccgacgtcacagagcccaccatcccaaacatgtttatgttcctgatcggaggagtgttcctgcgggcctgacactgcaaagcgttagcccacagtccctgcaaggcaagacaatgaaggagaacgagcccatcatcaccatggtgcacaccatgatcgagaatagtgctctgcgcccacagctgtatcagcagttgtcccaggatgagggaaggggtaccctttacaaatatcggcccgaggaagtggatatagacgccaagttgtcgcggctgtgcgagcaggacaaggttgtacacgcgctggaggagaagctgcagcagctgcataaggagaaatacacactagagcaggcgctcctgtcggccagccaagaaattgaaatgcacgcagacaatccagcagctattcagaccgtcgtactgcagagagacgacctccagaacgggctgctgagcacctgtcgcgagctctcaagggccaccgctgaactggaaagggcctggcgtgaatacgacaaattggagtacgacgtaactgtgaccaggaaccagatgcaagaacagctggatcaccttggagaagtgcagactgaatctgcgggcattcaacgggctcagatacagaaggagctttggcgaattcaggatgtgatggaaggcttgtccaaacacaagcagcagcggggaactacagaaataggcatgatcggttcgaaaccattctctactgtgaagtacaagaacgaggaagaggaagttgttcctcctcggcctccactcccccggtcatacgactttactgagcagccccccatcattcctccactgccttccgactcaagttctctcctttgctattctcgggggccagtccatcttccagaagaaaagaagatgtaccaggtccaaggatacccccggaacggctcccactgcggccctgactataggttgtacaagtccgaacctgagctcaccaccgttgctgaggttgatgagagtaacggtgaagagaaatctgagcccgtatcagagattgagacttccgtagtgaaggggtctcactttcccgtgggcgttgtaccccccagagcgaaatctccaacacctgaatctagcacaattgcatcttatgttactttgcggaaaaccaaaaagatgatggatttgcggacggagcgtccgcgttccgccgtcgaacagttatgcctcgccgagtccacccgacctcggatgactgtagaagagcagatggagaggattagacgccaccagcaggcctgccttcgtgaaaaaaagaaggggctcaatgtgatcggtgctagtgaccagtccccccttcagtctccttccaacctcagggataaccccttcaggaccacacaaacacgacggagggatgacaaggaactggacactgccattcgggagaacgatgtgaagccagatcacgagaccccagcaaccgaaatagttcagctcaaagagactgagccacagaacgtggatttctccaaggagctgaagaaaactgagaatatttcatatgagatgctgtttgagcctgagccaaacggggtaaattctgtggagatgatggacaaagagaggaataaggacaagatgcccgaggatgtcactttcagtccccaggacgagacccagacagccaatcataagccagaagagcacccagaggagaacacaaagaactctgtggatgagcaagaggagacagtcattagttacgaatctaccccggaggtgagcagaggcaaccaaacaatggctgtaaaaagccttagcccctctccagagagctccgcctctcctgtgccaagtacccaaccccagctaacggaagggagtcatttcatgtgtgtgtag

SEQ ID NO: 91532 - DNA, 3297 bp, Artificial Sequence
  derived and/or modified sequence
atgacatcagaggaaaaaaaagagagacccattagcatgatcaatgaggcgtccaattacaatgttacttcagattacgctgtacacccaatgtctccagtcggtagaacttcacgggcttctaagaaagtgcataacttcgggaaaaggtctaattcaataaagagaaacccgaatgccccagtcgttcggagggggtggctgtacaaacaggattctactggtatgaagctttggaaaaagcgttggttcgttctgtcagacttatgcctcttctactatagagatgagaaggaagaagggatactcggatctatcctgctgccatcttttcagattgcgctgttgacctccgaggatcacatcaatcgaaaatatgccttcaaggccgctcatcccaatatgagaacttactatttttgcacggacactgggaaggaaatggaactatggatgaaggccatgttagacgccgcattggtgcagaccgagcctgtcaaacgagtggacaagattacctctgaaaacgccccaacgaaggagactaacaatattcccaatcaccgcgtcctcatcaaacctgaaatccagaacaaccaaaagaataaagaaatgtctaaaatagaggagaagaaggccctggaggccgagaagtacggatttcagaaagacggacaggatcgccctctgaccaagatcaatagcgttaaactcaattctctccccagtgaatatgaatctggaagcgcctgccctgcccagaccgtacactatcggcctattaacctaagctcatccgaaaataagatcgtaaacgtgagtctggctgacttaagaggcggtaacagacccaatactgggccactctatacagaggccgaccgcgtgattcagcggacaaattctatgcagcaactcgaacagtggataaagatccaaaaaggtaggggtcacgaggaggagactcgcggtgtgatcagttatcagactctgcccaggaatatgcctagtcatcgggcacagattatggcacggtaccctgaaggctaccggactctcccgaggaactccaaaacgagaccggagagtatctgttctgtaactccgtccacacacgacaaaaccctaggcccaggagctgaggagaagaggagatcgatgcgcgacgacactatgtggcagctctacgaatggcagcagcgccagttttacaacaagcagagcacactgcccagacactccacactgtcatcacccaaaaccatggttaatatatccgaccagacgatgcattccattccaacatctccgtctcatgggtcaatagctgcttaccagggttactcaccacagaggacctataggagcgaggtctcatcacccatccagagaggtgatgtcacaatcgatcgtcggcatcgggcacatcacccaaagcacgtgtatgttcccgataggcgatctgtccccgctggactcactctgcagtccgtgagtcctcagtccctacagggcaagactatgaaggagaatgaacctatcatcaccatggtgcatactatgattgaaaattccgctctgcgccctcagctgtaccaacagttgtcacaagatgagggcagaggcactctgtataaatataggcccgaggaggtggacatcgacgctaagctgagccggctgtgtgaacaagataaggtagtacatgccttggaggaaaagctgcaacaactgcataaagagaagtataccctggaacaggcactcctatcggcttctcaggaaatcgagatgcatgccgacaatcccgcagccatccagactgtcgttctgcagagggatgaccttcaaaacggtctcctctccacttgtcgcgagcttagcagggcaaccgccgaattggaaagggcctggcgtgagtatgataaactcgaatacgatgtgacagtcacccgcaatcaaatgcaggagcaactagaccacctcggtgaagtccagacagagagtgctggcatacagagggcccaaatccagaaggagttgtggagaatccaagatgtgatggagggactcagcaagcataagcagcaaaggggaacaactgaaattggcatgatagggtcaaagccattttctactgtgaaatacaaaaatgaagaagaggaggtggtgccccctcgcccaccactgccaaggtcttatgacttcaccgaacagcctcccattattcctcctttgccatctgattcctcatcactgctgtgctacagtcgcggacccgtccatctgccagaagaaaagaaaatgtaccaagtgcagggctatccgaggaatggtagccattgtgggcctgactacaggttgtacaaatctgagcctgagcttacaactgttgctgaagtagatgagtccaacggggaagagaagagcgaaccagtgagcgaaattgaaacctccgtcgtgaagggaagccactttccagtgggggtcgtaccacccagagccaaatccccgactcccgagtcctcaaccatcgccagctatgtgaccctcaggaaaactaaaaagatgatggatctcagaacagaaagaccaagaagtgcagtggagcagctttgcctcgcagaaagtacgagacctcgcatgacagtggaggagcaaatggagcggattcgcaggcaccagcaggcttgcctgcgggaaaagaaaaagggactgaacgttattggtgcgtccgatcagagccccttacaaagtccatctaacctccgcgataatcctttccggacaactcaaactcgtcgaagagacgacaaggagctggatacggcaatcagggagaacgatgtcaagcccgaccacgaaactcccgctaccgaaattgttcagctgaaagaaacagagccacagaacgttgatttctcaaaggaattgaaaaagacagagaacatctcttacgagatgctgttcgaacccgagcccaatggagtaaattccgtggagatgatggacaaggagcgcaataaagacaaaatgcctgaagatgtaactttttcccctcaggacgagacccagacagccaaccataaacccgaagagcaccctgaggaaaacactaagaattctgttgacgagcaggaagagactgttatctcttatgagagtactcctgaggtaagccgcggaaatcagaccatggctgtgaaatccctgagtccatcccctgagtcctctgcttcccctgtgccatctacgcagccccagctcacagagggttcacatttcatgtgtgtgtag

SEQ ID NO: 91533 - protein, 1966 aa, Artificial Sequence
  derived and/or modified sequence
MSESEGGKDTTPEPSPANGAGPGPEWGLCPGPPAVEGESSGASGLGTPKRRNQHSKHKTVAVASAQRSPRALFCLTLANPLRRSCISIVEWKPFDILILLTIFANCVALGVYIPFPEDDSNTANHNLEQVEYVFLVIFTVETVLKIVAYGLVLHPSAYIRNGWNLLDFIIVVVGLFSVLLEQGPGRPGDAPHTGGKPGGFDVKALRAFRVLRPLRLVSGVPSLHIVLNSIMKALVPLLHIALLVLFVIIIYAIIGLELFLGRMHKTCYFLGSDMEAEEDPSPCASSGSGRACTLNQTECRGRWPGPNGGITNFDNFFFAMLTVFQCVTMEGWTDVLYWMQDAMGYELPWVYFVSLVIFGSFFVLNLVLGVLSGEFSKEREKAKARGDFQKQREKQQMEEDLRGYLDWITQAEELDMEDPSADDNLGPQLAELTNRRRGRLRWFSHSTRSTHSTSSHASLPASDTGSMTETQGDEDEEEGALASCTRCLNKIMKTRVCRRLRRANRVLRARCRRAVKSNACYWAVLLLVFLNTLTIASEHHGQPVWLTQIQEYANKVLLCLFTVEMLLKLYGLGPSAYVSSFFNRFDCFVVCGGILETTLVEVGAMQPLGISVLRCVRLLRIFKVTRHWASLSNLVASLLNSMKSIASLLLLLFLFIIIFSLLGMQLFGGKFNFDQTHTKRSTFDTFPQALLTVFQILTGEDWNVVMYDGIMAYGGPFFPGMLVCIYFIILFICGNYILLNVFLAIAVDNLASGDAGTAKDKGGEKSNEKDLPQENEGLVPGVEKEEEEGARREGADMEEEEEEEEEEEEEEEEEGAGGVELLQEVVPKEKVVPIPEGSAFFCLSQTNPLRKGCHTLIHHHVFTNLILVFIILSSVSLAAEDPIRAHSFRNHILGYFDYAFTSIFTVEILLKMTVFGAFLHRGSFCRSWFNMLDLLVVSVSLISFGIHSSAISVVKILRVLRVLRPLRAINRAKGLKHVVQCVFVAIRTIGNIMIVTTLLQFMFACIGVQLFKGKFYTCTDEAKHTPQECKGSFLVYPDGDVSRPLVRERLWVNSDFNFDNVLSAMMALFTVSTFEGWPALLYKAIDAYAEDHGPIYNYRVEISVFFIVYIIIIAFFMMNIFVGFVIITFRAQGEQEYQNCELDKNQRQCVEYALKAQPLRRYIPKNPHQYRVWATVNSAAFEYLMFLLILLNTVALAMQHYEQTAPFNYAMDILNMVFTGLFTIEMVLKIIAFKPKHYFTDAWNTFDALIVVGSIVDIAVTEVNNGGHLGESSEDSSRISITFFRLFRVMRLVKLLSKGEGIRTLLWTFIKSFQALPYVALLIAMIFFIYAVIGMQMFGKVALQDGTQINRNNNFQTFPQAVLLLFRCATGEAWQEIMLASLPGNRCDPESDFGPGEEFTCGSNFAIAYFISFFMLCAFLIINLFVAVIMDNFDYLTRDWSILGPHHLDEFKRIWSEYDPGAKGRIKHLDVVALLRRIQPPLGFGKLCPHRVACKRLVAMNMPLNSDGTVTFNATLFALVRTSLKIKTEGNLEQANQELRIVIKKIWKRMKQKLLDEVIPPPDEEEVTVGKFYATFLIQDYFRKFRRRKEKGLLGNDAAPSTSSALQAGLRSLQDLGPEMRQALTCDTEEEEEEGQEGVEEEDEKDLETNKATMVSQPSARRGSGISVSLPVGDRLPDSLSFGPSDDDRGTPTSSQPSVPQAGSNTHRRGSGALIFTIPEEGNSQPKGTKGQNKQDEDEEVPDRLSYLDEQAGTPPCSVLLPPHRAQRYMDGHLVPRRRLLPPTPAGRKPSFTIQCLQRQGSCEDLPIPGTYHRGRNSGPNRAQGSWATPPQRGRLLYAPLLLVEEGAAGEGYLGRSSGPLRTFTCLHVPGTHSDPSHGKRGSADSLVEAVLISEGLGLFARDPRFVALAKQEIADACRLTLDEMDNAASDLLAQGTSSLYSDEESILSRFDEEDLGDEMACVHAL

SEQ ID NO: 91534 - DNA, 5901 bp, Artificial Sequence
  derived and/or modified sequence
atgtctgagtccgagggcggaaaggatacgaccccagagccgagtccggcaaatggggccggacctggacccgaatggggcctttgccccggacctccagcagtcgaaggagagagctcaggcgctagcggcctgggcactcctaaacggagaaaccagcactctaaacataagacggttgctgtggcatcagcccaacggagccctcgggcccttttctgtttgaccctggcaaatccgctcagaagaagctgtatttcgattgtggaatggaaaccattcgacattctgatcctcctgaccatcttcgctaactgtgttgccctaggtgtgtatattccgttccctgaagatgactccaacacggcgaaccataacctagagcaggtggagtacgtcttcttagttatctttacagtagagactgtcctgaagattgtggcctacggcctggtgctgcacccgtccgcttatattaggaatggctggaatttgctggactttattatcgtggtcgttggccttttctctgtgctcctggaacagggaccggggagacctggggacgcacctcatacgggtggaaaacccggcggattcgatgtcaaggccttacgggcattccgcgtgctacgtccattgcggctggtgtccggcgttccttcactgcatatagtgctaaactccatcatgaaggccctggtcccattactgcacatcgctttgttggtgctcttcgttataataatctacgccatcatcggactggagctgttcttgggccggatgcataagacctgttacttcctggggagtgatatggaagcagaggaggatcctagcccctgtgcttcaagcggatccggccgagcatgcacacttaaccagactgaatgcaggggcaggtggccaggcccgaatggagggattaccaattttgacaacttcttcttcgccatgttaacggtcttccaatgtgtaacaatggaggggtggactgacgtgctgtactggatgcaagacgctatgggatacgagcttccgtgggtttactttgtatccctcgtcatcttcggtagctttttcgtgcttaatctggttctgggcgtgctgagcggagagttctccaaggagcgtgagaaggccaaggcaagaggcgattttcaaaaacaaagagagaagcagcagatggaagaagatctaaggggctatctggattggattactcaagctgaggagcttgacatggaagatccaagcgctgacgacaacctcggccctcagctggctgaactgactaatagaaggcgagggcgcctgagatggttctcacactcgaccagatcaacccacagcactagctcccatgcctcgctgcccgctagcgataccggctctatgaccgagactcagggagacgaagacgaggaagaaggagcgctggcgagttgtactcgctgtctgaataaaattatgaagacgagagtctgtagacgcctccggagagctaacagggtgctcagggcgcgatgcaggagagccgtgaagtctaacgcctgctactgggcagtccttttgctcgtgtttcttaacaccctgacgatcgcaagcgagcatcatgggcagcctgtctggctcactcaaattcaggaatacgccaataaggtactgctttgtctgttcactgtagagatgttactcaagctttatgggttgggcccctctgcctatgtgtcctccttttttaacaggtttgactgttttgtcgtttgtgggggcatcctggaaacaactctggtagaagtaggcgccatgcagcccctgggaatatccgtgcttagatgcgttcggctattgcgtatttttaaagttactcggcattgggctagcctgtcgaatcttgtggccagtctgctgaactctatgaaatctatcgcctcactactgttacttctctttctttttattatcatattttctcttctgggcatgcaactttttgggggaaagtttaacttcgaccaaactcataccaaaaggtccacctttgacacattcccccaagcactgctgactgtatttcagattctcacaggggaagattggaacgtggttatgtatgatggaattatggcctacggcggcccgttctttcctggcatgcttgtctgcatttacttcataatcctgtttatatgtgggaactatatcctgttaaacgtgtttctcgccattgccgtggacaacctggcttccggggacgcaggaacagccaaagacaagggcggcgagaagtccaatgaaaaagacctgccgcaagaaaatgaagggctggtgcctggcgtcgagaaggaagaggaggaaggcgcaaggagagagggcgctgacatggaagaggaggaagaagaggaagaggaagaagaagaagaggaggaggaggaaggagctggtggagtagagcttcttcaggaggtggtcccaaaagaaaaggtcgttccgataccagaggggagtgccttcttctgtctgagccagactaatccactcagaaagggatgccataccctcatccaccaccatgtcttcaccaatcttatcctagtttttataatcctttctagcgtgtcccttgccgcagaggatcctatacgggctcatagctttcggaaccatattttaggatacttcgattacgcttttactagtattttcaccgtggagattctccttaagatgactgtcttcggcgctttcttgcaccggggctctttttgtcggagttggttcaacatgctagatctgctcgttgtgtctgtatctctgatctcatttggtatccatagcagtgccattagcgtggtgaagattttgcgtgtgttaagggtgctccgtccgctgcgagccataaatcgtgccaaggggttgaagcatgtcgtgcaatgcgtgtttgtggccatccggactattgggaacattatgatcgtgacaaccttgctccaattcatgttcgcttgtatcggtgttcagctgttcaagggaaagttttacacctgtactgacgaggcaaagcacacccctcaggagtgtaagggaagttttctggtataccctgacggtgatgtaagtcggcccctggtccgtgaaaggctgtgggtaaatagcgactttaactttgacaatgtcctgtcagctatgatggcgttatttactgtgtctacgttcgagggatggccagcgctcctctataaggccatcgacgcctatgccgaagaccatgggcccatctacaattaccgtgtggaaatatcagtgtttttcatcgtttatatcattatcatagcctttttcatgatgaatatttttgtgggattcgtgattatcacttttcgcgcacagggcgaacaagaataccagaactgcgaattggataagaaccagagacagtgcgtcgagtatgccctcaaggctcagcccctacggcggtatatacccaagaatccccaccagtaccgcgtctgggctacagttaattctgctgcctttgaatacctgatgttcctgttaatcctcctaaacacggttgccctcgccatgcagcactatgaacagaccgctccattcaactacgcaatggacatactgaacatggtgtttacgggcctgttcacaatagagatggttctgaagattatagcgttcaagccaaagcactacttcaccgacgcatggaacactttcgacgccctgatcgttgtcgggtctatcgttgacattgcagtgaccgaggtcaataatggaggtcacctgggcgaatcttcggaggactcttccagaatctcaattacgttcttcaggctttttcgggtgatgagactggtaaaactgcttagtaaaggcgaagggatcagaactttgctttggactttcatcaaatcattccaggcactaccatacgtggcactgctgatcgcaatgattttcttcatctatgccgtaatcgggatgcagatgttcggaaaggtggccctgcaggacggaacccaaataaacaggaacaacaatttccaaactttcccgcaggccgtactgctactgttcaggtgcgcaactggtgaagcttggcaggaaataatgctcgcaagcttgcctggcaatagatgcgacccggaatccgattttggcccaggggaagagttcacatgcggctctaatttcgccattgcatacttcatctcatttttcatgctctgcgctttccttatcattaatctgttcgttgcagtgatcatggataattttgattacctgactagagattggtcgatcttgggccctcaccaccttgacgagttcaaacggatatggtctgaatacgatcctggagctaagggtcgcatcaagcacctggacgtggtggcactcctccgaaggattcagcccccattagggtttggcaagctgtgtccccatagagtggcttgtaagaggttagtcgcaatgaacatgcctctcaactcagacggaacagtaacttttaacgcaactctctttgctctggtacgcacatccctgaaaataaagacggaaggcaacctcgagcaggcaaaccaggaactacgaatcgtgattaagaagatatggaaacggatgaagcaaaagctcctggacgaggtcattcctccacctgatgaagaggaggtgaccgttggcaagttttatgcaactttcctgattcaggactatttcaggaaattccgacggcgcaaggagaagggactgctgggcaacgatgcggctccatcaacctcgtcggccctgcaggcgggactgaggtcccttcaggatttaggtccagaaatgcggcaggcactcacatgtgatactgaggaggaagaagaagaaggacaagagggggtagaggaagaggatgaaaaggacctggagactaataaagcaacaatggtttcacagccttccgcccgccgcgggtccgggataagcgtgtccttgccagtgggagaccggctgcccgactctttgtcatttggccccagcgatgacgacagaggcactccaaccagtagccagccgagcgtcccccaggctggctcaaacacgcatcgccgcggatccggagcgctgatcttcacaatccccgaagagggaaacagtcaacccaaaggcaccaagggccagaacaagcaggatgaggacgaggaagtgcccgacaggctgtcgtacctggatgaacaggcaggcaccccaccttgtagcgtcctcctcccgccccaccgcgcacagagatacatggacggtcacctcgttcctcgccggcgacttttgcctcccacacctgctggccgcaagccatcattcacaatccagtgtctacagcgccagggaagctgtgaggatttgccgatcccggggacctaccaccggggaagaaactctgggcctaaccgggcccagggtagttgggccacgccacctcaacgaggccgcctcctgtatgccccactgcttctggtcgaagagggggctgccggagaaggatacctgggtagatccagtggcccactcagaacctttacttgtcttcatgtgcctggcacccacagtgacccgagccatggaaaaaggggctcggccgattcactcgtggaggcagtcctgatcagcgaaggacttggcctgtttgcacgcgacccgcgctttgtcgctcttgcaaagcaggagattgcggacgcatgtagattaaccctggatgagatggacaatgctgcatccgacctactcgcccaaggcactagttcactgtactcagatgaggaatccattttgtctaggttcgatgaagaggaccttggagatgagatggcgtgcgttcacgccttatag

SEQ ID NO: 91535 - DNA, 5901 bp, Artificial Sequence
  derived and/or modified sequence
atgtctgagagcgagggcggcaaggacaccaccccagagcccagccctgccaacggggccggccctggccctgagtggggcctgtgccccggccccccagctgtggagggggagagcagcggggccagcggcctgggcacccccaagagaagaaaccagcacagcaagcacaagacagtggccgtggccagcgcccagaggagcccccgggccctcttctgcctgaccctggccaaccccctgcggcgcagctgcatcagcatcgtggagtggaagccctttgacatcctgatcctgctgaccatctttgccaactgtgtggccctgggcgtgtacatccccttcccagaagatgacagcaacacagccaaccacaacctggagcaggtggagtatgtgttcctggtgatcttcaccgtggagaccgtgctgaagatcgtggcctacggcctggtgctgcaccccagcgcctacatcagaaatggctggaacctgctggacttcatcatcgtggtggtgggcctcttctctgtgctgctggagcagggccctggccggcctggagatgccccccacactggaggcaagccaggcggctttgatgtgaaggccctgcgggccttccgggtgctgcggcccctgcggctggtgtctggagtgcccagcctgcacatcgtgctgaacagcatcatgaaggccctggtgcccctgctgcacatcgccctgctggtgctcttcgtcatcatcatctatgccatcatcggcctggagctgttcctgggccgcatgcacaagacctgctacttcctgggcagtgacatggaggccgaggaggaccccagcccctgtgccagcagcggcagcggccgggcctgcaccctgaaccagacagagtgccggggccgctggccaggccccaatggaggcatcaccaactttgacaacttcttctttgccatgctgaccgtcttccagtgtgtgaccatggagggctggacagatgtgctgtactggatgcaggatgccatgggctatgagctgccctgggtgtactttgtgtccctggtgatcttcggcagcttctttgtgctgaacctggtgctgggcgtgctgagcggggagttcagcaaggagcgggagaaggccaaggcccggggggacttccagaagcagcgggagaagcagcagatggaggaggacctgcggggctacctggactggatcacccaggccgaggagctggacatggaggaccccagcgcagatgacaacctgggcccccagctggccgagctgaccaacagaagaagaggccgcctgcgctggttcagccacagcaccaggagcacccacagcaccagcagccacgccagcctgcctgccagtgacaccggctccatgacagagacccagggagatgaagatgaggaggagggcgccctggccagctgcacccgctgcctgaacaagatcatgaagaccagggtgtgccggcggctgcggcgggccaacagagtgctgcgggcccgctgccggcgggctgtgaagagcaatgcctgctactgggccgtgctgctgctggtgttcctgaacaccctgaccatcgccagcgagcaccacggccagcctgtgtggctgacccagatccaggagtatgccaacaaggtgctgctgtgcctcttcaccgtggagatgctgctgaagctgtatggcctgggccccagcgcctacgtgagcagcttcttcaacagatttgactgctttgtggtgtgtggcggcatcctggagaccaccctggtggaggtgggcgccatgcagcccctgggcatctctgtgctgcgctgtgtgcggctgctgcgcatcttcaaggtgaccaggcactgggccagcctgagcaacctggtggccagcctgctgaacagcatgaagagcatcgccagcctgctgctgctgctcttcctgttcatcatcatcttcagcctgctgggcatgcagctgtttggaggcaagttcaactttgaccagacccacaccaagaggagcacctttgacaccttcccccaggccctgctgaccgtcttccagatcctgaccggggaggactggaatgtggtgatgtatgatggcatcatggcctatggaggccccttcttccctggcatgctggtgtgcatctacttcatcatcctcttcatctgtggcaactacatcctgctgaatgtgttcctggccatcgctgtggacaacctggccagcggagatgctggaacagccaaggacaagggcggggagaagagcaatgagaaggacctgccccaggagaatgaaggcctggtgcctggggtggagaaggaggaggaggagggcgcccggcgggagggcgctgacatggaggaggaggaggaggaggaggaggaggaggaggaggaggaggaggaggagggcgctgggggcgtggagctgctgcaggaggtggtgcccaaggagaaggtggtgcccatccctgagggcagcgccttcttctgcctgagccagaccaaccccctgaggaagggctgccacaccctcatccaccaccacgtgttcaccaacctgatcctggtgttcatcatcctgagctctgtgtccctggccgctgaggaccccatccgggcccacagcttcaggaaccacatcctgggctactttgattatgccttcaccagcatcttcaccgtggagatcctgctgaagatgacagtgtttggagccttcctgcaccggggcagcttctgccgctcctggttcaacatgctggacctgctggtggtgtctgtgtccctcatcagctttggcatccacagcagcgccatctctgtggtgaagatcctgcgggtgctgcgggtgctgcggcccctgcgggccatcaacagagccaagggcctgaagcacgtggtgcagtgtgtgtttgtggccatccgcaccatcggcaacatcatgattgtgaccaccctgctgcagttcatgtttgcctgcatcggcgtgcagctgttcaagggcaagttctacacctgcacagatgaggccaagcacaccccccaggagtgcaagggcagcttcctggtgtacccagatggagatgtgtcccggcccctggtgcgggagcggctgtgggtgaacagcgacttcaactttgacaacgtgctgagcgccatgatggccctcttcaccgtgtccacctttgagggctggccagccctgctgtacaaggccattgatgcctatgcagaggaccacggccccatctacaactacagagtggagatctctgtgttcttcatcgtgtacatcatcatcatcgccttcttcatgatgaacatctttgtgggcttcgtcatcatcaccttccgggcccagggcgagcaggagtaccagaactgtgagctggacaagaaccagaggcagtgtgtggagtatgccctgaaggcccagcccctgcggcgctacatccccaagaacccccaccagtacagagtgtgggccaccgtgaacagcgctgcctttgagtacctgatgttcctgctgatcctgctgaacacagtggccctggccatgcagcactatgagcagacagcccccttcaactatgccatggacatcctgaacatggtgttcaccggcctcttcaccatcgagatggtgctgaagatcatcgccttcaagcccaagcactacttcacagatgcctggaacacctttgatgccctgattgtggtgggcagcatcgtggacattgctgtgacagaggtgaacaatggaggccacctgggggagagcagcgaggacagcagccgcatcagcatcaccttcttccgcctcttccgggtgatgaggctggtgaagctgctgagcaagggggagggcatccgcaccctgctgtggaccttcatcaagagcttccaggccctgccctacgtggccctgctgattgccatgatcttcttcatctatgctgtgattggcatgcagatgtttgggaaggtggccctgcaggacggcacccagatcaacagaaacaacaacttccagaccttcccccaggccgtgctgctgctcttccgctgtgccaccggggaggcctggcaggagatcatgctggccagcctgcccggcaacagatgtgaccctgagagtgactttggacctggagaggagttcacctgtggcagcaactttgccatcgcctacttcatctccttcttcatgctgtgtgccttcctgatcatcaacctgtttgtggccgtcatcatggacaactttgactacctgacccgggactggagcatcctgggcccccaccacctggatgagttcaagaggatctggagcgaatatgaccccggggccaagggccgcatcaagcacctggatgtggtggccctgctgcggcgcatccagccccccctgggctttgggaagctgtgcccccaccgggtggcctgcaagaggctggtggccatgaacatgcccctgaacagtgatggcaccgtgaccttcaatgccaccctgtttgccctggtgaggaccagcctgaagatcaagacagagggcaacctggagcaggccaaccaggagctgagaattgtcatcaagaagatctggaagaggatgaagcagaagctgctggatgaggtgatccccccaccagatgaggaggaggtgacagtgggcaagttctacgccaccttcctgatccaggactacttcaggaagttcagaagaaggaaggagaagggcctgctgggcaatgatgctgcccccagcaccagcagcgccctgcaggccggcctgcggagcctgcaggacctgggccctgagatgaggcaggccctgacctgtgacacagaggaggaggaggaggagggccaggagggcgtggaggaggaggatgagaaggacctggagaccaacaaggccaccatggtgtcccagcccagcgcccggcggggcagcggcatctctgtgtccctgcctgtgggggaccggctgcctgacagcctgagctttggccccagtgatgatgaccggggcacccccaccagcagccagcccagcgtgccccaggccggcagcaacacccaccggcggggcagcggggccctgatcttcaccatccctgaggagggcaacagccagcccaagggcaccaagggccagaacaagcaggatgaagatgaggaggtgcctgaccggctgagctacctggatgagcaggccggcaccccaccctgcagcgtgctgctgcccccccaccgggcccagcgctacatggatggccacctggtgccccggcggcggctgctgccccccaccccagctggcaggaagcccagcttcaccatccagtgcctgcagaggcagggcagctgtgaggacctgcccatccctggcacctaccaccggggcaggaacagcggccccaacagagcccagggctcctgggccaccccaccccagaggggccgcctgctgtatgcccccctgctgctggtggaggagggcgctgctggggagggctacctgggccgcagcagcggccccctgcggaccttcacctgcctgcacgtgcccggcacccacagcgaccccagccacggcaagaggggcagcgctgacagcctggtggaggccgtgctgatcagcgagggcctgggcctgtttgcccgggaccccaggtttgtggccctggccaagcaggagattgctgatgcctgccgcctgaccctggatgagatggacaatgctgccagtgacctgctggcccagggcaccagcagcctgtacagtgatgaggagagcatcctgagcagatttgatgaggaggacctgggagatgagatggcctgtgtgcacgccctgtag

SEQ ID NO: 91536 - DNA, 5901 bp, Artificial Sequence
  derived and/or modified sequence
atgagcgagagcgagggcggcaaggacaccacccccgagcccagcccggctaatggtgctggacccggtcctgaatggggtctgtgcccggggccccccgcggtcgagggcgaaagctccggagcatctggcctggggactccaaaacgccggaaccagcattctaaacacaagacagttgcggtcgcttccgcccaacggagcccaagggcgcttttttgtttaacccttgcaaatcctcttcgacgatcctgcatcagcattgtcgaatggaaaccatttgacatcctcattctacttacgatctttgcaaattgtgtggctctcggcgtgtacatcccattcccggaagacgattcaaatacagcaaaccacaatctcgaacaggtggaatacgttttcttggtgatttttactgttgagacagtgctcaagattgtggcgtacgggttggtgctgcatccaagcgcctacatccggaacggatggaatctgctagatttcatcatagtggtagtaggactcttttccgtgctgctggaacaaggaccaggtcggcccggagacgccccacacacaggcggtaaaccaggtggctttgatgtaaaggcactgcgagccttccgggtgctcaggccccttcgattggtgtcaggggtgcctagcctgcacattgtcctgaatagtataatgaaagccttggtccctttattacacattgcccttctggtcctgtttgtaatcattatctacgctattatcggtttggaactgtttttgggacggatgcacaaaacctgctattttctggggagcgatatggaggcggaagaagacccctccccatgcgcgtcctctggctcaggaagagcttgcacactgaatcaaacagaatgccggggaagatggccagggccaaacggcggaataaccaatttcgacaatttcttctttgctatgcttacagtattccagtgcgtgaccatggaagggtggacagacgtcttatactggatgcaggacgccatgggatatgagttgccctgggtttactttgtgtctctcgtgatcttcggttctttcttcgtgttgaacctggttctgggggttctgtctggggagtttagtaaagaacgtgaaaaggcgaaggccaggggggatttccagaagcagcgggagaagcagcagatggaggaagacttaagagggtaccttgactggatcactcaggctgaagagttggatatggaggaccctagtgcagacgataacttgggcccacagttagccgaattgacgaacagaaggaggggcagacttcgatggttcagccacagtacccggtccacccattctacatcctcgcatgcaagcctgccagcaagcgacacagggtccatgaccgaaacacagggcgacgaagatgaggaggaaggcgccctggccagttgtactaggtgtctaaataagatcatgaagaccagggtgtgccggcgactcaggcgggccaatcgagtgctcagggccagatgccggagagcagtaaagagcaacgcctgctattgggctgtgttgctgctcgtgttcctgaacacacttacgatagcatccgagcaccacggccagcctgtgtggctcactcagatccaggagtacgcaaataaggtcctgctgtgtcttttcaccgtggagatgctgttaaaactgtatgggctcggcccgtccgcctatgtgagtagcttttttaatcgcttcgactgtttcgtggtatgtggcggaatcctagagacaacactggtcgaagtgggagccatgcagcccctggggatatcagtgctgaggtgcgttagactgctcagaatttttaaggttaccagacattgggcgagtctgtcgaacctggttgcaagtctcctgaacagcatgaagtccattgcatccctgctgttgctcctgttcttatttataattatcttctcgctgctcggaatgcagctgttcgggggcaagttcaacttcgaccagacacacaccaaacgctccacattcgatacattcccccaggcccttttgaccgttttccagatcttaaccggcgaagactggaacgtggttatgtatgacgggattatggcctacggggggccattttttccaggcatgctggtgtgtatatatttcatcattttgttcatctgcggaaactatatactgttgaacgtctttttagcgatcgcggtcgataacctcgcgtctggcgacgccgggaccgcaaaggacaaggggggagaaaaaagtaacgaaaaggatctgccccaggaaaacgaggggttagtccctggagtggagaaggaagaggaggagggagcccggcgtgaaggggctgacatggaagaggaggaggaagaggaagaggaagaagaagaagaggaggaggaagagggagccggaggcgtggagctcctccaggaggtggttcccaaggaaaaagtggtaccaatccctgagggttcagccttcttctgcttgtctcagactaaccctctgcgcaagggatgtcacacattgattcaccaccatgttttcaccaatctgatcctggtattcattattctctcgtcagtttccctggccgcagaggatccaatccgggctcattccttcagaaatcacatcctcgggtattttgactacgcttttacctccatatttacagtggagattctgctcaagatgacggtatttggtgcctttctgcaccgcggcagtttctgtcgctcatggttcaacatgctggacctccttgtggttagtgtctccttgatcagctttggcatacactctagtgcaatctctgtagtcaagatcctgagagtgttacgggtcctcaggccactgagagccatcaatagggccaaaggattaaaacacgtcgtgcagtgtgtttttgtggcaataagaacgatcggcaacatcatgatagtgactactcttctccagttcatgtttgcctgtatcggagtgcagcttttcaaaggcaagttctacacatgtaccgatgaagctaaacatacaccacaagaatgcaagggcagctttctcgtgtacccagacggcgacgtgagtaggcccctagtgcgcgaaaggttatgggtcaacagcgacttcaattttgataatgtcttaagcgctatgatggcactgtttacggtatcgactttcgaggggtggccagccctcttgtataaagcaattgacgcgtatgccgaagaccatggccctatctacaactaccgggtggaaattagcgttttctttatagtctatattatcattattgccttttttatgatgaacattttcgttgggttcgtaatcattaccttcagagctcagggtgagcaagagtatcagaactgcgaactggacaagaatcagcgacaatgtgtcgaatacgcattgaaagcccagcctctgaggcgttacattcctaagaatccccatcagtaccgggtctgggccacggtgaattcagcagccttcgagtatctgatgtttttgttgattttgttaaacacagtggcccttgctatgcagcactatgaacaaaccgcaccttttaactatgcaatggacatcctgaatatggtgttcactgggctctttactattgagatggtcctcaagatcattgcttttaagcctaaacactacttcaccgatgcgtggaatacttttgacgcactcattgtggtggggtctatcgtcgatatcgccgtgacagaggtaaataatggcggccatctgggtgagtcctcagaagattcatcaaggatttcaattactttctttcgtctgtttagagtgatgcgtctggtgaagctcttgagcaagggagaaggcattagaactctactctggactttcattaagagtttccaggcacttccttacgttgcgctgctcatcgcgatgattttcttcatttacgctgtgattggcatgcaaatgtttggcaaggtcgccctgcaggacggaactcagatcaatagaaacaataacttccaaacctttccacaagcagtcctgctcttatttcgctgcgccacaggagaggcctggcaagagataatgctagcatctctcccaggcaacagatgtgaccccgaatctgacttcggtccaggtgaggaattcacatgcggatcaaactttgccatcgcttattttatctcattcttcatgctgtgtgctttcctgatcatcaatcttttcgtcgcagtgataatggacaattttgattacctcactcgcgattggtctatactgggcccacatcatctggacgagttcaagcgcatctggtccgagtatgaccctggtgccaagggcagaatcaagcacctggatgtggtggcactgctaagaaggatccagccacccctcggcttcggaaagctgtgtccccatcgggtcgcatgtaagaggcttgtcgcaatgaatatgccgttaaacagcgatggaacagttactttcaacgctaccctgtttgctctagtgaggacttctttaaagatcaaaacagaaggcaatttagagcaggccaatcaggagctccggatcgtgatcaagaagatatggaagagaatgaaacagaaactgctggacgaggtaattccacccccagatgaggaggaggttacagttggcaaattctatgcaacatttctaattcaggattactttcgtaaatttcggaggagaaaggaaaagggccttctgggaaacgacgccgctcccagtacctcctcagctctgcaggccgggctccgatctcttcaagacctgggcccagaaatgaggcaggcactcacatgtgataccgaggaagaagaggaggagggccaggagggcgtggaagaagaggatgagaaggacctcgagacgaacaaggctacgatggtgtctcagccctcagctcgacgcggatccggcataagcgtctccctgccagtcggagaccgcctccctgactcgctatcgtttggtccctctgacgacgatagagggacccccacctcatctcagccgtctgtgcctcaggccggctcaaacacacacagacgaggcagtggggccctgatcttcaccattcccgaagagggcaactcccagccgaaggggactaagggccagaataaacaggatgaagacgaggaagtcccggatcgactctcttatctagacgaacaggccgggacccctccatgttccgtcctcctcccgcctcatagggcccagcgctatatggacggtcacctggttcctcggcgccgcttattgccacctacccccgcagggcgaaagccatcattcaccatccagtgcctccaacgccaaggctcctgtgaagacctgccaataccaggtacctaccatcgcggccggaactctggccccaaccgggctcagggtagctgggccaccccaccccaacgggggagactactttacgcgcccttactcctggttgaggaaggcgccgcaggcgagggatacctaggacgctcatcggggcccctgcgaacatttacctgtcttcacgtacccggtacccatagcgacccgagccacggaaagcggggaagcgccgacagtttagtggaggccgtcttaatatccgaagggctgggtttgtttgctcgggacccccgcttcgtggctttagccaagcaggagattgctgacgcatgccgcctgaccttggacgaaatggataacgcagcatccgacctgctcgcacagggcaccagttccctttactccgatgaagaatctatactctcccgctttgacgaagaagaccttggcgacgaaatggcctgcgtccacgccctgtag

SEQ ID NO: 91537 - DNA, 5900 bp, Artificial Sequence
  derived and/or modified sequence
atgagtgaatccgaggggggtaaagatacgacgcctgagccttctcctgcaaatggtgcgggtcctggcccagagtggggtctctgccccggaccacctgctgttgaaggcgaatcgtccggggcatcaggacttggcacgccgaagcggagaaatcagcattccaagcataagacagtagcggtcgcatctgcacagagaagcccaagagctctgttctgcctgacgttagccaatcctctccgaagatcttgtatctctattgttgaatggaagccctttgacatcctgattctgcttaccattttcgccaattgcgttgctctgggcgtgtacattcccttccccgaagatgacagcaatacggcaaatcataacttagagcaggtcgaatacgtttttctggttattttcacggtcgagacagtcctgaaaattgtcgcgtatgggcttgtgcttcatccatcagcatatattcgcaacggatggaatctgctggattttattatcgtggtggtggggctcttctcagtcctgctggagcagggacctggaaggccgggtgacgcacctcatacaggcggaaaacccggagggtttgacgttaaagccctgcgagcatttcgcgtgctccggcctctccgcctggtgagcggtgtgccctctttacatatcgtcttgaactcaataatgaaggccttggtgccgttacttcacatcgcactgctcgtcctattcgtcatcataatctacgccattattggacttgagctctttctgggtaggatgcacaagacttgttatttcctggggagcgacatggaagctgaagaggacccgagtccctgtgcctcaagcggaagtggcagagcatgcaccctcaaccaaacagaatgccggggtagatggccgggtccaaacggtgggatcaccaactttgacaatttctttttcgccatgctcaccgtatttcagtgcgttaccatggaagggtggactgatgtgctgtactggatgcaggatgccatgggctacgaactcccctgggtgtatttcgtgtccttggtgatttttggcagctttttcgtcttgaacctggtgctgggagttctgtcaggggagtttagcaaagagcgggaaaaggccaaagccaggggtgattttcagaagcagagggagaagcagcagatggaagaggacctcagaggctacctggattggatcacccaggcggaggaacttgatatggaggacccttccgctgatgacaatctgggaccacagctggcagagctcactaacagaaggcgcggtcgccttagatggttctctcactctacacgctccacgcatagcacctcatctcacgccagtctgcccgcatcagacaccggcagtatgacagagactcaaggagacgaggacgaagaggaaggggctctggcctcttgcacaagatgcctgaacaagatcatgaaaacccgcgtgtgccgcaggctgcgccgagcaaaccgtgtgctcagagcaagatgccgacgtgccgtgaagagtaacgcatgttactgggccgtgctgctgctggtgttcctcaacactcttacaattgcttccgaacaccacggccagccggtctggcttacccagatccaggaatatgccaacaaagtcttgctgtgcttattcaccgttgaaatgctgctgaaactctacggcttaggcccttccgcgtacgtgtcgtccttttttaacagattcgactgtttcgtagtgtgtggagggatcctagagacgactttagtggaagtgggcgcaatgcagcccttaggaatcagcgtgctgaggtgcgttagactgctgcgaatctttaaagtgacgcggcactgggcaagtctcagtaatctcgtcgctagcctgctgaactctatgaaaagcatagctagcttgcttctgttgctgttcctctttataattatattcagtctactggggatgcagctttttggagggaagttcaatttcgaccagacgcacacaaaaagaagtacttttgacacttttccgcaagctctgctaacggtgtttcagatcttgaccggtgaagattggaatgtggtgatgtatgacggaattatggcttacgggggtcctttctttcccggtatgcttgtgtgcatttacttcatcatccttttcatttgtgggaactacatcctgctcaacgtatttctggccattgccgtggacaacctggcgagcggggatgccggaaccgctaaggacaaaggaggtgaaaagagtaacgaaaaggacctgcctcaggagaacgagggacttgtcccgggagtggagaaggaggaagaggagggagccaggagagagggggcagacatggaagaggaagaagaagaggaggaggaggaggaggaggaagaggaggaggaaggcgctgggggagtggagctcttgcaggaggtggtgccaaaggaaaaagttgtgccaatccccgaagggtccgccttcttttgtctgtcacagaccaatcccctgcggaaaggatgtcatactctcattcaccaccatgtgttcaccaatctcatccttgtgttcattattcttagtagcgtcagcctggccgctgaagaccccatacgcgctcacagctttcgtaatcacatcctggggtatttcgattacgcctttacatccattttcaccgttgaaattctgctgaaaatgaccgtattcggcgcattcctgcatcgaggttcattctgtagaagctggttcaatatgcttgacctgctagtcgtatccgtaagcctcatttcatttggcatacacagttcagcaatcagtgtcgtcaaaatacttcgggtgctgcgcgtactgaggcccctgcgcgctattaatagagccaaaggcctcaagcatgtcgtgcagtgcgttttcgtggccatcaggacgataggcaacataatgatcgtgaccaccctgctccaattcatgtttgcatgtattggcgtgcagctcttcaaaggaaaattttacacatgcaccgacgaagccaagcatacaccgcaggagtgtaagggaagtttcctggtctatcccgacggtgatgtctctaggccactggtccgagaaagattatgggttaatagtgattttaacttcgataacgtcctgagcgctatgatggccctatttaccgtttctaccttcgaaggctggccagccttgttgtataaggccatcgacgcttatgcagaggaccacgggcctatctataattatagagtcgagatttccgtgttcttcatagtctacataatcatcatcgctttctttatgatgaacattttcgtcggatttgtgattattacatttagggctcaaggcgagcaagaatatcagaactgtgagctggataagaatcagagacagtgcgtggagtatgccctcaaggcccagccattgcgcaggtacatccctaaaaatccacatcagtacagagtgtgggcaacagtgaactctgctgccttcgagtacctgatgttcctgctgatcctcctgaataccgtggcccttgcaatgcagcattacgagcagaccgccccttttaactacgctatggacatcctgaacatggtgttcacaggtctttttaccatagagatggtcctgaaaatcatcgcctttaaaccaaagcattattttacagatgcctggaacacctttgacgccctgattgtggttggcagtattgttgacatcgctgtgaccgaggtcaataacggtggtcatttgggcgagtcttccgaggattcctcgaggatatcaatcacctttttcaggctgtttcgtgttatgaggttggtcaagctgctgtcaaagggcgaaggcataaggaccctcctctggacatttattaagtcctttcaggctctgccttacgtggctctgttgatcgccatgattttctttatttatgcagtgattggcatgcagatgttcggcaaggtcgccctgcaggatggaacgcagatcaaccggaataataacttccagaccttcccacaggccgtgttgttgctgtttaggtgcgccactggagaagcatggcaagaaatcatgcttgctagtctcccaggaaatagatgtgaccccgaaagcgactttgggcctggcgaagagttcacgtgtggttctaacttcgctatcgcatacttcatcagctttttcatgttgtgcgccttcctcatcataaatctgttcgtggccgttatcatggataacttcgactacctgacgagggactggtcaattctgggtccacaccaccttgacgaattcaaaagaatatggtctgagtatgatcccggagcaaaaggcagaatcaagcatttagacgtggtggcccttttgcggaggatccaaccacctttgggctttggaaagctgtgcccacatagagtggcatgcaagaggcttgtcgccatgaacatgcccctgaatagcgatggaaccgtgacgtttaacgcaaccctctttgctctcgtgcgcactagcctgaagatcaaaacggaggggaatctggaacaggcgaaccaggaacttcgaatcgtcatcaagaagatctggaagcgcatgaaacagaagcttctcgacgaggtgatccctccacccgacgaagaagaggtgacagttggtaaattttatgccacctttctgatccaggattattttcggaaattcagaagacggaaagagaaaggcctcttggggaacgacgccgctccaagtacttctagtgctcttcaggctggtctccgctcactgcaagacctcggccctgagatgcgccaagcactcacctgcgacaccgaggaagaggaagaggaaggccaagaaggagttgaggaagaggacgaaaaagatctggaaaccaataaagccaccatggtctcccagccatccgcacgcagagggtccgggatcagtgtatcactccccgttggtgaccggctgcctgactccctcagttttgggccttctgatgacgatcgcggtacccctacctcgagccaaccgagcgtccctcaggccggttccaacacccataggcgcggaagcggggcactgatattcaccatccctgaggagggtaattcccagcccaagggcacaaaagggcagaataaacaggatgaggacgaggaagttcctgataggctaagctatttggacgagcaggccggaactcctccctgctccgtcctgctgcctccacaccgggcacaaagatatatggatggacatttagtccccagaaggcggctgctgcccccaactcctgccggtagaaagcctagttttactattcaatgcctccagcgccagggttcctgtgaagatctgcctattccaggcacctatcatcggggacggaactctggcccaaatagggctcaggggtcatgggcaactccgcctcaacgcggtcgcttgctttatgctccattattgttggtggaggagggtgcagctggcgaagggtacctcggacgtagttcaggcccacttcggacttttacatgtcttcatgtaccagggacacactcagacccaagtcacggtaagagagggtcggctgactccctggtggaagccgtgctcatcagtgagggcctaggtctcttcgccagagatcctcgcttcgtggcccttgcaaaacaggaaattgcagacgcctgtagattaaccctcgacgagatggataatgctgcaagtgacctgctggcccagggcacctcctccttgtattctgatgaagaaagcattttatctaggttcgacgaggaggacttgggcgatgaaatggcatgtgtgcacgctttgta

SEQ ID NO: 91538 - DNA, 6037 bp, Artificial Sequence
  derived and/or modified sequence
ctccaaagctgggggaagagaggggggttgtgtgcagatggcccttcaatctcgaaagaaagatgtcggaatctgaaggcgggaaagacaccaccccagagcccagtccagccaatggggcaggccctggtcccgaatgggggctgtgccccgggcccccagctgtggaaggtgaaagcagtggggcatcaggcctagggacccctaagcgaagaaaccagcacagcaagcacaagacagtggcagtggccagtgcccagcggtcacctcgggcactcttctgcctcaccctggccaatcctctgcgacggtcctgcatcagcatcgtggagtggaagcccttcgacatcctcatcctgctgaccatctttgccaactgcgtggccctgggagtttacatccccttccctgaggacgactccaacactgccaaccacaacctggagcaggtggagtacgtattcctggtgattttcactgtggagacggtgctcaagatcgtggcctacgggctggtgctccaccccagcgcctacatccgcaatggctggaacctactcgacttcatcatcgtcgtggtcgggctgttcagcgttctgctggagcagggccccggacggccaggcgacgccccgcacaccgggggaaagccaggaggcttcgatgtgaaggcattgagggcgtttcgggtgctgcggccactgaggctggtgtctggggtcccgagcctgcacatagtgctcaattccatcatgaaggctctggtgccgctgctgcacattgcactgctcgtgctcttcgtcatcatcatttatgccatcattgggctcgagctgttccttggacgaatgcacaagacgtgctacttcctgggatccgacatggaagcggaggaggacccatcgccctgtgcgtcttcgggatcagggcgtgcgtgcacgctgaaccagactgagtgccgcgggcgctggccagggcccaatggaggcatcaccaactttgacaacttcttcttcgccatgctgacagtcttccagtgtgtcaccatggaaggctggaccgatgtgctctactggatgcaagatgccatggggtatgaactgccctgggtgtactttgtgagccttgtcatctttgggtccttcttcgtcctcaaccttgtgcttggcgtcctgagtggggagttctccaaggagagagagaaagcgaaagctcgcggggacttccagaagcagcgggagaagcagcagatggaggaagacctgcggggctacctggactggatcactcaagccgaagagctggacatggaggacccctccgccgatgacaaccttgggccacagctggccgagctgaccaataggaggcgtggacgtctgcgctggttcagtcattctactcgctccacacactccaccagcagccatgccagcctcccagccagtgacaccggttccatgacagagacccaaggcgatgaggatgaggaggagggggctctggccagctgtacacgctgcctaaacaagatcatgaaaaccagagtctgccgccgcctccgccgagccaaccgggtccttcgggcacgctgccgtcgggcagtgaagtccaatgcctgctactgggctgtgctgttgctcgtcttcctcaacacgttgaccatcgcctctgagcaccacgggcagcctgtgtggctcacccagatccaggagtatgccaacaaagtgttgctctgtctgttcacggtggagatgcttctcaaattgtacggtctgggcccctctgcctatgtgtcttccttcttcaaccgctttgactgctttgtggtctgtgggggcatcctagagaccaccttggtggaggtgggcgccatgcagcccttgggcatctcagtgctccgatgtgtgcgcctcctcaggatctttaaggtcaccagacactgggcttctctgagcaatctggtggcatccctgctcaattcaatgaaatccatcgcatccttgctgcttctcctcttcctcttcatcattatcttctccctgcttggcatgcagctgtttgggggcaagttcaactttgaccagacccacaccaagcgaagcacctttgacacgttcccccaggccctcctcactgtctttcagatcctgacaggtgaggactggaacgtggtcatgtatgatggtatcatggcatatggtggccccttcttcccaggaatgttggtgtgcatctatttcatcattctcttcatctgtggcaactacatcctgttgaacgtgtttcttgccattgctgtggacaacctggccagtggagatgcaggcactgccaaggacaagggcggggagaagagcaatgagaaggatctcccacaggagaatgaaggcctggtgcctggtgtggagaaagaggaagaggagggtgcaaggagggaaggagcagacatggaggaggaggaggaggaggaagaagaggaagaagaggaagaagaggaagagggtgcagggggtgtggaactcctgcaggaagttgtacccaaggagaaggtggtacccatccctgagggcagcgccttcttctgcctcagccaaaccaacccgctgaggaagggctgccacaccctcatccaccatcatgtcttcaccaatcttatcctggtgttcatcatcctcagcagtgtgtccctggccgctgaggaccccatccgagcccactccttccgcaaccatattctgggttacttcgattatgccttcacctccattttcactgtggagattctactaaagatgacagtgtttggggccttcctgcaccgcggctccttctgccgtagctggtttaatatgttggatctgctggtggtcagtgtgtccctcatctcctttggcatccactccagcgccatctcggtggtgaagattctgcgagtactccgagtactgcggcccctccgagccatcaacagggccaagggactcaagcatgtggtgcagtgtgtatttgtggccatccggaccatcggaaacatcatgattgtcaccacacttctgcaatttatgttcgcctgcatcggggtgcagctcttcaaggggaaattctacacctgcacggacgaggccaaacacacccctcaagaatgcaagggctccttcctggtatacccagatggagacgtgtcacggcccctggtccgggagcggctctgggtcaacagtgatttcaactttgacaatgtcctttcagccatgatggccctgttcactgtctccacctttgaaggctggcctgcactgctatacaaggccatcgatgcatatgcagaggaccatggccccatctataattaccgtgtggagatctcagtgttcttcattgtctacatcatcatcattgcgttcttcatgatgaacatcttcgtgggcttcgtcatcatcactttccgtgcccagggcgagcaggagtaccaaaactgtgagctggacaagaaccagcgtcaatgtgtggaatatgccctcaaggcccagccactccgccgttacatccccaagaacccgcatcagtatcgtgtgtgggccactgtgaactctgctgcctttgagtacctgatgttcctgctcatcctgctcaacacagttgccctagccatgcagcactatgagcagactgctcccttcaactatgccatggacatcctcaacatggtcttcactggcctcttcactattgagatggtgctcaaaatcatcgccttcaagcccaagcattacttcactgatgcctggaacacgtttgacgctcttattgtggtgggcagcatagtggatattgccgtcactgaagtcaataatggtggccaccttggcgagagctctgaggacagctcccgcatttccattaccttctttcgcctcttccgagttatgcggctggtcaagcttctcagtaagggtgaagggatccgcacattgctctggacattcatcaagtccttccaggccttgccctatgtggctcttctcatcgcaatgatattcttcatctatgccgtcattggcatgcagatgttcggcaaggtggctcttcaggatggcacacagataaaccgaaacaacaacttccagacctttccacaggctgtgctgcttctgttcaggtgtgccactggtgaggcatggcaggagataatgcttgccagccttcccggaaatcggtgtgatcctgagtctgacttcggccctggtgaagagtttacctgtggtagcaattttgccatcgcctatttcatcagcttcttcatgctctgtgccttcctgatcataaatctctttgtggctgtgatcatggacaactttgattatctcaccagagattggtccatcctgggcccccatcaccttgatgaattcaagaggatctggtctgaatatgaccctggggccaagggccgcatcaaacacttggatgtggttgccctgctgagacgtatccagccccctctgggatttgggaagctgtgcccacaccgagtggcctgcaagagacttgtggcaatgaacatgcccctcaactcagatgggacggtgacattcaacgccacactctttgccctggtccggacatccctgaagatcaaaacagaagggaacctggagcaagccaaccaggagctgcggattgtcatcaaaaagatctggaagcggatgaaacagaagctgctagatgaggtcatccccccaccagacgaggaggaggtcaccgtgggcaaattctacgccacatttctgatccaggactatttccgcaaattccggcggaggaaagaaaaagggctactaggcaacgacgccgcccctagcacctcttccgcccttcaggctggtctgcggagcctgcaggacttgggtcctgagatgcggcaggccctcacctgtgacacagaggaggaggaagaagaggggcaggagggagtggaggaggaagatgaaaaggacttggaaactaacaaagccacgatggtctcccagccctcagctcgccggggctccgggatttctgtgtctctgcctgtcggggacagacttccagattcactctcctttgggcccagtgatgatgacagggggactcccacctccagtcagcccagtgtgccccaggctggatccaacacccacaggagaggctctggggctctcattttcaccatcccagaagaaggaaattctcagcccaagggaaccaaagggcaaaacaagcaagatgaggatgaggaagtccctgatcggctttcctacctagatgagcaggcagggactcccccgtgctcagtccttttgccacctcacagagctcagagatacatggatgggcacctggtaccacgccgccgtctgctgccccccacacctgcaggtcggaagccctccttcaccatccagtgtctgcagcgccagggcagttgtgaggatttacccatcccaggcacctatcatcgtgggcgaaattcagggcccaatagggctcagggttcctgggcaacaccacctcagcggggtcggctcctgtatgccccgctgttgttggtggaagagggcgcagcgggggaggggtacctcggcagatccagtggcccactgcgcaccttcacctgtctgcacgtgcctggaacccactcggaccccagccatgggaagaggggcagtgccgacagcttggtggaggctgtgcttatctcagagggtctgggcctctttgctcgagacccacgtttcgtggccctggccaagcaggagattgcagatgcgtgtcgcctgacgctggatgagatggacaatgctgccagtgacctgctggcacagggaaccagctctctctatagcgacgaggagtccatcctctcccgcttcgatgaggaggacttgggagacgagatggcctgcgtccacgccctctgaattcccacccctccccaactgctcaataaacctcctgccctcccctccccagcaggaggcaggcatggaccaca

SEQ ID NO: 91539 - DNA, 5901 bp, Artificial Sequence
  derived and/or modified sequence
atgagcgagagcgagggcggcaaggacaccacccccgagcccagccccgccaacggcgccggccccggccccgagtggggcctgtgccccggcccccccgccgtggagggcgagagcagcggcgccagcggcctgggcacccccaagagaagaaaccagcacagcaagcacaagaccgtggccgtggccagcgcccagagaagccccagagccctgttctgcctgaccctggccaaccccctgagaagaagctgcatcagcatcgtggagtggaagcccttcgacatcctgatcctgctgaccatcttcgccaactgcgtggccctgggcgtgtacatccccttccccgaggacgacagcaacaccgccaaccacaacctggagcaggtggagtacgtgttcctggtgatcttcaccgtggagaccgtgctgaagatcgtggcctacggcctggtgctgcaccccagcgcctacatcagaaacggctggaacctgctggacttcatcatcgtggtggtgggcctgttcagcgtgctgctggagcagggccccggcagacccggcgacgccccccacaccggcggcaagcccggcggcttcgacgtgaaggccctgagagccttcagagtgctgagacccctgagactggtgagcggcgtgcccagcctgcacatcgtgctgaacagcatcatgaaggccctggtgcccctgctgcacatcgccctgctggtgctgttcgtgatcatcatctacgccatcatcggcctggagctgttcctgggcagaatgcacaagacctgctacttcctgggcagcgacatggaggccgaggaggaccccagcccctgcgccagcagcggcagcggcagagcctgcaccctgaaccagaccgagtgcagaggcagatggcccggccccaacggcggcatcaccaacttcgacaacttcttcttcgccatgctgaccgtgttccagtgcgtgaccatggagggctggaccgacgtgctgtactggatgcaggacgccatgggctacgagctgccctgggtgtacttcgtgagcctggtgatcttcggcagcttcttcgtgctgaacctggtgctgggcgtgctgagcggcgagttcagcaaggagagagagaaggccaaggccagaggcgacttccagaagcagagagagaagcagcagatggaggaggacctgagaggctacctggactggatcacccaggccgaggagctggacatggaggaccccagcgccgacgacaacctgggcccccagctggccgagctgaccaacagaagaagaggcagactgagatggttcagccacagcaccagaagcacccacagcaccagcagccacgccagcctgcccgccagcgacaccggcagcatgaccgagacccagggcgacgaggacgaggaggagggcgccctggccagctgcaccagatgcctgaacaagatcatgaagaccagagtgtgcagaagactgagaagagccaacagagtgctgagagccagatgcagaagagccgtgaagagcaacgcctgctactgggccgtgctgctgctggtgttcctgaacaccctgaccatcgccagcgagcaccacggccagcccgtgtggctgacccagatccaggagtacgccaacaaggtgctgctgtgcctgttcaccgtggagatgctgctgaagctgtacggcctgggccccagcgcctacgtgagcagcttcttcaacagattcgactgcttcgtggtgtgcggcggcatcctggagaccaccctggtggaggtgggcgccatgcagcccctgggcatcagcgtgctgagatgcgtgagactgctgagaatcttcaaggtgaccagacactgggccagcctgagcaacctggtggccagcctgctgaacagcatgaagagcatcgccagcctgctgctgctgctgttcctgttcatcatcatcttcagcctgctgggcatgcagctgttcggcggcaagttcaacttcgaccagacccacaccaagagaagcaccttcgacaccttcccccaggccctgctgaccgtgttccagatcctgaccggcgaggactggaacgtggtgatgtacgacggcatcatggcctacggcggccccttcttccccggcatgctggtgtgcatctacttcatcatcctgttcatctgcggcaactacatcctgctgaacgtgttcctggccatcgccgtggacaacctggccagcggcgacgccggcaccgccaaggacaagggcggcgagaagagcaacgagaaggacctgccccaggagaacgagggcctggtgcccggcgtggagaaggaggaggaggagggcgccagaagagagggcgccgacatggaggaggaggaggaggaggaggaggaggaggaggaggaggaggaggaggagggcgccggcggcgtggagctgctgcaggaggtggtgcccaaggagaaggtggtgcccatccccgagggcagcgccttcttctgcctgagccagaccaaccccctgagaaagggctgccacaccctgatccaccaccacgtgttcaccaacctgatcctggtgttcatcatcctgagcagcgtgagcctggccgccgaggaccccatcagagcccacagcttcagaaaccacatcctgggctacttcgactacgccttcaccagcatcttcaccgtggagatcctgctgaagatgaccgtgttcggcgccttcctgcacagaggcagcttctgcagaagctggttcaacatgctggacctgctggtggtgagcgtgagcctgatcagcttcggcatccacagcagcgccatcagcgtggtgaagatcctgagagtgctgagagtgctgagacccctgagagccatcaacagagccaagggcctgaagcacgtggtgcagtgcgtgttcgtggccatcagaaccatcggcaacatcatgatcgtgaccaccctgctgcagttcatgttcgcctgcatcggcgtgcagctgttcaagggcaagttctacacctgcaccgacgaggccaagcacaccccccaggagtgcaagggcagcttcctggtgtaccccgacggcgacgtgagcagacccctggtgagagagagactgtgggtgaacagcgacttcaacttcgacaacgtgctgagcgccatgatggccctgttcaccgtgagcaccttcgagggctggcccgccctgctgtacaaggccatcgacgcctacgccgaggaccacggccccatctacaactacagagtggagatcagcgtgttcttcatcgtgtacatcatcatcatcgccttcttcatgatgaacatcttcgtgggcttcgtgatcatcaccttcagagcccagggcgagcaggagtaccagaactgcgagctggacaagaaccagagacagtgcgtggagtacgccctgaaggcccagcccctgagaagatacatccccaagaacccccaccagtacagagtgtgggccaccgtgaacagcgccgccttcgagtacctgatgttcctgctgatcctgctgaacaccgtggccctggccatgcagcactacgagcagaccgcccccttcaactacgccatggacatcctgaacatggtgttcaccggcctgttcaccatcgagatggtgctgaagatcatcgccttcaagcccaagcactacttcaccgacgcctggaacaccttcgacgccctgatcgtggtgggcagcatcgtggacatcgccgtgaccgaggtgaacaacggcggccacctgggcgagagcagcgaggacagcagcagaatcagcatcaccttcttcagactgttcagagtgatgagactggtgaagctgctgagcaagggcgagggcatcagaaccctgctgtggaccttcatcaagagcttccaggccctgccctacgtggccctgctgatcgccatgatcttcttcatctacgccgtgatcggcatgcagatgttcggcaaggtggccctgcaggacggcacccagatcaacagaaacaacaacttccagaccttcccccaggccgtgctgctgctgttcagatgcgccaccggcgaggcctggcaggagatcatgctggccagcctgcccggcaacagatgcgaccccgagagcgacttcggccccggcgaggagttcacctgcggcagcaacttcgccatcgcctacttcatcagcttcttcatgctgtgcgccttcctgatcatcaacctgttcgtggccgtgatcatggacaacttcgactacctgaccagagactggagcatcctgggcccccaccacctggacgagttcaagagaatctggagcgagtacgaccccggcgccaagggcagaatcaagcacctggacgtggtggccctgctgagaagaatccagccccccctgggcttcggcaagctgtgcccccacagagtggcctgcaagagactggtggccatgaacatgcccctgaacagcgacggcaccgtgaccttcaacgccaccctgttcgccctggtgagaaccagcctgaagatcaagaccgagggcaacctggagcaggccaaccaggagctgagaatcgtgatcaagaagatctggaagagaatgaagcagaagctgctggacgaggtgatccccccccccgacgaggaggaggtgaccgtgggcaagttctacgccaccttcctgatccaggactacttcagaaagttcagaagaagaaaggagaagggcctgctgggcaacgacgccgcccccagcaccagcagcgccctgcaggccggcctgagaagcctgcaggacctgggccccgagatgagacaggccctgacctgcgacaccgaggaggaggaggaggagggccaggagggcgtggaggaggaggacgagaaggacctggagaccaacaaggccaccatggtgagccagcccagcgccagaagaggcagcggcatcagcgtgagcctgcccgtgggcgacagactgcccgacagcctgagcttcggccccagcgacgacgacagaggcacccccaccagcagccagcccagcgtgccccaggccggcagcaacacccacagaagaggcagcggcgccctgatcttcaccatccccgaggagggcaacagccagcccaagggcaccaagggccagaacaagcaggacgaggacgaggaggtgcccgacagactgagctacctggacgagcaggccggcacccccccctgcagcgtgctgctgcccccccacagagcccagagatacatggacggccacctggtgcccagaagaagactgctgccccccacccccgccggcagaaagcccagcttcaccatccagtgcctgcagagacagggcagctgcgaggacctgcccatccccggcacctaccacagaggcagaaacagcggccccaacagagcccagggcagctgggccacccccccccagagaggcagactgctgtacgcccccctgctgctggtggaggagggcgccgccggcgagggctacctgggcagaagcagcggccccctgagaaccttcacctgcctgcacgtgcccggcacccacagcgaccccagccacggcaagagaggcagcgccgacagcctggtggaggccgtgctgatcagcgagggcctgggcctgttcgccagagaccccagattcgtggccctggccaagcaggagatcgccgacgcctgcagactgaccctggacgagatggacaacgccgccagcgacctgctggcccagggcaccagcagcctgtacagcgacgaggagagcatcctgagcagattcgacgaggaggacctgggcgacgagatggcctgcgtgcacgccctgtag

SEQ ID NO: 91540 - protein, 1912 aa, Artificial Sequence
  derived and/or modified sequence
MSESEGGKGERILPSLQTLGASIVEWKPFDILILLTIFANCVALGVYIPFPEDDSNTANHNLEQVEYVFLVIFTVETVLKIVAYGLVLHPSAYIRNGWNLLDFIIVVVGLFSVLLEQGPGRPGDAPHTGGKPGGFDVKALRAFRVLRPLRLVSGVPSLHIVLNSIMKALVPLLHIALLVLFVIIIYAIIGLELFLGRMHKTCYFLGSDMEAEEDPSPCASSGSGRACTLNQTECRGRWPGPNGGITNFDNFFFAMLTVFQCVTMEGWTDVLYWMQDAMGYELPWVYFVSLVIFGSFFVLNLVLGVLSGEFSKEREKAKARGDFQKQREKQQMEEDLRGYLDWITQAEELDMEDPSADDNLGSMAEEGRAGHRPQLAELTNRRRGRLRWFSHSTRSTHSTSSHASLPASDTGSMTETQGDEDEEEGALASCTRCLNKIMKTRVCRRLRRANRVLRARCRRAVKSNACYWAVLLLVFLNTLTIASEHHGQPVWLTQIQEYANKVLLCLFTVEMLLKLYGLGPSAYVSSFFNRFDCFVVCGGILETTLVEVGAMQPLGISVLRCVRLLRIFKVTRHWASLSNLVASLLNSMKSIASLLLLLFLFIIIFSLLGMQLFGGKFNFDQTHTKRSTFDTFPQALLTVFQILTGEDWNVVMYDGIMAYGGPFFPGMLVCIYFIILFICGNYILLNVFLAIAVDNLASGDAGTAKDKGGEKSNEKDLPQENEGLVPGVEKEEEEGARREGADMEEEEEEEEEEEEEEEEEGAGGVELLQEVVPKEKVVPIPEGSAFFCLSQTNPLRKGCHTLIHHHVFTNLILVFIILSSVSLAAEDPIRAHSFRNHILGYFDYAFTSIFTVEILLKMTVFGAFLHRGSFCRSWFNMLDLLVVSVSLISFGIHSSAISVVKILRVLRVLRPLRAINRAKGLKHVVQCVFVAIRTIGNIMIVTTLLQFMFACIGVQLFKGKFYTCTDEAKHTPQECKGSFLVYPDGDVSRPLVRERLWVNSDFNFDNVLSAMMALFTVSTFEGWPALLYKAIDAYAEDHGPIYNYRVEISVFFIVYIIIIAFFMMNIFVGFVIITFRAQGEQEYQNCELDKNQRQCVEYALKAQPLRRYIPKNPHQYRVWATVNSAAFEYLMFLLILLNTVALAMQHYEQTAPFNYAMDILNMVFTGLFTIEMVLKIIAFKPKHYFTDAWNTFDALIVVGSIVDIAVTEVNNGGHLGESSEDSSRISITFFRLFRVMRLVKLLSKGEGIRTLLWTFIKSFQALPYVALLIAMIFFIYAVIGMQMFGKVALQDGTQINRNNNFQTFPQAVLLLFRCATGEAWQEIMLASLPGNRCDPESDFGPGEEFTCGSNFAIAYFISFFMLCAFLIINLFVAVIMDNFDYLTRDWSILGPHHLDEFKRIWSEYDPGAKGRIKHLDVVALLRRIQPPLGFGKLCPHRVACKRLVAMNMPLNSDGTVTFNATLFALVRTSLKIKTEGNLEQANQELRIVIKKIWKRMKQKLLDEVIPPPDEEEVTVGKFYATFLIQDYFRKFRRRKEKGLLGNDAAPSTSSALQAGLRSLQDLGPEMRQALTCDTEEEEEEGQEGVEEEDEKDLETNKATMVSQPSARRGSGISVSLPVGDRLPDSLSFGPSDDDRGTPTSSQPSVPQAGSNTHRRGSGALIFTIPEEGNSQPKGTKGQNKQDEDEEVPDRLSYLDEQAGTPPCSVLLPPHRAQRYMDGHLVPRRRLLPPTPAGRKPSFTIQCLQRQGSCEDLPIPGTYHRGRNSGPNRAQGSWATPPQRGRLLYAPLLLVEEGAAGEGYLGRSSGPLRTFTCLHVPGTHSDPSHGKRGSADSLVEAVLISEGLGLFARDPRFVALAKQEIADACRLTLDEMDNAASDLLAQGTSSLYSDEESILSRFDEEDLGDEMACVHAL

SEQ ID NO: 91541 - DNA, 5739 bp, Artificial Sequence
  derived and/or modified sequence
atgtcagagagtgagggtggtaaaggagagcggatccttccaagcctgcagaccctcggcgcgtccatagtcgagtggaaaccctttgacatcctgatccttcttactatttttgcaaactgcgtggctctgggagtttacatccctttcccagaagatgattcaaacactgccaatcataatcttgagcaggttgagtacgtattcctggtgattttcacggtcgagacggtgttgaaaatagtggcatacggcctcgttctccacccttctgcttacatccggaatggatggaacctgcttgattttatcatagtcgtggtgggcctcttttccgtactgttagaacaggggccagggaggcccggcgatgcacctcacacgggtggtaagcccggcggtttcgatgttaaagctctcagagctttccgggtcctgcgaccactgaggctggtctcaggcgtgcctagccttcacatagtcttgaactcaatcatgaaagccctcgtgccattgctgcacatcgcgctcttggtgcttttcgttatcattatctacgccatcataggcttggaactgttcctgggacggatgcataagacctgttatttcctgggaagcgacatggaggcagaggaggaccccagcccctgcgcgtccagcggtagcgggcgcgcttgtacattgaaccagaccgagtgtcggggaagatggcccggccctaatggaggaatcaccaattttgataactttttttttgccatgctgacagtgttccagtgtgtcaccatggagggctggacagatgtcttgtactggatgcaggatgcaatgggatatgagctcccttgggtctactttgtctcactggtgatcttcggttccttttttgtactgaacttggtcttgggagttctgtctggcgagttctccaaggagcgcgagaaggccaaagctcgaggggatttccagaaacagcgggaaaagcagcaaatggaggaggacttaagagggtatttagattggattacccaggccgaggaattagatatggaggatccatccgctgacgacaaccttggaagtatggcggaggaggggagggcaggtcacaggccccaattggccgagttgaccaaccgaaggcgagggcgtctacggtggtttagccactcgacaaggtccactcacagtacgtcttctcacgcaagtctgcccgccagtgacacggggtcaatgacagaaactcagggggatgaggacgaggaggaaggggcgcttgcatcatgcactcggtgtctgaataaaattatgaagaccagggtttgtcgcagacttcggagggccaatcgggttctccgcgctcgatgcagaagagcagtaaagagtaacgcgtgctactgggccgtcctgttgctcgtttttctaaatactctgacaattgccagtgaacatcacgggcagcccgtgtggttgactcaaattcaggagtacgctaataaggtattactgtgcctgtttacagtcgaaatgctcctgaagctgtacggactgggaccttctgcatacgtaagcagtttctttaatcgatttgattgtttcgtggtgtgcggcgggatcctagagacaaccctcgttgaagtaggagccatgcagcccctcgggatttctgtccttagatgcgtcaggttgctgcgcatttttaaagtgacaagacactgggcctctttatcaaatctggttgcaagtttgctaaattcgatgaaatctattgccagtctgctcctcttgctgttccttttcattataatcttctctttacttggtatgcagctgtttggagggaagtttaacttcgaccaaactcacaccaaacgctctactttcgatacatttcctcaggcgcttctgacagtgtttcagatcctgactggggaagactggaacgttgtgatgtacgatggcattatggcttacggaggtcccttttttccgggcatgttggtctgtatatatttcatcatactgttcatatgtggaaattacattctactgaacgttttcctggctattgccgttgacaacttggcatccggcgacgcaggaactgcgaaggataaaggtggagaaaaatccaacgagaaggatctgccccaagaaaacgaaggcctggtccccggggtggaaaaggaagaggaggagggcgcccgccgggagggcgcggacatggaagaagaggaagaagaggaggaggaggaggaagaagaggaggaggaggagggcgccgggggcgtggagctcctgcaggaggtggttcccaaagaaaaggtggtgcccatccctgaaggctctgcctttttttgcttgagccagactaacccacttagaaagggttgtcacaccctgattcatcaccacgtgtttacgaatttgattcttgtcttcatcatattgtctagcgtctccctagcagccgaggatcctatccgcgcgcactctttccgtaaccatatcttgggatactttgactatgcctttacatcgattttcactgtggaaatcttgctcaagatgaccgttttcggtgccttcctacacaggggctcattctgtcgatcatggttcaacatgctagatctgctcgtcgtgtcagtatctcttatatcctttggcattcactcttcagctatctctgttgttaagattctccgagtgctacgtgtcctgagacctctgcgggcaattaaccgggctaagggcctgaagcatgttgttcagtgtgtatttgtggcaattcgaacaattggtaacattatgattgtgactactttacttcagtttatgtttgcatgcattggtgtccagctctttaagggaaaattctatacctgtaccgacgaggcaaagcacaccccccaagaatgtaagggctcctttctggtgtatcccgacggagatgtgagccggccactggtgagggaacgactgtgggtgaattcagacttcaactttgataatgtgctgtccgccatgatggcactcttcaccgttagcacattcgaagggtggcccgccctgttgtataaggcaattgatgcttatgctgaggatcacggaccgatctataattatcgggttgaaatatcggttttctttatcgtgtacatcatcattatagccttctttatgatgaacatcttcgtgggcttcgttatcatcacctttcgggcccagggtgagcaggaatatcaaaactgtgagttggacaagaaccagcgtcaatgcgtcgagtacgcactgaaggctcagccgttacggagatacatcccgaagaacccacatcaataccgagtgtgggctacggtcaatagcgcagcttttgagtacctcatgtttcttcttattcttctgaataccgttgccctggccatgcagcactacgaacagacagcccctttcaattatgccatggatattcttaatatggtgtttacaggcctgttcaccattgagatggttctgaagatcatcgcttttaaacctaaacactattttaccgatgcctggaatacattcgacgcactgattgtagttggctcaatagttgacattgcagtaactgaggtgaataacggcgggcacctgggagaatccagtgaagacagttccagaataagcatcactttcttccgtctgtttagggttatgcgtctggtgaaactgctcagtaaaggggagggcattagaactctgttgtggacattcattaagagctttcaagcccttccttatgttgccctcctgatcgccatgatctttttcatctacgcagtgataggaatgcagatgttcggtaaagtggcgctccaggacgggacacagattaaccgtaataacaactttcagacgttcccccaggctgtcctgctactgtttagatgcgctacgggggaagcctggcaggagatcatgctggccagcctaccaggcaacagatgcgatcctgagtctgattttggacctggtgaagagttcacatgcggaagcaatttcgccatcgcgtactttatcagtttttttatgctgtgtgccttccttatcatcaacctttttgtagctgttatcatggacaacttcgactatcttacccgagactggagtatcctcggccctcaccatttggatgagtttaaaagaatatggtccgaatacgatcccggcgctaaaggacgcattaagcatctagacgtcgtagctcttctccgccgaatacaacctccactaggctttggcaagctatgcccgcatcgggtcgcgtgtaagaggcttgtggccatgaacatgccactgaacagcgatggaactgttacttttaacgcaactctgtttgctcttgtgcggacttctctgaagatcaaaacggaaggtaacctggaacaagcaaatcaagagctgagaatagtgattaagaagatttggaagaggatgaagcaaaagctgctggacgaagttattcctccccctgacgaagaggaggtaacagtagggaagttctatgctacctttctcattcaggattactttcggaagtttcgcagaaggaaggaaaaaggccttctgggaaacgacgccgcgccttccacgtccagcgccctccaggctgggctgcgtagcctacaggaccttggtcccgaaatgaggcaggccttgacatgcgacacagaggaggaagaagaggaaggccaggagggcgtcgaagaggaagatgagaaagatctggagacaaacaaggcaactatggtaagccaaccatccgcaagaagaggaagtggtataagcgtctctttgccggtcggcgacagactaccggattcactgtcttttgggccatcagacgacgatcggggtaccccgaccagttcccagccttctgtgccccaggctggttccaatacacaccgaaggggaagtggcgccctgattttcaccatcccggaagagggcaactcacagcccaaagggaccaaaggccagaacaagcaggatgaagacgaagaggtgcctgatagattgtcctacctcgacgagcaggcaggcacccctccatgcagtgtcctgctgcctccccatagagcccagagatatatggatggacatctggttccccggaggcggctgctccccccaaccccagctggtcggaaaccttcctttacgatccaatgcctccagcggcagggcagttgtgaggacctcccaatccccgggacataccaccgcggccgaaattccggaccgaatagggcacaggggtcctgggctacacccccgcaacggggtaggttgttatatgcacctctgctgctcgtggaggagggcgcagcaggcgagggctacttgggccgcagcagcggcccactccgcacattcacttgtctgcatgtaccaggcacacacagtgacccatcccacgggaaaagaggaagcgctgacagcctggtagaagctgtgctgatctctgaggggttgggactgttcgcgagagatccccggttcgtggcccttgccaagcaggaaatcgctgatgcgtgcagactgactctggacgagatggacaacgccgcctctgatctattggcccaaggcacatcatccttatactcagatgaggagtcaatcctttctcggttcgacgaggaggatcttggggacgagatggcctgcgtacacgccctgtag

SEQ ID NO: 91542 - DNA, 5739 bp, Artificial Sequence
  derived and/or modified sequence
atgtctgagagcgagggcggcaagggggagcgcatcctgcccagcctgcagaccctgggcgccagcatcgtggagtggaagccctttgacatcctgatcctgctgaccatctttgccaactgtgtggccctgggcgtgtacatccccttcccagaagatgacagcaacacagccaaccacaacctggagcaggtggagtatgtgttcctggtgatcttcaccgtggagaccgtgctgaagatcgtggcctacggcctggtgctgcaccccagcgcctacatcagaaatggctggaacctgctggacttcatcatcgtggtggtgggcctcttctctgtgctgctggagcagggccctggccggcctggagatgccccccacactggaggcaagccaggcggctttgatgtgaaggccctgcgggccttccgggtgctgcggcccctgcggctggtgtctggagtgcccagcctgcacatcgtgctgaacagcatcatgaaggccctggtgcccctgctgcacatcgccctgctggtgctgtttgtgatcatcatctatgccatcatcggcctggagctgttcctgggccgcatgcacaagacctgctacttcctgggcagtgacatggaggccgaggaggaccccagcccctgtgccagcagcggcagcggccgggcctgcaccctgaaccagacagaatgtcggggccgctggccaggccccaacggcggcatcaccaactttgacaacttcttctttgccatgctgactgtgttccagtgtgtgaccatggagggctggacagatgtgctgtactggatgcaggatgccatgggctatgagctgccctgggtgtactttgtgtccctggtgatcttcggcagcttctttgtgctgaacctggtgctgggcgtgctgtctggagagttcagcaaggagcgggagaaggccaaggcccggggggacttccagaagcagcgggagaagcagcagatggaggaggacctgcggggctacctggactggatcacccaggccgaggagctggacatggaggaccccagcgcagatgacaacctgggctccatggccgaggagggccgggccggccaccggccccagctggccgagctgaccaacagaagaagaggccgcctgcgctggttcagccacagcaccaggagcacccacagcaccagcagccacgccagcctgcctgccagtgacaccggctccatgacagagacccagggagatgaagatgaggaggagggcgccctggccagctgcacccgctgcctgaacaagatcatgaagaccagggtgtgccggcggctgcggcgggccaacagagtgctgcgggcccgctgccggcgggctgtgaagagcaatgcctgctactgggccgtgctgctgctggtgttcctgaacaccctgaccatcgccagcgagcaccacggccagcctgtgtggctgacccagatccaggagtatgccaacaaggtgctgctgtgcctcttcaccgtggagatgctgctgaagctgtatggcctgggccccagcgcctacgtgagcagcttcttcaacagatttgactgctttgtggtgtgtggcggcatcctggagaccaccctggtggaggtgggcgccatgcagcccctgggcatctctgtgctgcgctgtgtgcggctgctgcgcatcttcaaggtgaccaggcactgggccagcctgagcaacctggtggccagcctgctgaacagcatgaagagcatcgccagcctgctgctgctgctcttcctgttcatcatcatcttcagcctgctgggcatgcagctgtttggaggcaagttcaactttgaccagacccacaccaagaggagcacctttgacaccttcccccaggccctgctgaccgtcttccagatcctgaccggggaggactggaatgtggtgatgtatgatggcatcatggcctatggaggccccttcttccctggcatgctggtgtgcatctacttcatcatcctcttcatctgtggcaactacatcctgctgaatgtgttcctggccatcgctgtggacaacctggccagcggagatgctggaacagccaaggacaagggcggggagaagagcaatgagaaggacctgccccaggagaatgaaggcctggtgcctggggtggagaaggaggaggaggagggcgcccggcgggagggcgctgacatggaggaggaggaggaggaggaggaggaggaggaggaggaggaggaggaggagggcgctgggggcgtggagctgctgcaggaggtggtgcccaaggagaaggtggtgcccatccctgagggcagcgccttcttctgcctgagccagaccaaccccctgaggaagggctgccacaccctcatccaccaccacgtgttcaccaacctgatcctggtgttcatcatcctgagctctgtgtccctggccgctgaggaccccatccgggcccacagcttcaggaaccacatcctgggctactttgattatgccttcaccagcatcttcaccgtggagatcctgctgaagatgacagtgtttggagccttcctgcaccggggcagcttctgccgctcctggttcaacatgctggacctgctggtggtgtctgtgtccctcatcagctttggcatccacagcagcgccatctctgtggtgaagatcctgcgggtgctgcgggtgctgcggcccctgcgggccatcaacagagccaagggcctgaagcacgtggtgcagtgtgtgtttgtggccatccgcaccatcggcaacatcatgattgtgaccaccctgctgcagttcatgtttgcctgcatcggcgtgcagctgttcaagggcaagttctacacctgcacagatgaggccaagcacaccccccaggagtgcaagggcagcttcctggtgtacccagatggagatgtgtcccggcccctggtgcgggagcggctgtgggtgaacagcgacttcaactttgacaacgtgctgagcgccatgatggccctcttcaccgtgtccacctttgagggctggccagccctgctgtacaaggccattgatgcctatgcagaggaccacggccccatctacaactacagagtggagatctctgtgttcttcatcgtgtacatcatcatcatcgccttcttcatgatgaacatctttgtgggcttcgtcatcatcaccttccgggcccagggcgagcaggagtaccagaactgtgagctggacaagaaccagaggcagtgtgtggagtatgccctgaaggcccagcccctgcggcgctacatccccaagaacccccaccagtacagagtgtgggccaccgtgaacagcgctgcctttgagtacctgatgttcctgctgatcctgctgaacacagtggccctggccatgcagcactatgagcagacagcccccttcaactatgccatggacatcctgaacatggtgttcaccggcctcttcaccatcgagatggtgctgaagatcatcgccttcaagcccaagcactacttcacagatgcctggaacacctttgatgccctgattgtggtgggcagcatcgtggacattgctgtgacagaggtgaacaatggaggccacctgggggagagcagcgaggacagcagccgcatcagcatcaccttcttccgcctcttccgggtgatgaggctggtgaagctgctgagcaagggggagggcatccgcaccctgctgtggaccttcatcaagagcttccaggccctgccctacgtggccctgctgattgccatgatcttcttcatctatgctgtgattggcatgcagatgtttgggaaggtggccctgcaggacggcacccagatcaacagaaacaacaacttccagaccttcccccaggccgtgctgctgctcttccgctgtgccaccggggaggcctggcaggagatcatgctggccagcctgcccggcaacagatgtgaccctgagagtgactttggacctggagaggagttcacctgtggcagcaactttgccatcgcctacttcatctccttcttcatgctgtgtgccttcctgatcatcaacctgtttgtggccgtcatcatggacaactttgactacctgacccgggactggagcatcctgggcccccaccacctggatgagttcaagaggatctggagcgaatatgaccccggggccaagggccgcatcaagcacctggatgtggtggccctgctgcggcgcatccagccccccctgggctttgggaagctgtgcccccaccgggtggcctgcaagaggctggtggccatgaacatgcccctgaacagtgatggcaccgtgaccttcaatgccaccctgtttgccctggtgaggaccagcctgaagatcaagacagagggcaacctggagcaggccaaccaggagctgagaattgtcatcaagaagatctggaagaggatgaagcagaagctgctggatgaggtgatccccccaccagatgaggaggaggtgacagtgggcaagttctacgccaccttcctgatccaggactacttcaggaagttcagaagaaggaaggagaagggcctgctgggcaatgatgctgcccccagcaccagcagcgccctgcaggccggcctgcggagcctgcaggacctgggccctgagatgaggcaggccctgacctgtgacacagaggaggaggaggaggagggccaggagggcgtggaggaggaggatgagaaggacctggagaccaacaaggccaccatggtgtcccagcccagcgcccggcggggcagcggcatctctgtgtccctgcctgtgggggaccggctgcctgacagcctgagctttggccccagtgatgatgaccggggcacccccaccagcagccagcccagcgtgccccaggccggcagcaacacccaccggcggggcagcggggccctgatcttcaccatccctgaggagggcaacagccagcccaagggcaccaagggccagaacaagcaggatgaagatgaggaggtgcctgaccggctgagctacctggatgagcaggccggcaccccaccctgcagcgtgctgctgcccccccaccgggcccagcgctacatggatggccacctggtgccccggcggcggctgctgccccccaccccagctggcaggaagcccagcttcaccatccagtgcctgcagaggcagggcagctgtgaggacctgcccatccctggcacctaccaccggggcaggaacagcggccccaacagagcccagggctcctgggccaccccaccccagaggggccgcctgctgtatgcccccctgctgctggtggaggagggcgctgctggggagggctacctgggccgcagcagcggccccctgcggaccttcacctgcctgcacgtgcccggcacccacagcgaccccagccacggcaagaggggcagcgctgacagcctggtggaggccgtgctgatcagcgagggcctgggcctgtttgcccgggaccccaggtttgtggccctggccaagcaggagattgctgatgcctgccgcctgaccctggatgagatggacaatgctgccagtgacctgctggcccagggcaccagcagcctgtacagtgatgaggagagcatcctgagcagatttgatgaggaggacctgggagatgagatggcctgtgtgcacgccctgtag

SEQ ID NO: 91543 - DNA, 5739 bp, Artificial Sequence
  derived and/or modified sequence
atgagcgagagcgagggcggcaagggcgagcggatcctgcccagcctgcagacgctcggagcctctatcgtagagtggaagcctttcgatatccttatattgctcaccattttcgccaactgcgtcgcgctaggggtctatatcccctttcctgaggatgacagtaatactgctaaccataatctggagcaggtagagtatgtttttctggttatatttactgtcgaaacagtcctgaagattgtcgcgtatggtctggtgctgcatccctcggcatacatcaggaacggctggaaccttcttgacttcatcatcgtggttgtgggcctgttttcagtgctgctggaacagggaccagggcggccaggggacgcgccacacactggagggaaacccgggggattcgacgtcaaggctctgcgggctttccgcgtgctgcgcccgttgcgccttgtgagcggagtaccctctctccatatcgtactgaactcaattatgaaagctcttgtcccactgttacatattgcactgctcgtcctgtttgtgataatcatatacgcaattatagggttggaactctttcttggtcggatgcacaagacgtgttatttcttaggctctgatatggaggcggaggaggacccatctccttgtgctagctctggcagcggtcgcgcttgcactcttaaccagaccgagtgccggggtaggtggcccggcccaaacgggggaatcactaacttcgataacttcttctttgcaatgctgacggtgttccagtgtgtaacaatggagggttggaccgatgtgctatactggatgcaagacgctatgggatatgagcttccttgggtgtacttcgtgtccctagtgatttttggctccttttttgtactgaatttagtgctgggtgtactgagcggcgagttctctaaagagcgagaaaaagccaaggcaagaggggattttcagaaacagcgcgagaagcagcagatggaggaagacctaagggggtatttggactggattacacaggcagaagagttggatatggaggacccaagcgcagacgataatttaggctccatggctgaggaggggcgggccgggcaccgtccccagctggccgaattaacgaaccgccggaggggtcggctcagatggttcagtcactccacgcgtagcacacactcgacttcatctcatgccagccttcccgccagtgacacaggaagcatgaccgagactcagggggatgaagatgaggaggagggcgctttggccagttgcactcgttgtctcaacaagattatgaagactcgggtgtgccgccgcctacgtagggccaaccgcgttctcagagctcgctgccgccgagcagttaagtcaaatgcctgctactgggctgtcctgctcttggtgttcctcaacactctgaccatcgcttctgaacaccacggacagcccgtttggcttactcagatccaggagtatgcaaacaaagtactcctgtgtctctttacagtcgaaatgctccttaagctgtatggcctgggaccatctgcttacgtctcaagcttctttaatcgttttgactgttttgtagtatgcggtggaattttagagaccaccctcgttgaggtcggggccatgcagccactgggtatttcagtgctgcgctgtgttaggttgctccggattttcaaggtgacccgccattgggccagcctttctaatttggtcgcatccctgcttaatagtatgaaaagcatagcgtccctgctgctgctgttgttcctcttcataatcatcttcagcctacttggcatgcagctgtttgggggcaaatttaacttcgaccaaacgcacactaagagatccacattcgacacattcccacaggcgctgctgacagtgtttcagattctgactggcgaggactggaacgttgtgatgtacgatgggataatggcttatggaggccccttctttcccgggatgctagtctgcatttactttatcattcttttcatatgtgggaactatatactcctgaacgtttttctcgcaatcgcggtcgacaatctcgcgagcggggacgccggaacagctaaagacaaaggaggggaaaagtccaatgagaaagacttaccacaggagaatgagggactcgtccctggtgttgaaaaggaggaagaggagggcgctcgacgcgaaggtgccgatatggaggaggaggaagaggaggaagaagaggaagaggaggaggaagaagaggaaggagccgggggtgtcgagctattgcaggaagtggtccccaaggaaaaggtggttcctattcccgagggttccgctttcttctgcttatctcagaccaatccgcttcggaaagggtgtcacacactgattcatcatcatgtgtttaccaacttgatcttggtatttatcatcctctccagtgtctccctcgccgccgaagatcctattagagcacacagcttcaggaatcacatactcggatacttcgactacgcatttacgagtatctttaccgtcgagatcttgttaaaaatgacagtgtttggtgccttcctgcacaggggcagtttctgtagatcttggttcaatatgctcgatctacttgtggtcagcgtcagcttgataagcttcggcatacatagttctgctatctcagttgttaaaatcctccgggtgcttagggtactccgccccctgagggccatcaaccgggccaaggggctcaagcatgttgtccagtgtgtgttcgtggcaatccggaccatcggcaatatcatgattgtgaccaccttgctacagttcatgttcgcatgtattggtgtgcagctgtttaaaggcaaattttatacctgcacagacgaggcaaaacatacaccccaggagtgtaaaggaagctttctcgtttatccagatggcgatgtgtcacggcctctggttagggaaaggctgtgggtaaatagcgacttcaatttcgataatgtactaagcgcaatgatggccctctttaccgtcagcacgtttgaaggctggccagctctgttatataaggcgatcgatgcctacgccgaggaccacggccctatctacaattacagagtcgagattagtgtattcttcatcgtgtatatcatcatcatcgctttcttcatgatgaatatcttcgtcggtttcgtgattatcacattccgggcccagggcgagcaggagtaccagaattgcgagctggacaagaaccagagacagtgcgtcgaatacgccttaaaagcccagcccctcaggcgctacattcctaaaaacccacaccaatatcgagtatgggccactgttaatagtgctgctttcgaatatttaatgtttctgttaatccttttaaacactgttgccttggccatgcagcactacgaacaaaccgcgccattcaactatgcaatggacattctgaatatggtcttcacaggactttttacaatagaaatggtgcttaaaattatagcgtttaagccgaagcattacttcaccgacgcctggaacactttcgatgcccttatcgttgtaggcagcatcgtagacattgcagtcacagaggtgaacaacggaggtcatctcggcgagtcctcagaggactccagcagaatctctatcacattcttcaggctattccgggtgatgcgcctggtgaaattgctctcaaaaggggaagggatacggaccctcttatggacgttcatcaaatcttttcaggcactcccatacgttgctctactcatcgccatgatctttttcatttacgccgttattgggatgcaaatgtttgggaaagtggctctgcaggatgggacgcagattaacaggaacaataactttcagacatttccccaggctgtgttacttctcttcagatgcgccaccggggaagcctggcaggagataatgttggcctcactgcctgggaataggtgcgatcctgaatccgactttgggcccggtgaagaattcacctgtgggtcaaacttcgccattgcctactttatttcattcttcatgctgtgcgcattcttaatcataaatctttttgtcgccgtgatcatggacaactttgattatctcacacgggattggagtattttaggtccccaccacttggatgaattcaagcgaatttggtctgaatacgatcccggggcaaagggacgcatcaagcacctagacgtcgtggctctgctacgaaggatccagcctcccctcggtttcggtaagctgtgtccccatcgggtggcatgtaaaaggctggtcgccatgaacatgccactaaactccgacggaactgtcacatttaatgcaactctgttcgccctggttagaacgtcgctaaagattaaaaccgaaggaaatctcgagcaggccaatcaggagcttagaattgttataaagaaaatttggaagagaatgaaacaaaagctgctcgacgaggtgatcccaccccctgatgaggaagaggtgactgtaggcaagttttatgctactttcctaatccaggactatttcaggaagtttcgacggaggaaagagaaggggcttctaggaaatgatgccgctcctagcacgtcaagcgctctgcaggctggtctgaggagcctgcaagacttgggtcctgaaatgcgtcaggctctcacctgtgataccgaagaagaagaagaggaaggtcaagaaggcgttgaagaagaggatgaaaaagatttggaaacaaataaggctaccatggttagccagccttccgctagaagaggctccgggatttctgtatccctacctgttggcgacaggctgcccgactccttgtcctttggtccgagcgatgacgatcggggcacgccgaccagcagtcagccctccgttccacaggccgggtccaacacgcaccgacgggggagtggtgctctgattttcaccatcccggaagagggaaactcccagccaaagggcaccaaagggcagaataagcaggacgaggatgaggaggtacctgaccgcctttcgtacctggatgagcaagcggggactcctccctgtagcgtattgctgcctcctcaccgggcacagagatatatggatggacacctggtgccccggcgaaggctactgcctcctacccccgctgggcggaagccctccttcacaattcaatgtcttcaaagacaaggcagctgcgaagacctgcctattcctggcacataccaccggggtcgaaattcaggtccgaatagagcccaagggagctgggctacccctccccaaaggggtcggttgctctacgcacctctgctgttagtcgaggagggcgctgccggggaagggtatctggggcggtcctcaggccctctgcggacatttacctgcctccatgtgcccggaacgcacagtgatcccagtcacggcaaaagaggatctgctgacagccttgtagaggcagtcctgatcagcgaaggtctgggtctctttgcccgcgatccacgcttcgtggccctcgcgaaacaggagattgccgacgcctgccggctgacattggatgaaatggacaatgcagcatcagacctcctggcccaaggaacatcctctttgtactctgacgaagagagtatcctgtcccggtttgacgaggaggatctgggcgatgaaatggcttgtgttcacgccctgtag

SEQ ID NO: 91544 - DNA, 5738 bp, Artificial Sequence
  derived and/or modified sequence
atgtccgaatccgagggcggtaagggtgaacgtatcctcccctccctccagactctcggggcttctattgttgaatggaagccatttgacattctcatcctgctaacaatcttcgcgaactgcgtcgccctcggcgtatacattccatttccagaagacgactccaacaccgcgaaccacaatctcgagcaggttgaatatgtcttccttgtaatttttaccgtggagaccgtgctgaaaatcgttgcctacggcttggtgcttcacccctccgcttatatcagaaacggatggaatctgttagattttatcatcgttgtagtgggtctcttctcagttctgcttgagcagggaccgggacggcctggagatgcaccccacactggtggtaaaccagggggttttgacgtgaaagcgctccgggcattcagagtgttgcgccctttacgtctggtttctggcgtgccaagtctgcatatcgtgctgaactccattatgaaagctctcgtgcctcttctgcatatcgcccttctggtgctgttcgtgatcattatttacgcaatcattgggttggaactcttccttggtaggatgcacaaaacttgctactttctcggctcggatatggaagcggaagaagatccgtcaccatgcgcctcatccggaagcggcagggcgtgtaccttgaaccagacagaatgtcgagggaggtggcccggacctaatggcggaattaccaactttgataatttcttttttgccatgttaacagtgttccaatgtgtgacaatggagggatggaccgacgtcctctactggatgcaagacgccatggggtacgagctgccctgggtgtactttgtgagccttgttattttcgggagctttttcgtgctaaacctagtgctcggtgtgctttctggggagtttagtaaagagagggagaaagcaaaagccagaggcgactttcagaagcagcgagaaaagcaacagatggaggaagacctgcggggttatctagactggatcactcaggcagaggagcttgatatggaggatccatcggcagatgataacttgggatctatggcagaagagggccgagctggacatagaccacagctggctgaactcaccaacagacggagaggcaggctgaggtggttttctcattctactagatcaactcactctacgtcctctcacgcatctttgccagcctctgataccggttctatgaccgagacccaaggcgatgaggatgaagaggagggggctttggcatcatgcacccggtgtctgaataaaataatgaaaactagggtttgtcgcagactgagacgggcaaaccgcgtgctgcgagctcggtgccgacgcgctgttaaaagcaacgcatgttactgggccgttctgctgctagtgtttctgaataccctgactattgctagcgagcatcacgggcagcctgtttggcttacacagattcaggaatacgccaacaaagttctactttgtctgtttactgtggagatgttgctcaaactgtacggcctcggaccatctgcttacgtgtcttcattttttaaccgtttcgactgtttcgtggtctgcggtgggatacttgagactaccctcgtagaagtcggagcaatgcagccccttggaatttccgtgctgaggtgcgttagactcctgaggatctttaaggtcacaagacattgggcatccctcagtaatctcgtggcctctctattgaacagcatgaagtctattgccagcctcctgttgctgctgtttctcttcatcatcatcttcagcctgctgggtatgcagctgtttggaggcaagttcaattttgaccaaacccacaccaaaagatctaccttcgacaccttcccacaggcgctactgacggtgttccagatcctgacaggtgaagattggaatgtggtaatgtatgatggaattatggcttacggcggaccctttttcccgggtatgctggtatgtatctacttcatcatactttttatctgcggtaactatattctgctgaacgtgttccttgccatcgcagtggacaacttggccagcggtgacgcagggacagcaaaagataagggaggcgaaaagtccaacgaaaaagatctaccgcaggagaatgagggactcgtacctggcgttgagaaagaggaggaagaaggggctcggagggagggtgccgacatggaagaagaagaggaggaggaggaggaagaggaggaggaagaggaagaagagggtgccggtggtgtagagctgctgcaggaggtagtccccaaggagaaggtagttccgatccctgagggttccgcattcttctgcctgagtcaaacaaatcctctgcggaaaggatgtcatacactaattcatcaccacgtctttaccaacctgattttagtgttcattatcctgtcatcagtgtctttggctgctgaggatcctatcagggcccactctttccgcaaccatatccttggctatttcgactatgcctttacctcaatcttcactgttgagatcctccttaaaatgaccgttttcggggcattcctgcatagaggatccttttgtcggagctggttcaatatgctggacttgcttgtcgttagtgtgtccctcatatctttcgggatccactcctctgctatttcagtggttaagatccttcgggtcctgcgcgtgctgcggcctttacgcgcaataaatcgcgcaaaaggcctgaagcacgtcgtgcagtgcgtatttgttgctattcgtacaatcgggaatatcatgatcgtgacaactctgttgcagtttatgttcgcatgcatcggtgtgcaactgttcaaagggaaattttatacttgcacagacgaagcgaagcatacgccacaggagtgtaaggggagctttctcgtgtatccggatggggacgtaagcagaccactggtcagagagaggctgtgggtgaacagcgattttaactttgataacgtgttgagcgcgatgatggccttattcacagtgtccacattcgaaggctggcctgctctgctgtataaggctatcgacgcctatgcagaggaccacggacccatttacaactaccgcgtagagatcagtgtcttttttattgtttatatcattataattgcattcttcatgatgaacattttcgtgggattcgtgataattacgttccgggcacagggggagcaagagtatcagaattgtgagttagacaaaaaccagagacaatgcgtggaatacgcattgaaggcccagcctcttagaagatacatcccaaaaaaccctcatcagtaccgagtgtgggctacagttaattccgccgctttcgaatacttgatgtttctcttgatcctcctaaacacagtagctctggctatgcaacactacgagcagactgcacctttcaactacgccatggatatcctgaatatggtgttcaccggcttatttaccattgagatggtactaaagattattgcattcaagcccaagcactactttacagatgcgtggaatactttcgatgcccttatcgtggtgggcagtatagtcgatattgcagttaccgaggtcaacaatggcggacatctcggcgagtcatctgaagattccagccgcatttcaatcacatttttccgtctttttagagttatgaggttggtaaaacttctcagtaaaggcgagggaatcagaacgcttctttggacttttatcaagagcttccaggcgttgccctacgtcgccttactgattgccatgatcttcttcatttatgcagtgattggaatgcagatgttcggaaaggtagctttacaggatggcacgcagatcaaccggaacaataacttccagacttttccacaagctgtgctattgctattccgctgcgcgaccggtgaggcctggcaggagatcatgctagcatctctccccggtaatcggtgcgatcctgagagcgattttggcccaggcgaggagtttacttgtggtagcaattttgccattgcgtattttataagtttctttatgttgtgtgctttcctcataataaacctgttcgtggccgtgatcatggacaactttgattacctgacacgagattggtccattctgggacctcaccatctagacgagttcaagagaatctggtctgaatacgaccctggggcaaaaggaaggattaaacacctcgacgtcgtggcactgctccgtcgtattcaaccgccattgggatttggtaaactctgcccccacagagtggcttgcaaacggctggtcgccatgaatatgcccctgaattccgacggaactgtaaccttcaacgcaacgctgttcgcccttgtgcgtacatcactcaaaattaaaaccgaaggcaatctggagcaggctaatcaggagctgcgaatcgtgattaaaaagatttggaagcggatgaaacaaaagttgttagatgaggtgattcccccaccggatgaggaggaggtgactgtgggcaagttctacgcaacattcctcatccaagactactttagaaaattccgacgtcgtaaggagaagggtctgcttggcaatgacgccgctcccagtacgagcagcgccctgcaggccggactgagaagcttgcaggacctaggacccgaaatgcgtcaagccttgacatgtgacacagaggaagaggaggaggagggtcaggaaggagtagaagaggaggatgaaaaagacctagaaaccaacaaagccaccatggtcagccaacctagtgccaggagaggatctggaataagcgtaagtttgcccgttggagataggctccccgacagtctctcatttggcccttccgatgacgacaggggaacacctacatcttcacagccttctgtgccacaggctggttccaatactcaccggcgaggaagcggggcactgatctttacaataccggaggagggcaatagccagccaaaagggacgaaggggcagaacaagcaggacgaggatgaagaagtacccgataggctcagttatctagacgagcaggccggaacccctccatgtagcgttctcctccccccacatcgagcgcagcgctacatggacgggcacctggttcctcgcaggaggcttctgcctcctacccccgctggtcgaaagccctccttcaccatccaatgcctccagcgtcagggctcttgcgaagatctgccgattcctggaacttaccacagaggacggaattcaggcccaaatcgggcacagggatcatgggcgacccctccccagcgtggaagactcctctacgctccgctcttactggtggaagagggagccgctggcgagggttacctcggccgttctagcggaccacttaggaccttcacctgtctccacgtccctggtacccactcagatccctctcatgggaagcgcggaagcgctgatagtctggtagaggcggtgctcatatccgaaggtttggggctgtttgccagggaccctcgatttgtcgcattggctaagcaggaaattgcagacgcttgccggctcacccttgacgagatggataacgcagccagcgatctcttggctcaagggacatccagtttatactctgatgaggagtctatcctgtcccggtttgacgaagaagatctcggtgacgagatggcatgtgtacacgctctgta

SEQ ID NO: 91545 - DNA, 5813 bp, Artificial Sequence
  derived and/or modified sequence
atgtcggaatctgaaggcgggaaaggtgagagaatccttccatccctgcagacccttggagcaagcatcgtggagtggaagcccttcgacatcctcatcctgctgaccatctttgccaactgcgtggccctgggagtttacatccccttccctgaggacgactccaacactgccaaccacaacctggagcaggtggagtacgtattcctggtgattttcactgtggagacggtgctcaagatcgtggcctacgggctggtgctccaccccagcgcctacatccgcaatggctggaacctactcgacttcatcatcgtcgtggtcgggctgttcagcgttctgctggagcagggccccggacggccaggcgacgccccgcacaccgggggaaagccaggaggcttcgatgtgaaggcattgagggcgtttcgggtgctgcggccactgaggctggtgtctggggtcccgagcctgcacatagtgctcaattccatcatgaaggctctggtgccgctgctgcacattgcactgctcgtgctcttcgtcatcatcatttatgccatcattgggctcgagctgttccttggacgaatgcacaagacgtgctacttcctgggatccgacatggaagcggaggaggacccatcgccctgtgcgtcttcgggatcagggcgtgcgtgcacgctgaaccagactgagtgccgcgggcgctggccagggcccaatggaggcatcaccaactttgacaacttcttcttcgccatgctgacagtcttccagtgtgtcaccatggaaggctggaccgatgtgctctactggatgcaagatgccatggggtatgaactgccctgggtgtactttgtgagccttgtcatctttgggtccttcttcgtcctcaaccttgtgcttggcgtcctgagtggggagttctccaaggagagagagaaagcgaaagctcgcggggacttccagaagcagcgggagaagcagcagatggaggaagacctgcggggctacctggactggatcactcaagccgaagagctggacatggaggacccctccgccgatgacaaccttggttctatggctgaagagggccgggcgggccatcggccacagctggccgagctgaccaataggaggcgtggacgtctgcgctggttcagtcattctactcgctccacacactccaccagcagccatgccagcctcccagccagtgacaccggttccatgacagagacccaaggcgatgaggatgaggaggagggggctctggccagctgtacacgctgcctaaacaagatcatgaaaaccagagtctgccgccgcctccgccgagccaaccgggtccttcgggcacgctgccgtcgggcagtgaagtccaatgcctgctactgggctgtgctgttgctcgtcttcctcaacacgttgaccatcgcctctgagcaccacgggcagcctgtgtggctcacccagatccaggagtatgccaacaaagtgttgctctgtctgttcacggtggagatgcttctcaaattgtacggtctgggcccctctgcctatgtgtcttccttcttcaaccgctttgactgctttgtggtctgtgggggcatcctagagaccaccttggtggaggtgggcgccatgcagcccttgggcatctcagtgctccgatgtgtgcgcctcctcaggatctttaaggtcaccagacactgggcttctctgagcaatctggtggcatccctgctcaattcaatgaaatccatcgcatccttgctgcttctcctcttcctcttcatcattatcttctccctgcttggcatgcagctgtttgggggcaagttcaactttgaccagacccacaccaagcgaagcacctttgacacgttcccccaggccctcctcactgtctttcagatcctgacaggtgaggactggaacgtggtcatgtatgatggtatcatggcatatggtggccccttcttcccaggaatgttggtgtgcatctatttcatcattctcttcatctgtggcaactacatcctgttgaacgtgtttcttgccattgctgtggacaacctggccagtggagatgcaggcactgccaaggacaagggcggggagaagagcaatgagaaggatctcccacaggagaatgaaggcctggtgcctggtgtggagaaagaggaagaggagggtgcaaggagggaaggagcagacatggaggaggaggaggaggaggaagaagaggaagaagaggaagaagaggaagagggtgcagggggtgtggaactcctgcaggaagttgtacccaaggagaaggtggtacccatccctgagggcagcgccttcttctgcctcagccaaaccaacccgctgaggaagggctgccacaccctcatccaccatcatgtcttcaccaatcttatcctggtgttcatcatcctcagcagtgtgtccctggccgctgaggaccccatccgagcccactccttccgcaaccatattctgggttacttcgattatgccttcacctccattttcactgtggagattctactaaagatgacagtgtttggggccttcctgcaccgcggctccttctgccgtagctggtttaatatgttggatctgctggtggtcagtgtgtccctcatctcctttggcatccactccagcgccatctcggtggtgaagattctgcgagtactccgagtactgcggcccctccgagccatcaacagggccaagggactcaagcatgtggtgcagtgtgtatttgtggccatccggaccatcggaaacatcatgattgtcaccacacttctgcaatttatgttcgcctgcatcggggtgcagctcttcaaggggaaattctacacctgcacggacgaggccaaacacacccctcaagaatgcaagggctccttcctggtatacccagatggagacgtgtcacggcccctggtccgggagcggctctgggtcaacagtgatttcaactttgacaatgtcctttcagccatgatggccctgttcactgtctccacctttgaaggctggcctgcactgctatacaaggccatcgatgcatatgcagaggaccatggccccatctataattaccgtgtggagatctcagtgttcttcattgtctacatcatcatcattgcgttcttcatgatgaacatcttcgtgggcttcgtcatcatcactttccgtgcccagggcgagcaggagtaccaaaactgtgagctggacaagaaccagcgtcaatgtgtggaatatgccctcaaggcccagccactccgccgttacatccccaagaacccgcatcagtatcgtgtgtgggccactgtgaactctgctgcctttgagtacctgatgttcctgctcatcctgctcaacacagttgccctagccatgcagcactatgagcagactgctcccttcaactatgccatggacatcctcaacatggtcttcactggcctcttcactattgagatggtgctcaaaatcatcgccttcaagcccaagcattacttcactgatgcctggaacacgtttgacgctcttattgtggtgggcagcatagtggatattgccgtcactgaagtcaataatggtggccaccttggcgagagctctgaggacagctcccgcatttccattaccttctttcgcctcttccgagttatgcggctggtcaagcttctcagtaagggtgaagggatccgcacattgctctggacattcatcaagtccttccaggccttgccctatgtggctcttctcatcgcaatgatattcttcatctatgccgtcattggcatgcagatgttcggcaaggtggctcttcaggatggcacacagataaaccgaaacaacaacttccagacctttccacaggctgtgctgcttctgttcaggtgtgccactggtgaggcatggcaggagataatgcttgccagccttcccggaaatcggtgtgatcctgagtctgacttcggccctggtgaagagtttacctgtggtagcaattttgccatcgcctatttcatcagcttcttcatgctctgtgccttcctgatcataaatctctttgtggctgtgatcatggacaactttgattatctcaccagagattggtccatcctgggcccccatcaccttgatgaattcaagaggatctggtctgaatatgaccctggggccaagggccgcatcaaacacttggatgtggttgccctgctgagacgtatccagccccctctgggatttgggaagctgtgcccacaccgagtggcctgcaagagacttgtggcaatgaacatgcccctcaactcagatgggacggtgacattcaacgccacactctttgccctggtccggacatccctgaagatcaaaacagaagggaacctggagcaagccaaccaggagctgcggattgtcatcaaaaagatctggaagcggatgaaacagaagctgctagatgaggtcatccccccaccagacgaggaggaggtcaccgtgggcaaattctacgccacatttctgatccaggactatttccgcaaattccggcggaggaaagaaaaagggctactaggcaacgacgccgcccctagcacctcttccgcccttcaggctggtctgcggagcctgcaggacttgggtcctgagatgcggcaggccctcacctgtgacacagaggaggaggaagaagaggggcaggagggagtggaggaggaagatgaaaaggacttggaaactaacaaagccacgatggtctcccagccctcagctcgccggggctccgggatttctgtgtctctgcctgtcggggacagacttccagattcactctcctttgggcccagtgatgatgacagggggactcccacctccagtcagcccagtgtgccccaggctggatccaacacccacaggagaggctctggggctctcattttcaccatcccagaagaaggaaattctcagcccaagggaaccaaagggcaaaacaagcaagatgaggatgaggaagtccctgatcggctttcctacctagatgagcaggcagggactcccccgtgctcagtccttttgccacctcacagagctcagagatacatggatgggcacctggtaccacgccgccgtctgctgccccccacacctgcaggtcggaagccctccttcaccatccagtgtctgcagcgccagggcagttgtgaggatttacccatcccaggcacctatcatcgtgggcgaaattcagggcccaatagggctcagggttcctgggcaacaccacctcagcggggtcggctcctgtatgccccgctgttgttggtggaagagggcgcagcgggggaggggtacctcggcagatccagtggcccactgcgcaccttcacctgtctgcacgtgcctggaacccactcggaccccagccatgggaagaggggcagtgccgacagcttggtggaggctgtgcttatctcagagggtctgggcctctttgctcgagacccacgtttcgtggccctggccaagcaggagattgcagatgcgtgtcgcctgacgctggatgagatggacaatgctgccagtgacctgctggcacagggaaccagctctctctatagcgacgaggagtccatcctctcccgcttcgatgaggaggacttgggagacgagatggcctgcgtccacgccctctgaattcccacccctccccaactgctcaataaacctcctgccctcccctccccagcaggaggcaggcatggaccaca

SEQ ID NO: 91546 - DNA, 5739 bp, Artificial Sequence
  derived and/or modified sequence
atgagcgagagcgagggcggcaagggcgagagaatcctgcccagcctgcagaccctgggcgccagcatcgtggagtggaagcccttcgacatcctgatcctgctgaccatcttcgccaactgcgtggccctgggcgtgtacatccccttccccgaggacgacagcaacaccgccaaccacaacctggagcaggtggagtacgtgttcctggtgatcttcaccgtggagaccgtgctgaagatcgtggcctacggcctggtgctgcaccccagcgcctacatcagaaacggctggaacctgctggacttcatcatcgtggtggtgggcctgttcagcgtgctgctggagcagggccccggcagacccggcgacgccccccacaccggcggcaagcccggcggcttcgacgtgaaggccctgagagccttcagagtgctgagacccctgagactggtgagcggcgtgcccagcctgcacatcgtgctgaacagcatcatgaaggccctggtgcccctgctgcacatcgccctgctggtgctgttcgtgatcatcatctacgccatcatcggcctggagctgttcctgggcagaatgcacaagacctgctacttcctgggcagcgacatggaggccgaggaggaccccagcccctgcgccagcagcggcagcggcagagcctgcaccctgaaccagaccgagtgcagaggcagatggcccggccccaacggcggcatcaccaacttcgacaacttcttcttcgccatgctgaccgtgttccagtgcgtgaccatggagggctggaccgacgtgctgtactggatgcaggacgccatgggctacgagctgccctgggtgtacttcgtgagcctggtgatcttcggcagcttcttcgtgctgaacctggtgctgggcgtgctgagcggcgagttcagcaaggagagagagaaggccaaggccagaggcgacttccagaagcagagagagaagcagcagatggaggaggacctgagaggctacctggactggatcacccaggccgaggagctggacatggaggaccccagcgccgacgacaacctgggcagcatggccgaggagggcagagccggccacagaccccagctggccgagctgaccaacagaagaagaggcagactgagatggttcagccacagcaccagaagcacccacagcaccagcagccacgccagcctgcccgccagcgacaccggcagcatgaccgagacccagggcgacgaggacgaggaggagggcgccctggccagctgcaccagatgcctgaacaagatcatgaagaccagagtgtgcagaagactgagaagagccaacagagtgctgagagccagatgcagaagagccgtgaagagcaacgcctgctactgggccgtgctgctgctggtgttcctgaacaccctgaccatcgccagcgagcaccacggccagcccgtgtggctgacccagatccaggagtacgccaacaaggtgctgctgtgcctgttcaccgtggagatgctgctgaagctgtacggcctgggccccagcgcctacgtgagcagcttcttcaacagattcgactgcttcgtggtgtgcggcggcatcctggagaccaccctggtggaggtgggcgccatgcagcccctgggcatcagcgtgctgagatgcgtgagactgctgagaatcttcaaggtgaccagacactgggccagcctgagcaacctggtggccagcctgctgaacagcatgaagagcatcgccagcctgctgctgctgctgttcctgttcatcatcatcttcagcctgctgggcatgcagctgttcggcggcaagttcaacttcgaccagacccacaccaagagaagcaccttcgacaccttcccccaggccctgctgaccgtgttccagatcctgaccggcgaggactggaacgtggtgatgtacgacggcatcatggcctacggcggccccttcttccccggcatgctggtgtgcatctacttcatcatcctgttcatctgcggcaactacatcctgctgaacgtgttcctggccatcgccgtggacaacctggccagcggcgacgccggcaccgccaaggacaagggcggcgagaagagcaacgagaaggacctgccccaggagaacgagggcctggtgcccggcgtggagaaggaggaggaggagggcgccagaagagagggcgccgacatggaggaggaggaggaggaggaggaggaggaggaggaggaggaggaggaggagggcgccggcggcgtggagctgctgcaggaggtggtgcccaaggagaaggtggtgcccatccccgagggcagcgccttcttctgcctgagccagaccaaccccctgagaaagggctgccacaccctgatccaccaccacgtgttcaccaacctgatcctggtgttcatcatcctgagcagcgtgagcctggccgccgaggaccccatcagagcccacagcttcagaaaccacatcctgggctacttcgactacgccttcaccagcatcttcaccgtggagatcctgctgaagatgaccgtgttcggcgccttcctgcacagaggcagcttctgcagaagctggttcaacatgctggacctgctggtggtgagcgtgagcctgatcagcttcggcatccacagcagcgccatcagcgtggtgaagatcctgagagtgctgagagtgctgagacccctgagagccatcaacagagccaagggcctgaagcacgtggtgcagtgcgtgttcgtggccatcagaaccatcggcaacatcatgatcgtgaccaccctgctgcagttcatgttcgcctgcatcggcgtgcagctgttcaagggcaagttctacacctgcaccgacgaggccaagcacaccccccaggagtgcaagggcagcttcctggtgtaccccgacggcgacgtgagcagacccctggtgagagagagactgtgggtgaacagcgacttcaacttcgacaacgtgctgagcgccatgatggccctgttcaccgtgagcaccttcgagggctggcccgccctgctgtacaaggccatcgacgcctacgccgaggaccacggccccatctacaactacagagtggagatcagcgtgttcttcatcgtgtacatcatcatcatcgccttcttcatgatgaacatcttcgtgggcttcgtgatcatcaccttcagagcccagggcgagcaggagtaccagaactgcgagctggacaagaaccagagacagtgcgtggagtacgccctgaaggcccagcccctgagaagatacatccccaagaacccccaccagtacagagtgtgggccaccgtgaacagcgccgccttcgagtacctgatgttcctgctgatcctgctgaacaccgtggccctggccatgcagcactacgagcagaccgcccccttcaactacgccatggacatcctgaacatggtgttcaccggcctgttcaccatcgagatggtgctgaagatcatcgccttcaagcccaagcactacttcaccgacgcctggaacaccttcgacgccctgatcgtggtgggcagcatcgtggacatcgccgtgaccgaggtgaacaacggcggccacctgggcgagagcagcgaggacagcagcagaatcagcatcaccttcttcagactgttcagagtgatgagactggtgaagctgctgagcaagggcgagggcatcagaaccctgctgtggaccttcatcaagagcttccaggccctgccctacgtggccctgctgatcgccatgatcttcttcatctacgccgtgatcggcatgcagatgttcggcaaggtggccctgcaggacggcacccagatcaacagaaacaacaacttccagaccttcccccaggccgtgctgctgctgttcagatgcgccaccggcgaggcctggcaggagatcatgctggccagcctgcccggcaacagatgcgaccccgagagcgacttcggccccggcgaggagttcacctgcggcagcaacttcgccatcgcctacttcatcagcttcttcatgctgtgcgccttcctgatcatcaacctgttcgtggccgtgatcatggacaacttcgactacctgaccagagactggagcatcctgggcccccaccacctggacgagttcaagagaatctggagcgagtacgaccccggcgccaagggcagaatcaagcacctggacgtggtggccctgctgagaagaatccagccccccctgggcttcggcaagctgtgcccccacagagtggcctgcaagagactggtggccatgaacatgcccctgaacagcgacggcaccgtgaccttcaacgccaccctgttcgccctggtgagaaccagcctgaagatcaagaccgagggcaacctggagcaggccaaccaggagctgagaatcgtgatcaagaagatctggaagagaatgaagcagaagctgctggacgaggtgatccccccccccgacgaggaggaggtgaccgtgggcaagttctacgccaccttcctgatccaggactacttcagaaagttcagaagaagaaaggagaagggcctgctgggcaacgacgccgcccccagcaccagcagcgccctgcaggccggcctgagaagcctgcaggacctgggccccgagatgagacaggccctgacctgcgacaccgaggaggaggaggaggagggccaggagggcgtggaggaggaggacgagaaggacctggagaccaacaaggccaccatggtgagccagcccagcgccagaagaggcagcggcatcagcgtgagcctgcccgtgggcgacagactgcccgacagcctgagcttcggccccagcgacgacgacagaggcacccccaccagcagccagcccagcgtgccccaggccggcagcaacacccacagaagaggcagcggcgccctgatcttcaccatccccgaggagggcaacagccagcccaagggcaccaagggccagaacaagcaggacgaggacgaggaggtgcccgacagactgagctacctggacgagcaggccggcacccccccctgcagcgtgctgctgcccccccacagagcccagagatacatggacggccacctggtgcccagaagaagactgctgccccccacccccgccggcagaaagcccagcttcaccatccagtgcctgcagagacagggcagctgcgaggacctgcccatccccggcacctaccacagaggcagaaacagcggccccaacagagcccagggcagctgggccacccccccccagagaggcagactgctgtacgcccccctgctgctggtggaggagggcgccgccggcgagggctacctgggcagaagcagcggccccctgagaaccttcacctgcctgcacgtgcccggcacccacagcgaccccagccacggcaagagaggcagcgccgacagcctggtggaggccgtgctgatcagcgagggcctgggcctgttcgccagagaccccagattcgtggccctggccaagcaggagatcgccgacgcctgcagactgaccctggacgagatggacaacgccgccagcgacctgctggcccagggcaccagcagcctgtacagcgacgaggagagcatcctgagcagattcgacgaggaggacctgggcgacgagatggcctgcgtgcacgccctgtag

SEQ ID NO: 91547 - protein, 502 aa, Artificial Sequence
  derived and/or modified sequence
MLLRSAGKLNVGTKKEDGESTAPTPRPKVLRCKCHHHCPEDSVNNICSTDGYCFTMIEEDDSGLPVVTSGCLGLEGSDFQCRDTPIPHQRRSIECCTERNECNKDLHPTLPPLKNRDFVDGPIHHRALLISVTVCSLLLVLIILFCYFRYKRQETRPRYSIGLEQDETYIPPGESLRDLIEQSQSSGSGSGLPLLVQRTIAKQIQMVKQIGKGRYGEVWMGKWRGEKVAVKVFFTTEEASWFRETEIYQTVLMRHENILGFIAADIKGTGSWTQLYLITDYHENGSLYDYLKSTTLDAKSMLKLAYSSVSGLCHLHTEIFSTQGKPAIAHRDLKSKNILVKKNGTCCIADLGLAVKFISDTNEVDIPPNTRVGTKRYMPPEVLDESLNRNHFQSYIMADMYSFGLILWEVARRCVSGGIVEEYQLPYHDLVPSDPSYEDMREIVCIKKLRPSFPNRWSSDECLRQMGKLMTECWAHNPASRLTALRVKKTLAKMSESQDIKL

SEQ ID NO: 91548 - DNA, 1509 bp, Artificial Sequence
  derived and/or modified sequence
atgctgctgagaagcgctggcaagctgaacgtgggcactaaaaaggaagacggtgagagtaccgcaccaacaccccggccaaaggtgttgcgatgtaaatgccatcatcattgccctgaggatagtgtgaataatatctgcagcacagatgggtactgctttaccatgatcgaggaggatgatagcggcctcccggtggtgacttcaggctgtctggggctagaaggttcagactttcagtgtagagacacgccaatcccccatcaacgacgctccattgaatgttgcaccgagaggaacgagtgtaataaggatttgcacccgactcttccacctctgaagaatcgcgatttcgtggatgggcctatccatcatcgtgccctgctcatcagcgttaccgtgtgcagcctcctgctggtgttgatcatactcttttgctattttagatataagagacaggagacccggcctcggtacagcataggattagagcaagacgagacatatattcccccaggagaatctctcagggacctgattgagcaatcacaatcttccggctctggaagcggactgccactgttggttcaacgcaccatcgccaagcagattcagatggtcaagcagatcggcaaagggcgctacggcgaggtctggatgggcaagtggagaggggagaaggtagcagttaaagtgttcttcacgactgaagaagcctcctggttcagggagactgagatctatcagacagtcttgatgaggcacgagaatatacttgggttcatcgccgcggacataaaaggcacaggatcctggacacagctgtatctgattaccgactatcacgagaacggcagtctgtatgactacctgaaaagcaccaccctggacgcgaagtccatgttgaagctagcatacagctctgtgtctggcttgtgtcatctgcatactgaaatattttctacccagggaaagccggcaatcgctcatcgagatctcaaaagcaagaatatactggtcaaaaagaatggaacctgttgcattgctgacctgggactcgctgtgaagttcatttccgatacaaacgaagtggacattccccccaataccagggtcggaacaaagaggtatatgcctccggaggtgctggatgagtcactgaataggaatcattttcagtcttacataatggctgacatgtattcatttggcctcatcctgtgggaagtcgcaagaaggtgtgtgagtggaggcatcgtcgaagagtaccagctgccttaccatgatctcgtgccttccgacccaagctatgaagatatgagagagattgtatgcattaagaagctgagaccatctttccctaatagatggtcttcagatgagtgcctgcggcagatgggcaagctgatgaccgaatgctgggctcataaccctgcctcccgtctgactgcactcagggtcaagaagactctggctaaaatgagtgagtcccaggatattaagttgtag

SEQ ID NO: 91549 - DNA, 1509 bp, Artificial Sequence
  derived and/or modified sequence
atgttacttcgctccgcagggaagcttaatgtcggcacaaagaaggaggacggagagagcaccgctcctacaccaaggccaaaggtgctgaggtgcaaatgccatcatcactgtcccgaagacagtgtcaataacatctgctcaacggatggatattgttttactatgatcgaagaggacgatagcgggctgccagttgtaacttccgggtgcctaggcttggaggggtcggacttccagtgtagagacacccccatcccccatcagcgaagaagcattgaatgctgtactgagcggaacgagtgtaacaaagaccttcatccaacacttcccccactgaaaaaccgtgacttcgtcgacgggcccatacatcatagagctctcttaatttcagtaaccgtttgcagcctgctgctggtgctcatcattctattctgctacttccgatacaagcgccaagaaacacggccccgttactcaattgggctggaacaggatgaaacgtatataccgccgggcgaaagtttacgtgaccttatcgagcagtcccagagtagtggctcaggttctgggttgccacttctggttcagagaacgattgcgaagcagatacagatggttaaacagattgggaaggggagatatggcgaggtgtggatgggtaaatggcggggggagaaagtggctgtcaaagtgtttttcaccaccgaagaagcgtcatggtttagggaaacggagatttatcagactgtgttgatgcgccacgagaacattctcgggtttattgccgcagacatcaaaggcacgggaagctggacccagttatacctgatcacagattaccacgagaatggatccctctatgactatctgaaatcgacaactctggacgcgaaaagtatgctgaagttggcctactctagtgtatctggcctgtgtcatctgcacaccgaaatcttctcaacccaaggcaagccagccatcgcccacagggacctcaagtcaaagaatatcttggtcaagaagaatgggacatgttgcattgctgaccttggcctggccgtcaagttcatcagtgacaccaacgaggtggatattccacccaacactagggtgggaacaaagcggtacatgccccccgaggtgctagatgagtctttaaatagaaaccactttcagtcatacattatggccgatatgtatagctttggcctaattctctgggaggtggcccgcagatgtgtctcaggcgggattgtggaggagtaccagctgccataccatgatctcgtgcccagtgaccctagctatgaagacatgagggagattgtgtgtatcaagaaactgaggccctcgttccctaacagatggtcatccgacgaatgcctcaggcagatgggaaaacttatgacagagtgctgggcacacaatcctgctagccgtctcaccgctctccgagttaaaaaaacactggccaagatgtctgagtcacaggacatcaaactgtag

SEQ ID NO: 91550 - DNA, 345 bp, Artificial Sequence
  derived and/or modified sequence
atgctgctcaggtccgcagggaagcttaacgtgggaactaaaaaagaggacggagaatccacagcccccacccctcgccctaaggtgctgcggtgcaagtgtcatcatcactgccctgaggactcagtgaacaacatttgttctaccgatggctactgctttacaatgatagaggaggacgacagtggactgccggtagtgacgagtggatgtcttggtctcgaagggtcggacttccagtgccgcgtgcggacacttccctttctgattaaagaggatcaactaaatgcggcacagaagggaactaacgtgatcaaaacttatacactacactgcctccactag

SEQ ID NO: 91551 - DNA, 378 bp, Artificial Sequence
  derived and/or modified sequence
atgttactgcgttctgcaggaaaactgaacgtgggcactaagaaggaggacggggaatctaccgcccccactcctcgccccaaagttctgaggtgcaaatgccaccatcattgcccagaggactctgttaataacatttgtagtacagatggctactgttttacaatgatcgaggaggacgacagtgggcttcctgtggtgacatcaggctgtctcggtctggaaggcagcgattttcagtgccgcgacaccccaataccccaccagaggcggtctatagagtgttgtacagaacggaacgagtgcaacaaggaccttcacccaacactccctccgcttaaaaaccgcgacttcgtggatgggcccatccaccactag

SEQ ID NO: 91552 - DNA, 1509 bp, Artificial Sequence
  derived and/or modified sequence
atgctcctcagaagcgcgggcaaactgaacgtgggcaccaagaaagaggatggggaaagtactgctcctacccccaggccgaaggttttgcgttgcaaatgccaccaccactgccccgaggacagcgtgaataacatctgcagcacggatgggtactgcttcaccatgatcgaagaggacgatagcggcctgcctgtggtgacgagcggatgtctcggcctggaaggatccgactttcagtgcagagatacacctattccacaccagaggagaagcatcgagtgctgtacagaacgcaatgagtgcaataaggacttgcatcctactctcccaccccttaagaatagggacttcgttgacggccccatacaccatcgcgccctcctcatttctgtcaccgtctgctctctgttgttggtgctgatcatactcttctgctatttccggtacaaaaggcaggagacccggccaaggtattccattggcctcgaacaggacgagacatatattccccctggcgaaagcctgcgagatctaatagaacagtctcaaagctccggcagtggctctgggctgcccctccttgttcagagaaccattgcgaagcagattcaaatggtaaaacagatcgggaagggaagatacggagaagtgtggatgggaaaatggaggggagagaaggtagccgtgaaggtgtttttcacaacggaggaagcctcttggtttcgtgagacggaaatataccagactgtactgatgagacacgagaatattttgggcttcatagcagccgatatcaagggcacaggatcatggacccagctgtacttgattactgattatcacgaaaacggatcattgtacgattacttgaagtcaacgacacttgacgcgaagtccatgttaaagctcgcctatagcagcgttagcggcctgtgccacctacacacagagatattttcaacccagggaaaacctgctatcgctcaccgtgatcttaagtctaaaaacatccttgtgaaaaagaacggaacctgctgtattgccgacctgggcctggcagtgaagttcatttccgacacgaacgaggtggacatcccccctaatacaagggtggggacgaagcgctacatgcctcctgaggtcctggacgagtcgctcaatcggaatcacttccaatcatatatcatggccgacatgtactcctttggacttattctctgggaggtggctcgaagatgtgtgagcggaggcatcgtcgaggaatatcagctcccctatcacgatttagtgcctagtgacccctcctatgaggacatgcgagagatcgtatgtatcaagaaacttagaccatcattccccaacagatggagcagcgatgagtgtctgcgacagatgggaaagttaatgaccgagtgctgggcccacaaccctgctagcaggcttactgcacttcgggtgaagaaaacactggccaaaatgtctgagtctcaggatattaaattgtag

SEQ ID NO: 91553 - DNA, 1509 bp, Artificial Sequence
  derived and/or modified sequence
atgctgctcaggagtgctggtaagctgaatgtcgggaccaagaaggaggacggagagtccaccgcacccacccctcggcctaaggtcctccggtgcaagtgtcatcatcactgccccgaagactccgtaaacaatatctgcagtaccgatgggtattgtttcacaatgattgaggaagatgatagcggtttacccgtagtgacatctggttgtttggggctggagggctctgattttcagtgtagagatacgccaatccctcatcagcgacgctctatcgaatgttgtaccgagcggaacgagtgtaataaggaccttcatccaacacttccaccactcaagaaccgcgactttgtggacggacccattcaccatagggcccttcttatctccgtcactgtttgctcactgctcctggtgttgataatcctgttctgttacttcaggtacaagcgacaggaaacccgcccgcgatattccattggcctggagcaggacgagacatatatcccccctggcgaaagcctcagggatttgattgagcagtcccaatctagtgggtccggcagtggcctgcccctgctcgtccagaggacgattgcaaagcagatccagatggtgaagcagattggcaagggccggtacggagaagtctggatggggaagtggaggggggagaaagtcgccgtcaaagtgttcttcaccacggaagaggccagttggtttcgcgaaacagaaatctaccagacagtactgatgcgacacgaaaatatattaggcttcatagccgccgatattaaaggcaccggctcatggacccagctgtacttaattaccgactaccatgagaacggtagcctgtacgattatctgaagtcgaccaccttggatgcaaaatccatgttgaaattagcctattcctcggtctctgggctgtgccacctccacaccgagattttctctacacagggaaagcctgccatcgcgcatagagacctaaaaagtaagaatatcctggtgaaaaaaaacggaacttgctgtatagcggacctgggattggcagtaaagtttatctctgatactaacgaagttgacatcccaccaaatacccgcgtcggcaccaaaagatacatgccacccgaggtgctcgacgaatccctcaaccgcaaccacttccagagctacataatggcagatatgtactcttttggtctaattctctgggaggtggcccgcagatgcgtgtctggcggcatcgtagaggaataccagctaccttatcatgacttagtgccttcagacccttcttacgaagatatgagagagatagtttgcatcaagaaattacggccgtcatttccgaaccggtggagctccgatgaatgtctccgacagatgggcaaacttatgaccgagtgttgggcgcacaatcccgcctcaaggctcacagccctacgcgtcaagaaaacactcgcaaagatgagcgaatcgcaggacataaaactgtag

SEQ ID NO: 91554 - DNA, 1509 bp, Artificial Sequence
  derived and/or modified sequence
atgctgttgcgctctgccgggaagctaaacgtcggaactaaaaaggaggacggcgaatctactgcacctactccacggcctaaagtattacggtgcaagtgtcaccaccactgcccggaagacagcgtgaacaatatttgctctacagacgggtactgttttacaatgattgaggaagacgacagcggccttcctgttgtgacatcgggttgcctcggactcgagggatcagattttcagtgccgcgacactcctatccctcaccagaggagaagcattgagtgttgcaccgagcggaacgaatgcaataaggacctacatccaacgctaccccccctcaagaacagggatttcgtagatggtcctatccaccatagagctttactgatctccgttacagtttgctcccttctattggtgctcatcatactgttttgctactttcggtataagcgccaggagacaagacccagatactcgattggcctagaacaggatgaaacatacataccaccgggcgaatcacttagagatctgattgaacagagccagtcaagcgggagtggtagcggattgcctttacttgtgcagcggacgatagccaagcagatccagatggtgaaacagatcggaaagggacgttatggtgaagtatggatgggtaagtggagaggtgagaaggtagctgttaaggtgttcttcaccactgaggaggccagttggtttagagagaccgaaatttaccaaaccgtgctgatgagacatgagaacatcttaggttttattgccgcagacataaaagggacagggtcttggactcagttgtatctgattacagattatcatgagaatggatcactgtatgactacctgaagagcacaaccctggatgccaaatctatgctcaaactggcctactcatccgtgtccggcttgtgtcacctgcataccgagatattcagcacgcagggcaaaccagctattgcgcaccgtgacttaaaaagcaagaatatactggttaagaagaatggcacgtgctgtattgctgatttgggcttagcagtgaagttcatttctgacacaaatgaggtcgacatcccccctaatactagggtggggaccaagcggtatatgccccctgaggttctggatgaatctcttaatcgcaatcacttccagtcttacattatggcggatatgtattcattcggcttgattctgtgggaagttgcgaggaggtgtgtgagcgggggaatcgtcgaggagtatcagctcccataccacgaccttgtgccgagcgatcccagctatgaggacatgcgggagatcgtctgcattaaaaagctgagaccctcctttcctaaccggtggtcctcggatgagtgtcttcggcagatggggaaactgatgactgagtgctgggcccataaccctgcaagtcgccttacagcactgcgggtaaagaaaactctcgccaaaatgtctgagtctcaggacattaaactgtag

SEQ ID NO: 91555 - DNA, 1509 bp, Artificial Sequence
  derived and/or modified sequence
atgctgctgcggtctgctgggaagctgaatgtgggcaccaagaaggaggatggagagagcacagcccccaccccccggcccaaggtgctgcgctgcaagtgccaccaccactgcccagaggacagcgtgaacaacatctgcagcacagatggctactgcttcaccatgattgaagaagatgacagcggcctgcctgtggtgaccagcggctgcctgggcctggagggcagtgacttccagtgccgggacacccccatcccccaccagaggaggagcattgagtgctgcacagaaagaaatgaatgcaacaaggacctgcaccccaccctgccccccctgaagaacagagactttgtggatggccccatccaccaccgggccctgctgatctctgtgacagtgtgcagcctgctgctggtgctgatcatcctcttctgctacttccgctacaagaggcaggagacccggccccgctacagcatcggcctggagcaggatgagacctacatccccccaggagagagcctgcgggacctgattgagcagagccagagcagcggcagcggcagcggcctgcccctgctggtgcagaggaccatcgccaagcagatccagatggtgaagcagatcggcaagggccgctatggagaggtgtggatgggcaagtggagaggagagaaggtggccgtgaaggtgttcttcaccacagaggaggcctcctggttccgggagacagagatctaccagacagtgctgatgagacatgagaacatcctgggcttcatcgctgctgacatcaagggcaccggctcctggacccagctgtacctgatcacagactaccatgaaaatggcagcctgtatgactacctgaagagcaccaccctggatgccaagtccatgctgaagctggcctacagctctgtgtctggcctgtgccacctgcacacagagatcttcagcacccagggcaagccagccatcgcccaccgggacctgaagagcaagaacatcctggtgaagaagaatggcacctgctgcatcgctgacctgggcctggccgtgaagttcatcagtgacaccaatgaggtggacatcccccccaacaccagggtgggcaccaagcgctacatgcctcctgaggtgctggatgagagcctgaacagaaaccacttccagagctacatcatggctgacatgtacagctttggcctcatcctgtgggaggtggcccggcgctgtgtgtctgggggcatcgtggaggagtaccagctgccctaccatgacctggtgcccagcgaccccagctatgaggacatgagagaaattgtgtgcatcaagaagctgcggcccagcttccccaaccgctggagcagtgatgaatgtctgcggcagatgggcaagctgatgacagagtgctgggcccacaacccagccagccggctgacagccctgcgggtgaagaagaccctggccaagatgtctgagagccaggacatcaagctgtag

SEQ ID NO: 91556 - DNA, 345 bp, Artificial Sequence
  derived and/or modified sequence
atgctgctgcggtctgctgggaagctgaatgtgggcaccaagaaggaggatggagagagcacagcccccaccccccggcccaaggtgctgcgctgcaagtgccaccaccactgcccagaggacagcgtgaacaacatctgcagcacagatggctactgcttcaccatgattgaagaagatgacagcggcctgcctgtggtgaccagcggctgcctgggcctggagggcagtgacttccagtgccgggtgaggaccctgcccttcctgatcaaggaggaccagctgaatgctgcccagaagggcaccaacgtcatcaagacctacaccctgcactgcctgcactag

SEQ ID NO: 91557 - DNA, 378 bp, Artificial Sequence
  derived and/or modified sequence
atgctgctgcggtctgctgggaagctgaatgtgggcaccaagaaggaggatggagagagcacagcccccaccccccggcccaaggtgctgcgctgcaagtgccaccaccactgcccagaggacagcgtgaacaacatctgcagcacagatggctactgcttcaccatgattgaagaagatgacagcggcctgcctgtggtgaccagcggctgcctgggcctggagggcagtgacttccagtgccgggacacccccatcccccaccagaggaggagcattgagtgctgcacagaaagaaatgaatgcaacaaggacctgcaccccaccctgccccccctgaagaacagagactttgtggatggccccatccaccactag

SEQ ID NO: 91558 - DNA, 1509 bp, Artificial Sequence
  derived and/or modified sequence
atgctgctgcggagcgccggcaagctgaacgtgggcaccaagaaggaagacggcgaaagcacagctccgacacccagaccaaaggttcttaggtgtaagtgccaccatcattgccccgaagactcagtgaataatatctgctctactgacggatattgttttacaatgatcgaagaggacgattcagggctcccagtggtcactagcggttgtctcggtctcgagggttccgattttcagtgcagagacacccccattccacatcaaaggagaagcattgagtgctgcactgagcggaatgagtgtaacaaagacctgcaccctacgcttccacctctcaagaatcgcgacttcgttgacggtccaattcaccaccgagcactcttaattagcgttacagtttgtagcctgcttctggtgctcatcattttattctgttacttccgatataagcgccaggaaacacggccgagatactccatcggcttagaacaagatgagacctatattccacccggggaaagtctacgtgacctcatcgagcagagccagtcttcgggctctggaagcggtttacccttgctggtgcagaggacaatcgccaagcagatccagatggttaaacagatagggaagggccgctacggtgaggtgtggatgggaaagtggaggggcgaaaaagtggctgtcaaagtgttctttactacagaggaggcctcctggtttcgcgaaaccgaaatttaccagacagtccttatgaggcacgaaaatatattgggattcatcgccgcagacattaagggaaccggcagctggactcaattgtacctgattactgattatcatgagaacggttcgctttatgactacttaaagtccactacattggacgcgaaatcaatgttgaagcttgcttacagcagtgtatctggcctgtgtcacttgcatactgaaatcttcagcacacaaggaaagcctgcgatcgcgcaccgggatctgaagtctaagaacatcttggtgaagaagaacgggacgtgctgcattgccgatttagggctggcggttaagtttatcagtgatactaacgaggtcgatataccacccaacacccgggttggcacaaaaagatatatgccccccgaagtcctggatgaatcactaaatagaaatcatttccagagttacataatggcagacatgtattccttcggactaattctttgggaagttgcaagacgatgcgtgagcggaggcatcgtggaggagtatcagctgccgtatcacgacctagttccatctgacccatcttatgaggacatgagggagatagtgtgcatcaaaaagctccggccaagcttccccaatcgatggtcatctgatgagtgtcttagacagatggggaaactgatgaccgagtgttgggctcacaatcctgccagtcggcttacggcgctgagggtcaaaaaaacgctggccaagatgagtgaaagccaggacataaagttgtag

SEQ ID NO: 91559 - DNA, 1509 bp, Artificial Sequence
  derived and/or modified sequence
atgctgctgcggagcgccggcaagctgaacgtgggcaccaagaaggaggatggagaaagtacagctccgacacccaggcctaaggtgttgagatgtaaatgtcatcatcattgccccgaggacagcgtaaataatatctgtagcacggacgggtactgctttactatgatagaggaggatgacagtggcctcccagtggtaacaagcggctgtctgggcttggagggatccgacttccagtgccgggataccccaatacctcaccagaggcggtcaatagagtgctgtaccgagaggaatgagtgcaataaggacctgcaccctacgctcccccctcttaaaaaccgggactttgttgacggcccaattcaccacagggcccttctgatctcagtgactgtctgctcgctgcttctggttctcataatactgttctgctatttccgatacaaaaggcaagaaacccgacctcggtactcgattggccttgagcaggatgagacatatattcccccgggagagagtctgagagacctgattgagcagtcccaatcgtccggcagcggaagcggcctgcccctgttggtgcaacgaaccatcgctaagcaaattcagatggttaagcaaatcgggaaaggccgatatggagaggtctggatgggaaagtggagaggagaaaaagtggcggtaaaggtcttttttaccacagaagaggcatcctggttcagagagactgaaatctaccagaccgtgcttatgcgccacgaaaatatcctgggcttcattgcagctgatattaagggtacaggatcgtggacacagctttacttaatcacggattaccatgagaacggatccctctacgattatctgaaatcaacgacactcgatgcaaaatcaatgttgaagctagcctatagcagcgtaagcggactgtgccatctgcatacagagatattttccacccaggggaaacccgcaattgcccatcgtgatctcaagagcaagaacattttggtgaagaagaatgggacttgctgtatcgcggacctgggacttgcagttaaattcatctctgataccaacgaggtggatattccacccaatactcgggtaggcacgaaacgctacatgcccccagaggtactcgatgagtcattgaaccgcaaccactttcaaagctacatcatggccgacatgtacagcttcgggctgatcctgtgggaagtggctcggcggtgtgtatccggtggaattgtggaggagtatcagctgccataccacgatctggtcccttccgatccaagctacgaagatatgagggagattgtttgcattaaaaagcttcggccatcttttccgaaccgttggtcttctgacgagtgtttacgccagatggggaagctgatgaccgagtgttgggctcataaccctgcgtcccgacttacggcgctccgcgtgaagaagacgctggccaagatgagtgaaagccaggacattaagctgtag

SEQ ID NO: 91560 - DNA, 345 bp, Artificial Sequence
  derived and/or modified sequence
atgctgctgcggagcgccggcaagctgaacgtgggcaccaagaaggaagatggtgaatccacagcccccacgcccaggccgaaggttttgagatgtaagtgccaccaccactgtcccgaggactccgtgaacaacatctgctccactgacggatattgtttcaccatgatcgaggaggatgactccgggcttccagtggtaactagtggctgtctagggctggagggcagtgactttcagtgtagggtccgaaccctgccttttctgattaaggaagaccagctgaatgccgcacagaagggcactaatgtcatcaaaacctacaccctgcattgtttgcattag

SEQ ID NO: 91561 - DNA, 378 bp, Artificial Sequence
  derived and/or modified sequence
atgctgctgcggagcgccggcaagctgaacgtgggcaccaagaaggaggacggggaatcaacagctcctactcccagacccaaagttctgcggtgtaaatgtcaccatcactgtcccgaggatagtgtaaataatatctgttctactgatgggtactgtttcacaatgatcgaagaagatgatagtggtttgccagtcgtcacctcaggatgtctgggcctcgaaggaagcgatttccaatgcagagatacaccaatcccacatcagcgtcggtcgatcgagtgttgtacagagagaaatgagtgcaacaaggacctgcaccctacattgccacccctcaaaaatagggatttcgtagacgggccgatacatcactag

SEQ ID NO: 91562 - DNA, 1509 bp, Artificial Sequence
  derived and/or modified sequence
atgctgctgcggagcgccggcaagctgaacgtgggcaccaagaaggaggacggggagagcacggcccccacaccacggccaaaggtgctgcggtgtaagtgccatcatcattgcccagaagattctgttaacaatatttgttccactgacgggtactgcttcaccatgatcgaggaagacgatagcgggctgcccgtggtcactagcggatgtcttggacttgagggctcagatttccagtgtcgggatacgccaattcctcatcagcggaggagcattgagtgttgtaccgaacgcaatgaatgcaacaaagatctgcatcctaccttacctcctctcaagaaccgggacttcgttgatggccctatccatcatcgcgctctgttgattagtgtcacagtctgttcccttctcctggtgctgattattctgttctgctacttccggtataaacgccaggaaaccagacccaggtatagcattgggctcgaacaagacgaaacatatatcccccctggggagtcgctgcgggacctaatcgaacagtcacagtcatccggtagtggaagtggtctgcctttactggtccaaagaactatcgctaaacaaattcagatggtgaaacagatcggtaagggccgctacggcgaagtgtggatgggcaaatggcggggcgaaaaggtggctgtaaaggtttttttcacaactgaagaggcatcatggttcagagagacagaaatttatcagacagtgctcatgcgccatgagaacattttgggtttcatagccgcggatataaaaggcacaggctcctggactcagctgtacctgataactgattaccatgaaaatggctctctgtacgattacctcaaatcaactaccctggatgccaaatccatgttgaagctcgcatactccagcgtgagcggattgtgtcacctgcatactgagattttcagcacccagggtaaacccgccatcgcacaccgtgatttgaagagtaagaatatcttagtgaagaaaaacggtacgtgctgtatcgccgatctgggtttggccgtcaagttcatatcagacacgaacgaggtagatatcccccccaacacccgagtgggaacaaaaagatatatgccaccagaagtgctggacgaatcactaaatcggaaccattttcagtcctacatcatggctgatatgtacagtttcggcctcatactgtgggaagttgccagacgctgtgtctcgggcggcattgtcgaggagtaccagctgccctaccacgacctggttccctccgatcccagttacgaggacatgcgggaaatcgtgtgtatcaagaagttgagaccgtctttccccaacaggtggtcaagtgatgagtgcctgcggcaaatgggcaagctgatgacggagtgttgggcacacaacccagctagtcggcttactgccctgcgcgtcaagaagacattggcaaaaatgagcgaatctcaagatattaaactatag

SEQ ID NO: 91563 - DNA, 1509 bp, Artificial Sequence
  derived and/or modified sequence
atgctgctgcggagcgccggcaagctgaacgtgggcaccaagaaggaggacggagagagcacggctcctaccccaagacctaaggtccttcggtgtaaatgtcaccaccattgtcccgaggactccgtgaacaatatttgctcaacagacggctactgcttcacaatgatcgaagaggatgacagcgggctgcccgttgtaacgagcggctgtctgggattggagggatcagatttccagtgcagagatactccaataccccatcagcgcaggtcaatcgagtgctgcactgagcggaacgagtgcaacaaagacctgcatcccactttgcccccgctgaagaatcgggacttcgtggatggtcccatccaccaccgtgccctgcttatttccgtcacagtgtgctctcttcttctggtcctgataatactgttttgttactttcgatacaagcgtcaggagacacgccccagatactccatcggtctggagcaggacgaaacgtacattcccccgggggaatcgctgagggatctgattgagcaatctcagtccagcggctctggctccgggttgcccctattggtgcagaggaccattgccaagcaaatccagatggttaagcagattgggaagggaaggtacggcgaagtctggatgggcaagtggcgaggggaaaaggttgcggtgaaggttttcttcactaccgaggaagcaagctggttccgggagaccgaaatctaccagacagtgttaatgagacatgaaaacattcttggctttatcgccgcagatattaagggaactggatcttggacacagctctacctgatcacagactatcatgaaaatgggtctctctacgattacttgaagtccactaccctcgatgccaagagcatgttgaagttagcttacagcagcgtgagcggcctttgccacctgcataccgaaatcttttccactcaggggaagcccgccattgcccacagggacttgaaatctaaaaatattctcgtgaaaaagaacggaacctgttgtattgccgatttagggctggcagtgaagtttatctccgatactaacgaggtcgacatcccacctaatacaagggttggtaccaaacgctatatgcctcccgaagtgcttgacgaaagtctaaaccggaaccattttcaaagctacattatggctgacatgtattcatttggactaatactctgggaggtcgcccggcgctgtgtctctggaggtattgtggaagagtatcagcttccttaccatgatttggtcccatccgatcccagttatgaggacatgcgagagattgtgtgtataaaaaaactccgtcccagctttccaaaccggtggtcttccgatgagtgccttaggcagatggggaagctcatgactgagtgttgggctcacaaccccgcttcgaggctgacagccctgagggtgaaaaagaccctggccaagatgtcagagagccaggacatcaaactgtag

SEQ ID NO: 91564 - DNA, 1509 bp, Artificial Sequence
  derived and/or modified sequence
atgctgctgcggagcgccggcaagctgaacgtgggcaccaagaaggaggacggcgagagcacagctcccaccccgcgtccgaaagtcctgaggtgcaagtgtcaccaccactgcccagaggattcagtgaacaatatctgttcaactgacggatactgtttcacaatgattgaggaggacgacagtggactacctgttgttacttctggttgtctgggactggaaggcagtgactttcaatgtagggacacaccaatccctcatcagcgacggtccattgagtgttgcactgagcgaaatgagtgcaacaaagacctccatccgaccctacctccgctcaagaacagagattttgtcgacgggccaattcatcaccgggcgctgttgatcagtgttactgtctgctccctactgctggtgctcattatcttattctgctactttcgctataaacgccaggagactcgccccaggtatagtataggccttgaacaggacgaaacgtacatccctccaggtgagagtttgcgggacttaattgaacagtcgcagtctagcggtagcgggtctggcctgcccttgttagttcagagaactatcgccaaacagatccagatggtgaaacagattggcaaaggacgctacggagaggtgtggatgggcaagtggcgcggcgagaaagtggccgtgaaagtattctttacgaccgaggaggcatcctggttcagggaaactgagatttaccagactgttctgatgagacacgaaaacatcctaggtttcatagcagccgacatcaaaggtacagggtcatggacccaactgtacctgattaccgattatcatgagaatggctccctgtacgactacctgaaatctactacactggacgccaagtctatgttgaagctggcctattcgagcgtgagtgggctctgtcacctccatacagaaatcttcagcactcagggaaagcccgctatagcccatagggatctcaagtccaagaatattctcgtgaagaaaaacggaacctgctgtattgccgaccttggactagccgtcaagttcatttctgataccaatgaggttgatattccaccgaacacccgggtcgggacaaagagatacatgccacctgaagtgttggatgagtccctgaacagaaatcatttccagtcatacataatggcggatatgtacagtttcggcctcatactctgggaagtggcccgacgctgtgtcagcggaggtattgtggaagagtaccaactgccttaccatgacctcgtaccttccgacccgagctatgaggacatgagagagatcgtgtgtatcaaaaaactccgcccgtcctttcccaaccggtggtccagcgatgagtgcctgcggcagatgggaaagctgatgacagagtgctgggcacataatccagccagtcggttaactgccctcagggtgaaaaagaccctcgccaagatgtctgagtcccaggatatcaaattatag

SEQ ID NO: 91565 - DNA, 1509 bp, Artificial Sequence
  derived and/or modified sequence
atgctgctaagatccgcgggaaagctcaatgtagggaccaagaaagaagacggagagtcgacagccccaacaccacgtcctaaggtgctgcgttgtaaatgtcaccaccattgccccgaagacagcgtgaacaacatctgcagcaccgacggctactgcttcaccatgatcgaggaggatgactctggtttgcctgttgtgacttccggatgcctggggttagagggcagcgacttccagtgtcgggacacaccaattccccaccagcgccgaagcattgagtgttgcacggagagaaacgagtgcaataaagatctgcacccaactcttccccctctgaaaaatcgcgacttcgtggatggtcctatccaccatcgcgctctgctgatctctgtcaccgtgtgttcccttctgctggtcctcatcattctgttttgttactttcggtacaagagacaagaaacacggccacggtactccattggcctcgaacaggacgagacatacatccctccaggcgagtccttgagagacttgattgagcagagccagtcttcaggcagcggctccgggctgcctcttctggttcaacggacaattgcaaagcagattcaaatggtcaagcagatcggcaagggtcggtacggcgaggtgtggatgggtaagtggaggggagaaaaagtggctgtcaaagtgtttttcaccacggaagaagcatcatggttcagagagacagaaatatatcagaccgtactcatgcggcatgagaacatacttggattcatcgctgctgacatcaaaggaaccgggtcctggacacaactgtatctgatcaccgactaccacgaaaacggaagcctgtacgattatctgaaatccactacactcgatgccaagtctatgcttaaacttgcttatagtagcgtctccgggctctgccacttgcacactgagatctttagcactcagggaaaacccgctattgcccacagagatctgaaatcaaagaacattctggtgaagaagaacggaacttgctgcatagcggaccttggccttgccgtgaaatttatctcagacacaaacgaagtggacattccgccaaacaccagagtgggcaccaagcggtacatgccccctgaagtgctggatgaatcgctcaatcgcaatcattttcagtcttacattatggctgacatgtacagttttggcctgatcttatgggaagtagcccgtcggtgcgtcagcggtgggatcgtggaggaatatcagctcccctaccatgacctcgttccttcagaccctagctacgaggacatgcgggagatcgtgtgcatcaagaagcttcgaccctcatttcccaacaggtggtcatccgacgaatgccttaggcagatgggaaagttgatgaccgagtgttgggcacataacccggcaagccgccttaccgcccttagagtcaagaaaacacttgctaaaatgtccgagtcacaggacatcaagttatag

SEQ ID NO: 91566 - DNA, 1509 bp, Artificial Sequence
  derived and/or modified sequence
atgctccttcgctccgccggaaagctcaatgtgggaacgaagaaggaggacggcgagtccaccgcaccaacacctcggcctaaggtattgaggtgtaaatgccatcaccattgtccagaagacagtgtgaacaatatatgctctacagatgggtactgtttcacaatgatcgaggaagatgactctggattacccgtcgtcacatccggatgcctgggcctcgagggcagtgacttccagtgcagggataccccaatccctcatcaacggagatctattgagtgctgcacagagcgtaacgaatgcaacaaggatctgcacccgactctgccaccactcaagaatcgagatttcgtggacgggcctatccaccaccgcgctctgctcatttccgtgactgtgtgctctctcctgttggtccttatcatattgttctgttatttccgatataaacggcaggaaactagacctcggtactccatagggctcgagcaggatgagacctatattcctcccggtgaatccctccgcgatcttatcgagcagtctcaatccagcggctccgggtcaggtctgccactcctcgtccagaggacgatcgcaaaacagatacaaatggtgaaacagatcggaaaaggaaggtatggggaggtatggatgggaaagtggcgaggtgaaaaggtcgcagtaaaggtgttctttactaccgaagaggccagttggttccgagagaccgaaatttaccaaacggtcctaatgaggcacgagaatatcctgggattcatagccgctgatatcaagggcactggtagttggactcaattatatctgataactgattaccacgagaatggatcactatacgattacctgaaaagtaccactttagacgctaagtctatgcttaaactagcatattctagcgtgagcggcctctgtcacctgcacacggaaatcttcagtactcagggcaaaccagcaattgcccatcgagacctgaagagcaagaacatcttagtcaagaagaacggaacatgttgcattgctgacttggggctcgctgtcaagttcatctcagacacaaatgaggtcgatatcccgcctaacacgcgagtgggaactaagagatacatgcccccagaggtgctggacgagagtcttaatcggaaccacttccagtcttatatcatggctgacatgtactcctttggcttgatactgtgggaggttgcgaggcgatgtgtctctggcggaattgtggaggagtatcaactgccgtaccacgatttggtgccttcagaccctagctacgaggacatgcgggagatcgtgtgcatcaaaaaactccgcccttccttcccaaaccggtggtcttctgacgaatgcttgcgtcagatgggtaaacttatgaccgagtgctgggctcacaatcccgcatctagactgactgcactcagagtcaaaaaaacccttgcaaaaatgtccgaatcccaagacatcaagctctag

SEQ ID NO: 91567 - DNA, 345 bp, Artificial Sequence
  derived and/or modified sequence
atgctcctgagaagcgctggtaagctgaacgtcggaactaaaaaggaagatggcgaatctaccgcacctactccacgaccaaaagtgctgagatgcaagtgccatcaccattgcccggaggactcagtaaataatatttgttctacagacgggtattgcttcactatgatagaagaggatgacagcggactgcctgtagtgacctcaggctgtttaggactggaaggttctgacttccagtgccgcgtcagaacactaccttttctcataaaagaggaccagctgaacgccgcacagaaaggaacaaacgtaatcaagacctacacactccactgtctccactag

SEQ ID NO: 91568 - DNA, 378 bp, Artificial Sequence
  derived and/or modified sequence
atgctcctgcgttctgccggtaagctgaatgtcgggacgaaaaaggaggacggcgagagcacagctccgacaccccgacctaaagtgctgcggtgtaagtgccaccaccactgtcctgaagacagtgttaacaacatttgctcaaccgacgggtactgcttcacaatgattgaagaagacgatagcggtctgcctgtggtcacatcagggtgtctcggattggaaggttctgactttcagtgccgggacactccaatcccccatcagcgacgcagtattgagtgttgcactgagcgaaacgagtgcaataaggatctgcaccctaccttgccccctttgaagaaccgagacttcgtggatggaccaattcaccattag

SEQ ID NO: 91569 - DNA, 1509 bp, Artificial Sequence
  derived and/or modified sequence
atgctcttgcgctccgccggtaaactcaacgtgggaacaaaaaaggaggacggggagtctaccgccccaaccccccgtccaaaagtgctgaggtgtaaatgtcatcaccattgtccagaagatagcgtcaataacatttgcagtaccgacgggtattgctttactatgattgaagaggatgattccggcttgcccgtggttaccagtgggtgcctcgggctggaagggtctgattttcaatgcagagacacccccattccacatcaacggaggtctattgaatgctgcaccgagcggaatgagtgtaataaagatctccacccaaccctgccccctctgaaaaaccgggactttgtggatggacccattcatcaccgcgcattgctgataagcgtgactgtatgcagccttctgctggtcctgataattctcttctgttattttagatacaaaaggcaggaaactaggcctcgttactcaataggtcttgagcaggacgaaacctacatccctccaggggagagcctccgcgacttaattgaacagtcgcagtcttccggatcggggtccggcttgcccctgcttgttcagaggaccatcgccaagcagatccagatggtcaagcaaataggcaagggaagatacggggaggtgtggatgggcaagtggagaggcgagaaagtagccgtgaaagtctttttcacaacggaggaggcatcctggttccgggagactgagatctaccagacagtcctgatgaggcacgagaacatactgggatttatcgccgctgacatcaaaggcaccgggagctggacccaactgtacctgatcactgattaccacgagaatgggtctctatatgattacctcaagagcactaccctcgacgctaagtccatgctcaaactcgcatattcatcggtgagcgggctttgccatctccacaccgagatattttctacccaagggaaaccagcaatcgcacatcgggatctgaaatcaaaaaatatactggtgaagaaaaacggcacgtgctgtattgcagacctcggactggccgttaaattcatctcggatactaatgaagttgatattccgcctaatacccgggtgggaactaagcgctacatgccgcctgaagtcctcgacgaaagcctgaatagaaaccacttccagagttacatcatggccgatatgtattccttcggcctgatcctgtgggaggtagcccgaagatgtgtctccgggggtatcgtggaagagtaccagcttccttatcacgatctcgtgccatctgatccatcgtacgaggatatgagggagatagtctgcatcaagaaattacgcccttcattccctaaccggtggagtagtgatgagtgtttacggcagatggggaaacttatgaccgagtgctgggcacataatcccgcttctagacttaccgcactgagggtcaaaaagacactggctaagatgagtgagtcccaagatatcaagctgtag

SEQ ID NO: 91570 - DNA, 1509 bp, Artificial Sequence
  derived and/or modified sequence
atgctcctgcgcagcgccggtaaattgaacgtgggcaccaagaaggaagatggtgaaagcaccgccccaactccccgtcccaaagttctcagatgcaagtgccaccaccattgcccagaggacagcgttaacaatatctgctcaactgatgggtattgcttcactatgatcgaggaagatgatagcggcctgcccgttgtaacctcaggctgcttgggtctagaagggtccgacttccagtgccgcgacactccgatcccacatcagaggagaagtattgagtgctgtactgagaggaacgaatgtaataaagatctccacccaactttacctcctctgaaaaatcgcgatttcgtagatgggccaatccaccaccgggctcttctcataagcgtgactgtgtgctcacttctgctcgtgctgatcatcctcttctgctacttcagatataagcgccaggagacccggcctaggtacagtattgggttggagcaggatgagacttacatcccgccaggtgagagcctgagggacctgatagagcagtcacagtccagcgggtctggttccggtcttcccctactggttcagaggaccatagcgaaacagatccagatggtcaaacagattggcaaggggagatacggagaagtgtggatggggaaatggaggggtgaaaaggttgccgtaaaagtattttttactaccgaggaagctagctggtttagagagacagagatctatcagactgtcttgatgcgtcatgaaaacattttgggtttcatagccgctgacattaaaggcacgggatcctggactcaactctacctgataaccgactaccatgagaatgggtccctatatgattacctaaagtccactacattagatgccaaaagtatgctgaaattagcttattccagcgtgtcagggctttgtcacttgcataccgagatcttcagcactcagggaaaaccggcaatcgcacaccgagaccttaaatccaagaacattctggtcaaaaagaatggtacttgttgtattgccgatttaggactggccgtgaaattcattagcgatacaaacgaggttgacatcccacctaacacgagggtaggcaccaaaagatatatgcccccagaggtactggacgaaagtctgaaccgtaaccattttcaatcatacatcatggctgacatgtattctttcggactgatattgtgggaagtcgcaaggaggtgcgtttcgggaggtatagtagaggaataccagttaccatatcatgatcttgtgccatcagacccttcctacgaggacatgagggagatcgtctgtattaaaaagctgcgcccaagctttccaaaccgatggtcctctgacgagtgtcttcggcaaatgggtaagttgatgacagaatgctgggcccacaaccccgctagtagactaaccgccctgcgggtcaagaagaccctggccaaaatgtccgaatctcaggatataaagctttag

SEQ ID NO: 91571 - DNA, 1509 bp, Artificial Sequence
  derived and/or modified sequence
atgctcctccggagtgcaggaaagctgaacgttggaactaagaaagaggacggtgagagtacggctccaacaccacggccaaaagttttacgttgtaaatgccatcaccactgtcctgaggacagcgtgaataatatctgctcaacggatgggtactgtttcacaatgattgaggaggacgattctggtctgccggtcgttacgagcgggtgtctaggccttgaaggaagtgattttcaatgccgcgatacaccaattcctcaccagcggagaagtatagaatgctgcaccgaaaggaatgagtgcaataaagacctgcatcccaccctgccacccctgaagaatcgcgattttgtcgatggaccgatacatcatcgcgcattgttgatcagcgtgacagtttgcagcctgctgctcgtgcttatcatcctattttgttatttcaggtataaaagacaggaaactagaccccgttactccatcggactggaacaagatgagacctatatccctcctggggagagcctccgcgatctgatcgagcagtcccagtcttctggttctggatctggcttacctctgttagttcagcgcactattgctaaacagatccagatggtgaagcaaatagggaaaggtaggtacggagaagtgtggatgggaaaatggcgcggtgaaaaagtggccgtcaaggtgttctttaccacagaagaggcctcctggttccgggagacggagatctaccagaccgtcctgatgagacacgagaatattttagggtttatcgccgctgatattaagggcactggctcttggacacaattgtatctaatcactgactaccatgaaaatggatcgctctatgactacctaaaatcaactacactcgatgcaaagtctatgctgaagctggcttatagttccgtcagcggcctctgccatctacacacagaaatcttctcaacccagggcaagcccgctatagcacatcgcgatctgaagtctaagaatatactggtgaaaaagaacgggacctgttgtattgctgacttggggctggccgtgaaattcattagtgatacaaacgaagtggacatcccaccgaataccagggtagggacgaaaaggtatatgccgccagaggtcctggacgagtccttgaataggaatcacttccaatcctacatcatggctgatatgtactcttttgggctgattctctgggaagtcgccagaagatgtgtgagcggcggtatcgtcgaggagtatcagctcccttatcacgatctcgtgccatccgatccctcctacgaagatatgcgggagattgtctgtattaaaaagctccggccttcttttccaaatcgctggagctctgacgaatgcctgcgacaaatgggcaaactgatgaccgaatgctgggctcacaacccggcaagcagacttaccgccctgcgcgtgaaaaaaacccttgctaagatgtcagaatctcaggatatcaagctctag

SEQ ID NO: 91572 - DNA, 1922 bp, Artificial Sequence
  derived and/or modified sequence
gactggggtagtctaccccacagatgcctaactctcactatttcttctttcagcaaacttccttgataacatgcttttgcgaagtgcaggaaaattaaatgtgggcaccaagaaagaggatggtgagagtacagcccccaccccccgtccaaaggtcttgcgttgtaaatgccaccaccattgtccagaagactcagtcaacaatatttgcagcacagacggatattgtttcacgatgatagaagaggatgactctgggttgcctgtggtcacttctggttgcctaggactagaaggctcagattttcagtgtcgggacactcccattcctcatcaaagaagatcaattgaatgctgcacagaaaggaacgaatgtaataaagacctacaccctacactgcctccattgaaaaacagagattttgttgatggacctatacaccacagggctttacttatatctgtgactgtctgtagtttgctcttggtccttatcatattattttgttacttccggtataaaagacaagaaaccagacctcgatacagcattgggttagaacaggatgaaacttacattcctcctggagaatccctgagagacttaattgagcagtctcagagctcaggaagtggatcaggcctccctctgctggtccaaaggactatagctaagcagattcagatggtgaaacagattggaaaaggtcgctatggggaagtttggatgggaaagtggcgtggcgaaaaggtagctgtgaaagtgttcttcaccacagaggaagccagctggttcagagagacagaaatatatcagacagtgttgatgaggcatgaaaacattttgggtttcattgctgcagatatcaaagggacagggtcctggacccagttgtacctaatcacagactatcatgaaaatggttccctttatgattatctgaagtccaccaccctagacgctaaatcaatgctgaagttagcctactcttctgtcagtggcttatgtcatttacacacagaaatctttagtactcaaggcaaaccagcaattgcccatcgagatctgaaaagtaaaaacattctggtgaagaaaaatggaacttgctgtattgctgacctgggcctggctgttaaatttattagtgatacaaatgaagttgacataccacctaacactcgagttggcaccaaacgctatatgcctccagaagtgttggacgagagcttgaacagaaatcacttccagtcttacatcatggctgacatgtatagttttggcctcatcctttgggaggttgctaggagatgtgtatcaggaggtatagtggaagaataccagcttccttatcatgacctagtgcccagtgacccctcttatgaggacatgagggagattgtgtgcatcaagaagttacgcccctcattcccaaaccggtggagcagtgatgagtgtctaaggcagatgggaaaactcatgacagaatgctgggctcacaatcctgcatcaaggctgacagccctgcgggttaagaaaacacttgccaaaatgtcagagtcccaggacattaaactctgataggagaggaaaagtaagcatctctgcagaaagccaacaggtactcttctgtttgtgggcagagcaaaagacatcaaataagcatccacagtacaagccttgaacatcgtcctgcttcccagtgggttcagacctcacctctcagggagcgacctgggcaaagacagagaagctcccagaaggagagattgatccatgtctgtttgtaggacggagaaaccgcttgggtaacttgttcaagatatgatgcatgttgctttctaagaaagccctgtattttgtgattgcctttttttttttttaagatgctttcattttgccaaaataaaacagataatgtgga

SEQ ID NO: 91573 - DNA, 1509 bp, Artificial Sequence
  derived and/or modified sequence
atgctgctgagaagcgccggcaagctgaacgtgggcaccaagaaggaggacggcgagagcaccgcccccacccccagacccaaggtgctgagatgcaagtgccaccaccactgccccgaggacagcgtgaacaacatctgcagcaccgacggctactgcttcaccatgatcgaggaggacgacagcggcctgcccgtggtgaccagcggctgcctgggcctggagggcagcgacttccagtgcagagacacccccatcccccaccagagaagaagcatcgagtgctgcaccgagagaaacgagtgcaacaaggacctgcaccccaccctgccccccctgaagaacagagacttcgtggacggccccatccaccacagagccctgctgatcagcgtgaccgtgtgcagcctgctgctggtgctgatcatcctgttctgctacttcagatacaagagacaggagaccagacccagatacagcatcggcctggagcaggacgagacctacatcccccccggcgagagcctgagagacctgatcgagcagagccagagcagcggcagcggcagcggcctgcccctgctggtgcagagaaccatcgccaagcagatccagatggtgaagcagatcggcaagggcagatacggcgaggtgtggatgggcaagtggagaggcgagaaggtggccgtgaaggtgttcttcaccaccgaggaggccagctggttcagagagaccgagatctaccagaccgtgctgatgagacacgagaacatcctgggcttcatcgccgccgacatcaagggcaccggcagctggacccagctgtacctgatcaccgactaccacgagaacggcagcctgtacgactacctgaagagcaccaccctggacgccaagagcatgctgaagctggcctacagcagcgtgagcggcctgtgccacctgcacaccgagatcttcagcacccagggcaagcccgccatcgcccacagagacctgaagagcaagaacatcctggtgaagaagaacggcacctgctgcatcgccgacctgggcctggccgtgaagttcatcagcgacaccaacgaggtggacatcccccccaacaccagagtgggcaccaagagatacatgccccccgaggtgctggacgagagcctgaacagaaaccacttccagagctacatcatggccgacatgtacagcttcggcctgatcctgtgggaggtggccagaagatgcgtgagcggcggcatcgtggaggagtaccagctgccctaccacgacctggtgcccagcgaccccagctacgaggacatgagagagatcgtgtgcatcaagaagctgagacccagcttccccaacagatggagcagcgacgagtgcctgagacagatgggcaagctgatgaccgagtgctgggcccacaaccccgccagcagactgaccgccctgagagtgaagaagaccctggccaagatgagcgagagccaggacatcaagctgtag

SEQ ID NO: 91574 - DNA, 345 bp, Artificial Sequence
  derived and/or modified sequence
atgctgctgagaagcgccggcaagctgaacgtgggcaccaagaaggaggacggcgagagcaccgcccccacccccagacccaaggtgctgagatgcaagtgccaccaccactgccccgaggacagcgtgaacaacatctgcagcaccgacggctactgcttcaccatgatcgaggaggacgacagcggcctgcccgtggtgaccagcggctgcctgggcctggagggcagcgacttccagtgcagagtgagaaccctgcccttcctgatcaaggaggaccagctgaacgccgcccagaagggcaccaacgtgatcaagacctacaccctgcactgcctgcactag

SEQ ID NO: 91575 - DNA, 378 bp, Artificial Sequence
  derived and/or modified sequence
atgctgctgagaagcgccggcaagctgaacgtgggcaccaagaaggaggacggcgagagcaccgcccccacccccagacccaaggtgctgagatgcaagtgccaccaccactgccccgaggacagcgtgaacaacatctgcagcaccgacggctactgcttcaccatgatcgaggaggacgacagcggcctgcccgtggtgaccagcggctgcctgggcctggagggcagcgacttccagtgcagagacacccccatcccccaccagagaagaagcatcgagtgctgcaccgagagaaacgagtgcaacaaggacctgcaccccaccctgccccccctgaagaacagagacttcgtggacggccccatccaccactag

SEQ ID NO: 91576 - protein, 532 aa, Artificial Sequence
  derived and/or modified sequence
MGWLEELNWQLHIFLLILLSMHTRANFLDNMLLRSAGKLNVGTKKEDGESTAPTPRPKVLRCKCHHHCPEDSVNNICSTDGYCFTMIEEDDSGLPVVTSGCLGLEGSDFQCRDTPIPHQRRSIECCTERNECNKDLHPTLPPLKNRDFVDGPIHHRALLISVTVCSLLLVLIILFCYFRYKRQETRPRYSIGLEQDETYIPPGESLRDLIEQSQSSGSGSGLPLLVQRTIAKQIQMVKQIGKGRYGEVWMGKWRGEKVAVKVFFTTEEASWFRETEIYQTVLMRHENILGFIAADIKGTGSWTQLYLITDYHENGSLYDYLKSTTLDAKSMLKLAYSSVSGLCHLHTEIFSTQGKPAIAHRDLKSKNILVKKNGTCCIADLGLAVKFISDTNEVDIPPNTRVGTKRYMPPEVLDESLNRNHFQSYIMADMYSFGLILWEVARRCVSGGIVEEYQLPYHDLVPSDPSYEDMREIVCIKKLRPSFPNRWSSDECLRQMGKLMTECWAHNPASRLTALRVKKTLAKMSESQDIKL

SEQ ID NO: 91577 - protein, 114 aa, Artificial Sequence
  derived and/or modified sequence
MLLRSAGKLNVGTKKEDGESTAPTPRPKVLRCKCHHHCPEDSVNNICSTDGYCFTMIEEDDSGLPVVTSGCLGLEGSDFQCRVRTLPFLIKEDQLNAAQKGTNVIKTYTLHCLH

SEQ ID NO: 91578 - protein, 125 aa, Artificial Sequence
  derived and/or modified sequence
MLLRSAGKLNVGTKKEDGESTAPTPRPKVLRCKCHHHCPEDSVNNICSTDGYCFTMIEEDDSGLPVVTSGCLGLEGSDFQCRDTPIPHQRRSIECCTERNECNKDLHPTLPPLKNRDFVDGPIHH

SEQ ID NO: 91579 - DNA, 1599 bp, Artificial Sequence
  derived and/or modified sequence
atgggctggctggaggagcttaactggcagttgcacattttcctgctcatacttctgtccatgcatacaagggcaaatttcctggacaatatgctgttgcgaagcgccggtaaactgaatgtgggcacaaagaaggaggatggggaatccacagcgccgacacctcgccctaaagtgctgcggtgcaagtgccatcaccattgcccggaggacagcgttaacaacatatgcagcaccgatggctattgctttacaatgatagaggaggacgactccgggttgccagttgtcacgtccggatgtctggggttggaagggtccgactttcaatgtcgtgataccccaatcccccaccagagaaggtcaatcgaatgctgcaccgagcgtaatgagtgcaataaagatctgcaccctactttaccgcccctcaaaaacagagactttgtggacggcccgattcaccatcgggccctgctcatctccgttacggtgtgctctctgctgcttgtgctcatcatcctgttctgctatttccgttataagcgacaggagacccgccctcggtattcgatagggctagagcaggatgagacctatattccacccggggagtctctccgggacctgatcgaacagagccagtcctccgggagcggctctggactcccgctgctggtgcagagaactattgccaagcagatccagatggtcaaacagatcgggaaggggcggtatggtgaggtgtggatgggcaagtggcgaggagaaaaagtggcggtgaaggtattttttactaccgaggaggcaagttggtttagggaaactgagatctaccagactgtactgatgcggcatgaaaatatcctgggtttcatagccgctgacattaagggcaccgggagctggacacagctttatctcatcactgactaccacgaaaatggcagtctgtatgattatttaaagtccacaactctggatgctaagagcatgctgaaactagcctatagttcagtgagcggtctgtgccacctccacacggagatttttagtacacagggcaagcctgcaatcgctcatcgggatctgaagtctaaaaatatactggtcaaaaaaaacgggacgtgctgcatcgccgatctcggcctggcagtaaaatttattagtgacaccaatgaagtcgacattcccccaaacactagagttggaactaaacgttacatgccacccgaggtgcttgacgaaagtctgaatcgaaatcattttcaaagctacatcatggccgacatgtactctttcggccttatcctgtgggaggtcgcaagaaggtgcgtgtctgggggaattgtggaggagtaccagctgccgtatcacgatctcgtccctagcgatccttcctatgaagatatgcgtgaaatcgtctgtattaagaagctccgtccctctttccctaatcggtggtcaagcgatgagtgcctgcggcagatgggtaagctcatgacagaatgttgggcacacaatcctgcctcccgcctgacagcacttcgggtgaagaagactttagccaaaatgagcgagtcccaagacatcaagctgtag

SEQ ID NO: 91580 - DNA, 1599 bp, Artificial Sequence
  derived and/or modified sequence
atgggctggctggaggagctgaactggcagctgcacatcttcctgctgatcctgctgtccatgcacacccgggccaacttcctggacaacatgctgctgcggtctgctgggaagctgaatgtgggcaccaagaaggaggatggagagagcacagcccccaccccccggcccaaggtgctgcgctgcaagtgccaccaccactgcccagaggacagcgtgaacaacatctgcagcacagatggctactgcttcaccatgattgaagaagatgacagcggcctgcctgtggtgaccagcggctgcctgggcctggagggcagtgacttccagtgccgggacacccccatcccccaccagaggaggagcattgagtgctgcacagaaagaaatgaatgcaacaaggacctgcaccccaccctgccccccctgaagaacagagactttgtggatggccccatccaccaccgggccctgctgatctctgtgacagtgtgcagcctgctgctggtgctgatcatcctcttctgctacttccgctacaagaggcaggagacccggccccgctacagcatcggcctggagcaggatgagacctacatccccccaggagagagcctgcgggacctgattgagcagagccagagcagcggcagcggcagcggcctgcccctgctggtgcagaggaccatcgccaagcagatccagatggtgaagcagatcggcaagggccgctatggagaggtgtggatgggcaagtggagaggagagaaggtggccgtgaaggtgttcttcaccacagaggaggcctcctggttccgggagacagagatctaccagacagtgctgatgagacatgagaacatcctgggcttcatcgctgctgacatcaagggcaccggctcctggacccagctgtacctgatcacagactaccatgaaaatggcagcctgtatgactacctgaagagcaccaccctggatgccaagtccatgctgaagctggcctacagctctgtgtctggcctgtgccacctgcacacagagatcttcagcacccagggcaagccagccatcgcccaccgggacctgaagagcaagaacatcctggtgaagaagaatggcacctgctgcatcgctgacctgggcctggccgtgaagttcatcagtgacaccaatgaggtggacatcccccccaacaccagggtgggcaccaagcgctacatgcctcctgaggtgctggatgagagcctgaacagaaaccacttccagagctacatcatggctgacatgtacagctttggcctcatcctgtgggaggtggcccggcgctgtgtgtctgggggcatcgtggaggagtaccagctgccctaccatgacctggtgcccagcgaccccagctatgaggacatgagagaaattgtgtgcatcaagaagctgcggcccagcttccccaaccgctggagcagtgatgaatgtctgcggcagatgggcaagctgatgacagagtgctgggcccacaacccagccagccggctgacagccctgcgggtgaagaagaccctggccaagatgtctgagagccaggacatcaagctgtag

SEQ ID NO: 91581 - DNA, 1599 bp, Artificial Sequence
  derived and/or modified sequence
atgggctggctggaggagctgaactggcagctgcacatcttcctgttaatcctgttgagcatgcatacgcgggccaactttctggacaatatgctattgcggtctgcaggaaaacttaacgtgggaactaagaaagaggatggtgagtccacagcccctacaccgcggcccaaggttctcaggtgcaaatgtcatcaccattgtcctgaggattctgttaacaatatctgtagcacggacggctattgctttacaatgatcgaagaggatgatagtggactgcctgtggtgacatccggctgcctgggcctcgaaggatccgacttccaatgccgcgataccccgatcccccaccaacggcggagcattgaatgttgtaccgagaggaatgagtgtaacaaggatttgcatcctactttaccacccctaaaaaatagggatttcgtggatggccccattcaccatagggccctgttgatcagtgtcaccgtctgcagtctcctgctcgtactcattatcctgttctgctactttcgctacaaaagacaggagaccagaccccgctactctataggacttgagcaggatgagacatatatcccaccaggggagtctcttcgcgacttgattgagcagagccaaagcagtgggtccggaagcggtttacctctgctggtgcagcgaactatcgccaaacaaattcaaatggttaaacagatcgggaaggggcgctatggcgaggtttggatgggtaaatggcggggggagaaagtggctgtaaaggtgttttttacaaccgaagaggcatcttggttcagagagaccgagatttaccagaccgtattgatgaggcatgagaacattcttggtttcatagcagctgatatcaaaggaaccggaagttggactcagctttacctcataacggactaccacgagaacggatcattatacgattacctgaagtctaccacactcgatgctaagtccatgttaaagctggcctactcatctgtgagtggattatgccacctgcacactgaaatctttagtactcagggcaaacccgctatcgcgcacagagatctgaaatctaagaacatcctggttaagaaaaacggaacttgttgcattgcagatctgggcctggccgtaaaatttatttctgacacaaatgaggtggatataccccccaacaccagggttggtaccaagaggtacatgccaccggaggttctggacgagtctctgaatagaaaccactttcagtcttatatcatggctgacatgtatagctttggcctcattctatgggaggtggctcgtcgctgtgtgtcaggcggcattgtggaagaataccaactgccctatcacgacctggttccttccgatccctcttatgaggacatgcgggagatagtttgtatcaagaaactgagaccctcattccccaatcgatggtcaagtgacgagtgtctcaggcagatgggcaaactcatgaccgagtgctgggcccacaaccctgcttcacgactgacagctcttagggttaagaagactctggctaaaatgtctgagagtcaggatatcaaactatag

SEQ ID NO: 91582 - DNA, 1599 bp, Artificial Sequence
  derived and/or modified sequence
atgggctggctcgaggagctgaactggcaactgcacattttcctgcttattctactctctatgcataccagggcaaatttcctggataacatgttacttaggtccgcgggaaagctcaacgtggggacaaagaaagaggatggcgagtccaccgcccctactcctcgcccaaaagtactgagatgtaagtgtcaccaccattgccccgaggattctgttaataatatttgttctacagatgggtactgttttacaatgattgaagaggacgacagcggattgcccgtggtcacctccggttgtctgggcttagaggggagcgacttccagtgtcgagacactcctatcccgcaccagcgccgtagcattgagtgttgtaccgagaggaacgagtgcaacaaggacttgcatcctactctccctccactaaagaacagggattttgtagacggacctattcaccatcgagctctgctcatatccgtaacggtatgtagtttacttttagtgctcattatcctgttctgctatttccgttacaagagacaggaaacccgccctagatactccattggtctcgaacaggacgagacctatataccgccaggggaatccctgcgggacttgattgaacagtcccagtcctctggatcaggaagcggtctgcctctcctggtgcagcgtactatcgcgaagcagattcagatggtgaagcagatcggcaaagggcgatacggcgaagtgtggatgggaaagtggcgcggagagaaagttgccgtaaaagtcttcttcactactgaggaggccagctggttccgggagactgaaatttaccagactgtgctgatgcgccatgagaacatcctcggcttcatcgctgcagatatcaaaggtacaggctcatggacgcagctctacctgatcaccgactaccatgagaatggcagcctgtacgactacctcaagagcacaaccctggacgcaaagtcaatgctgaaactggcctattcctcagtgtcaggactctgccacctccatacggagatttttagcacccagggaaagcccgcaattgcccacagagacctgaaatccaagaatattctcgtgaagaaaaatgggacttgctgcattgctgatctggggctagcagtgaagtttatatctgatacgaacgaggttgacatcccgcctaatactcgagtaggcaccaaacgctatatgccccctgaggtgctggatgaaagcctgaaccgcaaccactttcagagctacatcatggctgatatgtacagctttgggttgatactgtgggaggtggccaggagatgcgtctcaggtggcattgtggaggaataccagctgccttatcacgatctcgttccttcagatccctcatatgaagatatgagggaaattgtctgtatcaaaaagcttcgacctagctttcccaacaggtggagctccgacgagtgtcttaggcaaatgggaaagctgatgaccgagtgctgggcgcacaacccagcatcacgcctcacagctctgcgggtgaaaaagaccctggcaaagatgagtgaatctcaggatatcaagctgtag

SEQ ID NO: 91583 - DNA, 1807 bp, Artificial Sequence
  derived and/or modified sequence
atatcacaggtgcaggattagtgctgcctacggtgctgggctttttagtggaaacccctagcaattctgtgcctcctcctcatgtctctcatcctagggagcctggcaaccatatatcaagcgtacagaaatcaaaacaaacttccttgataacatgcttttgcgaagtgcaggaaaattaaatgtgggcaccaagaaagaggatggtgagagtacagcccccaccccccgtccaaaggtcttgcgttgtaaatgccaccaccattgtccagaagactcagtcaacaatatttgcagcacagacggatattgtttcacgatgatagaagaggatgactctgggttgcctgtggtcacttctggttgcctaggactagaaggctcagattttcagtgtcgggacactcccattcctcatcaaagaagatcaattgaatgctgcacagaaaggaacgaatgtaataaagacctacaccctacactgcctccattgaaaaacagagattttgttgatggacctatacaccacagggctttacttatatctgtgactgtctgtagtttgctcttggtccttatcatattattttgttacttccggtataaaagacaagaaaccagacctcgatacagcattgggttagaacaggatgaaacttacattcctcctggagaatccctgagagacttaattgagcagtctcagagctcaggaagtggatcaggcctccctctgctggtccaaaggactatagctaagcagattcagatggtgaaacagattggaaaaggtcgctatggggaagtttggatgggaaagtggcgtggcgaaaaggtagctgtgaaagtgttcttcaccacagaggaagccagctggttcagagagacagaaatatatcagacagtgttgatgaggcatgaaaacattttgggtttcattgctgcagatatcaaagggacagggtcctggacccagttgtacctaatcacagactatcatgaaaatggttccctttatgattatctgaagtccaccaccctagacgctaaatcaatgctgaagttagcctactcttctgtcagtggcttatgtcatttacacacagaaatctttagtactcaaggcaaaccagcaattgcccatcgagatctgaaaagtaaaaacattctggtgaagaaaaatggaacttgctgtattgctgacctgggcctggctgttaaatttattagtgatacaaatgaagttgacataccacctaacactcgagttggcaccaaacgctatatgcctccagaagtgttggacgagagcttgaacagaaatcacttccagtcttacatcatggctgacatgtatagttttggcctcatcctttgggaggttgctaggagatgtgtatcaggaggtatagtggaagaataccagcttccttatcatgacctagtgcccagtgacccctcttatgaggacatgagggagattgtgtgcatcaagaagttacgcccctcattcccaaaccggtggagcagtgatgagtgtctaaggcagatgggaaaactcatgacagaatgctgggctcacaatcctgcatcaaggctgacagccctgcgggttaagaaaacacttgccaaaatgtcagagtcccaggacattaaactctgataggagaggaaaagtaagcatctctgcagaaagccaacaggtactcttctgtttgtgggcagagcaaaagacatcaaataagcatccacagtacaagccttgaacatcgtcctgcttcccagtgggttcagacctcacctctca

SEQ ID NO: 91584 - DNA, 1764 bp, Artificial Sequence
  derived and/or modified sequence
attgactgctctgctgctgcaatgggttggctggaagaactaaactggcagcttcacattttcttgctcattcttctctctatgcacacaagggcaaacttccttgataacatgcttttgcgaagtgcaggaaaattaaatgtgggcaccaagaaagaggatggtgagagtacagcccccaccccccgtccaaaggtcttgcgttgtaaatgccaccaccattgtccagaagactcagtcaacaatatttgcagcacagacggatattgtttcacgatgatagaagaggatgactctgggttgcctgtggtcacttctggttgcctaggactagaaggctcagattttcagtgtcgggacactcccattcctcatcaaagaagatcaattgaatgctgcacagaaaggaacgaatgtaataaagacctacaccctacactgcctccattgaaaaacagagattttgttgatggacctatacaccacagggctttacttatatctgtgactgtctgtagtttgctcttggtccttatcatattattttgttacttccggtataaaagacaagaaaccagacctcgatacagcattgggttagaacaggatgaaacttacattcctcctggagaatccctgagagacttaattgagcagtctcagagctcaggaagtggatcaggcctccctctgctggtccaaaggactatagctaagcagattcagatggtgaaacagattggaaaaggtcgctatggggaagtttggatgggaaagtggcgtggcgaaaaggtagctgtgaaagtgttcttcaccacagaggaagccagctggttcagagagacagaaatatatcagacagtgttgatgaggcatgaaaacattttgggtttcattgctgcagatatcaaagggacagggtcctggacccagttgtacctaatcacagactatcatgaaaatggttccctttatgattatctgaagtccaccaccctagacgctaaatcaatgctgaagttagcctactcttctgtcagtggcttatgtcatttacacacagaaatctttagtactcaaggcaaaccagcaattgcccatcgagatctgaaaagtaaaaacattctggtgaagaaaaatggaacttgctgtattgctgacctgggcctggctgttaaatttattagtgatacaaatgaagttgacataccacctaacactcgagttggcaccaaacgctatatgcctccagaagtgttggacgagagcttgaacagaaatcacttccagtcttacatcatggctgacatgtatagttttggcctcatcctttgggaggttgctaggagatgtgtatcaggaggtatagtggaagaataccagcttccttatcatgacctagtgcccagtgacccctcttatgaggacatgagggagattgtgtgcatcaagaagttacgcccctcattcccaaaccggtggagcagtgatgagtgtctaaggcagatgggaaaactcatgacagaatgctgggctcacaatcctgcatcaaggctgacagccctgcgggttaagaaaacacttgccaaaatgtcagagtcccaggacattaaactctgataggagaggaaaagtaagcatctctgcagaaagccaacaggtactcttctgtttgtgggcagagcaaaagacatcaaataagcatccacagtacaagccttgaacatcgtcctgcttcccagtgggttcagacctcacctctca

SEQ ID NO: 91585 - DNA, 567 bp, Artificial Sequence
  derived and/or modified sequence
agctgagctgtattaggcaaccacagtctgggctgcatttcttaactgctgaataacatatcacaggtgcaggattagtgctgcctacggtgctgggctttttagtggaaacccctagcaattctgtgcctcctcctcatgtctctcatcctagggagcctggcaaccatatatcaagcgtacagaaatcaaaacaaacttccttgataacatgcttttgcgaagtgcaggaaaattaaatgtgggcaccaagaaagaggatggtgagagtacagcccccaccccccgtccaaaggtcttgcgttgtaaatgccaccaccattgtccagaagactcagtcaacaatatttgcagcacagacggatattgtttcacgatgatagaagaggatgactctgggttgcctgtggtcacttctggttgcctaggactagaaggctcagattttcagtgtcgggtaaggacactcccattcctcatcaaagaagatcaattgaatgctgcacagaaaggaacgaatgtaataaagacctacaccctacactgcctccattgaaaaacagaggt

SEQ ID NO: 91586 - DNA, 731 bp, Artificial Sequence
  derived and/or modified sequence
gtctgagcagctgagaactttgccggagtattaccacggtgttcagtaacacagacctgtgccatgagcaagtaaagcactgagcaagtgtcagggtcaatatttatagaccactacgtagctgccttgcatagagagaaaacgggagagtaacatgcacacagagggcaaggaaagaaagactgcagtggagggaatgttaatttccaattttttctgaaaatgtattctttctaactgtcaggttcagacttctgctgattcataaccatttggctctgagctatgacaagagaggaaacaaaaagttaaacaagcaagcctgccataagtgagaagcaaacttccttgataacatgcttttgcgaagtgcaggaaaattaaatgtgggcaccaagaaagaggatggtgagagtacagcccccaccccccgtccaaaggtcttgcgttgtaaatgccaccaccattgtccagaagactcagtcaacaatatttgcagcacagacggatattgtttcacgatgatagaagaggatgactctgggttgcctgtggtcacttctggttgcctaggactagaaggctcagattttcagtgtcgggacactcccattcctcatcaaagaagatcaattgaatgctgcacagaaaggaacgaatgtaataaagacctacaccctacactgcctccattgaaaaacagagattttgttgatggacctatacaccac

SEQ ID NO: 91587 - DNA, 1679 bp, Artificial Sequence
  derived and/or modified sequence
gctaatgaggagggctgcctgctgggtaagaatgttgttggtggcagagccgttttgtgtactgctgttgagaatgccgggtacattcacaagacgtttcctgcgtgtggtaggaacagctctcaagcaccaatttcatattgtgtcctatcacaaacttccttgataacatgcttttgcgaagtgcaggaaaattaaatgtgggcaccaagaaagaggatggtgagagtacagcccccaccccccgtccaaaggtcttgcgttgtaaatgccaccaccattgtccagaagactcagtcaacaatatttgcagcacagacggatattgtttcacgatgatagaagaggatgactctgggttgcctgtggtcacttctggttgcctaggactagaaggctcagattttcagtgtcgggacactcccattcctcatcaaagaagatcaattgaatgctgcacagaaaggaacgaatgtaataaagacctacaccctacactgcctccattgaaaaacagagattttgttgatggacctatacaccacagggctttacttatatctgtgactgtctgtagtttgctcttggtccttatcatattattttgttacttccggtataaaagacaagaaaccagacctcgatacagcattgggttagaacaggatgaaacttacattcctcctggagaatccctgagagacttaattgagcagtctcagagctcaggaagtggatcaggcctccctctgctggtccaaaggactatagctaagcagattcagatggtgaaacagattggaaaaggtcgctatggggaagtttggatgggaaagtggcgtggcgaaaaggtagctgtgaaagtgttcttcaccacagaggaagccagctggttcagagagacagaaatatatcagacagtgttgatgaggcatgaaaacattttgggtttcattgctgcagatatcaaagggacagggtcctggacccagttgtacctaatcacagactatcatgaaaatggttccctttatgattatctgaagtccaccaccctagacgctaaatcaatgctgaagttagcctactcttctgtcagtggcttatgtcatttacacacagaaatctttagtactcaaggcaaaccagcaattgcccatcgagatctgaaaagtaaaaacattctggtgaagaaaaatggaacttgctgtattgctgacctgggcctggctgttaaatttattagtgatacaaatgaagttgacataccacctaacactcgagttggcaccaaacgctatatgcctccagaagtgttggacgagagcttgaacagaaatcacttccagtcttacatcatggctgacatgtatagttttggcctcatcctttgggaggttgctaggagatgtgtatcaggaggtatagtggaagaataccagcttccttatcatgacctagtgcccagtgacccctcttatgaggacatgagggagattgtgtgcatcaagaagttacgcccctcattcccaaaccggtggagcagtgatgagtgtctaaggcagatgggaaaactcatgacagaatgctgggctcacaatcctgcatcaaggctgacagccctgcgggttaagaaaacacttgccaaaatgtcagagtcccaggacattaaactctga

SEQ ID NO: 91588 - DNA, 5567 bp, Artificial Sequence
  derived and/or modified sequence
gcagccgggcgcggggcgcggagtcggcggggcctcgcgggacgccgggcagtgcggagaccgcggcgctgaggacgcgggagccgggagcgcagccgcggggtggagttcagcctactctttcttagatgtgaaaggaaaggaagatcatttcatgccttgttgataaaggttcagacttctgctgattcataaccatttggctctgagctatgacaagagaggaaacaaaaagttaaacaagcaagcctgccataagtgagaagcaaacttccttgataacatgcttttgcgaagtgcaggaaaattaaatgtgggcaccaagaaagaggatggtgagagtacagcccccaccccccgtccaaaggtcttgcgttgtaaatgccaccaccattgtccagaagactcagtcaacaatatttgcagcacagacggatattgtttcacgatgatagaagaggatgactctgggttgcctgtggtcacttctggttgcctaggactagaaggctcagattttcagtgtcgggacactcccattcctcatcaaagaagatcaattgaatgctgcacagaaaggaacgaatgtaataaagacctacaccctacactgcctccattgaaaaacagagattttgttgatggacctatacaccacagggctttacttatatctgtgactgtctgtagtttgctcttggtccttatcatattattttgttacttccggtataaaagacaagaaaccagacctcgatacagcattgggttagaacaggatgaaacttacattcctcctggagaatccctgagagacttaattgagcagtctcagagctcaggaagtggatcaggcctccctctgctggtccaaaggactatagctaagcagattcagatggtgaaacagattggaaaaggtcgctatggggaagtttggatgggaaagtggcgtggcgaaaaggtagctgtgaaagtgttcttcaccacagaggaagccagctggttcagagagacagaaatatatcagacagtgttgatgaggcatgaaaacattttgggtttcattgctgcagatatcaaagggacagggtcctggacccagttgtacctaatcacagactatcatgaaaatggttccctttatgattatctgaagtccaccaccctagacgctaaatcaatgctgaagttagcctactcttctgtcagtggcttatgtcatttacacacagaaatctttagtactcaaggcaaaccagcaattgcccatcgagatctgaaaagtaaaaacattctggtgaagaaaaatggaacttgctgtattgctgacctgggcctggctgttaaatttattagtgatacaaatgaagttgacataccacctaacactcgagttggcaccaaacgctatatgcctccagaagtgttggacgagagcttgaacagaaatcacttccagtcttacatcatggctgacatgtatagttttggcctcatcctttgggaggttgctaggagatgtgtatcaggaggtatagtggaagaataccagcttccttatcatgacctagtgcccagtgacccctcttatgaggacatgagggagattgtgtgcatcaagaagttacgcccctcattcccaaaccggtggagcagtgatgagtgtctaaggcagatgggaaaactcatgacagaatgctgggctcacaatcctgcatcaaggctgacagccctgcgggttaagaaaacacttgccaaaatgtcagagtcccaggacattaaactctgataggagaggaaaagtaagcatctctgcagaaagccaacaggtactcttctgtttgtgggcagagcaaaagacatcaaataagcatccacagtacaagccttgaacatcgtcctgcttcccagtgggttcagacctcacctctcagggagcgacctgggcaaagacagagaagctcccagaaggagagattgatccatgtctgtttgtaggacggagaaaccgcttgggtaacttgttcaagatatgatgcatgttgctttctaagaaagccctgtattttgtgattgcctttttttttttttaagatgctttcattttgccaaaataaaacagataatgtggatggtttaagggttatagtattatagtttaaataataacaacaaaattcttcccaggaactctgctggaaggtaaattaaaatacttgtttttccattggtaaaatattgttgcactctgtgaaccaaaagacagtctaagttggaggacatagaacggaactcatcttaaacatactccccaccccgtcttggcctcctcagaccactttggccatccctgcatttggggccgctatggtaatgtgaatgcactgggtacaaacaccgcctgtctaggaccacatttggaattcctgcaggtggccttttgcagcttcaggcaatatggaacaaatgaaggtttatgtgactctaatagaagtaattgttgataggtgttcttcagatccacttctgtttctgattgagttaggcatctctttcatggtaaaacccttttcattaaacacaaagaaagcttttttttttttttttttttttttttttttttaatgtgcagaggattgacctgtgcatgcttttgatctctcattcaaaggatcaatattaaataaaattgtcatgagctgtgttgaagacagggtgctttcaaatagaggtaatttgctcttgtgttgtaagaggaacatgtcaacaaagataggaaatgagggtgatcgtgcagatggcttgtatcttatatatgcaaaggagccaatctcagaagcacaaagaaaaaagtgtgcataccttattttgtacagataaagatgatgtctttttgttattgtctgtctgttttgtatgtgtctgagataagggatagagaggaaacatccgtcaggctaatttaactacattttattttaaaaatagagaaacataacctctagatgggacagcagaggacagttagtagaggccacaaactgttatgggctgctgtgttttgttctaaaatcaatatggttggagcatgtatatcttaggtgatcatttcacatcttaggaatgcctactcattttattttattctagtgatgctcaattcactatttaatttattatattttctcttctgtggcacttatacaaaatatctcttcacctacttagttctacagggttttaactttggagcaacatgaataaaatcatcgagaaggccaatattgtttagcaacatgaatacaatacagtttaaagttgtacacatcctgctcaactttattcatatacatttcctttctgtggttttcttttgcttcttagaaattctgttagtggttagtaaagaatttgaaagtactttctccttgctgtttttttttttttttaagacattcctcccagaatactccagggggcagtgttttataacacattttccccactgggtgattgaaggatggaggatttttgaaaatttgacagctacatgaaacatgagaaaacattttcctcacttctgaagtcggtttgcagctggtaacttgttcatccagaaaacattctaaagcaatgagactttgtgagctgtgcttacagtttgggagaatcatgaagattctttctatattttgcatttacttcccagtgcttcatagctgcattttgtttgtaactaagacagaagaatttcgtaatccttgaaattgaaaaaaaaaaaattgtgtttttaaagagtgaaaacagttagaaaacaagtagaactgtaatcagaacgctgcttcaattgatattaaaaataacctcaataataatgtaaaggttcctttctcttgtgtcagttatattcttagggatagcctagaaggaatatatggttagaactaagtgtgactaatcatctgagccttgaagagaaacttcagtgcctctaaacagatcatctacaaaacaacaggtaaacatttatgccagttaagtgggtcatgtttttgtttcttgggtttttcctaaatttaagtgaggttgggcttaccttgtagataaaattatgttttctttttggtaaatacttgaacgtggataacgtcaaatcagaatattttgtgaggaggtgatgatttgaaattaagctagatttctagggaggtgttggttccaatgaaggatgggaagaaattaaaatagtcttcaaacttcttccttattatatttggttgctttggaaaagattggtcctatcctcaatctaatttattcactattaatattttaaaaacattcctgagatacttaaaaagacccacttagcgattatagttgctcaatgaaacaagaatttatttatgcatagatttttctctgtatcttaccaaaatccactttacttagataacactaaattgttcttaaagactactcatttcccaataatcctttatgatttcaaaatttctagtggctcagaagtgaattttattttatttgtctttcacttgaataaatgagaacccagaaattaataatgttgtttattgcttactgtcaggactatttcaaagactaagaagagtttcttctaacccctccctctcaaaggaatcctaaattattagttgttagataagttttgtatgctaagatattcaggtttatagtttatgtatgtgtgtatatatataaatatatatgtatatataaatattatgttcagtttggagtctggcacaactccattatgtggattagagagtaagatattatggatgataaagtactaaatgaaacataatatttatttataaaagtgtgtagattgttaaatcacaaaaagagtgctatgaccattatgtatgaggaaacaggcctttgacctcctggaaagcactgctcaaaagtcattagtgcccatttttgaattccccaaacagaaagcttcttagaaaacatgctgagattttatttacagggaattctttgacacatttcaattggtgtgtagtcaagtatagcaagtacttaataatgactgaatttcatgttcctacagtcatacatattcattagaagttttatgttgttggtctgatctgattcttctttgtttgtgggtggaacggcactgagagaagtatagttttttaaacttgaacatgttcagtagttacattgccttagaaaacccagacacatagcagtggaaatgaaagaaatggcatcagaagtgacttaatttagcaattgtgattcctcttgtaaaacaaaacaaaaaaacaatgccatattttttggagaaaagttggcaatataggggtttcgttgtctgtttcacaagaagactcatttgttcttttgggggaaccagtgccttacagattttgtatatactgtaattattcaggactagggaacaaacaattgtattgtatttgttacagattgtatatggctttgttttaacattcccctaaataaaatggcttcattctccccttggaaaaaaa

SEQ ID NO: 91589 - DNA, 1599 bp, Artificial Sequence
  derived and/or modified sequence
atgggctggctggaggagctgaactggcagctgcacatcttcctgctgatcctgctgagcatgcacaccagagccaacttcctggacaacatgctgctgagaagcgccggcaagctgaacgtgggcaccaagaaggaggacggcgagagcaccgcccccacccccagacccaaggtgctgagatgcaagtgccaccaccactgccccgaggacagcgtgaacaacatctgcagcaccgacggctactgcttcaccatgatcgaggaggacgacagcggcctgcccgtggtgaccagcggctgcctgggcctggagggcagcgacttccagtgcagagacacccccatcccccaccagagaagaagcatcgagtgctgcaccgagagaaacgagtgcaacaaggacctgcaccccaccctgccccccctgaagaacagagacttcgtggacggccccatccaccacagagccctgctgatcagcgtgaccgtgtgcagcctgctgctggtgctgatcatcctgttctgctacttcagatacaagagacaggagaccagacccagatacagcatcggcctggagcaggacgagacctacatcccccccggcgagagcctgagagacctgatcgagcagagccagagcagcggcagcggcagcggcctgcccctgctggtgcagagaaccatcgccaagcagatccagatggtgaagcagatcggcaagggcagatacggcgaggtgtggatgggcaagtggagaggcgagaaggtggccgtgaaggtgttcttcaccaccgaggaggccagctggttcagagagaccgagatctaccagaccgtgctgatgagacacgagaacatcctgggcttcatcgccgccgacatcaagggcaccggcagctggacccagctgtacctgatcaccgactaccacgagaacggcagcctgtacgactacctgaagagcaccaccctggacgccaagagcatgctgaagctggcctacagcagcgtgagcggcctgtgccacctgcacaccgagatcttcagcacccagggcaagcccgccatcgcccacagagacctgaagagcaagaacatcctggtgaagaagaacggcacctgctgcatcgccgacctgggcctggccgtgaagttcatcagcgacaccaacgaggtggacatcccccccaacaccagagtgggcaccaagagatacatgccccccgaggtgctggacgagagcctgaacagaaaccacttccagagctacatcatggccgacatgtacagcttcggcctgatcctgtgggaggtggccagaagatgcgtgagcggcggcatcgtggaggagtaccagctgccctaccacgacctggtgcccagcgaccccagctacgaggacatgagagagatcgtgtgcatcaagaagctgagacccagcttccccaacagatggagcagcgacgagtgcctgagacagatgggcaagctgatgaccgagtgctgggcccacaaccccgccagcagactgaccgccctgagagtgaagaagaccctggccaagatgagcgagagccaggacatcaagctgtag

SEQ ID NO: 91590 - DNA, 84 bp, Artificial Sequence
  derived and/or modified sequence
tgggatatgggtgaaagaacaagtttgcagaaaagatacagtgaattatggaccatgagttcgggaaagaagggtaggactgcg

SEQ ID NO: 91591 - protein, 404 aa, Artificial Sequence
  derived and/or modified sequence
MAGCCAALAAFLFEYDTPRIVLIRSRKVGLMNRAVQLLILAYVIGCYHPHLAEVEMESPRRWVFVWEKGYQETDSVVSSVTTKVKGVAVTNTSKLGFRIWDVADYVIPAQEENSLFVMTNVILTMNQTQGLCPEIPDATTVCKSDASCTAGSAGTHSNGVSTGRCVAFNGSVKTCEVAAWCPVEDDTHVPQPAFLKAAENFTLLVKNNIWYPKFNFSKRNILPNITTTYLKSCIYDAKTDPFCPIFRLGKIVENAGHSFQDMAVEGGIMGIQVNWDCNLDRAASLCLPRYSFRRLDTRDVEHNVSPGYNFRFAKYYRDLAGNEQRTLIKAYGIRFDIIVFGKAGKFDIIPTMINIGSGLALLGMATVLCDIIVLYCMKKRLYYREKKYKYVEDYEQGLASELDQ

SEQ ID NO: 91592 - DNA, 1215 bp, Artificial Sequence
  derived and/or modified sequence
atggctgggtgctgcgctgctttggccgcctttcttttcgagtacgacacaccgaggatcgtcttgatccgatcccggaaggtaggcttgatgaatagagcagttcagctgctaattctcgcctacgtgatcggctgctaccatcctcatttagcagaggttgagatggaaagccctaggcgctgggtgttcgtatgggaaaaaggctatcaagagaccgacagtgtggtgtcttctgtgacaacgaaggtgaaaggagtggctgttactaatacgtccaaactcggattccgtatttgggacgtggcggattacgtgattcccgcccaggaggagaactctctcttcgtgatgactaatgtcatcttaacgatgaaccagacgcagggcctgtgtccagaaattcctgacgctaccacagtttgtaaatctgatgcctcttgtaccgctggatctgcgggaactcactccaacggggtttctactgggcggtgcgtcgctttcaatggaagcgtgaagacctgtgaagtcgctgcatggtgccccgtcgaagacgacactcacgtcccacagcctgccttcctcaaggcggccgagaacttcaccctcctggtgaagaacaacatttggtatcccaagttcaacttcagcaagcggaatatactgccaaatatcaccaccacttatctcaaatcttgcatctatgacgccaagacagatcctttttgccccatattccgtctgggaaaaatcgtggagaacgctggccactcttttcaggacatggccgtagagggcggcatcatgggtattcaagtcaactgggattgtaacctcgacagagccgctagcctttgcctccccaggtactcctttcgccggctggacactcgagatgttgagcacaatgtaagccccggctacaattttcggttcgccaagtactatcgcgacttagcaggaaacgagcagcgaactcttatcaaagcctacgggatccggtttgacatcattgtatttggtaaggccggaaagtttgatattatccccactatgatcaacattgggagcgggctcgccctactgggcatggccactgtattatgtgacatcattgtgctgtattgtatgaagaagcgcctttattacagggagaaaaaatacaagtatgttgaggattatgaacaaggactcgcctccgagctggaccagtag

SEQ ID NO: 91593 - DNA, 1215 bp, Artificial Sequence
  derived and/or modified sequence
atggccggctgctgtgccgccctggccgccttcctgtttgaatatgacaccccccgcatcgtgctgatccgcagcaggaaggtgggcctgatgaacagagctgtgcagctgctgatcctggcctacgtgattggctgctaccacccccacctggccgaggtggagatggagagcccccggcgctgggtgtttgtgtgggagaagggctaccaggagacagattctgtggtgtcctctgtgaccaccaaggtgaagggcgtggccgtgaccaacaccagcaagctgggcttccgcatctgggatgtggccgactatgtgatcccagcccaggaggagaacagcctgtttgtgatgaccaacgtcatcctgaccatgaaccagacccagggcctgtgcccagagatcccagatgccaccaccgtgtgcaagagtgatgccagctgcacagctggcagcgctggcacccacagcaatggagtgtccacaggccgctgtgtggccttcaatggatctgtgaagacctgtgaggtggccgcctggtgccctgtggaggatgacacccacgtgccccagcctgccttcctgaaggctgctgagaacttcaccctgctggtgaagaacaacatctggtaccccaagttcaacttcagcaagaggaacatcctgcccaacatcaccaccacctacctgaagagctgcatctatgatgccaagacagaccccttctgccccatcttccggctgggcaagatcgtggagaatgccggccacagcttccaggacatggctgtggagggcggcatcatgggcatccaggtgaactgggactgcaacctggaccgggccgccagcctgtgcctgccccgctacagcttccggcggctggacaccagagatgtggagcacaacgtgtccccaggctacaacttccgctttgccaagtactacagagacctggccggaaatgagcagaggaccctcatcaaggcctacggcatccgctttgacatcatcgtgtttgggaaggccggcaagtttgacatcatccccaccatgatcaacatcggcagcggcctggccctgctgggcatggccaccgtgctgtgtgacatcatcgtgctgtactgcatgaagaagaggctgtactaccgggagaagaagtacaagtatgtggaggactatgagcagggcctggccagcgagctggaccagtag

SEQ ID NO: 91594 - DNA, 1215 bp, Artificial Sequence
  derived and/or modified sequence
atggccggctgctgcgccgccctggccgccttcctgttcgagtacgacactcccagaatcgtcctgattagaagtagaaaggtgggactaatgaatagagccgttcaactcctaatcctggcctacgttattggatgctaccacccccacctggctgaagtggaaatggagagtcctcggagatgggtttttgtctgggaaaagggttaccaggaaactgactctgtggtgagtagcgttaccaccaaggtcaagggcgtagccgtgacaaacacgagtaaattaggattcaggatctgggacgtggctgactacgtgatcccagcacaggaggagaactcgttgtttgtaatgacaaatgtaatattgacaatgaatcagacacagggactgtgtccagagatcccagatgccacaactgtctgcaagagcgatgcaagttgcacggccggaagtgctggtacacactccaatggggtgtcgaccgggcgttgtgtggcctttaacggctcagttaaaacatgtgaagtcgccgcatggtgtcccgtggaggacgatacccacgtcccgcagccagcctttctgaaggccgccgaaaattttaccttactcgtgaagaacaatatctggtaccccaaattcaacttcagtaaacgaaacatcctgcctaacatcaccactacatacttgaaatcctgcatttacgatgccaagacagaccctttttgcccaatatttaggctcggaaagatcgtggagaatgcagggcacagtttccaggacatggctgtcgaaggcggcattatgggaatccaggtgaactgggattgtaatctagatagggctgcttccctgtgcctgcctagatactcattcagacggctggatacacgggacgtggagcacaatgtctccccaggctacaactttcgatttgccaagtactatcgggatctggcggggaatgaacagagaactctcatcaaagcttatggtatcagattcgacattatagtgtttggcaaggcaggcaagtttgacatcatcccaaccatgattaatattggttccggactggctctgctgggaatggcaacagtcttgtgcgatataatcgtgttatattgcatgaagaaaaggttgtactaccgggagaagaaatataagtacgttgaggactatgaacagggactggccagcgaattagatcagtag

SEQ ID NO: 91595 - DNA, 1215 bp, Artificial Sequence
  derived and/or modified sequence
atggctggatgttgcgctgccctcgcagcattcctcttcgagtatgataccccacgaatagtccttatcagatctcgcaaggttggactaatgaaccgagctgttcagctgctgatactggcctacgtgatcggatgctatcatccccacctggccgaagtggagatggaatcgccacggcgatgggtgtttgtgtgggaaaagggataccaggagactgatagcgtagtcagcagtgtcacaacaaaggttaagggagtagccgtgactaacactagcaaactcggcttccgaatttgggacgtggcagactatgtaatcccggctcaggaggaaaactccttgtttgtgatgacaaacgtgattctgactatgaaccagacacagggcctgtgccccgagatccctgacgccacaaccgtttgcaagagcgacgcctcttgtaccgcgggtagcgcagggactcacagcaatggtgtgtcaacagggagatgcgttgccttcaatggatcggtcaagacttgtgaggttgccgcttggtgtccagtggaggatgacacccacgtgccacagcccgcattcctgaaagctgcagagaactttactctgcttgttaaaaacaatatttggtacccgaaattcaactttagtaagcgtaatattctgcctaacataaccactacatacctgaaaagttgtatttatgatgccaagaccgaccccttctgccccatttttagattgggcaagatcgtggagaacgcgggtcactcctttcaggacatggcggttgaaggtggaattatgggcattcaggtgaactgggactgcaacctagacagggccgcttccctgtgcttgcccaggtatagctttaggcggctagacaccagagatgtggagcataatgtgtcaccaggatacaacttcagattcgccaagtattaccgggacctcgcgggaaatgagcagcgaactctaatcaaggcttacgggattagattcgacattattgtctttggaaaagccggtaagtttgatattattcctacaatgattaacatcggaagcgggctggcacttctggggatggcaactgttttatgcgacataattgtgctgtactgcatgaagaagcgcctgtattaccgcgaaaagaaatacaaatacgtggaggactacgagcagggcctggcttctgaactcgatcagtag

SEQ ID NO: 91596 - DNA, 1836 bp, Artificial Sequence
  derived and/or modified sequence
gcgatgacggcgccgccagcaggccaggcggactgggcggggctccgagcggggactgggacccagaccgactaggggactgggagcgggcggcgcggccatggcgggctgctgcgccgcgctggcggccttcctgttcgagtacgacacgccgcgcatcgtgctcatccgcagccgcaaagtggggctcatgaaccgcgccgtgcaactgctcatcctggcctacgtcatcgggtgctaccatccccatttggcagaagtggaaatggagtcccctagaaggtgggtgtttgtgtgggaaaagggctaccaggaaactgactccgtggtcagctccgttacgaccaaggtcaagggcgtggctgtgaccaacacttctaaacttggattccggatctgggatgtggcggattatgtgataccagctcaggaggaaaactccctcttcgtcatgaccaacgtgatcctcaccatgaaccagacacagggcctgtgccccgagattccagatgcgaccactgtgtgtaaatcagatgccagctgtactgccggctctgccggcacccacagcaacggagtctcaacaggcaggtgcgtagctttcaacgggtctgtcaagacgtgtgaggtggcggcctggtgcccggtggaggatgacacacacgtgccacaacctgcttttttaaaggctgcagaaaacttcactcttttggttaagaacaacatctggtatcccaaatttaatttcagcaagaggaatatccttcccaacatcaccactacttacctcaagtcgtgcatttatgatgctaaaacagatcccttctgccccatattccgtcttggcaaaatagtggagaacgcaggacacagtttccaggacatggccgtggagggaggcatcatgggcatccaggtcaactgggactgcaacctggacagagccgcctccctctgcttgcccaggtactccttccgccgcctcgatacacgggacgttgagcacaacgtatctcctggctacaatttcaggtttgccaagtactacagagacctggctggcaacgagcagcgcacgctcatcaaggcctatggcatccgcttcgacatcattgtgtttgggaaggcagggaaatttgacatcatccccactatgatcaacatcggctctggcctggcactgctaggcatggcgaccgtgctgtgtgacatcatagtcctctactgcatgaagaaaagactctactatcgggagaagaaatataaatatgtggaagattacgagcagggtcttgctagtgagctggaccagtgaggcctaccccacacctgggctctccacagccccatcaaagaacagagaggaggaggagggagaaatggccaccacatcaccccagagaaatttctggaatctgattgagtctccactccacaagcactcagggttccccagcagctcctgtgtgttgtgtgcaggatctgtttgcccactcggcccaggaggtcagcagtctgttcttggctgggtcaactctgcttttcccgcaacctggggttgtcgggggagcgctggcccgacgcagtggcactgctgtggctttcagggctggagctggctttgctcagaagcctcctgtctccagctctctccaggacaggcccagtcctctgaggcacggcggctctgttcaagcactttatgcggcaggggaggccgcctggctgcagtcactagacttgtagcaggcctgggctgcaggcttccccccgaccattccctgcagccatgcggcagagctggcatttctcctcagagaagcgctgtgctaaggt

SEQ ID NO: 91597 - DNA, 1215 bp, Artificial Sequence
  derived and/or modified sequence
atggccggctgctgcgccgccctggccgccttcctgttcgagtacgacacccccagaatcgtgctgatcagaagcagaaaggtgggcctgatgaacagagccgtgcagctgctgatcctggcctacgtgatcggctgctaccacccccacctggccgaggtggagatggagagccccagaagatgggtgttcgtgtgggagaagggctaccaggagaccgacagcgtggtgagcagcgtgaccaccaaggtgaagggcgtggccgtgaccaacaccagcaagctgggcttcagaatctgggacgtggccgactacgtgatccccgcccaggaggagaacagcctgttcgtgatgaccaacgtgatcctgaccatgaaccagacccagggcctgtgccccgagatccccgacgccaccaccgtgtgcaagagcgacgccagctgcaccgccggcagcgccggcacccacagcaacggcgtgagcaccggcagatgcgtggccttcaacggcagcgtgaagacctgcgaggtggccgcctggtgccccgtggaggacgacacccacgtgccccagcccgccttcctgaaggccgccgagaacttcaccctgctggtgaagaacaacatctggtaccccaagttcaacttcagcaagagaaacatcctgcccaacatcaccaccacctacctgaagagctgcatctacgacgccaagaccgaccccttctgccccatcttcagactgggcaagatcgtggagaacgccggccacagcttccaggacatggccgtggagggcggcatcatgggcatccaggtgaactgggactgcaacctggacagagccgccagcctgtgcctgcccagatacagcttcagaagactggacaccagagacgtggagcacaacgtgagccccggctacaacttcagattcgccaagtactacagagacctggccggcaacgagcagagaaccctgatcaaggcctacggcatcagattcgacatcatcgtgttcggcaaggccggcaagttcgacatcatccccaccatgatcaacatcggcagcggcctggccctgctgggcatggccaccgtgctgtgcgacatcatcgtgctgtactgcatgaagaagagactgtactacagagagaagaagtacaagtacgtggaggactacgagcagggcctggccagcgagctggaccagtag

SEQ ID NO: 91598 - protein, 260 aa, Artificial Sequence
  derived and/or modified sequence
MEEMRDPSKIKWGDAGAEYVVESTGVFTTMEKAGAHLQGGAKRVIISAPSADAPMFVMGVNHEKYDNSLKIISNASCTTNCLAPLAKVIHDNFGIVEGLMTTVHAITATQKTVDGPSGKLWRDGRGALQNIIPASTGAAKAVGKVIPELNGKLTGMAFRVPTANVSVVDLTCRLEKPAKYDDIKKVVKQASEGPLKGILGYTEHQVVSSDFNSDTHSSTFDAGAGIALNDHFVKLISWYDNEFGYSNRVVDLMAHMASKE

SEQ ID NO: 91599 - protein, 293 aa, Artificial Sequence
  derived and/or modified sequence
MVYMFQYDSTHGKFHGTVKAENGKLVINGNPITIFQERDPSKIKWGDAGAEYVVESTGVFTTMEKAGAHLQGGAKRVIISAPSADAPMFVMGVNHEKYDNSLKIISNASCTTNCLAPLAKVIHDNFGIVEGLMTTVHAITATQKTVDGPSGKLWRDGRGALQNIIPASTGAAKAVGKVIPELNGKLTGMAFRVPTANVSVVDLTCRLEKPAKYDDIKKVVKQASEGPLKGILGYTEHQVVSSDFNSDTHSSTFDAGAGIALNDHFVKLISWYDNEFGYSNRVVDLMAHMASKE

SEQ ID NO: 91600 - DNA, 783 bp, Artificial Sequence
  derived and/or modified sequence
atggaggaaatgagagaccctagcaaaattaaatggggagatgctggcgccgagtacgtggttgagagcacaggtgtctttactaccatggagaaggctggtgcccaccttcagggtggggcgaagagagttatcatcagtgccccgagcgccgatgctccgatgttcgtgatgggggtcaatcacgaaaaatacgacaacagcctgaaaattatctcgaacgcttcttgcacgacaaattgcttggcgccactggccaaggttattcacgataacttcggcattgttgaaggtcttatgaccacagtacatgctatcacagccacccagaagacggttgatgggccaagcggtaagctttggagggacgggcgaggggctcttcagaatataatccccgctagcaccggggccgctaaagcagtcggtaaggtgattccagaactaaatggaaagttgactgggatggcctttagagtacccacggccaacgtgtctgtggtagatctcacttgtaggttggagaaaccagctaagtacgatgacataaaaaaggttgtaaagcaggccagcgaggggcccctcaagggcattctgggctatactgaacaccaggtggttagcagtgactttaactccgatacccattctagcaccttcgatgccggcgccggcatcgccttgaacgaccatttcgtgaaactgatcagctggtatgataatgaatttggctactctaaccgggtggtggatctcatggcccatatggccagcaaggaatag

SEQ ID NO: 91601 - DNA, 882 bp, Artificial Sequence
  derived and/or modified sequence
atggtgtatatgttccaatacgactccacgcacggcaaattccatggtacggtgaaagccgaaaacggcaagctggtcattaacggaaatccaatcactatattccaagagagggatcctagcaagataaagtggggtgacgctggcgctgaatatgtcgtcgaaagcactggagtcttcacgacgatggaaaaagcgggggcacacctgcaggggggagccaaacgggtgatcatcagtgccccgtccgctgacgcccccatgttcgtgatgggcgtgaatcatgagaagtatgacaatagcttgaagatcataagcaatgcatcctgtaccaccaactgcctcgctccactggccaaggtaattcacgacaacttcggaattgtggagggtctgatgacaacagtccatgcaattactgccacccagaagacagtcgacgggccttcaggcaaactgtggcgggacgggcgcggggcgctgcagaatatcataccagctagtacgggcgctgcaaaggcagttggaaaagttatacccgagctgaacggcaaattgactgggatggcctttcgggtgccgacagcaaacgtctcagtcgttgatctcacctgccgcctggagaagcccgcaaagtacgatgatattaagaaggtggtgaagcaggcctctgaaggtccactcaaggggattttgggctacaccgaacatcaggtcgtgtccagcgactttaactctgatacccactctagtacatttgatgccggcgccgggatcgccctgaacgaccattttgtaaaactgatctcctggtatgacaacgagtttggatattccaatcgcgtggtcgacctgatggcccacatggcctcgaaggaatag

SEQ ID NO: 91602 - DNA, 783 bp, Artificial Sequence
  derived and/or modified sequence
atggaggagatgagggaccccagcaagatcaagtggggagatgctggagcagaatatgtggtggagagcactggagtcttcaccaccatggagaaggccggggcccacctgcagggcggggccaagagggtcatcatcagcgcccccagcgcagatgcccccatgtttgtgatgggcgtgaaccacgagaagtatgacaacagcctgaagatcatcagcaatgccagctgcaccaccaactgcctggcccccctggccaaggtgattcatgacaactttggaattgtggagggcctgatgaccaccgtgcacgccatcacagccacccagaagacagtggatggccccagcggcaagctgtggagagatggccgcggggccctgcagaacatcatcccagccagcactggagctgccaaggctgtgggcaaggtgattcctgagctgaatggcaagctgaccggcatggccttccgggtgcccacagccaacgtgtctgtggtggacctgacctgccgcctggagaagccagccaagtatgatgacatcaagaaggtggtgaagcaggccagcgagggccccctgaagggcatcctgggctacacagagcaccaggtggtgtccagtgacttcaacagcgacacccacagcagcacctttgatgctggggccggcatcgccctgaatgaccactttgtgaagctgatctcctggtatgacaatgaatttggctacagcaacagagtggtggacctgatggcccacatggccagcaaggagtag

SEQ ID NO: 91603 - DNA, 882 bp, Artificial Sequence
  derived and/or modified sequence
atggtgtacatgttccagtatgacagcacccacggcaagttccatggaacagtgaaggcagaaaatggcaagctggtgatcaatggaaaccccatcaccatcttccaggagcgggaccccagcaagatcaagtggggagatgctggagcagaatatgtggtggagagcactggagtcttcaccaccatggagaaggccggggcccacctgcagggcggggccaagagggtcatcatcagcgcccccagcgcagatgcccccatgtttgtgatgggcgtgaaccacgagaagtatgacaacagcctgaagatcatcagcaatgccagctgcaccaccaactgcctggcccccctggccaaggtgattcatgacaactttggcatcgtggagggcctgatgaccaccgtgcacgccatcacagccacccagaagacagtggatggccccagcggcaagctgtggagagatggccgcggggccctgcagaacatcatcccagccagcactggagctgccaaggctgtgggcaaggtgattcctgagctgaatggcaagctgaccggcatggccttccgggtgcccacagccaacgtgtctgtggtggacctgacctgccgcctggagaagccagccaagtatgatgacatcaagaaggtggtgaagcaggccagcgagggccccctgaagggcatcctgggctacacagagcaccaggtggtgtccagtgacttcaacagcgacacccacagcagcacctttgatgctggagctggcatcgccctgaatgaccactttgtgaagctgatctcctggtatgacaatgaatttggctacagcaacagagtggtggacctgatggcccacatggccagcaaggagtag

SEQ ID NO: 91604 - DNA, 783 bp, Artificial Sequence
  derived and/or modified sequence
atggaggagatgcgggaccccagcaagatcaagtggggcgacgccggcgcagaatacgtggtcgagtcaactggggtcttcacaaccatggagaaggctggagctcatctgcagggtggggccaagagagtcattatatcagcaccgtccgcagacgcgccaatgttcgtcatgggcgtcaaccatgagaagtacgacaattcgttaaagatcatatcaaatgcaagttgtacaaccaattgtcttgcccccctcgcaaaggttatccacgacaattttggtattgtggaggggcttatgacaacagtacatgctataacggcaacacagaaaacagtggatggaccatctggcaagctgtggcgggacggcaggggggctctgcagaacattattccggcatctaccggtgccgcaaaggccgtcggcaaagtaataccagagctgaacggtaaattaacaggcatggcatttagggtgccaaccgccaacgtcagcgtcgtcgacctgacttgtcgtctagaaaaaccagccaaatacgacgacatcaagaaggttgtcaagcaggcctctgaggggcctttgaaggggatcctggggtacacagaacatcaagtagtgtcatccgactttaattcggacacacatagtagcacgtttgatgccggcgccggtatcgccctgaacgatcacttcgtcaaactcatttcctggtatgacaatgaatttggctattccaatcgtgttgtggatctgatggcacacatggcctctaaggagtag

SEQ ID NO: 91605 - DNA, 882 bp, Artificial Sequence
  derived and/or modified sequence
atggtgtacatgttccagtacgacagcacccacggcaagttccacgggacagttaaggccgaaaacggcaaactcgtcattaatgggaaccccattacaatatttcaggagagagacccatccaaaatcaagtggggagatgccggcgctgaatatgtcgttgagagtacaggcgtgttcaccacaatggagaaagctggcgctcaccttcagggaggagccaagagagtaatcatctccgcccctagcgctgatgctccaatgttcgtaatgggagttaaccatgaaaagtatgacaactccctgaaaatcatctctaacgcctcgtgcacaactaactgtctggcccctttagccaaggtcatacacgacaacttcggaatcgtggaggggctgatgacaacggtccacgctatcacagcaacacagaaaacagtggacggaccgtcaggtaagctgtggcgggacggaagaggagcacttcagaacatcatcccagcctcaaccggggcagcgaaggctgtcgggaaggtcatcccagagcttaacggcaagctcactgggatggcttttcgggtgccgaccgccaacgtcagcgtggtcgatctgacttgcagacttgaaaaaccagcaaaatatgatgacattaaaaaggtagtgaaacaggcaagcgaaggcccactgaagggcatcttgggctataccgagcaccaagtagtctccagcgacttcaattctgacacgcactcttcaaccttcgatgcaggcgcgggcattgcactgaacgatcattttgtgaagctgatcagctggtatgataatgagttcggatacagtaaccgcgtcgttgacctcatggcccatatggctagtaaagaatag

SEQ ID NO: 91606 - DNA, 783 bp, Artificial Sequence
  derived and/or modified sequence
atggaagaaatgcgcgatccaagtaaaatcaaatggggtgacgctggtgcagagtacgtggtcgagtcaaccggcgtctttaccacaatggagaaggctggcgctcacctccagggtggcgctaaaagagtcataatttccgcacctagcgccgatgccccaatgttcgtgatgggggtaaaccatgagaagtacgataatagcttgaagataatatctaatgcttcctgtactacgaactgcctcgcccctctggcgaaggtgatccacgacaatttcggcatagttgaaggactcatgacaaccgtacacgccattactgcgactcagaagaccgtggatggcccatccggaaagttgtggcgcgacgggagaggagctctgcagaacattattccagccagcacaggtgccgctaaggccgtggggaaggtcatcccagaactcaacggaaagctcaccggtatggcattccgcgtgcctactgccaacgtgtcagtggtcgaccttacatgtcgccttgagaaacccgctaagtacgacgatatcaaaaaagttgtgaagcaggcctccgaagggcctcttaagggcattctgggttacaccgaacatcaggtcgtgagttccgactttaactcagacactcattcgtccacgttcgacgccggagcaggtatcgctctgaacgaccacttcgtgaagctcattagctggtacgacaatgagtttggctattccaacagggtagtggacctgatggcccatatggcttctaaggagtag

SEQ ID NO: 91607 - DNA, 882 bp, Artificial Sequence
  derived and/or modified sequence
atggtgtacatgtttcaatacgattctacccacgggaagtttcacggcacagttaaggccgaaaacggaaagctggtaataaacggaaacccaattaccatattccaggaaagggacccatctaaaatcaagtggggggacgcaggcgcagagtacgttgtagagagcactggagtgttcacaacaatggagaaggctggcgcacacctccagggaggtgccaagcgggtgatcatctccgcacctagtgcggacgcacctatgtttgtgatgggtgttaatcacgagaagtatgataacagtctgaagatcatctctaacgctagttgcaccacgaattgcctggccccactggccaaagtgatccacgacaacttcggtatcgtggaagggttaatgactacggtgcacgctattactgcaacccagaagactgttgacggcccatcaggaaagttgtggagggatggacgaggcgctcttcaaaatatcatcccagcttccactggagccgcaaaggcggtagggaaggtgatcccggagctgaacggcaagctgacagggatggcttttcgcgtcccaaccgccaacgtgtccgtggtcgatctgacttgcaggttggaaaagcctgcgaaatatgacgatattaaaaaagtggtgaaacaggcatcggaagggccactcaagggcattctggggtacacggagcatcaggttgttagcagtgactttaatagcgatacacactccagcaccttcgatgccggtgctggtatcgcactcaacgatcacttcgtaaaattgatctcctggtacgacaacgagttcgggtacagtaatcgcgtagtggaccttatggcccacatggccagtaaagaatag

SEQ ID NO: 91608 - DNA, 783 bp, Artificial Sequence
  derived and/or modified sequence
atggaggagatgagagaccccagcaagatcaagtggggcgacgccggcgccgagtacgtggtggagagcaccggcgtgttcaccaccatggagaaggccggcgcccacctgcagggcggcgccaagagagtgatcatcagcgcccccagcgccgacgcccccatgttcgtgatgggcgtgaaccacgagaagtacgacaacagcctgaagatcatcagcaacgccagctgcaccaccaactgcctggcccccctggccaaggtgatccacgacaacttcggcatcgtggagggcctgatgaccaccgtgcacgccatcaccgccacccagaagaccgtggacggccccagcggcaagctgtggagagacggcagaggcgccctgcagaacatcatccccgccagcaccggcgccgccaaggccgtgggcaaggtgatccccgagctgaacggcaagctgaccggcatggccttcagagtgcccaccgccaacgtgagcgtggtggacctgacctgcagactggagaagcccgccaagtacgacgacatcaagaaggtggtgaagcaggccagcgagggccccctgaagggcatcctgggctacaccgagcaccaggtggtgagcagcgacttcaacagcgacacccacagcagcaccttcgacgccggcgccggcatcgccctgaacgaccacttcgtgaagctgatcagctggtacgacaacgagttcggctacagcaacagagtggtggacctgatggcccacatggccagcaaggagtag

SEQ ID NO: 91609 - DNA, 882 bp, Artificial Sequence
  derived and/or modified sequence
atggtgtacatgttccagtacgacagcacccacggcaagttccacggcaccgtgaaggccgagaacggcaagctggtgatcaacggcaaccccatcaccatcttccaggagagagaccccagcaagatcaagtggggcgacgccggcgccgagtacgtggtggagagcaccggcgtgttcaccaccatggagaaggccggcgcccacctgcagggcggcgccaagagagtgatcatcagcgcccccagcgccgacgcccccatgttcgtgatgggcgtgaaccacgagaagtacgacaacagcctgaagatcatcagcaacgccagctgcaccaccaactgcctggcccccctggccaaggtgatccacgacaacttcggcatcgtggagggcctgatgaccaccgtgcacgccatcaccgccacccagaagaccgtggacggccccagcggcaagctgtggagagacggcagaggcgccctgcagaacatcatccccgccagcaccggcgccgccaaggccgtgggcaaggtgatccccgagctgaacggcaagctgaccggcatggccttcagagtgcccaccgccaacgtgagcgtggtggacctgacctgcagactggagaagcccgccaagtacgacgacatcaagaaggtggtgaagcaggccagcgagggccccctgaagggcatcctgggctacaccgagcaccaggtggtgagcagcgacttcaacagcgacacccacagcagcaccttcgacgccggcgccggcatcgccctgaacgaccacttcgtgaagctgatcagctggtacgacaacgagttcggctacagcaacagagtggtggacctgatggcccacatggccagcaaggagtag

SEQ ID NO: 91610 - protein, 796 aa, Artificial Sequence
  derived and/or modified sequence
MPAWEPGVAASCGWRAPPCSPLRLCIAPHPCTPPSSHQGNLTCRLPPRSFGFCRCVWVRTRGPSLPGEQVSLAAHESEGAAAQLGSSPEIDPRRPRCLLPESAQIPQISYASTAPDLSDNSRYDFFSRVVPSDTYQAQAMVDIVRALKWNYVSTVASEGSYGESGVEAFIQKSREDGGVCIAQSVKIPREPKAGEFDKIIRRLLETSNARAVIIFANEDDIRRVLEAARRANQTGHFFWMGSDSWGSKIAPVLHLEEVAEGAVTILPKRMSVRDRERIGQDSAYEQEGKVQFVIDAVYAMGHALHAMHRDLCPGRVGLCPRMDPVDGTQLLKYIRNVNFSGIAGNPVTFNENGDAPGRYDIYQYQLRNDSAEYKVIGSWTDHLHLRIERMHWPGSGQQLPRSICSLPCQPGERKKTVKGMPCCWHCEPCTGYQYQVDRYTCKTCPYDMRPTENRTGCRPIPIIKLEWGSPWAVLPLFLAVVGIAATLFVVITFVRYNDTPIVKASGRELSYVLLAGIFLCYATTFLMIAEPDLGTCSLRRIFLGLGMSISYAALLTKTNRIYRIFEQGKRSVSAPRFISPASQLAITFSLISLQLLGICVWFVVDPSHSVVDFQDQRTLDPRFARGVLKCDISDLSLICLLGYSMLLMVTCTVYAIKTRGVPETFNEAKPIGFTMYTTCIVWLAFIPIFFGTSQSADKLYIQTTTLTVSVSLSASVSLGMLYMPKVYIILFHPEQNVPKRKRSLKAVVTAATMSNKFTQKGNFRPNGEAKSELCENLEAPALATKQTYVTYTNHAI

SEQ ID NO: 91611 - DNA, 2391 bp, Artificial Sequence
  derived and/or modified sequence
atgccagcctgggagccaggcgtagccgcctcatgtgggtggcgtgcccctccttgcagcccgctcaggctgtgtattgcaccacatccctgtacgcccccaagttcccatcagggcaacttgacgtgccggctgccacccagatccttcggattctgccgatgtgtgtgggtgagaacccggggacccagtttacccggtgaacaggtgtcgcttgccgcccatgagagcgaaggcgccgctgctcagctcgggagcagtcctgagatagatccacgccggcccagatgcctgctgccagagtcagcacagattccccagatatcctatgcatcaaccgctcccgacctcagcgacaatagtcgctacgattttttctcgagagtcgtacccagcgacacctatcaagcacaggcaatggtggatatcgtcagagctttgaaatggaactatgtctcaaccgtggcctcggaagggtcctacggagagtcaggcgttgaggccttcatccagaagagcagagaggatggtggtgtgtgcatagcacagtccgtgaagattccccgcgagcccaaagctggagagttcgataagattattcgccgtttgttggagacgtctaatgctcgggctgtgattatttttgccaacgaagatgacattaggcgtgtgctggaggcagcaagaagagccaatcagactggacactttttctggatgggttcggattcttgggggagcaaaatcgctccggttctccatttggaagaagtggccgaaggggctgttaccatcttaccaaagcgtatgtcagtgagggatagggagcgtatcggtcaggactctgcttatgagcaggaaggtaaggtgcaatttgttatagacgctgtgtacgcaatgggtcatgccctacacgctatgcatagagatctgtgccccggacgagttggcctctgtcctcgaatggacccggtagacggaacccagttgctgaaatatattcgtaatgtgaatttcagcgggatcgccgggaatcccgttactttcaacgaaaacggcgacgcacctggacgctatgatatttatcagtaccagctccgcaacgatagcgctgaatacaaagtgatagggtcatggaccgatcacctacatctcagaatcgaacgcatgcactggcccggcagtgggcaacagctccctcgaagcatctgttcattgccttgtcagcccggagaaaggaaaaagactgtaaaggggatgccctgctgttggcattgcgaaccctgtaccggctaccagtaccaagtcgatagatacacctgcaaaacatgtccttatgacatgcggcctaccgaaaaccgaacaggatgccgtccaatcccaatcattaagctggagtggggcagtccgtgggccgtacttccactgtttctggcagttgtagggatcgctgccaccctgttcgtggtcatcacctttgtgcgatacaatgacactcccattgttaaggcttctggccgcgagctctcgtatgtgctgctggcgggcatcttcctctgctatgccactaccttcctgatgatcgctgaacccgatctggggacctgctcattgcgacgcatcttcctgggcctcggtatgtcaattagctacgctgctctgctcaccaagaccaaccgcatttaccgcatctttgaacaaggcaaaaggtccgtgtctgcccctcgcttcataagtcctgcgagccagctggctattacattcagtctgatatcactgcaactgttgggcatctgcgtatggttcgtggttgatccttcacattctgtcgttgactttcaggatcaacggacacttgacccaaggtttgcccgtggcgtgctgaaatgtgacatctccgacctctcacttatatgtctgctaggatattcaatgctactgatggtgacctgtactgtgtacgccattaagaccaggggagtccctgaaactttcaatgaagccaagcctattggcttcaccatgtataccacgtgtatcgtctggttagcttttattccaatattcttcggaaccagccagtcagccgacaagctgtacatacagactacaacacttacagtgagcgtgagcttgtccgcatctgtcagcttagggatgctgtacatgccaaaggtgtatattatcttatttcaccccgaacaaaatgtgccgaaaaggaagcgctccctgaaggcagtagtaaccgccgcaacaatgagcaataaattcacccagaaaggcaacttccgacccaatggtgaggcgaaaagcgaactgtgcgaaaacctggaagcgccggccctggcaaccaagcagacatatgttacgtacaccaaccatgccatttag

SEQ ID NO: 91612 - DNA, 3590 bp, Artificial Sequence
  derived and/or modified sequence
aatcccagcgctttgctggaggatcgcttgagcccaggaattcaagaccagcctgggcaacatggcgagaccctgtctgtcccaaaacaaaaaaacagattttaattggtttgggatgcggcctggacacagggaaattttaaagctctctaggtaactccaatgtgcgtcgaggttgcgaaccgccggcctgtcacacagagggagctcaggagatgctgagagtgggaggatgccggcttgggagcctggagttgcagcttcctgcggctggcgcgcccctccttgctcccctctacgcctctgcatcgcaccccacccctgtaccccaccttcctcccaccaaggaaacctcacctgccgcctcccgcccaggtcctttggattttgccggtgtgtgtgggtgcgcacaagaggcccctccctgccaggagagcaggtgagcctggccgcgcacgaatccgagggggcggccgcccagctgggaagcagccctgaaatagacccccgccgcccccgctgcctccttccggaatctgctcagataccccagatcagctacgcctccacagcgccagacctgagtgacaacagccgctacgacttcttctcccgcgtggtgccctcggacacgtaccaggcccaggccatggtggacatcgtccgtgccctcaagtggaactatgtgtccacagtggcctcggagggcagctatggtgagagcggtgtggaggccttcatccagaagtcccgtgaggacgggggcgtgtgcatcgcccagtcggtgaagataccacgggagcccaaggcaggcgagttcgacaagatcatccgccgcctcctggagacttcgaacgccagggcagtcatcatctttgccaacgaggatgacatcaggcgtgtgctggaggcagcacgaagggccaaccagacaggccatttcttctggatgggctctgacagctggggctccaagattgcacctgtgctgcacctggaggaggtggctgagggtgctgtcacgatcctccccaagaggatgtccgtacgagaccgtgagcgaattgggcaggattcagcttatgagcaggaggggaaggtgcagtttgtgatcgatgccgtgtacgccatgggccacgcgctgcacgccatgcaccgtgacctgtgtcccggccgcgtggggctctgcccgcgcatggaccctgtagatggcacccagctgcttaagtacatccgaaacgtcaacttctcaggcatcgcagggaaccctgtgaccttcaatgagaatggagatgcgcctgggcgctatgacatctaccaataccagctgcgcaacgattctgccgagtacaaggtcattggctcctggactgaccacctgcaccttagaatagagcggatgcactggccggggagcgggcagcagctgccccgctccatctgcagcctgccctgccaaccgggtgagcggaagaagacagtgaagggcatgccttgctgctggcactgcgagccttgcacagggtaccagtaccaggtggaccgctacacctgtaagacgtgtccctatgacatgcggcccacagagaaccgcacgggctgccggcccatccccatcatcaagcttgagtggggctcgccctgggccgtgctgcccctcttcctggccgtggtgggcatcgctgccacgttgttcgtggtgatcacctttgtgcgctacaacgacacgcccatcgtcaaggcctcgggccgtgaactgagctacgtgctgctggcaggcatcttcctgtgctatgccaccaccttcctcatgatcgctgagcccgaccttggcacctgctcgctgcgccgaatcttcctgggactagggatgagcatcagctatgcagccctgctcaccaagaccaaccgcatctaccgcatcttcgagcagggcaagcgctcggtcagtgccccacgcttcatcagccccgcctcacagctggccatcaccttcagcctcatctcgctgcagctgctgggcatctgtgtgtggtttgtggtggacccctcccactcggtggtggacttccaggaccagcggacactcgacccccgcttcgccaggggtgtgctcaagtgtgacatctcggacctgtcgctcatctgcctgctgggctacagcatgctgctcatggtcacgtgcaccgtgtatgccatcaagacacgcggcgtgcccgagaccttcaatgaggccaagcccattggcttcaccatgtacaccacttgcatcgtctggctggccttcatccccatcttctttggcacctcgcagtcggccgacaagctgtacatccagacgacgacgctgacggtctcggtgagtctgagcgcctcggtgtccctgggaatgctctacatgcccaaagtctacatcatcctcttccacccggagcagaacgtgcccaagcgcaagcgcagcctcaaagccgtcgttacggcggccaccatgtccaacaagttcacgcagaagggcaacttccggcccaacggagaggccaagtctgagctctgcgagaaccttgaggccccagcgctggccaccaaacagacttacgtcacttacaccaaccatgcaatctagcgagtccatggagctgagcagcaggaggaggagccgtgaccctgtggaaggtgcgtcgggccagggccacacccaagggcccagctgtcttgcctgcccgtgggcacccacggacgtggcttggtgctgaggatagcagagcccccagccatcactgctggcagcctgggcaaaccgggtgagcaacaggaggacgaggggccggggcggtgccaggctaccacaagaacctgcgtcttggaccattgcccctcccggccccaaaccacaggggctcaggtcgtgtgggccccagtgctagatctctccctcccttcgtctctgtctgtgctgttggcgacccctctgtctgtctccagccctgtctttctgttctcttatctctttgtttcaccttttccctctctggcgtccccggctgcttgtactcttggccttttctgtgtctcctttctggctcttgcctccgcctctctctctcatcctctttgtcctcagctcctcctgctttcttgggtcccaccagtgtcacttttctgccgttttctttcctgttctcctctgcttcattctcgtccagccattgctcccctctccctgccacccttccccagttcaccaaaccttacatgttgcaaaagagaaaaaaggaaaaaaaatcaaaacacaaaaaagccaaaacgaaaacaaatctcgagtgtgttgccaagtgctgcgtcctcctggtggcctctgtgtgtgtccctgtggcccgcagcctgcccgcctgccccgcccatctgccgtgtgtcttgcccgcctgccccgcccgtctgccgtctgtcttgcccgcctgcccgcctgcccctcctgccgaccacacggagttcagtgcctgggtgtttggtgatggttattgacgacaatgtgtagcgcatgattgtttttataccaagaacatttctaataaaaataaacacatggtttt

SEQ ID NO: 91613 - DNA, 2391 bp, Artificial Sequence
  derived and/or modified sequence
atgcctgcctgggagcccggggtggccgccagctgtggctggagggccccaccctgcagccccctgcggctgtgcatcgccccccacccctgcaccccacccagcagccaccagggcaacctgacctgccgcctgccccccaggagctttggcttctgccgctgtgtgtgggtgaggacccggggccccagcctgcccggggagcaggtgtccctggccgcccatgaaagtgaaggagctgctgcccagctgggcagcagccctgagattgacccccggcggccccgctgcctgctgcctgagagcgcccagatcccccagatctcctatgccagcacagccccagacctgagtgacaacagccgctatgacttcttcagccgggtggtgcccagcgacacctaccaggcccaggccatggtggacatcgtgcgggccctgaagtggaactacgtgtccacagtggccagcgagggcagctatggagagagcggcgtggaggccttcatccagaagagcagagaagatggcggcgtgtgcatcgcccagagcgtgaagatcccccgggagcccaaggccggggagtttgacaagatcatccggcggctgctggagaccagcaatgcccgggctgtgatcatctttgccaatgaagatgacatccggcgggtgctggaggccgcccggcgggccaaccagacaggccacttcttctggatgggcagtgacagctggggcagcaagatcgcccctgtgctgcacctggaggaggtggccgagggcgctgtgaccatcctgcccaagaggatgtctgtgcgggaccgggagcgcatcggccaggacagcgcctatgagcaggagggcaaggtgcagtttgtgattgatgctgtgtatgccatgggccacgccctgcacgccatgcaccgggacctgtgccccggccgggtgggcctgtgccccaggatggaccctgtggatggcacccagctgctgaagtacatcagaaatgtgaacttcagcggcattgctggcaaccctgtgaccttcaatgaaaatggagatgcccctggccgctatgacatctaccagtaccagctgagaaatgacagcgctgagtacaaggtgattggctcctggacagaccacctgcacctgagaattgaaagaatgcactggccaggcagcggccagcagctgcccaggagcatctgcagcctgccctgccagcccggggagaggaagaagacagtgaagggcatgccctgctgctggcactgtgagccctgcaccggctaccagtaccaggtggaccgctacacctgcaagacctgcccctatgacatgaggcccacagagaacagaacaggctgccggcccatccccatcatcaagctggagtggggcagcccctgggccgtgctgcccctcttcctggccgtggtgggcattgctgccaccctgtttgtggtgatcacctttgtgcgctacaatgacacccccatcgtgaaggccagcggccgggagctgtcctatgtgctgctggccggcatcttcctgtgctacgccaccaccttcctgatgattgctgagccagacctgggcacctgcagcctgcggcgcatcttcctgggcctgggcatgagcatctcctatgctgccctgctgaccaagaccaaccgcatctaccgcatctttgagcagggcaagaggtctgtgtctgccccccgcttcatcagccctgccagccagctggccatcaccttcagcctcatcagcctgcagctgctgggcatctgtgtgtggtttgtggtggaccccagccacagcgtggtggacttccaggaccagaggaccctggaccccaggtttgcccggggcgtgctgaagtgtgacatcagtgacctgagcctcatctgcctgctgggctacagcatgctgctgatggtgacctgcaccgtgtatgccatcaagacccggggcgtgcctgagaccttcaatgaggccaagcccatcggcttcaccatgtacaccacctgcatcgtgtggctggccttcatccccatcttcttcggcaccagccagagcgctgacaagctgtacatccagaccaccaccctgactgtgtctgtgtccctgagcgcctctgtgtccctgggcatgctgtacatgcccaaggtgtacatcatcctcttccaccctgagcagaatgtgcccaagaggaagaggagcctgaaggctgtggtgacagctgccaccatgagcaacaagttcacccagaagggcaacttccggcccaacggggaggccaagtctgagctgtgtgagaacctggaggccccagccctggccaccaagcagacctacgtgacctacaccaaccacgccatctag

SEQ ID NO: 91614 - DNA, 2391 bp, Artificial Sequence
  derived and/or modified sequence
atgcccgcctgggagcccggcgtggccgccagctgcggctggcgggcacctccctgcagtcccctgcggctgtgcatcgccccccacccatgcacccctccttcctcccaccaagggaacttaacatgccggctgccaccccgatcattcgggttctgtcgatgtgtgtgggtacggactagggggccaagcctgcccggtgagcaggtctctttggcggctcatgagtccgagggcgctgccgcccagttaggcagcagccctgagattgatcctcggagaccccggtgtctgttgccggaatctgcccagattccacagatctcctatgcctcgacggcccctgatttgtccgacaatagccgttacgactttttttcccgagtcgtcccttctgacacgtaccaagcccaggcaatggttgacatcgtgagggccctgaaatggaattatgtgagcacagtagcgtccgagggctcttacggcgagagcggcgtggaggcttttatacagaagtccagggaagacgggggcgtgtgcattgcccagtctgtgaaaatcccaagagaaccaaaagccggggagttcgataagatcatccggaggctgctggaaactagcaacgcgcgtgcagttattatcttcgccaacgaggacgatatccggagagtcctggaggcagcacgccgcgctaaccaaaccggtcattttttttggatgggatccgattcatggggctccaagattgcccccgtgctgcatttggaggaagtggcagagggcgccgtgactattttgccgaagcggatgtcggtaagagatcgtgaacgcatcgggcaggattccgcatacgaacaggagggaaaggtccaatttgtgattgatgccgtgtacgccatgggacatgcactacacgccatgcatagagatctgtgcccgggacgcgtgggcctatgcccccgcatggaccccgttgatggcacacaacttctgaagtatatccgtaacgttaattttagtggaatagccggcaaccctgtaactttcaatgaaaacggcgatgctcccggcaggtacgacatctaccagtaccaactcagaaacgacagtgcagaatacaaagtcataggctcgtggacagaccatttacatctgcggatcgaacgaatgcactggcccgggagcgggcagcagctaccacgatcaatatgttccctcccatgccagcctggagagagaaagaagaccgtcaaaggaatgccatgttgctggcattgtgagccctgtactggctatcagtatcaggtggatagatacacttgcaaaacatgcccatatgatatgcggccgacggagaacagaacaggctgtagaccaataccaattatcaagctggagtggggttctccatgggcagttctgcccctgttcctggccgtcgtgggcatcgccgccaccctgtttgttgttatcactttcgtgcgttacaatgatacgccaatcgtgaaggcctctggcagagaactaagctatgttttgctcgccggcatctttctttgctacgccacaacttttctcatgatcgccgagccagacctgggtacctgctccctgaggcgaattttcctggggctcgggatgtctataagttacgccgctctgctgacaaaaactaatcggatttaccggatttttgaacaaggcaagagaagcgtatctgcgccgaggtttatctcgccagcaagtcagttagctataacatttagcctgatctcgctgcagctgttgggcatctgcgtgtggttcgttgtggaccccagccattccgtagtggactttcaggatcagagaaccctggaccccagatttgccagaggggtgctcaagtgcgatatctcagatcttagtttaatctgtctgttgggctactctatgctcctcatggtaacatgcactgtctatgcaattaagacccgaggggtccctgagacgttcaacgaagcaaagcctattgggttcaccatgtatacgacctgcattgtctggcttgcttttatcccaatcttctttgggactagccaatctgcagacaagttgtatatccagacaacaactctaacggtaagcgtgtcactgagcgcctctgtgagtttgggcatgctgtatatgccaaaggtctatattattttgttccacccagagcaaaatgtgcccaaacggaaacgcagccttaaagctgtggtcacagccgcaactatgagtaacaagttcacccagaagggaaactttcgccctaatggagaagccaaatctgaactctgcgagaatctagaggcgcctgcacttgcgacgaagcaaacttacgtgacgtacactaatcatgctatctag

SEQ ID NO: 91615 - DNA, 2391 bp, Artificial Sequence
  derived and/or modified sequence
atgcccgcttgggagcccggagtggccgcaagctgcggatggagagcgccaccttgcagccccctgaggctctgcattgcaccccatccttgcactccgccaagctcccaccagggaaacctcacttgccggcttcctcctcggagtttcggcttttgtcggtgcgtgtgggtgaggacacggggaccatccctccctggcgagcaggtctcactggccgctcacgaaagtgagggcgcagccgctcaactcggaagctcccctgagatcgacccccgtcggcctagatgcttgctgcccgagagtgcacagattccccaaattagctacgcgtctaccgcccctgatctctccgataattcccgctacgactttttctctagggtggtacctagcgatacttatcaggcacaggcaatggtcgatatcgttagggcccttaagtggaactatgtctccaccgttgcctctgagggctcatatggagagtccggtgtggaagcttttattcagaagagtagggaggatggaggcgtttgcatcgcacagagcgtaaagattccacgggagcccaaagcaggagaattcgacaagattattcgcaggctgctagagactagtaacgccagggcagttatcattttcgctaacgaagatgacattcgtcgagtccttgaggctgcgaggagggcaaaccaaacaggccatttcttttggatgggcagtgacagttggggaagcaagattgcgcctgtacttcatctggaggaggttgccgagggagcagttactatcctgccgaaaagaatgtcggttagggatcgagagcggattggccaggacagtgcctacgagcaggaggggaaggtgcagttcgttatagacgcggtttacgcaatgggccacgccctgcacgccatgcatcgcgatttatgtcccggacgggttggactgtgtccccgaatggaccctgtggatggaactcagttgctcaaatatatcaggaacgttaacttctctgggatagctggaaatccagtgactttcaatgagaatggcgatgccccaggaagatatgacatctaccaataccagctgcgtaacgacagtgcagagtataaagtgatcggcagctggactgatcatctgcatctgcgcatcgagcggatgcattggcctgggtcaggacaacagctgcctaggagtatctgcagtttaccctgccagccgggagaaagaaagaaaactgtcaagggaatgccctgttgctggcattgtgagccctgcaccggttaccagtatcaggttgatcgctacacatgtaagacctgcccttatgatatgcggcctacagagaatcgtactggatgtcgtccgattccgattatcaaactggaatggggctccccatgggccgtgctccctctgttcttagcagttgtggggatagcagcaacacttttcgtggtcattacgttcgttcgttacaacgacacgccaatcgtaaaggctagcgggagggagctgtcctatgtgttgctagccggaatttttctatgctatgcaacaacattcttaatgatcgccgagccggacctgggaacctgctcgctgcggaggatttttctcgggctcggtatgagcatctcgtatgccgctctcctcactaagacaaataggatttaccggatcttcgagcagggcaaacggagtgtgtcagccccaagattcatttctcccgcaagccagttagccattaccttttctctgatcagtcttcagctgctggggatatgcgtttggttcgtggttgatccttcccactccgtggtagattttcaagaccagcgcactcttgatcctagatttgccagaggggtgctgaaatgtgatatctctgacctctctctgatctgcctgctgggatactcaatgctccttatggttacctgtacagtctatgccattaagactagaggcgttccagaaacttttaacgaggcaaagcccatcggctttaccatgtacactacatgcatagtgtggctggcatttataccaatcttcttcggaacttcccagtctgccgacaaactttatatccagacgactacacttactgtgtccgtatccttatccgcatccgtgagcctggggatgctgtatatgccaaaggtgtatattatcctatttcaccccgaacaaaatgtaccaaagcgcaaacggagcctcaaagctgtggttacagcagccacaatgtccaataaattcacgcagaaaggaaatttccggcctaatggcgaagccaaatcagagttgtgtgaaaaccttgaggctcctgcgttggctacaaagcagacctacgtgacatatacaaaccacgctatctag

SEQ ID NO: 91616 - DNA, 2391 bp, Artificial Sequence
  derived and/or modified sequence
atgcccgcctgggagcccggcgtggccgccagctgcggctggagagcccccccctgcagccccctgagactgtgcatcgccccccacccctgcaccccccccagcagccaccagggcaacctgacctgcagactgccccccagaagcttcggcttctgcagatgcgtgtgggtgagaaccagaggccccagcctgcccggcgagcaggtgagcctggccgcccacgagagcgagggcgccgccgcccagctgggcagcagccccgagatcgaccccagaagacccagatgcctgctgcccgagagcgcccagatcccccagatcagctacgccagcaccgcccccgacctgagcgacaacagcagatacgacttcttcagcagagtggtgcccagcgacacctaccaggcccaggccatggtggacatcgtgagagccctgaagtggaactacgtgagcaccgtggccagcgagggcagctacggcgagagcggcgtggaggccttcatccagaagagcagagaggacggcggcgtgtgcatcgcccagagcgtgaagatccccagagagcccaaggccggcgagttcgacaagatcatcagaagactgctggagaccagcaacgccagagccgtgatcatcttcgccaacgaggacgacatcagaagagtgctggaggccgccagaagagccaaccagaccggccacttcttctggatgggcagcgacagctggggcagcaagatcgcccccgtgctgcacctggaggaggtggccgagggcgccgtgaccatcctgcccaagagaatgagcgtgagagacagagagagaatcggccaggacagcgcctacgagcaggagggcaaggtgcagttcgtgatcgacgccgtgtacgccatgggccacgccctgcacgccatgcacagagacctgtgccccggcagagtgggcctgtgccccagaatggaccccgtggacggcacccagctgctgaagtacatcagaaacgtgaacttcagcggcatcgccggcaaccccgtgaccttcaacgagaacggcgacgcccccggcagatacgacatctaccagtaccagctgagaaacgacagcgccgagtacaaggtgatcggcagctggaccgaccacctgcacctgagaatcgagagaatgcactggcccggcagcggccagcagctgcccagaagcatctgcagcctgccctgccagcccggcgagagaaagaagaccgtgaagggcatgccctgctgctggcactgcgagccctgcaccggctaccagtaccaggtggacagatacacctgcaagacctgcccctacgacatgagacccaccgagaacagaaccggctgcagacccatccccatcatcaagctggagtggggcagcccctgggccgtgctgcccctgttcctggccgtggtgggcatcgccgccaccctgttcgtggtgatcaccttcgtgagatacaacgacacccccatcgtgaaggccagcggcagagagctgagctacgtgctgctggccggcatcttcctgtgctacgccaccaccttcctgatgatcgccgagcccgacctgggcacctgcagcctgagaagaatcttcctgggcctgggcatgagcatcagctacgccgccctgctgaccaagaccaacagaatctacagaatcttcgagcagggcaagagaagcgtgagcgcccccagattcatcagccccgccagccagctggccatcaccttcagcctgatcagcctgcagctgctgggcatctgcgtgtggttcgtggtggaccccagccacagcgtggtggacttccaggaccagagaaccctggaccccagattcgccagaggcgtgctgaagtgcgacatcagcgacctgagcctgatctgcctgctgggctacagcatgctgctgatggtgacctgcaccgtgtacgccatcaagaccagaggcgtgcccgagaccttcaacgaggccaagcccatcggcttcaccatgtacaccacctgcatcgtgtggctggccttcatccccatcttcttcggcaccagccagagcgccgacaagctgtacatccagaccaccaccctgaccgtgagcgtgagcctgagcgccagcgtgagcctgggcatgctgtacatgcccaaggtgtacatcatcctgttccaccccgagcagaacgtgcccaagagaaagagaagcctgaaggccgtggtgaccgccgccaccatgagcaacaagttcacccagaagggcaacttcagacccaacggcgaggccaagagcgagctgtgcgagaacctggaggcccccgccctggccaccaagcagacctacgtgacctacaccaaccacgccatctag

SEQ ID NO: 91617 - protein, 772 aa, Artificial Sequence
  derived and/or modified sequence
MVQTLPKLFPHDGAKRKKRTLRTSGPCFGGGGQIPQISYASTAPDLSDNSRYDFFSRVVPSDTYQAQAMVDIVRALKWNYVSTVASEGSYGESGVEAFIQKSREDGGVCIAQSVKIPREPKAGEFDKIIRRLLETSNARAVIIFANEDDIRRVLEAARRANQTGHFFWMGSDSWGSKIAPVLHLEEVAEGAVTILPKRMSVRGFDRYFSSRTLDNNRRNIWFAEFWEDNFHCKLSRHALKKGSHVKKCTNRERIGQDSAYEQEGKVQFVIDAVYAMGHALHAMHRDLCPGRVGLCPRMDPVDGTQLLKYIRNVNFSGIAGNPVTFNENGDAPGRYDIYQYQLRNDSAEYKVIGSWTDHLHLRIERMHWPGSGQQLPRSICSLPCQPGERKKTVKGMPCCWHCEPCTGYQYQVDRYTCKTCPYDMRPTENRTGCRPIPIIKLEWGSPWAVLPLFLAVVGIAATLFVVITFVRYNDTPIVKASGRELSYVLLAGIFLCYATTFLMIAEPDLGTCSLRRIFLGLGMSISYAALLTKTNRIYRIFEQGKRSVSAPRFISPASQLAITFSLISLQLLGICVWFVVDPSHSVVDFQDQRTLDPRFARGVLKCDISDLSLICLLGYSMLLMVTCTVYAIKTRGVPETFNEAKPIGFTMYTTCIVWLAFIPIFFGTSQSADKLYIQTTTLTVSVSLSASVSLGMLYMPKVYIILFHPEQNVPKRKRSLKAVVTAATMSNKFTQKGNFRPNGEAKSELCENLEAPALATKQTYVTYTNHAI

SEQ ID NO: 91618 - protein, 743 aa, Artificial Sequence
  derived and/or modified sequence
MSCKIPQISYASTAPDLSDNSRYDFFSRVVPSDTYQAQAMVDIVRALKWNYVSTVASEGSYGESGVEAFIQKSREDGGVCIAQSVKIPREPKAGEFDKIIRRLLETSNARAVIIFANEDDIRRVLEAARRANQTGHFFWMGSDSWGSKIAPVLHLEEVAEGAVTILPKRMSVRGFDRYFSSRTLDNNRRNIWFAEFWEDNFHCKLSRHALKKGSHVKKCTNRERIGQDSAYEQEGKVQFVIDAVYAMGHALHAMHRDLCPGRVGLCPRMDPVDGTQLLKYIRNVNFSGIAGNPVTFNENGDAPGRYDIYQYQLRNDSAEYKVIGSWTDHLHLRIERMHWPGSGQQLPRSICSLPCQPGERKKTVKGMPCCWHCEPCTGYQYQVDRYTCKTCPYDMRPTENRTGCRPIPIIKLEWGSPWAVLPLFLAVVGIAATLFVVITFVRYNDTPIVKASGRELSYVLLAGIFLCYATTFLMIAEPDLGTCSLRRIFLGLGMSISYAALLTKTNRIYRIFEQGKRSVSAPRFISPASQLAITFSLISLQLLGICVWFVVDPSHSVVDFQDQRTLDPRFARGVLKCDISDLSLICLLGYSMLLMVTCTVYAIKTRGVPETFNEAKPIGFTMYTTCIVWLAFIPIFFGTSQSADKLYIQTTTLTVSVSLSASVSLGMLYMPKVYIILFHPEQNVPKRKRSLKAVVTAATMSNKFTQKGNFRPNGEAKSELCENLEAPALATKQTYVTYTNHAI

SEQ ID NO: 91619 - protein, 591 aa, Artificial Sequence
  derived and/or modified sequence
MGSDSWGSKIAPVLHLEEVAEGAVTILPKRMSVRGFDRYFSSRTLDNNRRNIWFAEFWEDNFHCKLSRHALKKGSHVKKCTNRERIGQDSAYEQEGKVQFVIDAVYAMGHALHAMHRDLCPGRVGLCPRMDPVDGTQLLKYIRNVNFSGIAGNPVTFNENGDAPGRYDIYQYQLRNDSAEYKVIGSWTDHLHLRIERMHWPGSGQQLPRSICSLPCQPGERKKTVKGMPCCWHCEPCTGYQYQVDRYTCKTCPYDMRPTENRTGCRPIPIIKLEWGSPWAVLPLFLAVVGIAATLFVVITFVRYNDTPIVKASGRELSYVLLAGIFLCYATTFLMIAEPDLGTCSLRRIFLGLGMSISYAALLTKTNRIYRIFEQGKRSVSAPRFISPASQLAITFSLISLQLLGICVWFVVDPSHSVVDFQDQRTLDPRFARGVLKCDISDLSLICLLGYSMLLMVTCTVYAIKTRGVPETFNEAKPIGFTMYTTCIVWLAFIPIFFGTSQSADKLYIQTTTLTVSVSLSASVSLGMLYMPKVYIILFHPEQNVPKRKRSLKAVVTAATMSNKFTQKGNFRPNGEAKSELCENLEAPGSS

SEQ ID NO: 91620 - DNA, 2232 bp, Artificial Sequence
  derived and/or modified sequence
atgtcctgtaaaataccacagataagttacgcctccactgccccagaccttagcgataattctcgatacgatttcttcagtcgggtggttccgagcgatacctatcaggcccaggccatggtagacatagtacgggccctgaagtggaactatgtgtctacagtggcgtctgagggcagctacggcgagagcggggtcgaggcattcattcagaagtcccgggaagatggaggcgtctgcatcgcacagtccgtgaagataccaagggagcctaaggcgggagagttcgacaaaatcataagaaggctcttggaaacctccaatgctcgagccgttataatatttgcaaacgaggacgacatcagacgcgtgttggaagccgccagacgcgccaatcaaacaggacacttcttctggatgggctccgactcatggggctctaagatcgcacccgtgctgcaccttgaggaagtggcagaaggagctgtgaccattctacccaaacgcatgagcgttcgcggctttgacaggtatttcagcagtagaactctggataacaataggcgcaatatttggtttgccgaattctgggaggataattttcattgcaagctgtctcgtcacgctctgaagaaggggtcccacgtgaaaaagtgcaccaatcgagagcgtatcggccaggatagtgcatatgaacaggaaggtaaagtgcagttcgtgatagacgccgtgtacgctatgggtcatgctctgcatgccatgcatcgagatttgtgcccaggaagagtgggcctgtgcccccgaatggacccggtcgacggcacgcagctgttaaagtacatcagaaacgtgaacttttctggtattgcggggaacccagtcactttcaacgagaacggggatgccccaggcagatacgatatttatcagtaccagctcaggaatgactccgctgagtacaaagtaattggatcatggacagaccatctgcacctcagaatcgagcgaatgcactggcctggatcagggcaacagctgccccggagtatctgcagtctgccctgtcagccgggtgagagaaaaaagacggtcaagggaatgccatgctgctggcattgcgaaccgtgtacggggtaccagtaccaggttgacagatatacgtgtaagacctgcccttacgatatgagacctacggagaaccgaaccggttgtcgccccatcccaatcataaagcttgagtggggctcaccttgggccgtcctccctctcttcttagccgtggtagggattgcagcaacacttttcgtcgtgatcacgttcgtgaggtataacgacacccctatagtgaaggcctccgggagggagctaagctatgttctgttagctggtatatttctctgctatgctaccaccttcctcatgatcgccgagcctgatttaggaacctgcagtctgcgacgaatttttctcggattgggtatgtctatctcttacgccgccctgctgactaaaacaaaccggatctaccgaatattcgagcaaggcaagcggtcagtcagcgcgcccagatttatcagccctgccagtcagcttgctatcacctttagccttatttcactccagcttttaggtatatgtgtgtggttcgtggtggacccatcccactccgtcgttgacttccaggaccagcgcactctggatccacggtttgcaagaggcgtgctgaaatgcgacatttccgacctgtcactcatttgcctgctgggctactccatgctgctgatggttacttgcaccgtgtatgccattaagacgaggggggtacctgaaacttttaacgaggcaaaaccgatcggctttacaatgtatacaacgtgcatcgtgtggctagctttcattccgatcttctttggtaccagccagtctgctgacaagctgtatatccagaccacaactctaacggtgagtgtgtctctttccgcctccgtgagcttgggcatgctctacatgcccaaggtctatatcatcctctttcacccggagcagaacgttcctaaaaggaaaaggtcgctgaaagccgtggtgacagcggcgacaatgagcaacaaattcacgcagaagggcaacttcagacccaacggagaggccaagtctgagctatgtgagaacctcgaggcaccagcgctggcaaccaagcaaacttacgtgacctacacaaaccatgctatctag

SEQ ID NO: 91621 - DNA, 2712 bp, Artificial Sequence
  derived and/or modified sequence
gatgccctggggactcacgggctgcaggtgctaccagcccagcaccccggcacagcggggaggctgaggcagacacacgctcctggagagacatgtcatgtaagataccccagatcagctacgcctccacagcgccagacctgagtgacaacagccgctacgacttcttctcccgcgtggtgccctcggacacgtaccaggcccaggccatggtggacatcgtccgtgccctcaagtggaactatgtgtccacagtggcctcggagggcagctatggtgagagcggtgtggaggccttcatccagaagtcccgtgaggacgggggcgtgtgcatcgcccagtcggtgaagataccacgggagcccaaggcaggcgagttcgacaagatcatccgccgcctcctggagacttcgaacgccagggcagtcatcatctttgccaacgaggatgacatcaggcgtgtgctggaggcagcacgaagggccaaccagacaggccatttcttctggatgggctctgacagctggggctccaagattgcacctgtgctgcacctggaggaggtggctgagggtgctgtcacgatcctccccaagaggatgtccgtacgaggcttcgaccgctacttctccagccgcacgctggacaacaaccggcgcaacatctggtttgccgagttctgggaggacaacttccactgcaagctgagccgccacgccctcaagaagggcagccacgtcaagaagtgcaccaaccgtgagcgaattgggcaggattcagcttatgagcaggaggggaaggtgcagtttgtgatcgatgccgtgtacgccatgggccacgcgctgcacgccatgcaccgtgacctgtgtcccggccgcgtggggctctgcccgcgcatggaccctgtagatggcacccagctgcttaagtacatccgaaacgtcaacttctcaggcatcgcagggaaccctgtgaccttcaatgagaatggagatgcgcctgggcgctatgacatctaccaataccagctgcgcaacgattctgccgagtacaaggtcattggctcctggactgaccacctgcaccttagaatagagcggatgcactggccggggagcgggcagcagctgccccgctccatctgcagcctgccctgccaaccgggtgagcggaagaagacagtgaagggcatgccttgctgctggcactgcgagccttgcacagggtaccagtaccaggtggaccgctacacctgtaagacgtgtccctatgacatgcggcccacagagaaccgcacgggctgccggcccatccccatcatcaagcttgagtggggctcgccctgggccgtgctgcccctcttcctggccgtggtgggcatcgctgccacgttgttcgtggtgatcacctttgtgcgctacaacgacacgcccatcgtcaaggcctcgggccgtgaactgagctacgtgctgctggcaggcatcttcctgtgctatgccaccaccttcctcatgatcgctgagcccgaccttggcacctgctcgctgcgccgaatcttcctgggactagggatgagcatcagctatgcagccctgctcaccaagaccaaccgcatctaccgcatcttcgagcagggcaagcgctcggtcagtgccccacgcttcatcagccccgcctcacagctggccatcaccttcagcctcatctcgctgcagctgctgggcatctgtgtgtggtttgtggtggacccctcccactcggtggtggacttccaggaccagcggacactcgacccccgcttcgccaggggtgtgctcaagtgtgacatctcggacctgtcgctcatctgcctgctgggctacagcatgctgctcatggtcacgtgcaccgtgtatgccatcaagacacgcggcgtgcccgagaccttcaatgaggccaagcccattggcttcaccatgtacaccacttgcatcgtctggctggccttcatccccatcttctttggcacctcgcagtcggccgacaagctgtacatccagacgacgacgctgacggtctcggtgagtctgagcgcctcggtgtccctgggaatgctctacatgcccaaagtctacatcatcctcttccacccggagcagaacgtgcccaagcgcaagcgcagcctcaaagccgtcgttacggcggccaccatgtccaacaagttcacgcagaagggcaacttccggcccaacggagaggccaagtctgagctctgcgagaaccttgaggccccagcgctggccaccaaacagacttacgtcacttacaccaaccatgcaatctagcgagtccatggagctgagcagcaggaggaggagccgtgaccctgtggaaggtgcgtcgggccagggccacacccaagggcccagctgtcttgcctgcccgtgggcacccacggacgtggcttggtgctgaggatagcagagcccccagccatcactgctggcagcctgggcaaaccgggtgagcaacaggaggacgaggggccggggcggtgccaggctaccacaagaacctgcgtcttggaccattgcccctcccggccccaaaccacaggggctcaggtcgtgtgggccccagtgctagatctctccctcccttcgtctctgtctgtgctgttggcgacccctctgtctgtctccagccctgtctttctgttctcttatctctttg

SEQ ID NO: 91622 - DNA, 2232 bp, Artificial Sequence
  derived and/or modified sequence
atgagctgcaagatcccccagatctcctatgccagcacagccccagacctgagtgacaacagccgctatgacttcttcagccgggtggtgcccagcgacacctaccaggcccaggccatggtggacatcgtgcgggccctgaagtggaactacgtgtccacagtggccagcgagggcagctatggagagagcggcgtggaggccttcatccagaagagcagagaagatggcggcgtgtgcatcgcccagagcgtgaagatcccccgggagcccaaggccggggagtttgacaagatcatccggcggctgctggagaccagcaatgcccgggctgtgatcatctttgccaatgaagatgacatccggcgggtgctggaggccgcccggcgggccaaccagacaggccacttcttctggatgggcagtgacagctggggcagcaagatcgcccctgtgctgcacctggaggaggtggccgagggcgctgtgaccatcctgcccaagaggatgtctgtgcggggctttgaccgctacttcagcagcaggaccctggacaacaacagaagaaacatctggtttgctgagttctgggaggacaacttccactgcaagctgagcagacatgccctgaagaagggcagccacgtgaagaagtgcaccaaccgggagagaattggccaggacagcgcctatgagcaggagggcaaggtgcagtttgtgattgatgctgtgtatgccatgggccacgccctgcacgccatgcaccgggacctgtgccccggccgggtgggcctgtgccccaggatggaccctgtggatggcacccagctgctgaagtacatcagaaatgtgaacttctctggaattgctggcaaccctgtgaccttcaatgaaaatggagatgcccctggccgctatgacatctaccagtaccagctgagaaatgattctgctgagtacaaggtgattggctcctggacagaccacctgcacctgcgcatcgagaggatgcactggccaggcagcggccagcagctgcccaggagcatctgcagcctgccctgccagcctggagagaggaagaagacagtgaagggcatgccctgctgctggcactgtgagccctgcaccggctaccagtaccaggtggaccgctacacctgcaagacctgcccctatgacatgaggcccacagaaaatagaacaggctgccggcccatccccatcatcaagctggagtggggcagcccctgggccgtgctgcccctcttcctggccgtggtgggcattgctgccaccctgtttgtggtgatcacctttgtgcgctacaatgacacccccatcgtgaaggccagcggccgggagctgtcctatgtgctgctggccggcatcttcctgtgctacgccaccaccttcctgatgattgctgagccagacctgggcacctgcagcctgcggcgcatcttcctgggcctgggcatgagcatctcctatgctgccctgctgaccaagaccaaccgcatctaccgcatctttgagcagggcaagaggtctgtgtctgccccccgcttcatcagccctgccagccagctggccatcaccttcagcctcatcagcctgcagctgctgggcatctgtgtgtggtttgtggtggaccccagccacagcgtggtggacttccaggaccagaggaccctggaccccaggtttgcccggggcgtgctgaagtgtgacatcagtgacctgagcctcatctgcctgctgggctacagcatgctgctgatggtgacctgcaccgtgtatgccatcaagacccggggcgtgcctgagaccttcaatgaggccaagcccatcggcttcaccatgtacaccacctgcatcgtgtggctggccttcatccccatcttcttcggcaccagccagagcgctgacaagctgtacatccagaccaccaccctgactgtgtctgtgtccctgagcgcctctgtgtccctgggcatgctgtacatgcccaaggtgtacatcatcctcttccaccctgagcagaatgtgcccaagaggaagaggagcctgaaggctgtggtgacagctgccaccatgagcaacaagttcacccagaagggcaacttccggcccaatggagaggccaagtctgagctgtgtgagaacctggaggccccagccctggccaccaagcagacctacgtgacctacaccaaccacgccatctag

SEQ ID NO: 91623 - DNA, 2232 bp, Artificial Sequence
  derived and/or modified sequence
atgagctgcaagatcccccagatcagctacgccagcaccgcccccgatctgtccgacaatagccgatatgacttcttttcaagggtggtcccgtcagatacttatcaggcccaggcaatggtcgacatcgtgagggccctaaaatggaactatgtgagcacagtggcatctgagggttcttacggcgagtccggagtcgaagctttcatacagaaatcacgggaggacggaggcgtgtgtatagcccaatcagtgaagatccccagggaaccaaaggcaggagaattcgataaaatcatcagacgcctgctggagaccagcaatgctcgggccgtaattatcttcgcgaatgaagacgacatacgccgtgtcctcgaagccgctaggagggccaaccagaccggccatttcttttggatgggatccgactcctggggcagcaaaatcgcacccgtgcttcatctcgaggaggtagctgagggggcagtgacaattcttcccaagcgaatgtctgtgcgggggtttgatagatacttctcttcccgcacgttagataataaccggcggaacatatggttcgctgagttttgggaggataactttcactgcaaactctcccgccatgcgttgaaaaagggttcgcacgtgaagaaatgtactaatagggaaaggattggacaggactccgcgtatgagcaggagggcaaggtgcaattcgtgatcgacgctgtctacgccatggggcacgccctgcacgctatgcatcgagatctatgtcccggaagagtgggcctgtgccccaggatggacccagttgatgggactcagcttctaaaatatatccgtaacgtcaacttttcaggaatagccggaaatccagttacgtttaatgaaaatggtgacgccccagggcgctacgacatataccagtatcaactgagaaatgacagcgcggagtacaaagtaatcgggtcctggaccgaccatctccacttgcgaatcgagagaatgcactggccgggaagcggtcagcagctgcccagatcaatctgctccctgccttgtcagcctggggagcggaagaagaccgtcaaaggcatgccatgctgctggcactgcgagccgtgcaccggataccagtaccaagttgaccgatacacatgcaagacgtgtccgtacgacatgagacccacagagaaccgaactggttgcagacccattcccatcatcaaattggaatgggggagcccttgggctgtgcttcccttatttctcgccgttgtcggcatcgctgcaaccctcttcgtggtgattacatttgtaaggtataacgataccccaattgttaaggcatcagggagggagttgtcttacgtgttactggccggaatctttctgtgctacgctacgacattccttatgatagccgaacccgatctgggaacctgtagtcttaggagaatcttcttgggactcggaatgagcatttcttacgccgctctgctgactaagactaacagaatatatcggatttttgaacagggcaaacggagtgtgagcgctcctagatttatcagcccagcaagtcagctggccataaccttttccctaataagcctgcagcttcttgggatctgcgtctggttcgtggtggacccaagccattccgtggttgacttccaggaccagcgaacattggacccgcggtttgcccggggggtgctgaaatgcgatatcagcgacctctccctgatctgtctcctagggtactccatgctgctcatggtaacgtgcactgtctatgcaattaagacccgtggtgtccctgaaacattcaatgaagcgaagcctataggattcacgatgtatacaacatgcatcgtgtggctggccttcatccccattttctttggaacaagtcaaagtgctgataagctctacattcaaaccacgaccctgaccgtgagtgtgagcctatctgcctctgtttccctgggaatgctgtacatgcccaaagtgtacatcatccttttccacccagagcaaaacgtgccaaagagaaagcgcagtctgaaagccgtggtgaccgccgccaccatgtctaataagtttacacagaaaggcaattttcgcccaaacggcgaagcaaaaagcgagctgtgtgaaaacttagaagcaccggcccttgccactaagcagacttacgtcacatatacaaatcacgccatttag

SEQ ID NO: 91624 - DNA, 2232 bp, Artificial Sequence
  derived and/or modified sequence
atgtcctgcaaaatacctcagatctcatatgcctcgacagccccagatctttccgacaactccaggtacgattttttctctcgggtggtcccatcggacacataccaagcccaggctatggtggatattgtccgagctcttaaatggaattacgtctctactgtggcatccgaaggttcctatggcgaatcgggggtcgaagctttcatccagaagagccgcgaagacggcggagtttgtatcgctcagtccgtgaagattccacgggagcccaaggcaggcgagttcgacaaaattatccgcagactgctggagacctcaaacgcgagagcagtgataatattcgcgaatgaagatgacatacggagggtcctcgaggccgctagaagggccaaccaaacaggtcacttcttttggatgggttctgatagctggggctccaagatcgctccagtcttgcacttggaagaggtagccgagggagctgttacaatcttgccgaaacgtatgagcgttcggggattcgatcgctatttttcatcaaggaccttagataataaccgtcgcaatatttggttcgccgaattttgggaggacaacttccattgcaagctgtcacggcatgccctgaaaaaggggtcccacgtgaagaaatgtactaatagggaacggatcggccaagatagtgcttatgagcaagaagggaaggtccagttcgtgatcgacgcggtttacgctatggggcacgccttgcacgcaatgcaccgcgacctctgtcctggccgagtcggtctgtgccccagaatggaccccgttgatgggacccagctgctcaagtacatacggaatgttaatttctctggtatagcaggaaacccagtcacttttaacgagaatggagatgctccaggcagatacgatatctatcagtatcagttaagaaatgatagcgccgagtacaaggttataggttcctggactgatcacctgcatttgcggatcgagagaatgcattggcctgggtccgggcaacagctccccagatctatttgcagcctcccctgccagcccggtgaacggaagaagacagtcaagggcatgccctgctgttggcattgtgaaccctgcacgggctaccagtaccaggtcgatcggtacacatgtaaaacttgtccctatgatatgcggccaaccgagaaccgaacaggctgccgtcccatccccatcatcaagctggagtggggatctccctgggccgtcttaccactgtttctagccgtggtgggaatcgcggcaacactgttcgtggtgatcacattcgtacggtacaatgacactcctatagtgaaagccagcggaagggagctaagttacgtgttgctcgccggaatatttctctgctacgccacaacgttcttgatgatcgccgaaccggacctgggcacctgtagcctcagacgcattttcctcggtctcggaatgagcatatcttatgccgctctgcttacgaagactaacaggatttaccgcatattcgagcagggaaaacgttcagtgtctgctccaagatttatctcaccagcaagccagctcgctataacttttagcctcatctcactacagctcctgggtatctgcgtgtggtttgtcgttgaccctagccactcggtggtggatttccaggatcagcgaaccctcgatccgaggttcgctaggggtgttctgaaatgtgatatcagcgatctttctctgatctgcctgctgggttacagtatgcttctgatggttacttgcacggtgtatgccattaaaactcgtggagtccctgagacttttaacgaggctaagccaatcggattcactatgtatactacgtgcattgtgtggttggcctttatacccattttctttggcacctcgcaaagcgcagacaaactgtacatccagacgactacgctgactgtgagcgtaagtctgtccgctagcgtcagtcttggtatgctttatatgcccaaggtttacattatcctgttccatcccgaacaaaacgttccgaaaaggaagaggtccctaaaggctgtggtcacagcggcaactatgtcaaataagtttacgcaaaagggtaattttcgcccaaatggagaggctaaaagcgagttatgtgaaaacctggaagccccagccctcgccaccaagcagacctatgttacttacacaaaccatgccatctag

SEQ ID NO: 91625 - DNA, 2232 bp, Artificial Sequence
  derived and/or modified sequence
atgagctgcaagatcccccagatcagctacgccagcaccgcccccgacctgagcgacaacagcagatacgacttcttcagcagagtggtgcccagcgacacctaccaggcccaggccatggtggacatcgtgagagccctgaagtggaactacgtgagcaccgtggccagcgagggcagctacggcgagagcggcgtggaggccttcatccagaagagcagagaggacggcggcgtgtgcatcgcccagagcgtgaagatccccagagagcccaaggccggcgagttcgacaagatcatcagaagactgctggagaccagcaacgccagagccgtgatcatcttcgccaacgaggacgacatcagaagagtgctggaggccgccagaagagccaaccagaccggccacttcttctggatgggcagcgacagctggggcagcaagatcgcccccgtgctgcacctggaggaggtggccgagggcgccgtgaccatcctgcccaagagaatgagcgtgagaggcttcgacagatacttcagcagcagaaccctggacaacaacagaagaaacatctggttcgccgagttctgggaggacaacttccactgcaagctgagcagacacgccctgaagaagggcagccacgtgaagaagtgcaccaacagagagagaatcggccaggacagcgcctacgagcaggagggcaaggtgcagttcgtgatcgacgccgtgtacgccatgggccacgccctgcacgccatgcacagagacctgtgccccggcagagtgggcctgtgccccagaatggaccccgtggacggcacccagctgctgaagtacatcagaaacgtgaacttcagcggcatcgccggcaaccccgtgaccttcaacgagaacggcgacgcccccggcagatacgacatctaccagtaccagctgagaaacgacagcgccgagtacaaggtgatcggcagctggaccgaccacctgcacctgagaatcgagagaatgcactggcccggcagcggccagcagctgcccagaagcatctgcagcctgccctgccagcccggcgagagaaagaagaccgtgaagggcatgccctgctgctggcactgcgagccctgcaccggctaccagtaccaggtggacagatacacctgcaagacctgcccctacgacatgagacccaccgagaacagaaccggctgcagacccatccccatcatcaagctggagtggggcagcccctgggccgtgctgcccctgttcctggccgtggtgggcatcgccgccaccctgttcgtggtgatcaccttcgtgagatacaacgacacccccatcgtgaaggccagcggcagagagctgagctacgtgctgctggccggcatcttcctgtgctacgccaccaccttcctgatgatcgccgagcccgacctgggcacctgcagcctgagaagaatcttcctgggcctgggcatgagcatcagctacgccgccctgctgaccaagaccaacagaatctacagaatcttcgagcagggcaagagaagcgtgagcgcccccagattcatcagccccgccagccagctggccatcaccttcagcctgatcagcctgcagctgctgggcatctgcgtgtggttcgtggtggaccccagccacagcgtggtggacttccaggaccagagaaccctggaccccagattcgccagaggcgtgctgaagtgcgacatcagcgacctgagcctgatctgcctgctgggctacagcatgctgctgatggtgacctgcaccgtgtacgccatcaagaccagaggcgtgcccgagaccttcaacgaggccaagcccatcggcttcaccatgtacaccacctgcatcgtgtggctggccttcatccccatcttcttcggcaccagccagagcgccgacaagctgtacatccagaccaccaccctgaccgtgagcgtgagcctgagcgccagcgtgagcctgggcatgctgtacatgcccaaggtgtacatcatcctgttccaccccgagcagaacgtgcccaagagaaagagaagcctgaaggccgtggtgaccgccgccaccatgagcaacaagttcacccagaagggcaacttcagacccaacggcgaggccaagagcgagctgtgcgagaacctggaggcccccgccctggccaccaagcagacctacgtgacctacaccaaccacgccatctag

SEQ ID NO: 91626 - protein, 779 aa, Artificial Sequence
  derived and/or modified sequence
MAVPLGAPCWASALPAWAPPGLPHRSLLTRLLSQHVKPAKIPQISYASTAPDLSDNSRYDFFSRVVPSDTYQAQAMVDIVRALKWNYVSTVASEGSYGESGVEAFIQKSREDGGVCIAQSVKIPREPKAGEFDKIIRRLLETSNARAVIIFANEDDIRRVLEAARRANQTGHFFWMGSDSWGSKIAPVLHLEEVAEGAVTILPKRMSVRGFDRYFSSRTLDNNRRNIWFAEFWEDNFHCKLSRHALKKGSHVKKCTNRERIGQDSAYEQEGKVQFVIDAVYAMGHALHAMHRDLCPGRVGLCPRMDPVDGTQLLKYIRNVNFSGIAGNPVTFNENGDAPGRYDIYQYQLRNDSAEYKVIGSWTDHLHLRIERMHWPGSGQQLPRSICSLPCQPGERKKTVKGMPCCWHCEPCTGYQYQVDRYTCKTCPYDMRPTENRTGCRPIPIIKLEWGSPWAVLPLFLAVVGIAATLFVVITFVRYNDTPIVKASGRELSYVLLAGIFLCYATTFLMIAEPDLGTCSLRRIFLGLGMSISYAALLTKTNRIYRIFEQGKRSVSAPRFISPASQLAITFSLISLQLLGICVWFVVDPSHSVVDFQDQRTLDPRFARGVLKCDISDLSLICLLGYSMLLMVTCTVYAIKTRGVPETFNEAKPIGFTMYTTCIVWLAFIPIFFGTSQSADKLYIQTTTLTVSVSLSASVSLGMLYMPKVYIILFHPEQNVPKRKRSLKAVVTAATMSNKFTQKGNFRPNGEAKSELCENLEAPALATKQTYVTYTNHAI

SEQ ID NO: 91627 - DNA, 2319 bp, Artificial Sequence
  derived and/or modified sequence
atggttcagaccttgcccaagctgttcccacacgatggcgcgaagcggaaaaagcgaactctgcgaactagtggcccctgctttggcggggggggtcagatccctcagatctcctatgccagcaccgctcccgatctctctgacaacagccgctatgactttttctcacgggtggtacccagtgatacctatcaggcccaggccatggtggacatcgtccgcgcgctgaagtggaactatgtcagtaccgttgcttcggaggggtcctacggggagtctggcgttgaggcgtttatccagaagagccgggaggatggtggagtgtgtattgcccagagcgtgaaaattccccgagagcccaaagccggcgagttcgataaaattatccggcgtctactggaaacctccaatgcccgcgccgtcatcatcttcgcaaatgaagatgacatacggagagttctcgaagcagccagacgcgccaatcagacagggcatttcttttggatgggatcagattcttggggcagcaagatcgcgccggtgctgcatttagaggaggttgccgaaggcgccgtgactattctgcccaaaaggatgtccgtacgcggatttgatagatactttagcagccggaccctggacaacaaccggcggaacatctggttcgcagagttctgggaagacaatttccactgtaaactgtcaagacacgccctgaagaagggcagccacgtgaaaaaatgtacaaaccgtgagcgaatcggccaggactccgcctatgagcaagaaggaaaggtgcagttcgtcattgatgccgtgtacgcaatggggcacgccttacatgcaatgcatagagatctatgcccagggcgagtaggcctttgtccccgcatggatccagtagacgggacccaacttctgaaatacattaggaatgtcaattttagtggaatcgctggcaacccagtgactttcaacgagaatggcgacgccccgggcagatacgacatctaccagtaccagctgcgcaatgactccgctgagtacaaggtcatcgggtcttggactgatcacctgcatctgaggatcgaaagaatgcactggcctggcagcggccagcagctgccgcggtctatttgttcactgccatgccaaccaggagaacgtaagaagaccgtgaagggtatgccttgctgctggcattgtgagccgtgcaccggctaccagtatcaagtggaccggtatacgtgcaaaacctgcccctatgatatgcgccctactgagaacagaactgggtgcagaccaattccaataatcaagctcgaatggggctccccctgggccgtgctgccactttttttagctgtcgtgggaatagccgctaccctctttgtggtcattacctttgtacgatacaatgacaccccaatagttaaagcttcgggtagggaactgtcctacgtgctgctcgctgggatttttttgtgttatgccaccacattcctaatgattgcagaacccgacctcggaacttgctctctcagacggatctttctcgggctgggtatgagtatttcgtatgccgcactgttgaccaagacgaaccgtatctaccgcatcttcgaacaggggaagcggtctgtttccgctccccggttcatttctccagcttcacagttagccattactttctctctgatcagtctgcagcttttgggcatctgtgtgtggttcgtcgtcgatccgagtcacagcgtcgtggactttcaggatcagcgaaccttagacccaaggttcgcaaggggagtgctcaaatgcgacatttcggatctgtcactcatttgtcttttagggtactcaatgctgcttatggtgacgtgtactgtgtacgcaattaagactcggggcgtcccagagacctttaacgaagctaaaccaatagggttcactatgtacacgacctgtattgtgtggctcgcattcattcccattttctttgggaccagtcagtccgctgacaaactctacatacagactacaaccctgacggtaagcgtttcactgtccgcttcagtgtccttaggcatgctgtacatgcccaaagtttacattatcttattccaccccgagcaaaacgtccccaaaagaaagcgctcactgaaggccgttgttacagcagctactatgagtaataagtttactcagaagggcaattttcgacctaacggggaggccaagagcgagctatgcgagaatttggaagccccagccctcgccaccaagcagacttacgtgacttatacgaaccacgctatttag

SEQ ID NO: 91628 - DNA, 2340 bp, Artificial Sequence
  derived and/or modified sequence
atggccgtcccattgggagccccctgttgggcgagcgctctgcccgcatgggcaccacctggactaccccatagaagtctgctgacgagattgctgtcacagcacgttaagccagctaagattccccaaatttcctacgcctccacagccccagacttgagcgataattctaggtacgactttttctcacgcgtggttccctcagacacctaccaggctcaggcaatggtagacattgtccgcgctctcaaatggaattatgtaagtactgtggcaagcgagggttcctacggtgagtctggcgtcgaggcttttattcagaaatcaagggaggacggaggagtgtgcatcgctcaatccgtcaaaattccccgagaacccaaggccggagagttcgacaagataatccggcgtctgttggagacttctaacgcgcgggcagttattatctttgccaatgaggatgacatccggcgcgtacttgaggctgccaggagggctaatcagactggacactttttctggatgggatccgattcgtggggatccaaaatcgcgccagtcctacatctggaggaggttgccgaaggggccgtgacaatcctgcctaagcggatgtccgtgaggggctttgaccgttatttcagctctaggacgctggacaacaacagaaggaacatctggtttgctgagttttgggaagataacttccactgcaaactgtcacgtcatgccctcaaaaaaggcagccacgttaagaagtgcacaaatcgggaacgtatagggcaggactccgcctacgagcaagaaggaaaggtgcagtttgtcatcgatgccgtttatgccatgggccatgctctgcacgctatgcaccgcgacttatgccctggccgggtgggcctctgtcctcgaatggaccctgtggatgggacccaattgttaaaatatattcgaaacgttaacttctctggtatcgccgggaacccggtgacattcaacgagaatggcgatgcccccggccgatatgacatctatcagtaccagttgcgaaatgactccgcggagtataaggttattgggagttggactgatcacttgcacctgcgtatagaacggatgcattggccaggctcagggcagcagttgccaagaagtatctgcagcctgccgtgccaaccgggggagcgtaaaaagacggtgaaaggaatgccctgttgttggcactgcgagccctgtactggatatcagtaccaagttgatagatacacgtgtaagacctgtccctacgacatgaggcccacagaaaatagaacgggatgtcggcccattcccataattaagctggaatggggcagcccctgggctgtgctaccgctgttccttgccgtcgtcggaatcgccgcaaccctgtttgtcgtaattaccttcgtgcggtataacgatacacctattgtgaaagcgtctgggcgggaactcagttacgtactgttggccggcatatttttatgttacgccacaacattcctcatgatagcggagcccgacctcggtacatgctcattgagaaggatctttttaggactgggaatgagtatttcctatgctgcattactgactaaaactaataggatataccggatctttgaacaaggaaagagaagcgtgtctgcccccagattcatctctccagcctcccaactcgccattactttcagccttatttccctgcagctcctgggtatctgcgtgtggtttgtcgtggacccatctcacagcgtggtggatttccaggaccagcgtactctggatccacgctttgccaggggcgtgctcaaatgtgatatatccgatctttcgctcatatgcctgttaggttactcaatgctgctcatggtgacatgcactgtttacgccatcaaaacacggggagtccccgaaacattcaacgaggcgaaacccattggctttacaatgtacaccacttgcatagtgtggttagcctttatccccatttttttcggcacctcccagtccgcagacaaattgtatattcagaccacgactttgacagtgagtgtttccctcagtgcttctgtgtctctcggcatgctctatatgcccaaagtctatataattctctttcacccagagcaaaacgtccccaaaagaaaaagaagtctaaaagctgtagttactgcagccactatgtctaacaagttcacccaaaagggtaattttaggccaaacggcgaggccaagtctgaactgtgcgagaacctcgaggcccctgctctggccacaaaacaaacgtatgtcacttatactaatcatgccatttag

SEQ ID NO: 91629 - DNA, 2574 bp, Artificial Sequence
  derived and/or modified sequence
aaatgccccagtccttccggctggctgcaagatggtgcaaactcttcccaagctatttccccatgatggcgccaagagaaaaaagaggacccttaggacttcagggccatgctttgggggtggaggacagataccccagatcagctacgcctccacagcgccagacctgagtgacaacagccgctacgacttcttctcccgcgtggtgccctcggacacgtaccaggcccaggccatggtggacatcgtccgtgccctcaagtggaactatgtgtccacagtggcctcggagggcagctatggtgagagcggtgtggaggccttcatccagaagtcccgtgaggacgggggcgtgtgcatcgcccagtcggtgaagataccacgggagcccaaggcaggcgagttcgacaagatcatccgccgcctcctggagacttcgaacgccagggcagtcatcatctttgccaacgaggatgacatcaggcgtgtgctggaggcagcacgaagggccaaccagacaggccatttcttctggatgggctctgacagctggggctccaagattgcacctgtgctgcacctggaggaggtggctgagggtgctgtcacgatcctccccaagaggatgtccgtacgaggcttcgaccgctacttctccagccgcacgctggacaacaaccggcgcaacatctggtttgccgagttctgggaggacaacttccactgcaagctgagccgccacgccctcaagaagggcagccacgtcaagaagtgcaccaaccgtgagcgaattgggcaggattcagcttatgagcaggaggggaaggtgcagtttgtgatcgatgccgtgtacgccatgggccacgcgctgcacgccatgcaccgtgacctgtgtcccggccgcgtggggctctgcccgcgcatggaccctgtagatggcacccagctgcttaagtacatccgaaacgtcaacttctcaggcatcgcagggaaccctgtgaccttcaatgagaatggagatgcgcctgggcgctatgacatctaccaataccagctgcgcaacgattctgccgagtacaaggtcattggctcctggactgaccacctgcaccttagaatagagcggatgcactggccggggagcgggcagcagctgccccgctccatctgcagcctgccctgccaaccgggtgagcggaagaagacagtgaagggcatgccttgctgctggcactgcgagccttgcacagggtaccagtaccaggtggaccgctacacctgtaagacgtgtccctatgacatgcggcccacagagaaccgcacgggctgccggcccatccccatcatcaagcttgagtggggctcgccctgggccgtgctgcccctcttcctggccgtggtgggcatcgctgccacgttgttcgtggtgatcacctttgtgcgctacaacgacacgcccatcgtcaaggcctcgggccgtgaactgagctacgtgctgctggcaggcatcttcctgtgctatgccaccaccttcctcatgatcgctgagcccgaccttggcacctgctcgctgcgccgaatcttcctgggactagggatgagcatcagctatgcagccctgctcaccaagaccaaccgcatctaccgcatcttcgagcagggcaagcgctcggtcagtgccccacgcttcatcagccccgcctcacagctggccatcaccttcagcctcatctcgctgcagctgctgggcatctgtgtgtggtttgtggtggacccctcccactcggtggtggacttccaggaccagcggacactcgacccccgcttcgccaggggtgtgctcaagtgtgacatctcggacctgtcgctcatctgcctgctgggctacagcatgctgctcatggtcacgtgcaccgtgtatgccatcaagacacgcggcgtgcccgagaccttcaatgaggccaagcccattggcttcaccatgtacaccacttgcatcgtctggctggccttcatccccatcttctttggcacctcgcagtcggccgacaagctgtacatccagacgacgacgctgacggtctcggtgagtctgagcgcctcggtgtccctgggaatgctctacatgcccaaagtctacatcatcctcttccacccggagcagaacgtgcccaagcgcaagcgcagcctcaaagccgtcgttacggcggccaccatgtccaacaagttcacgcagaagggcaacttccggcccaacggagaggccaagtctgagctctgcgagaaccttgaggccccagcgctggccaccaaacagacttacgtcacttacaccaaccatgcaatctagcgagtccatggagctgagcagcaggaggaggagccgtgaccctgtggaaggtgcgtcgggccagggccacacccaagggcccagctgtcttgcctgcccgtgggcacccacggacgtggcttggtgctgaggatagcagagcccccagccatcactgctggcagcctgggcaaaccgggtgagcaacaggaggacgaggggccggggcggtgccaggctaccac

SEQ ID NO: 91630 - DNA, 3137 bp, Artificial Sequence
  derived and/or modified sequence
gcagtgcctgacacatcccagtctttcaccgtggtgcctgtggacagatgaggagactgaggctcacaaaggaggtgacttgcccaaggtcacacagcgaggcagcttctcacctatgggagttggactttgagccctccttggaaaagggggcatggctgtgccccttggggctccttgctgggcctctgccctgcctgcctgggctcctcccggcctcccccacagatcactgttgacaaggttactgagtcagcatgtaaaacctgcaaaaataccccagatcagctacgcctccacagcgccagacctgagtgacaacagccgctacgacttcttctcccgcgtggtgccctcggacacgtaccaggcccaggccatggtggacatcgtccgtgccctcaagtggaactatgtgtccacagtggcctcggagggcagctatggtgagagcggtgtggaggccttcatccagaagtcccgtgaggacgggggcgtgtgcatcgcccagtcggtgaagataccacgggagcccaaggcaggcgagttcgacaagatcatccgccgcctcctggagacttcgaacgccagggcagtcatcatctttgccaacgaggatgacatcaggcgtgtgctggaggcagcacgaagggccaaccagacaggccatttcttctggatgggctctgacagctggggctccaagattgcacctgtgctgcacctggaggaggtggctgagggtgctgtcacgatcctccccaagaggatgtccgtacgaggcttcgaccgctacttctccagccgcacgctggacaacaaccggcgcaacatctggtttgccgagttctgggaggacaacttccactgcaagctgagccgccacgccctcaagaagggcagccacgtcaagaagtgcaccaaccgtgagcgaattgggcaggattcagcttatgagcaggaggggaaggtgcagtttgtgatcgatgccgtgtacgccatgggccacgcgctgcacgccatgcaccgtgacctgtgtcccggccgcgtggggctctgcccgcgcatggaccctgtagatggcacccagctgcttaagtacatccgaaacgtcaacttctcaggcatcgcagggaaccctgtgaccttcaatgagaatggagatgcgcctgggcgctatgacatctaccaataccagctgcgcaacgattctgccgagtacaaggtcattggctcctggactgaccacctgcaccttagaatagagcggatgcactggccggggagcgggcagcagctgccccgctccatctgcagcctgccctgccaaccgggtgagcggaagaagacagtgaagggcatgccttgctgctggcactgcgagccttgcacagggtaccagtaccaggtggaccgctacacctgtaagacgtgtccctatgacatgcggcccacagagaaccgcacgggctgccggcccatccccatcatcaagcttgagtggggctcgccctgggccgtgctgcccctcttcctggccgtggtgggcatcgctgccacgttgttcgtggtgatcacctttgtgcgctacaacgacacgcccatcgtcaaggcctcgggccgtgaactgagctacgtgctgctggcaggcatcttcctgtgctatgccaccaccttcctcatgatcgctgagcccgaccttggcacctgctcgctgcgccgaatcttcctgggactagggatgagcatcagctatgcagccctgctcaccaagaccaaccgcatctaccgcatcttcgagcagggcaagcgctcggtcagtgccccacgcttcatcagccccgcctcacagctggccatcaccttcagcctcatctcgctgcagctgctgggcatctgtgtgtggtttgtggtggacccctcccactcggtggtggacttccaggaccagcggacactcgacccccgcttcgccaggggtgtgctcaagtgtgacatctcggacctgtcgctcatctgcctgctgggctacagcatgctgctcatggtcacgtgcaccgtgtatgccatcaagacacgcggcgtgcccgagaccttcaatgaggccaagcccattggcttcaccatgtacaccacttgcatcgtctggctggccttcatccccatcttctttggcacctcgcagtcggccgacaagctgtacatccagacgacgacgctgacggtctcggtgagtctgagcgcctcggtgtccctgggaatgctctacatgcccaaagtctacatcatcctcttccacccggagcagaacgtgcccaagcgcaagcgcagcctcaaagccgtcgttacggcggccaccatgtccaacaagttcacgcagaagggcaacttccggcccaacggagaggccaagtctgagctctgcgagaaccttgaggccccagcgctggccaccaaacagacttacgtcacttacaccaaccatgcaatctagcgagtccatggagctgagcagcaggaggaggagccgtgaccctgtggaaggtgcgtcgggccagggccacacccaagggcccagctgtcttgcctgcccgtgggcacccacggacgtggcttggtgctgaggatagcagagcccccagccatcactgctggcagcctgggcaaaccgggtgagcaacaggaggacgaggggccggggcggtgccaggctaccacaagaacctgcgtcttggaccattgcccctcccggccccaaaccacaggggctcaggtcgtgtgggccccagtgctagatctctccctcccttcgtctctgtctgtgctgttggcgacccctctgtctgtctccagccctgtctttctgttctcttatctctttgtttcaccttttccctctctggcgtccccggctgcttgtactcttggccttttctgtgtctcctttctggctcttgcctccgcctctctctctcatcctctttgtcctcagctcctcctgctttcttgggtcccaccagtgtcacttttctgccgttttctttcctgttctcctctgcttcattctcgtccagccattgctcccctctccctgccacccttccccagttcaccaaaccttacatgttgcaaaagag

SEQ ID NO: 91631 - DNA, 3471 bp, Artificial Sequence
  derived and/or modified sequence
agtaaacatgctcttctctagcacttgggacttcttggtgtcttaggagagacctgaggagctgtgtgtgtgtgtgcacgcacatgtgcgtgtgtgtgcatgcgtgtgtgtgtgttgtgtcctgtggccccaggccagcagggtgcctggcacagagcagccactccttccagagcgtaccctgttctctccagaatgcctgccgcctggccacttgcatcctctgaggactcagcccagtgtcactgcctttgggcagccttccctggcggccatctccctgcccacagggggcgtgtgcatcgcccagtcggtgaagataccacgggagcccaaggcaggcgagttcgacaagatcatccgccgcctcctggagacttcgaacgccagggcagtcatcatctttgccaacgaggatgacatcaggcgtgtgctggaggcagcacgaagggccaaccagacaggccatttcttctggatgggctctgacagctggggctccaagattgcacctgtgctgcacctggaggaggtggctgagggtgctgtcacgatcctccccaagaggatgtccgtacgaggcttcgaccgctacttctccagccgcacgctggacaacaaccggcgcaacatctggtttgccgagttctgggaggacaacttccactgcaagctgagccgccacgccctcaagaagggcagccacgtcaagaagtgcaccaaccgtgagcgaattgggcaggattcagcttatgagcaggaggggaaggtgcagtttgtgatcgatgccgtgtacgccatgggccacgcgctgcacgccatgcaccgtgacctgtgtcccggccgcgtggggctctgcccgcgcatggaccctgtagatggcacccagctgcttaagtacatccgaaacgtcaacttctcaggcatcgcagggaaccctgtgaccttcaatgagaatggagatgcgcctgggcgctatgacatctaccaataccagctgcgcaacgattctgccgagtacaaggtcattggctcctggactgaccacctgcaccttagaatagagcggatgcactggccggggagcgggcagcagctgccccgctccatctgcagcctgccctgccaaccgggtgagcggaagaagacagtgaagggcatgccttgctgctggcactgcgagccttgcacagggtaccagtaccaggtggaccgctacacctgtaagacgtgtccctatgacatgcggcccacagagaaccgcacgggctgccggcccatccccatcatcaagcttgagtggggctcgccctgggccgtgctgcccctcttcctggccgtggtgggcatcgctgccacgttgttcgtggtgatcacctttgtgcgctacaacgacacgcccatcgtcaaggcctcgggccgtgaactgagctacgtgctgctggcaggcatcttcctgtgctatgccaccaccttcctcatgatcgctgagcccgaccttggcacctgctcgctgcgccgaatcttcctgggactagggatgagcatcagctatgcagccctgctcaccaagaccaaccgcatctaccgcatcttcgagcagggcaagcgctcggtcagtgccccacgcttcatcagccccgcctcacagctggccatcaccttcagcctcatctcgctgcagctgctgggcatctgtgtgtggtttgtggtggacccctcccactcggtggtggacttccaggaccagcggacactcgacccccgcttcgccaggggtgtgctcaagtgtgacatctcggacctgtcgctcatctgcctgctgggctacagcatgctgctcatggtcacgtgcaccgtgtatgccatcaagacacgcggcgtgcccgagaccttcaatgaggccaagcccattggcttcaccatgtacaccacttgcatcgtctggctggccttcatccccatcttctttggcacctcgcagtcggccgacaagctgtacatccagacgacgacgctgacggtctcggtgagtctgagcgcctcggtgtccctgggaatgctctacatgcccaaagtctacatcatcctcttccacccggagcagaacgtgcccaagcgcaagcgcagcctcaaagccgtcgttacggcggccaccatgtccaacaagttcacgcagaagggcaacttccggcccaacggagaggccaagtctgagctctgcgagaaccttgaggccccagggagctcataggccactgactccacccaactctggccaggagaaaattcttcctttaactgagctggaccctgaccttcatgcctccctactggtcccatggtggacccctctgctcaccccatcctcaagcagtttgcttcgtccacatgtgatagactgatagttggacaccaaacttctgcctgtgttagtgggcttccagttacactgctgtgacaaagaggtcccagaactgagcagctcaaatcagacagatgtttgttgctctctgccgtaataggacatggtgggtgggtgggagtgaggacccaggatccttccatcttgttgctccattggctccctgaagattgaggctagatgacctcaatggttgttctgctcatggaagggaaaagagaagacgcatgggggaaagacccattttaattgaatgacatgggagctgcacacagtccttccatgtgtatttcatgaggaagaacacagtcagcgctggccaccaaacagacttacgtcacttacaccaaccatgcaatctagcgagtccatggagctgagcagcaggaggaggagccgtgaccctgtggaaggtgcgtcgggccagggccacacccaagggcccagctgtcttgcctgcccgtgggcacccacggacgtggcttggtgctgaggatagcagagcccccagccatcactgctggcagcctgggcaaaccgggtgagcaacaggaggacgaggggccggggcggtgccaggctaccacaagaacctgcgtcttggaccattgcccctcccggccccaaaccacaggggctcaggtcgtgtgggccccagtgctagatctctccctcccttcgtctctgtctgtgctgttggcgacccctctgtctgtctccagccctgtctttctgttctcttatctctttgtttcaccttttccctctctggcgtccccggctgcttgtactcttggccttttctgtgtctcctttctggctcttgcctccgcctctctctctcatcctctttgtcctcagctcctcctgctttcttgggtcccaccagtgtcacttttctgccgttttctttcctgttctcctctgcttcattctcgtccagccattgctcccctctccctgccacccttccccagttcaccaaaccttacatgttgcaaaagagaaaaaaggaaaaaaaatcaaaacacaaaaaagccaaaacg

SEQ ID NO: 91632 - DNA, 2319 bp, Artificial Sequence
  derived and/or modified sequence
atggtgcagaccctgcccaagctgttcccccatgatggagccaagaggaagaagaggaccctgcggaccagcggcccctgcttcggcggcggcggccagatcccccagatctcctatgccagcacagccccagacctgagtgacaacagccgctatgacttcttcagccgggtggtgcccagcgacacctaccaggcccaggccatggtggacatcgtgcgggccctgaagtggaactacgtgtccacagtggccagcgagggcagctatggagagagcggcgtggaggccttcatccagaagagccgggaggatggaggagtgtgcatcgcccagagcgtgaagatcccccgggagcccaaggccggggagtttgacaagatcatccggcggctgctggagaccagcaatgcccgggccgtcatcatctttgccaatgaagatgacatcagaagagtgctggaggccgcccggcgggccaaccagacaggccacttcttctggatgggcagtgacagctggggcagcaagatcgcccctgtgctgcacctggaggaggtggccgagggcgctgtgaccatcctgcccaagaggatgtctgtgcggggctttgaccgctacttcagcagcaggaccctggacaacaacagaagaaacatctggtttgctgagttctgggaggacaacttccactgcaagctgagcagacatgccctgaagaagggcagccacgtgaagaagtgcaccaaccgggagcgcatcggccaggacagcgcctatgagcaggagggcaaggtgcagtttgtgattgatgctgtgtatgccatgggccacgccctgcacgccatgcaccgggacctgtgccccggccgggtgggcctgtgccccaggatggaccctgtggatggcacccagctgctgaagtacatcagaaatgtgaacttcagcggcattgctggcaaccctgtgaccttcaatgaaaatggagatgcccctggccgctatgacatctaccagtaccagctgagaaatgacagcgctgagtacaaggtgattggctcctggacagaccacctgcacctgagaattgaaagaatgcactggccaggcagcggccagcagctgcccaggagcatctgcagcctgccctgccagcccggggagaggaagaagacagtgaagggcatgccctgctgctggcactgtgagccctgcaccggctaccagtaccaggtggaccgctacacctgcaagacctgcccctatgacatgaggcccacagagaacagaacaggctgccggcccatccccatcatcaagctggagtggggcagcccctgggccgtgctgcccctcttcctggccgtggtgggcattgctgccaccctgtttgtggtgatcacctttgtgcgctacaatgacacccccatcgtgaaggccagcggccgggagctgtcctatgtgctgctggccggcatcttcctgtgctacgccaccaccttcctgatgattgctgagccagacctgggcacctgcagcctgcggcgcatcttcctgggcctgggcatgagcatctcctatgctgccctgctgaccaagaccaaccgcatctaccgcatctttgagcagggcaagaggtctgtgtctgccccccgcttcatcagccctgccagccagctggccatcaccttcagcctcatcagcctgcagctgctgggcatctgtgtgtggtttgtggtggaccccagccacagcgtggtggacttccaggaccagaggaccctggaccccaggtttgcccggggcgtgctgaagtgtgacatcagtgacctgagcctcatctgcctgctgggctacagcatgctgctgatggtgacctgcaccgtgtatgccatcaagacccggggcgtgcctgagaccttcaatgaggccaagcccatcggcttcaccatgtacaccacctgcatcgtgtggctggccttcatccccatcttcttcggcaccagccagagcgctgacaagctgtacatccagaccaccaccctgactgtgtctgtgtccctgagcgcctctgtgtccctgggcatgctgtacatgcccaaggtgtacatcatcctcttccaccctgagcagaatgtgcccaagaggaagaggagcctgaaggctgtggtgacagctgccaccatgagcaacaagttcacccagaagggcaacttccggcccaacggggaggccaagtctgagctgtgtgagaacctggaggccccagccctggccaccaagcagacctacgtgacctacaccaaccacgccatctag

SEQ ID NO: 91633 - DNA, 2340 bp, Artificial Sequence
  derived and/or modified sequence
atggctgtgcccctgggcgccccctgctgggccagcgccctgcctgcctgggcccctcctggcctgccccacaggagcctgctgacccggctgctgagccagcacgtgaagccagccaagatcccccagatctcctatgccagcacagccccagacctgagtgacaacagccgctatgacttcttcagccgggtggtgcccagcgacacctaccaggcccaggccatggtggacatcgtgcgggccctgaagtggaactacgtgtccacagtggccagcgagggcagctatggagagagcggcgtggaggccttcatccagaagagcagagaagatggcggcgtgtgcatcgcccagagcgtgaagatcccccgggagcccaaggccggggagtttgacaagatcatccggcggctgctggagaccagcaatgcccgggctgtgatcatctttgccaatgaagatgacatccggcgggtgctggaggccgcccggcgggccaaccagacaggccacttcttctggatgggcagtgacagctggggcagcaagatcgcccctgtgctgcacctggaggaggtggccgagggcgctgtgaccatcctgcccaagaggatgtctgtgcggggctttgaccgctacttcagcagcaggaccctggacaacaacagaagaaacatctggtttgctgagttctgggaggacaacttccactgcaagctgagcagacatgccctgaagaagggcagccacgtgaagaagtgcaccaaccgggagagaattggccaggacagcgcctatgagcaggagggcaaggtgcagtttgtgattgatgctgtgtatgccatgggccacgccctgcacgccatgcaccgggacctgtgccccggccgggtgggcctgtgccccaggatggaccctgtggatggcacccagctgctgaagtacatcagaaatgtgaacttctctggaattgctggcaaccctgtgaccttcaatgaaaatggagatgcccctggccgctatgacatctaccagtaccagctgagaaatgattctgctgagtacaaggtgattggctcctggacagaccacctgcacctgcgcatcgagaggatgcactggccaggcagcggccagcagctgcccaggagcatctgcagcctgccctgccagcctggagagaggaagaagacagtgaagggcatgccctgctgctggcactgtgagccctgcaccggctaccagtaccaggtggaccgctacacctgcaagacctgcccctatgacatgaggcccacagaaaatagaacaggctgccggcccatccccatcatcaagctggagtggggcagcccctgggccgtgctgcccctcttcctggccgtggtgggcattgctgccaccctgtttgtggtgatcacctttgtgcgctacaatgacacccccatcgtgaaggccagcggccgggagctgtcctatgtgctgctggccggcatcttcctgtgctacgccaccaccttcctgatgattgctgagccagacctgggcacctgcagcctgcggcgcatcttcctgggcctgggcatgagcatctcctatgctgccctgctgaccaagaccaaccgcatctaccgcatctttgagcagggcaagaggtctgtgtctgccccccgcttcatcagccctgccagccagctggccatcaccttcagcctcatcagcctgcagctgctgggcatctgtgtgtggtttgtggtggaccccagccacagcgtggtggacttccaggaccagaggaccctggaccccaggtttgcccggggcgtgctgaagtgtgacatcagtgacctgagcctcatctgcctgctgggctacagcatgctgctgatggtgacctgcaccgtgtatgccatcaagacccggggcgtgcctgagaccttcaatgaggccaagcccatcggcttcaccatgtacaccacctgcatcgtgtggctggccttcatccccatcttcttcggcaccagccagagcgctgacaagctgtacatccagaccaccaccctgactgtgtctgtgtccctgagcgcctctgtgtccctgggcatgctgtacatgcccaaggtgtacatcatcctcttccaccctgagcagaatgtgcccaagaggaagaggagcctgaaggctgtggtgacagctgccaccatgagcaacaagttcacccagaagggcaacttccggcccaatggagaggccaagtctgagctgtgtgagaacctggaggccccagccctggccaccaagcagacctacgtgacctacaccaaccacgccatctag

SEQ ID NO: 91634 - DNA, 2319 bp, Artificial Sequence
  derived and/or modified sequence
atggtgcagaccctgcccaagctgttcccccacgacggcgccaagagaaaaaagcgaacgctgagaacctcagggccatgcttcgggggcgggggccagatcccacagataagctatgccagcacggccccagatttgtctgacaatagtcgatatgatttttttagtagagtggtccccagcgatacgtatcaggctcaggctatggtcgatattgtgagggccctgaagtggaactacgtctcaaccgtggccagcgagggctcatatggggaatccggggtcgaagcctttattcagaagtcgcgggaagatggaggggtgtgcatcgctcaaagcgtgaaaatcccccgggagcctaaggcgggggaattcgataagattatcaggcgacttctcgaaaccagcaacgctcgggctgttattattttcgctaacgaagacgacatacgccgtgtcttggaggccgcccggcgggccaatcaaacaggccattttttctggatggggtccgactcctggggaagcaagattgcacctgtcctccacctcgaggaggtcgctgagggggccgtgacaatacttcccaaacggatgtcggtgcgcggttttgatcgatacttcagctctaggacactcgataacaaccgccgaaatatttggtttgccgaattctgggaggacaactttcactgcaagctctctcgtcacgcactcaaaaaggggagccatgtgaaaaaatgcactaaccgcgagagaataggtcaggactctgcctatgaacaagagggcaaggtccaattcgtaatcgatgccgtttatgcgatgggtcacgcccttcatgctatgcacagagacctctgccctggccgcgtgggcctgtgccctcggatggacccagtggacggcacacagctgttgaaatatataaggaatgtcaatttctccgggattgccggaaaccccgtgactttcaatgaaaatggcgatgcacccggcaggtatgatatctatcaatatcagctgagaaacgatagcgctgagtataaagtcataggcagctggactgaccatctccatctgcggatcgaacggatgcactggcccggaagcgggcaacagctgccgcgctcaatctgctcattgccctgtcagcccggcgagaggaaaaaaacggtcaagggaatgccatgttgttggcactgtgagccttgcaccgggtatcagtaccaggtggatcggtacacatgtaaaacttgcccgtatgacatgcgtcccacagaaaatcggaccgggtgcaggcccattcccataatcaaactcgaatgggggagcccttgggccgttctgccgctttttttggcagtcgtcggcattgcagctaccctatttgtcgtcattacattcgtcagatacaatgatactccgatagtgaaagcaagtgggagggaactatcttacgtgcttctcgctggaatctttctctgttatgctaccacatttctgatgattgccgagcctgatttggggacgtgctccctccgaagaatcttccttggtctgggcatgagcatctcatatgcagcactcctaaccaaaaccaatcggatataccggatcttcgagcagggaaagcggtctgtctccgcgcctagattcattagtcctgccagtcagctcgccatcacttttagtcttatctccctgcaattgttgggaatctgcgtttggttcgtggtcgacccgagtcactctgttgtcgattttcaagaccagcgaacattggacccccgcttcgccagaggagtgctcaagtgcgacatcagcgacctaagcctaatctgcttgctgggctactccatgttgctcatggtgacgtgtaccgtctatgctattaagacacgaggtgtgcctgagaccttcaacgaagccaaaccaatcgggtttacaatgtataccacatgcatcgtgtggcttgcctttatcccaattttctttggcacctcacagtccgctgataagctctatatccaaactaccactcttacggtatcagtctcacttagcgcaagcgtcagcttaggcatgctgtacatgcccaaagtgtatataattctctttcaccccgagcaaaatgttccaaaacgcaaaagatcgctaaaggccgtggtgaccgccgcaacaatgtccaataagtttactcagaagggcaactttcgcccaaatggagaggctaagagcgaactgtgtgagaatctagaggcgcctgctctcgctaccaagcagacctatgttacctacaccaaccacgcgatctag

SEQ ID NO: 91635 - DNA, 2340 bp, Artificial Sequence
  derived and/or modified sequence
atggccgtgcccctgggcgccccctgctgggccagcgccctgcccgcgtgggcgccgccaggcttgccccacaggagtctcttaaccaggctcctgagccaacacgtgaagcctgctaagattcctcagatctcttacgcaagtactgcccctgacctaagcgataactctaggtacgactttttcagtcgtgtggtaccgtcagacacgtatcaagcccaagcaatggtggatattgtgagagcactgaaatggaactatgtgagcactgttgcgtctgaggggagctacggcgaatcaggggtcgaagcctttatccaaaagtcacgcgaggacggcggtgtgtgcatagctcaatccgtcaaaatcccacgggaacccaaggctggggagtttgacaaaataatccgcagactgttggaaacgtccaacgcacgggctgtgataatctttgcaaacgaagacgatatccggagagtgcttgaagcagcaaggcgtgcgaaccaaacaggccacttcttctggatggggagtgacagttgggggtctaaaatcgctcctgtgctgcacctggaagaggtcgctgagggggccgtgacaatacttcctaagagaatgtcagtgcgaggcttcgatcgctattttagttccagaaccttggataacaacagacggaacatctggttcgcagagttttgggaggacaactttcactgcaagttatctagacacgccctgaagaagggctcccatgtgaaaaaatgcaccaacagggagagaattggtcaggactcggcatacgaacaggagggcaaagtccagttcgtaatagatgctgtgtatgccatgggacatgccctgcatgcaatgcatcgggacctgtgtcccggacgcgtgggcctctgcccaaggatggatcctgtagatggcacccagctccttaaatacattcgtaatgtgaacttctcaggtatcgctggaaatcctgtcacatttaacgagaatggcgacgccccggggcgctacgacatttaccagtaccagttacgaaatgattccgcagagtataaggtcatcggtagctggaccgatcatcttcatcttcggatcgagcggatgcattggcctggctcaggccaacagttgcccaggtccatttgttccttaccttgccaacctggggaacgaaaaaaaaccgtaaaagggatgccatgttgttggcattgtgaaccgtgcactggataccagtatcaggtcgatcgctatacttgtaaaacttgcccgtatgacatgcgcccaactgagaatcgaaccggatgcaggccaataccgatcattaaacttgaatggggaagcccatgggccgtgctgcctctctttctggctgttgtggggatcgctgcaactttattcgtggttatcacctttgtacgatataacgatacccctatcgttaaggcctctggacgggaactgagctatgtgctgctggctggtattttcttgtgttatgccacgacattcctgatgatcgcggaacccgacttaggcacctgtagcctcagacgcatctttctagggctcggcatgtcaatctcttacgcagcgctgctaaccaagacaaatcgaatttaccgcatatttgaacaggggaaaaggagtgttagtgcgccacgcttcattagccctgcaagtcaacttgctatcactttctctctgatttccctgcaactgttggggatttgcgtttggttcgtagtggacccaagtcatagtgtggtggacttccaggaccaacgtactttagatcctagattcgcaagaggggtcctgaagtgcgacatctctgatctctcactcatttgcctcctcggttatagtatgctgcttatggtcacatgcacagtgtatgcaatcaaaacccgcggtgtccccgagacatttaatgaggccaagcccatcgggttcacgatgtacactacctgcatcgtctggctcgctttcatcccaatcttttttgggacctcacagtctgccgataagctgtacatccagacgacgactctgaccgtctccgtttctttaagtgcctctgtgtctctgggtatgctgtatatgccaaaggtgtacataattctctttcacccggaacaaaatgttcccaaacggaaaaggagcctcaaagctgtcgttacagcggctacaatgtctaataaatttacccaaaagggtaacttcaggccgaacggcgaggctaagtccgagctctgcgaaaatttggaagcgccagccctggctaccaaacaaacttatgtgacttatacgaaccacgctatctag

SEQ ID NO: 91636 - DNA, 2319 bp, Artificial Sequence
  derived and/or modified sequence
atggtgcagactctgccaaagctcttcccgcacgatggcgctaagcggaagaagcgaacgcttcggacgagcgggccttgtttcggtgggggtggccaaatcccacagattagctacgcctctacagcccctgacttgtctgataattcaaggtacgacttcttcagccgggtggtcccctcagacacgtatcaggctcaggccatggtggatattgtccgtgccctgaaatggaactatgtctctaccgtcgcgtctgagggatcatacggagagtccggagtcgaagcatttattcagaaaagccgcgaggatggcggagtgtgtattgctcagagtgtcaaaatcccgagggaacccaaagccggagaattcgacaagatcatcaggcgattactggaaacatctaacgcccgagccgtgatcatttttgcaaatgaagacgacatacgcagagtgctcgaggccgctcgacgtgctaatcagacaggacactttttctggatgggaagcgacagttggggctctaagattgcccctgtcttacatctggaagaagtggctgaaggagcagtgacgatcctgccaaagagaatgagtgtccggggttttgaccgctatttcagctctcgcactttagacaacaaccggaggaacatttggtttgcagagttttgggaagataactttcattgcaagctgagtagacacgccctgaagaagggaagtcacgtcaagaagtgtacaaaccgagaacggataggtcaggattccgcctatgagcaggagggcaaagtccagttcgtgattgatgccgtttatgcaatgggccatgcactgcacgctatgcatagggatctgtgtcccggaagggtgggactgtgcccacgcatggaccccgtggatggcactcagctgctgaaatatattcgcaacgttaacttcagcggaatcgccggtaatccagtcacattcaatgaaaatggggacgcccctggcaggtacgacatatatcagtatcagctgagaaatgactctgccgaatacaaggtcatcggttcgtggacggaccatctgcacttgcgaatcgagcggatgcactggcccggaagtgggcagcaactgccgaggtccatttgctcactaccttgccagcctggcgaacgcaaaaagactgtgaagggcatgccctgctgttggcattgcgagccttgtaccggttaccagtatcaagtagatcgttacacttgcaaaacatgcccatacgatatgcgaccaactgaaaataggactggctgcagacctattccaattattaagcttgagtggggaagcccgtgggcggttttgcctttgttccttgccgtggtcggtattgcagccacattgttcgtagttattacatttgtgagatacaacgatacccctattgtgaaggcctctggcagggaattaagctacgtgttactcgccggtatttttctgtgttacgcaactacctttctgatgatcgctgaacccgatctgggaacatgctccttgagacgcatattcctgggcctcggcatgtccatctcctacgctgccctcctgacaaagaccaacagaatctatagaatctttgaacaaggaaagcggtccgtgtctgcccctcggttcatctccccggctagccagctggccattactttttctctcatttccctgcagttgttggggatatgcgtgtggtttgtcgtggacccttcccacagcgtggttgatttccaagaccagaggacacttgatcctcggttcgctcgcggtgtactgaaatgtgacatcagcgatctttctctaatatgtctgttagggtatagtatgcttctgatggtcacctgcacagtgtacgcaatcaagacccgaggagttccagagacattcaatgaggctaaaccaattgggtttactatgtacaccacatgtatcgtgtggctggccttcatcccaatattctttggcacaagccaatcggcagacaagctctacatacaaacgacaacccttacagtgtccgtcagtttgtctgcatctgtcagtttaggaatgttgtatatgccgaaagtttacattatcttgtttcaccctgaacaaaatgtgcccaaacggaaaagatcactgaaggctgtagtgactgcggcaacaatgtccaataaatttactcagaaggggaactttcggccaaatggagaagcgaagagcgagctttgcgaaaacctagaggccccagcattggcgactaaacagacgtacgtgacttacaccaatcacgccatctag

SEQ ID NO: 91637 - DNA, 2340 bp, Artificial Sequence
  derived and/or modified sequence
atggcagtcccactgggtgccccatgctgggccagcgcattgccagcatgggcaccacctggcctgccacacagaagtctgctgacaaggctccttagccagcacgtgaagcctgcaaaaattccccagataagctatgccagtaccgcccctgaccttagtgacaactctaggtacgatttcttctctagggtagtgccttccgacacctatcaggcccaggccatggtggatatagtacgagcccttaagtggaactacgtatccaccgtcgcctccgaaggaagttatggcgaaagtggagtggaggcctttatacagaagtctcgggaagacgggggtgtgtgtatcgcccagtccgtgaagatacctcgggagccgaaagctggggagtttgacaaaattatacgaagacttctggagaccagtaatgcacgcgcagtgatcatctttgccaacgaagacgacataagacgcgtcctagaggctgctagaagggcaaaccagaccggccactttttttggatggggtccgactcctgggggtctaaaattgcccctgtgctgcacctggaggaagtggccgagggcgctgtcaccatcctacctaaaaggatgagcgtgcggggattcgaccgatacttttcgagcaggacactggataacaaccggcgtaacatctggttcgctgagttctgggaggataactttcattgtaaactgtctaggcatgctctgaaaaaaggttcacacgtcaagaaatgtaccaatagagaacggatcgggcaagactcggcatacgagcaggagggaaaagtacagtttgtgattgacgcagtgtatgccatggggcatgctttacatgctatgcacagggacctttgcccagggcgagtgggtctctgccccagaatggaccctgtggacggtacccagctattaaagtacatccgaaacgtcaattttagcggtatcgctgggaaccccgtgacatttaacgagaacggcgacgcaccaggcaggtatgacatctatcagtaccagttgcgcaatgacagcgctgagtacaaggtcatcggttcttggaccgatcatttacacctccgcattgagaggatgcattggcccggatcaggacaacagctccctcggtcaatatgctccttgccttgccagcctggggaacgcaagaaaacagtgaaggggatgccctgctgttggcactgtgagccgtgcacgggctaccagtaccaggtggatcgctacacctgcaagacttgtccttatgatatgcgacctactgaaaacagaaccggctgccggcctatccccatcattaaactggaatgggggtccccctgggcggtattaccactctttctcgccgtagtggggatcgccgctaccctgttcgtcgtcatcacgttcgtccgctacaatgatactcctatagtgaaggcctccggcagggagctgagctatgttcttctcgccggtatattcttatgttatgcgacaacatttctgatgattgccgagcccgatctgggaacatgcagcctccggagaatatttctcgggctgggaatgtccatctcatacgctgcgctgttaaccaagactaaccgcatttaccgcatttttgagcagggcaagcgctccgtatccgccccacggttcatatctcctgcttcccaactcgctattaccttttccttaattagcctgcaactgctgggaatatgcgtttggtttgttgtggatccctcgcactctgtggtggactttcaggatcagcggaccctcgacccgagattcgctagaggggtgctgaaatgtgacatttctgacctatccttgatttgcctcctcgggtactctatgttgctgatggtgacctgcaccgtctacgctatcaaaactcgaggtgtaccggagacgttcaatgaagccaagcccatcgggttcacgatgtatacaacctgtatagtgtggttggcatttattccgattttctttggcacatcccagagtgcagataaactgtatatccaaaccaccacccttaccgtgagcgtgtctctgtccgcgagtgtgtctctggggatgttgtatatgcctaaggtctacatcattttgttccacccggagcagaatgtccccaagcgcaaacggtctcttaaggctgtggttacagcggctactatgagtaacaagtttacccagaagggaaacttccgccctaacggcgaagctaaatcagaactctgcgaaaacctcgaggccccagcgcttgccactaagcaaacatatgtcacctacacaaatcacgctatttag

SEQ ID NO: 91638 - DNA, 2319 bp, Artificial Sequence
  derived and/or modified sequence
atggtgcagaccctgcccaagctgttcccccacgacggcgccaagagaaagaagagaaccctgagaaccagcggcccctgcttcggcggcggcggccagatcccccagatcagctacgccagcaccgcccccgacctgagcgacaacagcagatacgacttcttcagcagagtggtgcccagcgacacctaccaggcccaggccatggtggacatcgtgagagccctgaagtggaactacgtgagcaccgtggccagcgagggcagctacggcgagagcggcgtggaggccttcatccagaagagcagagaggacggcggcgtgtgcatcgcccagagcgtgaagatccccagagagcccaaggccggcgagttcgacaagatcatcagaagactgctggagaccagcaacgccagagccgtgatcatcttcgccaacgaggacgacatcagaagagtgctggaggccgccagaagagccaaccagaccggccacttcttctggatgggcagcgacagctggggcagcaagatcgcccccgtgctgcacctggaggaggtggccgagggcgccgtgaccatcctgcccaagagaatgagcgtgagaggcttcgacagatacttcagcagcagaaccctggacaacaacagaagaaacatctggttcgccgagttctgggaggacaacttccactgcaagctgagcagacacgccctgaagaagggcagccacgtgaagaagtgcaccaacagagagagaatcggccaggacagcgcctacgagcaggagggcaaggtgcagttcgtgatcgacgccgtgtacgccatgggccacgccctgcacgccatgcacagagacctgtgccccggcagagtgggcctgtgccccagaatggaccccgtggacggcacccagctgctgaagtacatcagaaacgtgaacttcagcggcatcgccggcaaccccgtgaccttcaacgagaacggcgacgcccccggcagatacgacatctaccagtaccagctgagaaacgacagcgccgagtacaaggtgatcggcagctggaccgaccacctgcacctgagaatcgagagaatgcactggcccggcagcggccagcagctgcccagaagcatctgcagcctgccctgccagcccggcgagagaaagaagaccgtgaagggcatgccctgctgctggcactgcgagccctgcaccggctaccagtaccaggtggacagatacacctgcaagacctgcccctacgacatgagacccaccgagaacagaaccggctgcagacccatccccatcatcaagctggagtggggcagcccctgggccgtgctgcccctgttcctggccgtggtgggcatcgccgccaccctgttcgtggtgatcaccttcgtgagatacaacgacacccccatcgtgaaggccagcggcagagagctgagctacgtgctgctggccggcatcttcctgtgctacgccaccaccttcctgatgatcgccgagcccgacctgggcacctgcagcctgagaagaatcttcctgggcctgggcatgagcatcagctacgccgccctgctgaccaagaccaacagaatctacagaatcttcgagcagggcaagagaagcgtgagcgcccccagattcatcagccccgccagccagctggccatcaccttcagcctgatcagcctgcagctgctgggcatctgcgtgtggttcgtggtggaccccagccacagcgtggtggacttccaggaccagagaaccctggaccccagattcgccagaggcgtgctgaagtgcgacatcagcgacctgagcctgatctgcctgctgggctacagcatgctgctgatggtgacctgcaccgtgtacgccatcaagaccagaggcgtgcccgagaccttcaacgaggccaagcccatcggcttcaccatgtacaccacctgcatcgtgtggctggccttcatccccatcttcttcggcaccagccagagcgccgacaagctgtacatccagaccaccaccctgaccgtgagcgtgagcctgagcgccagcgtgagcctgggcatgctgtacatgcccaaggtgtacatcatcctgttccaccccgagcagaacgtgcccaagagaaagagaagcctgaaggccgtggtgaccgccgccaccatgagcaacaagttcacccagaagggcaacttcagacccaacggcgaggccaagagcgagctgtgcgagaacctggaggcccccgccctggccaccaagcagacctacgtgacctacaccaaccacgccatctag

SEQ ID NO: 91639 - DNA, 2340 bp, Artificial Sequence
  derived and/or modified sequence
atggccgtgcccctgggcgccccctgctgggccagcgccctgcccgcctgggccccccccggcctgccccacagaagcctgctgaccagactgctgagccagcacgtgaagcccgccaagatcccccagatcagctacgccagcaccgcccccgacctgagcgacaacagcagatacgacttcttcagcagagtggtgcccagcgacacctaccaggcccaggccatggtggacatcgtgagagccctgaagtggaactacgtgagcaccgtggccagcgagggcagctacggcgagagcggcgtggaggccttcatccagaagagcagagaggacggcggcgtgtgcatcgcccagagcgtgaagatccccagagagcccaaggccggcgagttcgacaagatcatcagaagactgctggagaccagcaacgccagagccgtgatcatcttcgccaacgaggacgacatcagaagagtgctggaggccgccagaagagccaaccagaccggccacttcttctggatgggcagcgacagctggggcagcaagatcgcccccgtgctgcacctggaggaggtggccgagggcgccgtgaccatcctgcccaagagaatgagcgtgagaggcttcgacagatacttcagcagcagaaccctggacaacaacagaagaaacatctggttcgccgagttctgggaggacaacttccactgcaagctgagcagacacgccctgaagaagggcagccacgtgaagaagtgcaccaacagagagagaatcggccaggacagcgcctacgagcaggagggcaaggtgcagttcgtgatcgacgccgtgtacgccatgggccacgccctgcacgccatgcacagagacctgtgccccggcagagtgggcctgtgccccagaatggaccccgtggacggcacccagctgctgaagtacatcagaaacgtgaacttcagcggcatcgccggcaaccccgtgaccttcaacgagaacggcgacgcccccggcagatacgacatctaccagtaccagctgagaaacgacagcgccgagtacaaggtgatcggcagctggaccgaccacctgcacctgagaatcgagagaatgcactggcccggcagcggccagcagctgcccagaagcatctgcagcctgccctgccagcccggcgagagaaagaagaccgtgaagggcatgccctgctgctggcactgcgagccctgcaccggctaccagtaccaggtggacagatacacctgcaagacctgcccctacgacatgagacccaccgagaacagaaccggctgcagacccatccccatcatcaagctggagtggggcagcccctgggccgtgctgcccctgttcctggccgtggtgggcatcgccgccaccctgttcgtggtgatcaccttcgtgagatacaacgacacccccatcgtgaaggccagcggcagagagctgagctacgtgctgctggccggcatcttcctgtgctacgccaccaccttcctgatgatcgccgagcccgacctgggcacctgcagcctgagaagaatcttcctgggcctgggcatgagcatcagctacgccgccctgctgaccaagaccaacagaatctacagaatcttcgagcagggcaagagaagcgtgagcgcccccagattcatcagccccgccagccagctggccatcaccttcagcctgatcagcctgcagctgctgggcatctgcgtgtggttcgtggtggaccccagccacagcgtggtggacttccaggaccagagaaccctggaccccagattcgccagaggcgtgctgaagtgcgacatcagcgacctgagcctgatctgcctgctgggctacagcatgctgctgatggtgacctgcaccgtgtacgccatcaagaccagaggcgtgcccgagaccttcaacgaggccaagcccatcggcttcaccatgtacaccacctgcatcgtgtggctggccttcatccccatcttcttcggcaccagccagagcgccgacaagctgtacatccagaccaccaccctgaccgtgagcgtgagcctgagcgccagcgtgagcctgggcatgctgtacatgcccaaggtgtacatcatcctgttccaccccgagcagaacgtgcccaagagaaagagaagcctgaaggccgtggtgaccgccgccaccatgagcaacaagttcacccagaagggcaacttcagacccaacggcgaggccaagagcgagctgtgcgagaacctggaggcccccgccctggccaccaagcagacctacgtgacctacaccaaccacgccatctag

SEQ ID NO: 91640 - DNA, 722 bp, Artificial Sequence
  derived and/or modified sequence
attttttgcatggccggagtgttcagttttgcatgtgccctcggagttgtgacagccttggggacaccgttgtggatcaaagccactgtcctctgcaaaacgggagctctgctcgtcaatgcctcagggcaggagctggacaagtttatgggtgaaatgcagtacgggcttttccacggagagggtgtgaggcagtgtgggttgggagcaaggccctttcggttctcatgctattttcttgaccccttcatgggactcccaacaggggtaccccatttactcagcctgccctgctcaacctcttgcaggagggagcacacgagtgaacgagtgcaggaaccagctggctgctttagtgctgtgaggagtaaactccatgcaggccctgcagcagcaaccagtttttccagatttgctcaaagcaatcccagtgagcatccacgtcaatgtcattctcttctctgccatccttattgtgttaaccatggtggggacagccttcttcatgtacaatgcttttggaaaaccttttgaaactctgcatggtcccctagggctgtaccttttgagcttcatttcaggctcctgtggctgtcttgtcatgatattgtttgcctctgaagtgaaaatccatcacctctcagaaaaaattgcaaattataaagaagggacttatgtctacaaaacgcaaagtgaaaaatataccacctcattctgggtca

SEQ ID NO: 91641 - DNA, 552 bp, Artificial Sequence
  derived and/or modified sequence
atgaccatgcagttcatcagccacagattccccgaggaccacgaccccaccatcgaggacgcctacaagatcagaatcagaatcgacgacgagcccgccaacctggacatcctggacaccgccggccaggccgagttcaccgccatgagagaccagtacatgagagccggcgagggcttcatcatctgctacagcatcaccgacagaagaagcttccacgaggtgagagagttcaagcagctgatctacagagtgagaagaaccgacgacacccccgtggtgctggtgggcaacaagagcgacctgaagcagctgagacaggtgaccaaggaggagggcctggccctggccagagagttcagctgccccttcttcgagaccagcgccgcctacagatactacatcgacgacgtgttccacgccctggtgagagagatcagaagaaaggagaaggaggccgtgctggccatggagaagaagagcaagcccaagaacagcgtgtggaagagactgaagagccccttcagaaagaagaaggacagcgtgacctag

SEQ ID NO: 91642 - DNA, 552 bp, Artificial Sequence
  derived and/or modified sequence
atgaccatgcagtttatctcacatagatttccagaggaccacgaccccaccatcgaagatgcatacaaaatcaggattcggattgacgatgaaccagcaaatctcgacatcctagacactgcaggacaggccgaattcacagcaatgcgcgatcaatacatgagagccggcgaagggttcattatttgttatagtattaccgataggcgctccttccacgaggtgagagagtttaagcagttaatctacagagttcgccgtaccgacgataccccagttgtcctggtgggaaacaaaagtgatctgaagcagctgagacaagtgaccaaggaggaaggcctggcccttgccagagaattttcatgccctttctttgagacctccgctgcatatagatactacatagatgacgtgttccacgctctggtacgcgaaattcgccgaaaggagaaggaagcggtcctggctatggaaaagaaatccaagcctaagaattcagtgtggaaacgcctgaagagcccgttcagaaaaaagaaagatagcgtgacgtag

SEQ ID NO: 91643 - DNA, 552 bp, Artificial Sequence
  derived and/or modified sequence
atgaccatgcagttcatcagccaccgcttccctgaggaccatgaccccaccattgaagatgcctacaagatccgcatcagaattgatgatgagcccgccaacctggacatcctggacacagctggccaggccgagttcaccgccatgagggaccagtacatgagagctggggagggcttcatcatctgctacagcatcacagacagaagaagcttccacgaggtgcgggagttcaagcagctgatctacagagtgcggaggacagatgacacccctgtggtgctggtgggcaacaagagtgacctgaagcagctgcggcaggtgaccaaggaggagggcctggccctggcccgggagttcagctgccccttctttgagaccagcgctgcctaccgctactacattgatgatgtgttccacgccctggtgcgggagatccggaggaaggagaaggaggccgtgctggccatggagaagaagagcaagcccaagaacagcgtgtggaagaggctgaagagccccttcaggaagaagaaggacagcgtgacctag

SEQ ID NO: 91644 - DNA, 552 bp, Artificial Sequence
  derived and/or modified sequence
atgaccatgcagttcatcagccaccggttccccgaggaccacgacccgacgatcgaagacgcctacaagattaggatacgcattgatgacgagcccgctaacttggacattctggacacagctggacaggccgagtttaccgcaatgcgcgatcagtacatgcgggcaggtgagggttttatcatctgctactcaatcaccgatcgcaggtcttttcacgaggtgcgggagtttaagcagcttatataccgagtgcggcggaccgatgacactccagtcgtgctagtgggaaacaagagcgatctgaagcaacttaggcaggtgacgaaggaagaaggtttagccctggcccgcgaatttagctgcccattctttgagacgagtgctgcctatagatactatatcgatgatgtgttccatgccctggtaagggagatcaggaggaaagaaaaagaagccgtgctcgctatggagaaaaagagcaagcccaagaactctgtttggaagaggctaaagtctccctttaggaaaaagaaagattctgtgacgtag

SEQ ID NO: 91645 - DNA, 552 bp, Artificial Sequence
  derived and/or modified sequence
atgacaatgcagttcatcagccacagattccccgaggatcatgacccaactatcgaggacgcttacaagattagaatccgcatcgacgacgagcccgcaaatcttgatatcctcgatactgctggtcaggctgaattcacagctatgagggatcagtacatgagagccggtgaaggtttcatcatctgctattcaatcactgaccggaggtcattccatgaagtcagggaattcaagcaactgatttaccgagttcgccgaacagacgacacccctgtggtccttgtcgggaataagagtgatcttaagcagctacgtcaggtcaccaaagaggaagggctcgccctggcacgcgagtttagctgcccgttctttgaaactagcgcagcctaccggtactacatcgatgatgtctttcacgcactggttcgtgaaataaggcgtaaggagaaggaagcagtgcttgctatggagaaaaagagcaagccgaaaaatagcgtttggaagaggttaaaatcgccattcagaaaaaaaaaggacagcgtgacctag

SEQ ID NO: 91646 - protein, 236 aa, Artificial Sequence
  derived and/or modified sequence
MERWLFLGATEEGPKRTMDSGTRPVGSCCSSPAGLSREYKLVMLGAGGVGKSAMTMQFISHRFPEDHDPTIEDAYKIRIRIDDEPANLDILDTAGQAEFTAMRDQYMRAGEGFIICYSITDRRSFHEVREFKQLIYRVRRTDDTPVVLVGNKSDLKQLRQVTKEEGLALAREFSCPFFETSAAYRYYIDDVFHALVREIRRKEKEAVLAMEKKSKPKNSVWKRLKSPFRKKKDSVT

SEQ ID NO: 91647 - DNA, 711 bp, Artificial Sequence
  derived and/or modified sequence
atggagagatggctgttcctgggcgccaccgaggagggccccaagagaaccatggacagcggcaccagacccgtgggcagctgctgcagcagccccgccggcctgagcagagagtacaagctggtgatgctgggcgccggcggcgtgggcaagagcgccatgaccatgcagttcatcagccacagattccccgaggaccacgaccccaccatcgaggacgcctacaagatcagaatcagaatcgacgacgagcccgccaacctggacatcctggacaccgccggccaggccgagttcaccgccatgagagaccagtacatgagagccggcgagggcttcatcatctgctacagcatcaccgacagaagaagcttccacgaggtgagagagttcaagcagctgatctacagagtgagaagaaccgacgacacccccgtggtgctggtgggcaacaagagcgacctgaagcagctgagacaggtgaccaaggaggagggcctggccctggccagagagttcagctgccccttcttcgagaccagcgccgcctacagatactacatcgacgacgtgttccacgccctggtgagagagatcagaagaaaggagaaggaggccgtgctggccatggagaagaagagcaagcccaagaacagcgtgtggaagagactgaagagccccttcagaaagaagaaggacagcgtgacctag

SEQ ID NO: 91648 - DNA, 711 bp, Artificial Sequence
  derived and/or modified sequence
atggagagatggctgttcctgggggccacggaggaagggcccaaacgcaccatggattccggaactcgccctgttggaagctgctgctcttctccagccggtttgtctagagaatacaagctggtgatgcttggtgccggaggagtgggcaagagcgcaatgaccatgcagtttatttctcaccggtttcctgaagatcatgaccccacgatagaggacgcctataaaatcaggataaggatcgatgatgaacccgcaaacctggacattctggataccgcggggcaagctgaattcaccgccatgcgagaccagtacatgcgcgctggggagggatttataatttgctattctatcacagaccggcgcagtttccacgaggtgagggagttcaaacaactaatctatagagtaagacgaacggacgatacccctgtcgtgctggtaggcaacaaaagcgatctgaagcagttgaggcaggtgaccaaggaagaggggctggccttggcaagggagttctcatgccctttttttgaaaccagcgctgcttatcggtactatattgatgatgtcttccatgccctggtgcgggagatccggcgcaaggaaaaggaggctgtgctggctatggaaaaaaagtccaaacccaaaaattcggtttggaaacgccttaaaagccctttccggaagaagaaggactctgtgacttag

SEQ ID NO: 91649 - DNA, 711 bp, Artificial Sequence
  derived and/or modified sequence
atggagcgctggctgttcctgggcgccacagaggagggccccaagaggaccatggacagcggcaccaggcctgtgggcagctgctgcagcagccctgctggcctgagccgggagtacaagctggtgatgctgggcgctgggggcgtgggcaagagcgccatgaccatgcagttcatcagccaccgcttcccagaagatcatgaccccaccattgaagatgcctacaagatccgcatcagaattgatgatgagcccgccaacctggacatcctggacacagctggccaggccgagttcaccgccatgagggaccagtacatgagagctggggagggcttcatcatctgctacagcatcacagaccggcgctccttccacgaggtgcgggagttcaagcagctgatctacagagtgagaagaacagatgacacccctgtggtgctggtgggcaacaagagtgacctgaagcagctgcggcaggtgaccaaggaggagggcctggccctggcccgggagttcagctgccccttctttgagaccagcgctgcctaccgctactacattgatgatgtgttccacgccctggtgcgggagatccggaggaaggagaaggaggccgtgctggccatggagaagaagagcaagcccaagaacagcgtgtggaagaggctgaagagccccttcaggaagaagaaggacagcgtgacctag

SEQ ID NO: 91650 - DNA, 711 bp, Artificial Sequence
  derived and/or modified sequence
atggagcggtggctgttcctgggcgccaccgaggagggccccaagagaacaatggactccggcactcgacccgtgggcagttgctgttcttccccagccggactttctcgagagtacaaactggtgatgctgggggcagggggggttggaaaatctgccatgacaatgcagttcatctcacatcgtttccctgaagaccacgatccaacaatcgaggacgcttataagattagaattaggattgatgatgaacccgctaatttggacatcctggacactgctgggcaagccgagttcaccgccatgcgggaccagtacatgcgggctggcgaaggcttcatcatatgttattcgatcaccgatcgaaggagtttccacgaggtgcgcgaatttaagcagctcatttaccgggttcgccgcaccgatgataccccagttgtccttgtcggcaacaagtccgacctgaagcaactgcgacaggttaccaaagaggagggattggccctggctcgggagttctcctgtcccttcttcgagacctccgcagcctacagatactatatagatgacgtttttcacgccctggtgagggagatccggcgcaaggagaaggaggcagtgttggcaatggagaagaagtctaagccaaaaaactcagtgtggaagcgcttgaagtctccgttcaggaaaaaaaaagactccgtcacatag

SEQ ID NO: 91651 - DNA, 711 bp, Artificial Sequence
  derived and/or modified sequence
atggagcgctggctgttcctgggcgctacagaagagggtcctaagcggacaatggactctgggacgagacccgtgggaagttgctgttcctctcccgcaggactgtctcgggaatataagctggtgatgctgggtgccggtggggtgggaaagagtgccatgactatgcaatttatttctcatcggttccctgaggatcatgacccaacaatcgaggacgcctataagatcaggatcaggatcgatgacgagcccgctaacctggatatcctggacacggcaggccaggccgaattcacggccatgcgcgatcagtacatgagggcaggagagggattcatcatttgttacagtatcacggatcgtagaagcttccacgaggtgagagaattcaagcaattaatctacagggtgcgccgaactgacgacacacccgtggtgctggtcggcaacaagtcggacctgaagcagttacggcaagtgaccaaagaggaaggactggccctggcgcgagagttcagctgccccttctttgaaacatctgccgcttatcgttattatattgacgacgtgtttcatgccctggtacgggagattagaaggaaagagaaagaggctgtgctggcaatggaaaaaaagtctaaaccaaagaattcagtgtggaaacggctcaaaagcccttttcggaagaagaaagacagcgtgacctag

SEQ ID NO: 91652 - DNA, 855 bp, Artificial Sequence
  derived and/or modified sequence
ccagagtaagagggacaggccagaatatgtatggaaaggtggcttttcctcggggcaaccgaggaaggccccaagaggacaatggattctggaactcgcccagttggtagctgctgtagcagccccgctgggctctcacgggagtacaaactagtgatgctgggtgctggtggtgtagggaagagtgccatgaccatgcagttcatcagccaccgattcccagaagatcatgatcccaccattgaagatgcttataagatcaggatccgtattgatgatgagcctgccaatctggacattttggatacagctggacaggcagagtttacagccatgcgggaccagtatatgagggcaggagaagggtttatcatctgttactctatcacggatcgtcgaagtttccatgaagttcgtgagtttaaacagcttatttatcgagtccgacgtactgacgatacacctgtggttcttgtgggaaacaagtcagacctcaaacagctaagacaggtcaccaaggaagaaggattggccttggcccgagaattcagctgtcccttttttgagacatctgctgcataccgctactatattgatgatgttttccatgcccttgtacgggagatacgtaggaaagaaaaggaggcagtactggccatggagaaaaaatctaagcccaaaaacagtgtatggaagaggctaaaatcaccattccggaagaagaaagattcagtaacttgaagagaagatgtgaagtgtttatctgtgaactgcagtgctgtatcaaagcagtccagtaacctgcagtactgagtatggtgcttgctctttcacttaactgataagagggacatg

SEQ ID NO: 91653 - DNA, 3445 bp, Artificial Sequence
  derived and/or modified sequence
gcgactcgggcgccggtggcgccatcttactcggttgcgggaggggtcacaggtcagtgccggagcctccgcgagtgaaggaagacgaagtgcgtgacccgaccggctgtggtgttccagtccccactgaccagtaggagcagcagggcgtcggcttgtgaggtggcttttcctcggggcaaccgaggaaggccccaagaggacaatggattctggaactcgcccagttggtagctgctgtagcagccccgctgggctctcacgggagtacaaactagtgatgctgggtgctggtggtgtagggaagagtgccatgaccatgcagttcatcagccaccgattcccagaagatcatgatcccaccattgaagatgcttataagatcaggatccgtattgatgatgagcctgccaatctggacattttggatacagctggacaggcagagtttacagccatgcgggaccagtatatgagggcaggagaagggtttatcatctgttactctatcacggatcgtcgaagtttccatgaagttcgtgagtttaaacagcttatttatcgagtccgacgtactgacgatacacctgtggttcttgtgggaaacaagtcagacctcaaacagctaagacaggtcaccaaggaagaaggattggccttggcccgagaattcagctgtcccttttttgagacatctgctgcataccgctactatattgatgatgttttccatgcccttgtacgggagatacgtaggaaagaaaaggaggcagtactggccatggagaaaaaatctaagcccaaaaacagtgtatggaagaggctaaaatcaccattccggaagaagaaagattcagtaacttgaagagaagatgtgaagtgtttatctgtgaactgcagtgctgtatcaaagcagtccagtaacctgcagtactgagtatggtgcttgctctttcacttaactgataagagggacatgcctactaggagtttttaatgatgtggtatttaaagtattgtctcttagttaagtatgatttattaacccagtggagcactgtctgcttttaaattgtcacattagaatttgttctaccaatgttttgggttctgttgcgctattaattaatgtaaatttgtttatacccaggagaatatgtataccatgtgtgtttgactaagttcacaagggaagtttttggctctgcactccacattatcctttaatttcaatttcctgggactatcccagagaaagacctcagtctcttctattcacactatgcttcctagagacagaacaaaaatcatgtagggaaattggggctaatgagatcagtgccaaatttcagcagatacctgtgaggctgacacctgttgcagactatggagtggtgagatttgggaaagttgggctatatgtttgcagggacttaaaaaggtaggttcagaacagtattctcagtacaagcttcgcttttctaagaagtacacatttggcccaaattcaccgggataagtgagaacagccagaagcataaaatgtgatgaaggtttctcctgggaaccttattttactcttcatttcagggttttctttttttttttaccttcaaaggtagacattttgggaatcataactgtattactaaacgtgtttaatcaaaattcatagttggatcagccattgccttgtacaggtttattttttccccacagacgcacacaccaacacatttatattcattgcttcctcccactttgtgctctgtaaaagagctacagctggcaagatgttttttcggcccttcatcactgattgcattttccatacagaagagacatcaggggtgtgggtaaaattgtgtgtgtgcctccttgacgtggacaatcactagactcagtgctctgagaaaatctgctatttctgttgaatgggtcagtcttaaagctttaaaattcacataggtggagtttcccatctgaagatttctttacaaggactttgctaagttcatctcagggttatctgagccttgaccaagtttatcctaagggaataccactttgctccctgtgcatagtttaggaactgtagtcctaggaggaaacagctttaaatattggtagtgagttgtctaagatcaggactgttttgatatctgaccttgttatatgcggagagtaaatgcaaaaatgctaagagtaatgcatcatgtattgaatattaagtgtcactgaagcaatgtttgtgttgactagaaacgtaagatgacttgtgtagcacctctttataagcacacagctcatcttaatattttccatttttattagaggaagtaggacagagttgtgtttttctttataaacaaatgataaactagcttttttaaaaagtgactgttagaacttttttagctctgagtagtggtccctttttaaactcctggaaacatttttgttaccaaataaatcatgttttatggtactcagccatccaaaagtgaaagacctagcatttgattctgtgcaggacacaaatctcacaggaactatagcactttggaaaagcatcaaagtagaaaagaaatacagtgcaattctattatgagaatgttttacatttaaactggtttagcaccttttaagtttaaagcccatagcttcttattactagtgacctagggaattgttattaacattaagagatatatatatatatatatatatatatttttttttttttttttttttttttttaaatagagatgaggtttcactatgttgcccaggctgatctcgaactcctaggctcaagcaatcctcccaatatgctgggattacaggcatgagccaccacctggcccaagcaagaaattgacactatatagttatttaaggtagtcaggcagtagaaacattgccagaaggatagaaaggaatttggattatatataaggaaaataacaaatcggtgtttttaagactatcactgtcatatattagatccttgtattagtccatccattaatattagttctattcgtggtgctaggtagcttgacaggtatgatatgcataagtcatagctctattcttagtgtcataaagtgtagctaatttataagctctaagtaatcagctttatctaatttgagggcattaaaattactgcctagaactttgagaagagaaaaattcagggataagttgaaaggcactggaactgttcatgtccataccagaccggtaaattataagatccagatgttagtgtctagaattagctgtttagaattcagaggggacatatgttttaactttgtcatatattagcaagaattggtctactgtgatgtttggggaggaggagggggggataatttttttaatgcacttgtatgtgaagacagtttgtatgacataatacaaaacttttaaacaa

SEQ ID NO: 91654 - protein, 485 aa, Artificial Sequence
  derived and/or modified sequence
MAPTIQTQAQREDGHRSGVVCRVKYCNSLPDIPFDPKFITYPFDQNRFVQYKATSLEKQHKHDLLTEPDLGVTIDLINPDTYRIDPNVLLDPADEKLLEEEIQAPTSSKRSQQHAKVVPWMRKTEYISTEFNRYGISNEKPEVKIGVSVKQQFTEEEIYKDRDSQITAIEKTFEDAQKSISQHYSKPRVTPVEVMPVFPDFKMWINPCAQVIFDSDPAPKDTSGAAALEMMSQAMIRGMMDEEGNQFVAYFLPVEETLKKRKRDQEEEMDYAPDDVYDYKIAREYNWNVKNKASKGYEENYFFIFREGDGVYYNELETRVRLSKRRAKAGVQSGTNALLVVKHRDMNEKELEAQEARKAQLENHEPEEEEEEEMETEEKEAGGSVMLILRTMPTLMMRTEDRPKVAVTMIQTAAAMGVASGAGATAAAPVPSPVAASTRPRRMAVKLQLLIPVKLIVTVTESQGIQGWFRHHYCEQQSTFLVVCL

SEQ ID NO: 91655 - protein, 462 aa, Artificial Sequence
  derived and/or modified sequence
MAPTIQTQAQREDGHRSGVVCRVKYCNSLPDIPFDPKFITYPFDQNRFVQYKATSLEKQHKHDLLTEPDLGVTIDLINPDTYRIDPNVLLDPADEKLLEEEIQAPTSSKRSQQHAKVVPWMRKTEYISTEFNRYGISNEKPEVKIGVSVKQQFTEEEIYKDRDSQITAIEKTFEDAQKSMWINPCAQVIFDSDPAPKDTSGAAALEMMSQAMIRGMMDEEGNQFVAYFLPVEETLKKRKRDQEEEMDYAPDDVYDYKIAREYNWNVKNKASKGYEENYFFIFREGDGVYYNELETRVRLSKRRAKAGVQSGTNALLVVKHRDMNEKELEAQEARKAQLENHEPEEEEEEEMETEEKEAGGSVMLILRTMPTLMMRTEDRPKVAVTMIQTAAAMGVASGAGATAAAPVPSPVAASTRPRRMAVKLQLLIPVKLIVTVTESQGIQGWFRHHYCEQQSTFLVVCL

SEQ ID NO: 91656 - DNA, 1458 bp, Artificial Sequence
  derived and/or modified sequence
atggcccccaccatccagacccaggcccagagagaggacggccacagaagcggcgtggtgtgcagagtgaagtactgcaacagcctgcccgacatccccttcgaccccaagttcatcacctaccccttcgaccagaacagattcgtgcagtacaaggccaccagcctggagaagcagcacaagcacgacctgctgaccgagcccgacctgggcgtgaccatcgacctgatcaaccccgacacctacagaatcgaccccaacgtgctgctggaccccgccgacgagaagctgctggaggaggagatccaggcccccaccagcagcaagagaagccagcagcacgccaaggtggtgccctggatgagaaagaccgagtacatcagcaccgagttcaacagatacggcatcagcaacgagaagcccgaggtgaagatcggcgtgagcgtgaagcagcagttcaccgaggaggagatctacaaggacagagacagccagatcaccgccatcgagaagaccttcgaggacgcccagaagagcatcagccagcactacagcaagcccagagtgacccccgtggaggtgatgcccgtgttccccgacttcaagatgtggatcaacccctgcgcccaggtgatcttcgacagcgaccccgcccccaaggacaccagcggcgccgccgccctggagatgatgagccaggccatgatcagaggcatgatggacgaggagggcaaccagttcgtggcctacttcctgcccgtggaggagaccctgaagaagagaaagagagaccaggaggaggagatggactacgcccccgacgacgtgtacgactacaagatcgccagagagtacaactggaacgtgaagaacaaggccagcaagggctacgaggagaactacttcttcatcttcagagagggcgacggcgtgtactacaacgagctggagaccagagtgagactgagcaagagaagagccaaggccggcgtgcagagcggcaccaacgccctgctggtggtgaagcacagagacatgaacgagaaggagctggaggcccaggaggccagaaaggcccagctggagaaccacgagcccgaggaggaggaggaggaggagatggagaccgaggagaaggaggccggcggcagcgtgatgctgatcctgagaaccatgcccaccctgatgatgagaaccgaggacagacccaaggtggccgtgaccatgatccagaccgccgccgccatgggcgtggccagcggcgccggcgccaccgccgccgcccccgtgcccagccccgtggccgccagcaccagacccagaagaatggccgtgaagctgcagctgctgatccccgtgaagctgatcgtgaccgtgaccgagagccagggcatccagggctggttcagacaccactactgcgagcagcagagcaccttcctggtggtgtgcctgtag

SEQ ID NO: 91657 - DNA, 867 bp, Artificial Sequence
  derived and/or modified sequence
atggccaccggccccatccccaccggcctgtgcctgagaggcctggagtggagcgccgagagcagcaccgccatcgccagcctgatcagccccagcacccccagcagcagccccacccccagcaccagaaccgtgctgctggaccccgccgacgagaagctgctggaggaggagatccaggcccccaccagcagcaagagaagccagcagcacgccaaggtggtgccctggatgagaaagaccgagtacatcagcaccgagttcaacagatacggcatcagcaacgagaagcccgaggtgaagatcggcgtgagcgtgaagcagcagttcaccgaggaggagatctacaaggacagagacagccagatcaccgccatcgagaagaccttcgaggacgcccagaagagcatcagccagcactacagcaagcccagagtgacccccgtggaggtgatgcccgtgttccccgacttcaagatgtggatcaacccctgcgcccaggtgatcttcgacagcgaccccgcccccaaggacaccagcggcgccgccgccctggagatgatgagccaggccatgatcagaggcatgatggacgaggagggcaaccagttcgtggcctacttcctgcccgtggaggagaccctgaagaagagaaagagagaccaggaggaggagatggactacgcccccgacgacgtgtacgactacaagatcgccagagagtacaactggaacgtgaagaacaaggccagcaagggctacgaggagaactacttcttcatcttcagagagggcgacggcgtgtactacaacgagctggagaccagcatccagtacagccacatgctgtacaacctggtggcctag

SEQ ID NO: 91658 - DNA, 1458 bp, Artificial Sequence
  derived and/or modified sequence
atggcccccacaatacagacacaggcacagcgagaagatggccacagatctggggtggtttgcagagttaagtattgtaattctctgccagacatccccttcgatcctaaatttatcacttatccattcgatcagaatcgctttgtccaatacaaagctacatctctcgagaagcagcataaacacgatttgcttaccgagcccgacttgggcgttaccatcgacctaattaacccagatacataccgcattgaccctaatgtcctgctggaccccgccgacgagaagctgctggaggaggaaatccaggcacctacaagttccaaacgcagtcagcagcatgcaaaggttgttccctggatgcggaaaaccgaatatatctcaaccgagtttaataggtacggtatcagtaatgagaagccggaagttaagataggagtaagcgtgaagcaacaatttaccgaggaagagatttacaaagaccgagattcccaaattacagccatcgagaaaacctttgaagacgcccagaagagcataagccagcactatagtaagccccgagtaacgcctgtggaggtcatgcccgtgttccccgatttcaaaatgtggatcaacccctgtgcacaggtcatctttgatagtgaccccgcccctaaggataccagcggggccgccgctttggagatgatgagccaggccatgattcggggcatgatggatgaggagggaaatcagttcgtcgcctactttctgccagttgaggagacacttaaaaaacgaaagagagaccaggaagaagagatggattatgcgcctgacgatgtatacgactacaaaatcgcgcgtgaatacaactggaatgtgaagaataaggcaagtaaaggatacgaggaaaactatttctttattttccgagagggtgacggagtctactataacgaactggagactagagtcaggctgagcaaacgccgtgctaaggcaggtgtgcaatctgggaccaacgcactgctcgtggtcaagcaccgagacatgaatgaaaaagaattggaggctcaggaggcccgaaaggctcagttggagaatcatgagcccgaagaggaggaagaggaggagatggagacggaagagaaagaggctggaggtagcgttatgcttatattaaggactatgccgaccctaatgatgcggaccgaggatcggcctaaagtggcagtgacaatgattcagacagccgcggccatgggcgtggcgagtggtgccggggcgactgccgcggcaccggttccctcccctgtagccgcatcaacacgcccaaggcggatggccgttaaactccagctgctaatccctgtgaaactgatcgtcacagtaacggagtcccagggcattcaaggttggtttcggcaccattactgcgaacagcaaagcacgttcctggtggtttgcctgtag

SEQ ID NO: 91659 - DNA, 867 bp, Artificial Sequence
  derived and/or modified sequence
atggctacgggacccattccaacagggctatgtctgcgtgggcttgagtggagtgccgaaagcagtaccgccatcgcctcattaatttccccttctacgccttctagtagccccacaccatcgacaagaactgttttactggaccctgcagacgaaaagctgttggaagaggagattcaggcccctaccagttctaagcggagccagcagcatgctaaggtagtgccatggatgcgcaagactgagtacattagtaccgagtttaatcgctacggcatctcaaatgaaaaaccagaagtcaagatcggagtgtcagttaagcagcaattcactgaggaggagatctacaaggacagagactcccaaattacagcaatagaaaaaactttcgaggacgcccagaaatctattagtcaacattattcaaaacctcgggtcacgccagtcgaggttatgcctgtattccctgacttcaaaatgtggattaacccctgcgcacaagtgatcttcgactctgaccctgcccctaaagacactagcggcgcggcagccctggaaatgatgagtcaggctatgatccgcggaatgatggatgaggagggcaaccaatttgtggcatatttcctccccgtagaagagactctcaagaagagaaagagagatcaggaagaggaaatggattacgcccccgatgatgtctacgattataagatagcccgggagtacaactggaacgttaagaataaagcaagcaagggctatgaggaaaactattttttcatttttcgcgaaggcgatggggtatactataacgagcttgagacctctatccaatattcccacatgctctacaacctggtggcgtag

SEQ ID NO: 91660 - DNA, 1458 bp, Artificial Sequence
  derived and/or modified sequence
atggcccccaccatccagacccaggcccagcgggaggatggccacaggtctggagtggtgtgccgggtgaagtactgcaacagcctgcctgacatcccctttgaccccaagttcatcacctacccctttgaccagaacagatttgtgcagtacaaggccaccagcctggagaagcagcacaagcatgacctgctgacagagccagacctgggcgtgaccatcgacctgatcaacccagacacctacagaattgaccccaacgtgctgctggaccctgcagatgagaagctgctggaggaggagatccaggcccccaccagcagcaagaggagccagcagcacgccaaggtggtgccctggatgaggaagacagagtacatcagcacagagttcaacagatatggcatcagcaatgagaagccagaggtgaagattggagtgtctgtgaagcagcagttcacagaggaggagatctacaaggaccgggacagccagatcacagccatcgagaagacctttgaagatgcccagaagagcatcagccagcactacagcaagccccgggtgacccctgtggaggtgatgcctgtgtttcctgacttcaagatgtggatcaacccctgtgcccaggtgatctttgacagcgaccctgcccccaaggacaccagcggggccgccgccctggagatgatgagccaggccatgatccggggcatgatggatgaggagggcaaccagtttgtggcctacttcctgcctgtggaggagaccctgaagaagaggaagagggaccaggaggaggagatggactatgccccagatgatgtgtatgactacaagatcgcccgggagtacaactggaatgtgaagaacaaggccagcaagggctatgaggagaactacttcttcatcttccgggagggagatggagtgtactacaatgagctggagaccagggtgcggctgagcaagagaagagccaaggccggcgtgcagagcggcaccaatgccctgctggtggtgaagcaccgggacatgaatgagaaggagctggaggcccaggaggccaggaaggcccagctggagaaccacgagcctgaggaggaggaggaggaggagatggagacagaggagaaggaggccggcggctctgtgatgctgatcctgcggaccatgcccaccctgatgatgaggacagaggaccggcccaaggtggccgtgaccatgatccagacagctgctgccatgggcgtggccagcggggccggggccacagctgctgcccctgtgcccagccctgtggccgccagcacccggcccaggaggatggctgtgaagctgcagctgctgatccctgtgaagctgattgtgacagtgacagagagccagggcatccagggctggttccgccaccactactgtgagcagcagagcaccttcctggtggtgtgcctgtag

SEQ ID NO: 91661 - DNA, 867 bp, Artificial Sequence
  derived and/or modified sequence
atggccaccggccccatccccaccggcctgtgcctgcggggcctggagtggagcgctgagagcagcacagccatcgccagcctcatcagccccagcacccccagcagcagccccacccccagcaccaggacagtgctgctggaccctgcagatgagaagctgctggaggaggagatccaggcccccaccagcagcaagaggagccagcagcacgccaaggtggtgccctggatgaggaagacagagtacatcagcacagagttcaacagatatggcatcagcaatgagaagccagaggtgaagattggagtgtctgtgaagcagcagttcacagaggaggagatctacaaggaccgggacagccagatcacagccatcgagaagacctttgaagatgcccagaagagcatcagccagcactacagcaagccccgggtgacccctgtggaggtgatgcctgtgtttcctgacttcaagatgtggatcaacccctgtgcccaggtgatctttgacagcgaccctgcccccaaggacaccagcggggctgctgccctggagatgatgagccaggccatgatccggggcatgatggatgaggagggcaaccagtttgtggcctacttcctgcctgtggaggagaccctgaagaagaggaagagggaccaggaggaggagatggactatgccccagatgatgtgtatgactacaagatcgcccgggagtacaactggaatgtgaagaacaaggccagcaagggctatgaggagaactacttcttcatcttccgggagggagatggagtgtactacaatgagctggagaccagcatccagtacagccacatgctgtacaacctggtggcctag

SEQ ID NO: 91662 - DNA, 1458 bp, Artificial Sequence
  derived and/or modified sequence
atggcccccaccatccagacccaggcccagcgggaggacggccaccgcagtggggtcgtatgcagagtgaaatactgtaactccctgcctgacattccgtttgaccccaagtttataacataccctttcgatcagaatcggttcgtgcagtacaaggccacctcactggagaagcagcataagcacgatctcttaacagaacccgacttgggcgtgaccatcgacctgattaatccagacacttaccggatagacccaaatgtgttgctggacccagctgatgaaaagcttctggaggaagaaatacaagctccgacctccagcaagaggagccaacagcacgcaaaagtggtgccctggatgagaaagacggagtacatcagcaccgaattcaacagatacgggatttctaacgagaaacccgaagtaaagatcggggtgtcagtcaagcagcaattcacagaggaggagatatataaggaccgcgactctcagattaccgccattgagaaaacgttcgaggacgcacagaagtccattagccagcactattcaaaaccccgagtgaccccagttgaggtaatgcctgtgttccctgactttaagatgtggatcaacccatgcgcccaagtgatcttcgactcagatcccgctcccaaggacacttccggggctgccgcactggaaatgatgtcccaggctatgattaggggcatgatggacgaggagggaaatcaattcgtggcatacttcttgcccgtggaagaaaccctaaaaaaaaggaagcgggaccaagaagaagagatggactatgcacccgacgacgtttatgattataagatcgctagagaatacaactggaacgtcaaaaacaaggcgagcaagggctatgaagaaaattattttttcattttccgagaaggcgacggagtctactataacgaactcgagacacgagtccgcctgtctaaacgcagggcaaaggcaggagtacagtcaggcaccaatgccctcctagttgtgaagcacagggacatgaacgaaaaagaattagaagcccaagaggcaagaaaagctcagctggaaaaccacgaacccgaagaggaagaagaggaagaaatggaaacagaggaaaaggaggccggcgggtcggtcatgctgatcctccgtacaatgccgactttgatgatgaggacggaggatcgccctaaggtcgcggtcactatgatccagactgccgctgccatgggagtagcatctggtgctggagcgaccgcagcagctccagtgccaagccctgttgccgcatcaactcggcctagacgaatggcggtgaaactccaattactcatacccgtgaaattgatagtcaccgtgacggagtctcaggggatccaggggtggttccgacaccactattgcgaacagcaaagcaccttcctggtggtgtgtctgtag

SEQ ID NO: 91663 - DNA, 867 bp, Artificial Sequence
  derived and/or modified sequence
atggccaccggccccatccccaccggcctgtgcctgcggggcctggaatggagcgctgagtcttccactgctattgctagtctgataagcccatccacgcccagctctagcccgactccctccacacgcaccgttctgctggaccctgcggacgaaaaattgttggaagaagaaattcaagcgccgactagcagcaaacgttctcagcagcatgcaaaggtcgtaccgtggatgaggaaaacagagtatataagcaccgagtttaataggtacggtatcagcaacgagaaacctgaagtgaagatcggcgtttcggtgaagcaacagtttactgaagaggaaatctacaaggatcgcgatagtcaaatcactgcaatcgagaaaacgtttgaggatgctcaaaagtccatttcacaacactactctaaacccagggttacacctgtcgaagtcatgcccgtgtttccggattttaagatgtggatcaacccctgcgcacaagtgatattcgactctgaccctgcgccaaaggacacctcaggcgctgccgctcttgaaatgatgtctcaggctatgatcaggggcatgatggacgaagaggggaaccagtttgtcgcctactttcttccggttgaggaaaccctcaagaagcgtaagagagaccaggaggaggagatggattacgcacctgacgatgtgtatgactataaaatcgctagagagtataattggaacgtcaaaaacaaggcttccaagggctatgaagagaactacttcttcatattcagagaaggggatggagtgtactacaatgaattagaaacctcgatacagtattcacatatgctgtacaatttggtggcctag

SEQ ID NO: 91664 - DNA, 1810 bp, Artificial Sequence
  derived and/or modified sequence
ttcatttccccgaaggcgtcgcggcctgaggagacccgttgggtcctcagcgtcttggcggcagttggtggaaccggagcttcgagtccgtccccggtgctgcctgcgcgttcacctgagtctcgctggagctcttctcgcccgcccacctcatctcaacccactttccgcggggagcggcgccaagctgggccttcctcggatcaggcgtcccctgaagtcggcacgcccctctgcgtcccccttcggtcccgctaggaccccgtccgggctgccgtcgcctcgtcgctatggcgcccaccatccagacccaggcccagcgggaggatggccacaggtctggagtggtctgccgagtcaagtactgcaatagcctccctgatatccccttcgaccccaagttcatcacctaccccttcgaccagaacaggttcgtccagtacaaagccacttccttggagaaacagcacaaacatgacctcctgactgagccagacctgggggtcaccatcgatctcatcaatcctgacacctaccgcatcgaccccaatgttcttctagatccagctgatgagaaacttttggaagaggagattcaggcccccaccagctccaagagatcccagcagcacgcgaaggtggtgccatggatgcgaaagacagagtacatctccactgagttcaaccgttatggcatctccaatgagaagcctgaggtcaagattggggtttctgtgaagcagcagtttaccgaggaagaaatatacaaagacagggatagccagatcacagccattgagaagacttttgaggatgcccagaaatcaatctcacagcattacagcaaaccccgagtcacaccggtggaggtcatgcctgtcttcccagactttaagatgtggatcaatccatgtgctcaggtgatctttgactcagacccagcccccaaggacacgagtggtgcagctgcgttggagatgatgtctcaggccatgattaggggcatgatggatgaggaagggaaccagtttgtggcctatttcctgcctgtagaagagacgttgaagaaacgaaagcgggaccaggaggaggagatggactatgcaccagatgatgtgtatgactacaaaattgctcgggagtacaactggaacgtgaagaacaaagctagcaagggctatgaggaaaactacttcttcatcttccgagagggtgacggggtttactacaatgagttggaaaccagggtccgccttagtaagcgccgggccaaggctggggttcagtcaggcaccaacgccctgcttgtggtcaaacatcgggacatgaatgagaaggaactggaagctcaggaggcacggaaggcccagctagaaaaccacgaaccggaggaggaagaggaagaggagatggagacagaagagaaagaagctgggggctcagtgatgctgattctgaggacgatgccgactctgatgatgaggacagaggacaggcccaaggtggcagtgacaatgattcagacagcggcagcaatgggggtggccagcggagccggagccacagccgcagcgccagtcccttccccagtggcagcgagcactcggcccaggaggatggcagtgaagctgcagcttctgattccagtgaagctgatagtgacagtgactgagtcccagggcattcagggctggttcagacaccattattgtgagcagcaaagcacttttctagtggtctgtttgtgagcctttcacttgtttgttccccacccccaaacctttgctgttaataaagtcaacttctcttt

SEQ ID NO: 91665 - DNA, 1631 bp, Artificial Sequence
  derived and/or modified sequence
agcgtcttggcggcagttggtggaaccggagcttcgagtccgtccccggtgctgcctgcgcgttcacctgagtctcgctggagctcttctcgcccgcccacctcatctcaacccactttccgcggggagcggcgccaagctgggccttcctcggatcaggcgtcccctgaagtcggcacgcccctctgcgtcccccttcggtcccgctaggaccccgtccgggctgccgtcgcctcgtcgctatggcgcccaccatccagacccaggcccagcgggaggatggccacaggtctggagtggtctgccgagtcaagtactgcaatagcctccctgatatccccttcgaccccaagttcatcacctaccccttcgaccagaacaggttcgtccagtacaaagccacttccttggagaaacagcacaaacatgacctcctgactgagccagacctgggggtcaccatcgatctcatcaatcctgacacctaccgcatcgaccccaatgttcttctagatccagctgatgagaaacttttggaagaggagattcaggcccccaccagctccaagagatcccagcagcacgcgaaggtggtgccatggatgcgaaagacagagtacatctccactgagttcaaccgttatggcatctccaatgagaagcctgaggtcaagattggggtttctgtgaagcagcagtttaccgaggaagaaatatacaaagacagggatagccagatcacagccattgagaagacttttgaggatgcccagaaatcaatgtggatcaatccatgtgctcaggtgatctttgactcagacccagcccccaaggacacgagtggtgcagctgcgttggagatgatgtctcaggccatgattaggggcatgatggatgaggaagggaaccagtttgtggcctatttcctgcctgtagaagagacgttgaagaaacgaaagcgggaccaggaggaggagatggactatgcaccagatgatgtgtatgactacaaaattgctcgggagtacaactggaacgtgaagaacaaagctagcaagggctatgaggaaaactacttcttcatcttccgagagggtgacggggtttactacaatgagttggaaaccagggtccgccttagtaagcgccgggccaaggctggggttcagtcaggcaccaacgccctgcttgtggtcaaacatcgggacatgaatgagaaggaactggaagctcaggaggcacggaaggcccagctagaaaaccacgaaccggaggaggaagaggaagaggagatggagacagaagagaaagaagctgggggctcagtgatgctgattctgaggacgatgccgactctgatgatgaggacagaggacaggcccaaggtggcagtgacaatgattcagacagcggcagcaatgggggtggccagcggagccggagccacagccgcagcgccagtcccttccccagtggcagcgagcactcggcccaggaggatggcagtgaagctgcagcttctgattccagtgaagctgatagtgacagtgactgagtcccagggcattcagggctggttcagacaccattattgtgagcagcaaagcacttttctagtggtctgtttgtga

SEQ ID NO: 91666 - DNA, 1387 bp, Artificial Sequence
  derived and/or modified sequence
gttgggtcctcagcgtcttggcggcagttggtggaaccggagcttcgagtccgtccccggtgctgcctgcgcgttcacctgagtctcgctggagctcttctcgcccgcccacctcatctcaacccactttccgcggggagcggcgccaagctgggccttcctcggatcaggcgtcccctgaagtcggcacgcccctctgcgtcccccttcggtcccgctaggaccccgtccgggctgccgtcgcctcgtcgctatggcgcccaccatccagacccaggcccagcgggaggatggccacaggcccaattcccaccggactctgcctgagaggtctggagtggtctgccgagtcaagtactgcaatagcctccctgatatccccttcgaccccaagttcatcacctaccccttcgaccagaacagttcttctagatccagctgatgagaaacttttggaagaggagattcaggcccccaccagctccaagagatcccagcagcacgcgaaggtggtgccatggatgcgaaagacagagtacatctccactgagttcaaccgttatggcatctccaatgagaagcctgaggtcaagattggggtttctgtgaagcagcagtttaccgaggaagaaatatacaaagacagggatagccagatcacagccattgagaagacttttgaggatgcccagaaatcaatctcacagcattacagcaaaccccgagtcacaccggtggaggtcatgcctgtcttcccagactttaagatgtggatcaatccatgtgctcaggtgatctttgactcagacccagcccccaaggacacgagtggtgcagctgcgttggagatgatgtctcaggccatgattaggggcatgatggatgaggaagggaaccagtttgtggcctatttcctgcctgtagaagagacgttgaagaaacgaaagcgggaccaggaggaggagatggactatgcaccagatgatgtgtatgactacaaaattgctcgggagtacaactggaacgtgaagaacaaagctagcaagggctatgaggaaaactacttcttcatcttccgagagggtgacggggtttactacaatgagttggaaaccagtattcagtacagtcacatgctgtacaaccttgtagcctaggagcaataggctacaccattacagcctagggtccgccttagtaagcgccgggccaaggctggggttcagtcaggcaccaacgccctgcttgtggtcaaacatcgggacatgaatgagaaggaactggaagctcaggaggcacggaaggcccagctagaaaaccacgaaccggaggaggaagaggaagaggagatggagacagaagagaaagaagctgggggctcaggtaa

SEQ ID NO: 91667 - DNA, 1458 bp, Artificial Sequence
  derived and/or modified sequence
atggcccctaccatccagacacaggctcaacgggaggacggccaccgatctggagtggtgtgcagggtgaagtattgtaactcgcttccagacattccattcgatccaaaatttatcacctacccatttgaccaaaacaggtttgtccagtacaaagcgacttcgctggaaaagcagcacaagcacgacctgctcaccgaacctgatcttggcgtcaccatcgacctcattaatcccgatacgtaccgaattgatcctaacgtgttgctggatcctgctgatgagaagctgttggaggaagaaattcaggcccctacctccagcaaaagaagccagcagcacgctaaggtggtgccatggatgagaaaaactgaatatatatcaacagaattcaatagatacggcataagtaatgagaagccagaggtcaagatcggggtgagcgtgaagcagcaatttactgaagaagagatctataaggatcgcgactcccaaattaccgccatcgaaaagacctttgaggatgcacagaaatcgatctctcagcactactccaaacctagggtcactcccgtcgaagtgatgccagtctttccggactttaaaatgtggataaacccttgcgcacaggtgatttttgatagtgatcctgcaccaaaagatacatctggggctgcagcactcgagatgatgtcacaggctatgatcagaggcatgatggacgaggagggaaaccaatttgtagcctactttttacccgtggaagagacactcaaaaagagaaagcgggatcaggaggaggagatggattatgctcctgacgatgtgtacgattacaagattgccagggagtataactggaacgtgaaaaacaaagccagcaagggctacgaagaaaactatttcttcatctttcgcgaaggcgacggcgtttactacaacgaactggaaacacgggtgcgcctcagcaaaagaagagccaaggccggtgtgcagtccgggaccaatgcgctgctggtggtaaagcaccgtgacatgaacgagaaggagctcgaagctcaggaggccaggaaggcccaattagaaaaccacgaaccagaggaagaggaggaggaggagatggagaccgaagagaaggaagcaggcggttccgtgatgctgattctgcggacaatgccaaccttaatgatgaggaccgaggatcggcctaaagtggcagtaactatgatacagacggctgccgctatgggggtggccagtggtgctggggcaaccgcggcagccccagtcccctctccagtggccgcaagtacccgtcctcggaggatggcagtcaagctccagttactcatccctgttaagctgatagtgacagttacggagtcacagggtattcagggctggtttagacaccactattgcgagcagcaatcaacttttctcgtggtgtgcctctag

SEQ ID NO: 91668 - DNA, 867 bp, Artificial Sequence
  derived and/or modified sequence
atggccacaggaccaatacctacaggtttatgtctgcgcggtctagaatggtcagccgagtcctccacagccatagccagcctgatttctccatctaccccaagctcatcccccacgccttccaccagaactgtgctcttggatcccgcagatgagaagctgctggaagaagaaatccaagctcccaccagtagtaagcgatcgcagcagcatgccaaggtagtgccatggatgagaaaaacggaatacatctcaacagaattcaataggtatggcatttccaatgagaagccggaggtgaaaataggggtctctgttaaacagcagtttaccgaggaggaaatctacaaagatcgcgatagccagataacagcaatcgagaaaacattcgaagacgcccagaagtctataagtcagcactattcaaagccaagagtcacccccgtggaggtgatgcctgtatttcctgactttaaaatgtggatcaacccctgtgctcaagtgattttcgactcagatcccgcacccaaggatacaagcggagctgcagctcttgaaatgatgagccaggcaatgattagggggatgatggacgaggagggcaatcagtttgttgcctatttcctgcccgtagaagaaaccctgaagaaacgcaaaagggaccaagaagaagagatggactacgcccctgatgacgtctacgactacaaaatcgctcgggagtataattggaacgtcaaaaacaaggcatcgaaaggctacgaagagaactatttcttcattttccgggagggggacggcgtatattataacgagctcgagacatcaatccaatactcccatatgctgtataatctggtggcttag

SEQ ID NO: 91669 - DNA, 1389 bp, Artificial Sequence
  derived and/or modified sequence
atggcccccaccatccagacccaggcccagagagaggacggccacagaagcggcgtggtgtgcagagtgaagtactgcaacagcctgcccgacatccccttcgaccccaagttcatcacctaccccttcgaccagaacagattcgtgcagtacaaggccaccagcctggagaagcagcacaagcacgacctgctgaccgagcccgacctgggcgtgaccatcgacctgatcaaccccgacacctacagaatcgaccccaacgtgctgctggaccccgccgacgagaagctgctggaggaggagatccaggcccccaccagcagcaagagaagccagcagcacgccaaggtggtgccctggatgagaaagaccgagtacatcagcaccgagttcaacagatacggcatcagcaacgagaagcccgaggtgaagatcggcgtgagcgtgaagcagcagttcaccgaggaggagatctacaaggacagagacagccagatcaccgccatcgagaagaccttcgaggacgcccagaagagcatgtggatcaacccctgcgcccaggtgatcttcgacagcgaccccgcccccaaggacaccagcggcgccgccgccctggagatgatgagccaggccatgatcagaggcatgatggacgaggagggcaaccagttcgtggcctacttcctgcccgtggaggagaccctgaagaagagaaagagagaccaggaggaggagatggactacgcccccgacgacgtgtacgactacaagatcgccagagagtacaactggaacgtgaagaacaaggccagcaagggctacgaggagaactacttcttcatcttcagagagggcgacggcgtgtactacaacgagctggagaccagagtgagactgagcaagagaagagccaaggccggcgtgcagagcggcaccaacgccctgctggtggtgaagcacagagacatgaacgagaaggagctggaggcccaggaggccagaaaggcccagctggagaaccacgagcccgaggaggaggaggaggaggagatggagaccgaggagaaggaggccggcggcagcgtgatgctgatcctgagaaccatgcccaccctgatgatgagaaccgaggacagacccaaggtggccgtgaccatgatccagaccgccgccgccatgggcgtggccagcggcgccggcgccaccgccgccgcccccgtgcccagccccgtggccgccagcaccagacccagaagaatggccgtgaagctgcagctgctgatccccgtgaagctgatcgtgaccgtgaccgagagccagggcatccagggctggttcagacaccactactgcgagcagcagagcaccttcctggtggtgtgcctgtag

SEQ ID NO: 91670 - DNA, 1389 bp, Artificial Sequence
  derived and/or modified sequence
atggcccctaccatccaaacacaagcccagagagaggatggccatcgttcaggcgtagtatgtcgagtcaagtactgcaactcactcccagacatacctttcgaccccaagtttatcacttacccgtttgatcaaaatcggtttgtgcagtataaggccacatcgctggagaaacagcataaacacgatcttctcaccgagccagacttgggggttacaatcgatcttattaaccctgatacgtacaggattgatcctaacgtgcttctagacccagccgacgagaagctactggaggaggaaatccaagcccctaccagctctaagcgctcacagcagcatgcaaaggtcgtaccctggatgcgtaagacagagtatatatctactgagtttaacagatatggcatttctaacgaaaaaccggaggttaaaataggcgtctctgtgaagcagcagtttacagaggaggaaatctacaaggatagggactcccagataactgcaatcgaaaagaccttcgaggatgcccagaagtcgatgtggattaacccatgtgcgcaggtcatttttgacagcgacccagccccgaaggacacatcaggtgcagcagcccttgaaatgatgtcacaggcgatgattcggggaatgatggatgaagaaggcaatcagtttgtagcctactttttgccagtcgaagaaaccctcaagaagcgcaaacgagaccaggaggaggaaatggactacgccccagacgatgtgtatgactacaagatagctagagagtacaactggaacgtcaaaaacaaagccagcaagggttatgaagagaattacttctttatttttagggaaggtgacggagtgtactacaacgagcttgaaacccgggttaggctctccaaaaggcgcgccaaggcaggcgtgcaatctgggactaacgccctgctcgtggtgaagcacagggatatgaacgaaaaagagctggaggcgcaagaggctagaaaggctcaattggagaaccacgagccagaagaggaggaggaggaggaaatggagacagaagaaaaggaggccggtggaagcgtgatgcttatcctgaggactatgcccacactcatgatgagaaccgaagatcgacccaaagtggccgtcacaatgattcaaaccgccgcagccatgggagtcgccagtggcgcaggcgcaacagcagcagctcccgtgcctagccctgtggccgctagtactcgtcccagacgcatggctgtgaagctgcagcttctgattcccgttaaactaattgtgaccgtcactgaatcgcagggcatccagggatggttccggcatcactattgtgaacagcagagcacctttcttgtagtgtgcctatag

SEQ ID NO: 91671 - DNA, 1389 bp, Artificial Sequence
  derived and/or modified sequence
atggcccccaccatccagacccaggcccagcgggaggatggccacaggtctggagtggtgtgccgggtgaagtactgcaacagcctgcctgacatcccctttgaccccaagttcatcacctacccctttgaccagaacagatttgtgcagtacaaggccaccagcctggagaagcagcacaagcatgacctgctgacagagccagacctgggcgtgaccatcgacctgatcaacccagacacctacagaattgaccccaacgtgctgctggaccctgcagatgagaagctgctggaggaggagatccaggcccccaccagcagcaagaggagccagcagcacgccaaggtggtgccctggatgaggaagacagagtacatcagcacagagttcaacagatatggcatcagcaatgagaagccagaggtgaagattggagtgtctgtgaagcagcagttcacagaggaggagatctacaaggaccgggacagccagatcacagccatcgagaagacctttgaagatgcccagaagtccatgtggatcaacccctgtgcccaggtgatctttgacagcgaccctgcccccaaggacaccagcggggctgctgccctggagatgatgagccaggccatgatccggggcatgatggatgaggagggcaaccagtttgtggcctacttcctgcctgtggaggagaccctgaagaagaggaagagggaccaggaggaggagatggactatgccccagatgatgtgtatgactacaagatcgcccgggagtacaactggaatgtgaagaacaaggccagcaagggctatgaggagaactacttcttcatcttccgggagggagatggagtgtactacaatgagctggagaccagggtgcggctgagcaagaggcgggccaaggccggcgtgcagagcggcaccaatgccctgctggtggtgaagcaccgggacatgaatgagaaggagctggaggcccaggaggccaggaaggcccagctggagaaccacgagcctgaggaggaggaggaggaggagatggagacagaggagaaggaggccggcggctctgtgatgctgatcctgcggaccatgcccaccctgatgatgaggacagaagatcggcccaaggtggccgtgaccatgatccagacagctgctgccatgggcgtggccagcggggccggggccacagctgctgcccctgtgcccagccctgtggccgccagcacccggcccaggaggatggctgtgaagctgcagctgctgatccctgtgaagctgattgtgacagtgacagagagccagggcatccagggctggttccgccaccactactgtgagcagcagagcaccttcctggtggtgtgcctgtag

SEQ ID NO: 91672 - DNA, 1389 bp, Artificial Sequence
  derived and/or modified sequence
atggcccccaccatccagacccaggcccagcgggaggacggccaccggtccggggtggtatgccgagtcaagtactgcaattctctgcccgatattccattcgaccctaagttcataacttatcccttcgaccagaatcggtttgtgcaatataaggcaactagccttgagaaacagcacaaacatgatctgttgaccgagccagacctgggtgtcacaatcgacctgatcaacccagacacataccggattgatcctaacgtgctgctggatccagcagatgaaaaactgctggaggaggagatccaggccccgacctctagcaagaggtcccaacagcacgccaaggtggtcccatggatgcgcaagactgaatacattagcacggagtttaataggtatgggatttccaatgaaaaaccagaggtgaaaattggcgttagcgttaaacagcaattcaccgaggaggaaatttacaaggaccgggatagtcagatcactgcaatcgagaaaaccttcgaggacgcccaaaaaagcatgtggatcaatccttgcgctcaggtcatcttcgactcagatcccgcccccaaggatacatccggggccgcagcactcgaaatgatgtcacaggctatgattagaggtatgatggatgaggagggtaatcagtttgttgcttatttcctgcctgttgaagagacccttaaaaaaagaaagcgcgatcaggaagaggaaatggactatgccccagacgacgtctatgactacaaaattgcccgtgagtacaactggaatgttaagaacaaggcctccaaggggtacgaagaaaactactttttcattttcagggagggcgacggagtttactataacgaattagaaacacgggtgagactttcaaaacgtagggccaaagctggcgtgcagtcagggacaaacgcactgctggtggttaaacaccgggacatgaacgagaaggagctggaagcccaggaggcacgcaaggcacaattggaaaaccacgaacccgaagaagaggaggaagaagaaatggagactgaagaaaaggaggccggagggtccgtcatgctgatactgcgtaccatgccgaccttaatgatgcgcacggaagacagacccaaggtggctgtgaccatgatccagaccgctgccgccatgggcgtggccagcggcgctggtgcgactgccgcagctcctgtgcctagccccgtggccgcatcgacacggccccggagaatggccgtcaaactgcagcttctaatccctgtgaagcttatcgtgacggtcaccgaatcgcaaggaatacagggatggtttaggcatcattactgcgaacagcagtctactttcctggtcgtgtgtctgtag

SEQ ID NO: 91673 - DNA, 1389 bp, Artificial Sequence
  derived and/or modified sequence
atggcacccacaatccagacccaggcccaaagggaggatggacaccgctctggcgtagtgtgcagagttaagtactgcaactcactgccagacatcccattcgatccgaaattcattacgtacccgttcgaccagaaccggtttgtgcagtacaaggcgactagtctagaaaaacagcataagcacgacctccttaccgaacccgatctgggtgtaacaatcgacctgatcaacccagacacttacagaattgacccgaacgtgttactggatccggcagatgagaagttgctcgaagaagagatccaggcccctacctcgtcaaaaagaagccagcagcatgcgaaagtggttccttggatgcgaaagactgagtacatatctacagaattcaaccgctacggaatctcgaacgagaaaccagaggtgaaaatcggtgtgagtgtgaaacagcaatttacagaagaggagatatacaaagatcgcgactcacaaattaccgctatagagaagaccttcgaagatgcacaaaagagcatgtggatcaatccttgcgcacaggtgatcttcgacagcgatcccgctcccaaagacaccagcggtgcagccgctctggaaatgatgagtcaagcaatgatccgcggaatgatggacgaggaaggcaatcaatttgtggcctactttctccccgtcgaggagacacttaagaagcggaaacgggatcaagaggaggagatggactatgcacccgatgacgtctacgactataaaatcgctcgggaatacaattggaacgtaaagaacaaggcctctaaaggctacgaggagaactacttcttcattttccgtgagggtgacggcgtgtactataatgaacttgaaactcgcgtccgcctctctaagcgtcgggctaaggctggggtccagtcaggaacgaacgccctgttggtggttaaacacagagacatgaacgagaaggagttggaggcccaagaagccagaaaagcccaacttgagaaccatgagccagaggaagaagaggaagaggagatggagacagaagaaaaagaagccggtggaagcgtgatgctcattctgagaactatgccaactctgatgatgaggaccgaagatcgacccaaggtcgctgttacaatgatccagactgcggctgctatgggggtagcaagtggggctggcgcaacagcagccgctccggtgcccagccccgtggccgcatcgactcgacccaggagaatggctgtgaagctgcaactgctcataccggtcaagctgatcgtgaccgtaaccgagagccagggcatccagggctggttcagacatcattactgcgaacaacagtctacgttcctggtggtgtgcctttag

SEQ ID NO: 91674 - protein, 562 aa, Artificial Sequence
  derived and/or modified sequence
MPIQIFCSMSFSSGEEAPGPLGDIWGPHHHQQQQDISESEEEEEEKEKEAVRKEASEGHSPMDLVAFANSCTLHGTNHIFVEGGPGPRQVLWAVAFVLALGAFLCQVGDRVAYYLSYPHVTLLNEVATTELAFPAVTLCNTNAVRLSQLSYPDLLYLAPMLGLDESDDPGVPLAPPGPEAFSGEPFNLHRFYNRSCHRLEDMLLYCSYQGGPCGPHNFSVVFTRYGKCYTFNSGRDGRPRLKTMKGGTGNGLEIMLDIQQDEYLPVWGETDETSFEAGIKVQIHSQDEPPFIDQLGFGVAPGFQTFVACQEQRLIYLPPPWGTCKAVTMDSDLDFFDSYSITACRIDCETRYLVENCNCRMVHMPGDAPYCTPEQYKECADPALDFLVEKDQEYCVCEMPCNLTRYGKELSMVKIPSKASAKYLAKKFNKSEQYIGENILVLDIFFEVLNYETIEQKKAYEIAGLLGDIGGQMGLFIGASILTVLELFDYAYEVIKHKLCRRGKCQKEAKRSSADKGVALSLDDVKRHNPCESLRGHPAGMTYAANILPHHPARGTFEDFTC

SEQ ID NO: 91675 - DNA, 1689 bp, Artificial Sequence
  derived and/or modified sequence
atgcctatccagattttctgcagtatgtcctttagctccggcgaagaagccccaggtcctctgggggatatttggggcccccatcatcaccagcaacagcaggatatatcagagtcggaggaggaggaggaggagaaagagaaggaggccgtgcgcaaagaggccagcgaaggccatagtcccatggatctggtagcgttcgcaaattcgtgcacactgcacgggacaaaccacatattcgtggagggtggccccggcccccgacaggtcctctgggccgtcgcctttgtgttggctttgggcgcgtttttgtgccaggtcggtgatcgcgttgcatactatctgtcatacccccatgtgaccttactcaatgaagtcgctacaactgagctcgcgttcccagccgtgaccctttgcaataccaatgcagtcaggttatcacagctcagctaccccgaccttctctatctggctcccatgcttggtctggatgaatccgacgacccgggagtcccacttgctccacccgggcccgaagccttctctggcgaaccttttaacctgcaccgattttacaacagatcctgccaccgcctagaggacatgctgttgtattgttcttaccaaggagggccatgtgggccacacaacttttctgtggtgtttactaggtacgggaagtgctacacattcaattcaggacgagacgggagaccgcgactgaaaaccatgaaaggaggtactggaaatggattagagataatgttggatatacagcaggatgaatacctccctgtgtggggggagacagatgagacaagcttcgaggctggcatcaaagtgcagatccacagccaggacgagccgcccttcatcgatcaactcgggtttggggttgcaccaggatttcagactttcgtggcctgtcaggaacaacgcctcatatatctcccgccaccgtgggggacctgcaaagctgtcacaatggactccgatcttgacttcttcgattcctattccattacagcctgccggatcgactgtgaaactcgatatttagtggagaactgtaactgcaggatggtgcacatgcccggagatgccccgtattgcaccccggagcagtataaagagtgcgctgaccctgcattggattttctcgtcgagaaggaccaggagtactgtgtgtgtgagatgccttgtaacctaactagatacgggaaggaactgtcgatggttaagatcccttccaaggcctctgccaagtaccttgcaaagaagtttaacaagagcgaacaatatataggtgagaatatactggtgctggatatcttctttgaggtcttgaactacgaaactatcgaacagaagaaggcctacgagattgctggtttgctcggcgacataggcgggcagatgggccttttcataggagcaagcattctgaccgtgctcgagctgttcgattatgcctatgaggttataaaacacaagctatgccggcgcggcaaatgccaaaaagaggccaagcgatcgtccgccgataagggagtggctctctctctcgacgacgttaagcggcacaatccttgcgaaagtctacgcggacaccccgccgggatgacttatgcggcgaacattctgccccaccaccccgccagaggaacctttgaggatttcacatgttag

SEQ ID NO: 91676 - DNA, 1689 bp, Artificial Sequence
  derived and/or modified sequence
atgcccatccagatcttctgcagcatgtccttcagcagtggagaggaggcccctggccccctgggggacatctggggcccccaccaccaccagcagcagcaggacatcagcgagagcgaggaggaggaggaggagaaggagaaggaggccgtgaggaaggaggccagcgagggccacagccccatggacctggtggcctttgccaacagctgcaccctgcacggcaccaaccacatctttgtggagggcggccctggcccccggcaggtgctgtgggccgtggcctttgtgctggccctgggcgccttcctgtgccaggtgggggacagagtggcctactacctgagctacccccacgtgaccctgctgaatgaggtggccaccacagagctggccttccctgctgtgaccctgtgcaacaccaatgctgtgcggctgagccagctgagctacccagacctgctgtacctggcccccatgctgggcctggatgaaagtgatgatcctggggtgcccctggcccctcctggccctgaggccttcagcggggagcccttcaacctgcaccgcttctacaacagaagctgccaccggctggaggacatgctgctgtactgcagctaccagggcggcccctgtggcccccacaacttctctgtggtgttcaccaggtatggcaagtgctacaccttcaacagcggcagagatggccggccccggctgaagaccatgaagggcggcactggaaatggcctggagatcatgctggacatccagcaggatgagtacctgcctgtgtggggcgagacagatgagaccagctttgaagctggcatcaaggtgcagatccacagccaggatgagccccccttcatcgaccagctgggctttggagtggcccctggcttccagacctttgtggcctgccaggagcagaggctcatctacctgcccccaccctggggcacctgcaaggctgtgaccatggacagcgacctggacttctttgacagctacagcatcacagcctgcagaattgactgtgagacccgctacctggtggagaactgcaactgcaggatggtgcacatgcctggagatgccccctactgcaccccagagcagtacaaggaatgtgccgaccctgccctggacttcctggtggagaaggaccaggagtactgtgtgtgtgagatgccctgcaacctgaccaggtatggcaaggagctgtccatggtgaagatccccagcaaggccagcgccaagtacctggccaagaagttcaacaagtctgagcagtacatcggggagaacatcctggtgctggacatcttctttgaggtgctgaactatgagaccatcgagcagaagaaggcctatgaaattgctggcctgctgggggacattggaggccagatgggcctcttcatcggggccagcatcctgactgtgctggagctgtttgattatgcctatgaggtgatcaagcacaagctgtgcagaagaggcaagtgccagaaggaggccaagaggagcagcgctgacaagggcgtggccctgagcctggatgatgtgaagaggcacaacccctgtgagagcctgcggggccaccctgctggcatgacctacgccgccaacatcctgccccaccacccagcccggggcacctttgaggacttcacctgctag

SEQ ID NO: 91677 - DNA, 3327 bp, Artificial Sequence
  derived and/or modified sequence
cctggagaaaatgcccatccagatcttctgctccatgtcattctcctctggagaggaagccccagggcccttgggagatatttggggtccccaccaccatcagcagcagcaggacatctcagaatcggaagaggaggaagaagagaaggaaaaggaggcagtgaggaaggaggccagtgaggggcattcacccatggacttggtggcctttgccaacagctgcaccctccatggcaccaaccacatttttgtggaggggggtccagggccaaggcaggtgctgtgggcggtggcctttgtcctggcactgggtgccttcctgtgccaggtaggggaccgcgttgcttattacctcagctacccacacgtgacccttctaaacgaagtggccaccacggagctggccttcccggcagtcaccctctgcaacactaatgctgtgcggctgtcccagctcagctaccctgacttgctttatttggcccccatgctgggactggatgaaagtgatgaccccggggtgcccctcgctccaccgggccctgaggccttctctggggagccctttaacctgcaccgcttctacaatcgctcctgccaccggctggaggacatgctgctctattgctcctaccaagggggaccctgcggccctcacaacttctcagtggtcttcacacgctatggaaagtgctacacgttcaactcgggccgagatgggcggccgcggctgaagaccatgaagggtgggacgggcaatgggctggaaatcatgctggacatccagcaggacgagtacctgcctgtgtggggggagactgacgagacgtccttcgaagcaggcatcaaagtgcagatccatagtcaggatgaacctcctttcatcgaccagctgggctttggcgtggccccaggcttccagacctttgtggcctgccaggagcagcggctcatctacctgcccccaccctggggcacctgcaaagctgttaccatggactcggatttggatttcttcgactcctacagcatcactgcctgccgcatcgactgtgagacgcgctacctggtggagaactgcaactgccgcatggtgcacatgccaggggatgccccatactgtactccagagcagtacaaggagtgtgcagatcctgctctggacttcctggtggagaaggaccaggagtactgcgtgtgtgaaatgccttgcaacctgacccgctatggcaaagagctgtccatggtcaagatccccagcaaagcctcagccaagtacctggccaagaagttcaacaaatctgagcaatacataggggagaacatcctggtgctggacattttctttgaagtcctcaactatgagaccattgaacagaagaaggcctatgagattgcagggctcctgggtgacatcgggggccagatggggctgttcatcggggccagcatcctcacggtgctggagctctttgactacgcctacgaggtcattaagcacaagctgtgccgacgaggaaaatgccagaaggaggccaaaaggagcagtgcggacaagggcgtggccctcagcctggacgacgtcaaaagacacaacccgtgcgagagccttcggggccaccctgccgggatgacatacgctgccaacatcctacctcaccatccggcccgaggcacgttcgaggactttacctgctgagccccgcaggccgctgaaccaaaggcctagatggggaggactaggagagcgagggggcccccagctgcctcctcacatctgccctggggactccccacactccggggcagatctttcctcttgtctgtggtaaggaaggagtcttgaccatagagtcctctctctgcctctatcccattctttttacatttaacaaaactaatctaaaaaagaactaaaaagggagaacggggcaagggacctcaggctgcccctctctcctccatgctgcctcccctagctcccagcctgaattctgtctatctagctgtctgccatctgagtgtccatctacattctgctgccaccagtcaccaaaggcccttcccagtgaggggtggaagggatctctggggtctggaatttggccccaaaccagagaatgtaccttaagggggagggctagtgtgggggagggaggcttccccagccttaagagaccctctcagcccagtgactgtccccaaacccaagtctcctggcaggaactaaaacctcagccccactctctcacaccatgtggaatctcgtgggggtcggggatccccttaagaagtggtaatggggacaagatgcggccctggtgctgtaggctacatcctgatacctataagttcacccccaccccacagctgctggagagaaatcccaagaggcagcccttcctcaccatcccattaaagaccgggctggttagcgtccagctcagggagaagggcgctagtgcctaacctcactggtccctctcccggaggcccttgtagagggccacgtccataaattttcttatggaactctcccacatcctcttccccaacttcatttgcttctctcaacaacctcatctgcattttctatttctatatgatacagactctatattgctatatctctgtatatactttcccagccctgtctgtctccaccccatcccctcttgtctctgagaaccattctcccaccccaagttccaccttctatgtttctactccctccctggtctctgaatgccttcgcctgtataaagagttggactctctcccctggtgtctgtactgtgtacacacatccctctgagaagcacaaggagacgacacgcgcattgtaacctttgcactgtctcagtggcgacaaaggaagctgtgaatcacaagctctgcctctttctggcctcaccctctcccccaacccgggcaccctcggccctccctgcagccttaacattctcttcccctgctcctcctatcccattgccctctgcccagctgacagtggcatccccagggaaggggttgctgtagagatagcccccacccaggggatggaggtctaccctggacactaagccaagtgtgtcagagacagaagggagctggggattggcgactcctgaagttggggcagtgggatgctgacaggcagaagctgaggtcctcagtcagtggcctttcctccttctgggtgcccagccccctttcctcacctgatacccaagcccaccacttttattttctggtgaggtgggtttgggaggaaagagaggcctagaggaggagttgaaagctctgctgttgtctcaccctatctta

SEQ ID NO: 91678 - DNA, 1689 bp, Artificial Sequence
  derived and/or modified sequence
atgcccatccagatcttctgcagcatgagcttcagcagcggcgaggaagctcctggaccactcggagacatctggggcccccaccaccaccagcagcaacaggacatcagcgaaagcgaggaagaggaggaggaaaaggaaaaggaggctgttagaaaagaagctagcgaaggtcacagcccaatggacctggttgcattcgctaactcttgcacgttacacggtactaaccacatcttcgttgaggggggccccggcccacgtcaggtattgtgggccgttgcgtttgtgctagcactgggggcttttctgtgccaggtgggtgatcgagtggcctactacctctcatacccacacgtcacacttctaaacgaagtggcgaccacagagctggcatttcccgctgtcaccttgtgtaataccaacgcagtgagattaagtcaattgtcgtaccctgatctgctctacctggccccgatgctgggtctcgacgaaagtgatgaccctggagtacctctggccccgccgggacccgaggctttttccggcgagccctttaacctacaccgcttctacaacaggagttgccataggctggaagatatgcttctctactgttcctaccaaggtggcccttgcggcccacataatttctctgtcgtgtttacaaggtatggtaagtgctacacgttcaactctggccgggatggtagaccaagactcaagaccatgaagggcggcaccggcaatggtctggaaattatgctggatatccagcaggacgagtatctgcccgtctggggagaaaccgatgagacttcatttgaagcagggatcaaagtacagatacacagtcaggatgaacctccctttatagaccagctgggctttggagtagctccaggcttccagacctttgtggcctgccaggaacaaagattaatttacttacctccgccttggggcacctgtaaagcagtgaccatggactcagacctcgactttttcgattcttattcaatcactgcttgccgcattgattgcgagacgcgataccttgtggaaaattgcaattgccgtatggtgcatatgcctggggatgcaccttactgcaccccagagcagtacaaggagtgcgcagatcctgccttggattttctcgtggaaaaagatcaagaatactgcgtgtgtgaaatgccatgcaacctgacacgctacgggaaagagttgtcaatggtgaagattccgtccaaggcctccgcaaaatacttggccaaaaaattcaacaagagcgagcagtacattggggagaatatcttagttctggatattttctttgaagtcctgaactacgagacaatagagcagaaaaaggcttatgaaatcgctgggcttctcggggacatcggagggcagatggggctgttcattggcgcctccatactgaccgttttggaactcttcgactacgcctatgaggtcatcaaacataaactgtgtcgtagggggaagtgtcagaaggaggctaagcgcagctcggcagataagggagtcgcgctgagtctggatgatgtaaaaaggcacaacccttgcgagtccttgcggggtcaccccgcagggatgacatatgctgctaatatcctccctcaccaccccgctcgagggaccttcgaggatttcacttgttag

SEQ ID NO: 91679 - DNA, 1689 bp, Artificial Sequence
  derived and/or modified sequence
atgccaatccaaattttctgttctatgtctttctcctccggagaggaagcgccaggccctcttggagacatctggggcccacaccaccaccaacaacaacaggacatctccgagtcagaggaagaagaggaggagaaggagaaggaagcggtaaggaaggaggccagtgagggtcatagccccatggacctagtggcctttgccaattcgtgcacacttcatggaactaaccacatctttgtggaggggggacccggtccacggcaagtgctttgggccgttgcattcgtgctggccttgggagccttcctttgccaggtgggcgacagagttgcctattacctttcttatccacatgttacattgctgaacgaagtggccactacagagcttgcatttcctgcagtgaccctgtgcaacacaaatgctgtccgcttgtcccaactttcttatcccgaccttctgtatctggccccaatgttggggctcgatgagtctgatgatcccggtgtaccactcgctcctcccggacctgaagcgttcagtggggagccctttaaccttcatcgattttacaacagatcatgtcataggctggaggacatgctcctttattgttcgtatcaaggcggaccgtgcggaccccataacttttcagttgtgttcacgaggtacggaaaatgctatactttcaatagcggaagagacggtaggcccagattgaaaacaatgaaaggcggaacaggtaatgggctagagatcatgcttgacatccagcaagatgagtacctacccgtctggggggagaccgatgaaacctcctttgaggccggaattaaagtccagatccactcccaggatgagcctccctttatagatcagctggggtttggagtcgcccctggtttccagacttttgtcgcgtgtcaggagcagcggttgatctacttaccccctccttggggaacctgcaaagccgtgacaatggatagcgaccttgactttttcgacagctatagcatcacagcctgtcgaatcgactgcgagacccggtacctagtcgaaaattgcaattgtcgcatggtccacatgcctggagacgctccttactgtactccagaacagtataaagagtgtgcagacccagccctggatttcctagtggagaaagaccaggaatactgtgtctgtgagatgccgtgcaacctaacccgatacgggaaggagcttagcatggtgaaaataccaagtaaagcatcagccaagtatctagctaaaaaatttaacaagtcggaacaatacatcggagagaatatcctcgtgctggacattttctttgaagttttaaactacgagactatagagcagaagaaagcctatgaaatcgcaggcttactgggggacatcggcggtcagatgggactgttcattggagcatccatactaaccgtccttgaattattcgattatgcctacgaggtaattaagcacaagctgtgtaggagggggaagtgtcagaaagaagccaagcgatccagcgctgataaaggagtcgcattaagcctggacgatgtaaaaagacataacccatgtgaatcactaagaggtcatcctgctggaatgacttatgcggcaaacatcctgcctcaccacccggctagagggaccttcgaggatttcacttgttag

SEQ ID NO: 91680 - DNA, 1689 bp, Artificial Sequence
  derived and/or modified sequence
atgcccatccagatcttctgcagcatgagcttcagcagcggcgaggaggcccccggccccctgggcgacatctggggcccccaccaccaccagcagcagcaggacatcagcgagagcgaggaggaggaggaggagaaggagaaggaggccgtgagaaaggaggccagcgagggccacagccccatggacctggtggccttcgccaacagctgcaccctgcacggcaccaaccacatcttcgtggagggcggccccggccccagacaggtgctgtgggccgtggccttcgtgctggccctgggcgccttcctgtgccaggtgggcgacagagtggcctactacctgagctacccccacgtgaccctgctgaacgaggtggccaccaccgagctggccttccccgccgtgaccctgtgcaacaccaacgccgtgagactgagccagctgagctaccccgacctgctgtacctggcccccatgctgggcctggacgagagcgacgaccccggcgtgcccctggccccccccggccccgaggccttcagcggcgagcccttcaacctgcacagattctacaacagaagctgccacagactggaggacatgctgctgtactgcagctaccagggcggcccctgcggcccccacaacttcagcgtggtgttcaccagatacggcaagtgctacaccttcaacagcggcagagacggcagacccagactgaagaccatgaagggcggcaccggcaacggcctggagatcatgctggacatccagcaggacgagtacctgcccgtgtggggcgagaccgacgagaccagcttcgaggccggcatcaaggtgcagatccacagccaggacgagccccccttcatcgaccagctgggcttcggcgtggcccccggcttccagaccttcgtggcctgccaggagcagagactgatctacctgccccccccctggggcacctgcaaggccgtgaccatggacagcgacctggacttcttcgacagctacagcatcaccgcctgcagaatcgactgcgagaccagatacctggtggagaactgcaactgcagaatggtgcacatgcccggcgacgccccctactgcacccccgagcagtacaaggagtgcgccgaccccgccctggacttcctggtggagaaggaccaggagtactgcgtgtgcgagatgccctgcaacctgaccagatacggcaaggagctgagcatggtgaagatccccagcaaggccagcgccaagtacctggccaagaagttcaacaagagcgagcagtacatcggcgagaacatcctggtgctggacatcttcttcgaggtgctgaactacgagaccatcgagcagaagaaggcctacgagatcgccggcctgctgggcgacatcggcggccagatgggcctgttcatcggcgccagcatcctgaccgtgctggagctgttcgactacgcctacgaggtgatcaagcacaagctgtgcagaagaggcaagtgccagaaggaggccaagagaagcagcgccgacaagggcgtggccctgagcctggacgacgtgaagagacacaacccctgcgagagcctgagaggccaccccgccggcatgacctacgccgccaacatcctgccccaccaccccgccagaggcaccttcgaggacttcacctgctag

SEQ ID NO: 91681 - protein, 549 aa, Artificial Sequence
  derived and/or modified sequence
MSQGSVSFKDVTVDFTQEEWQQLDPAQKALYRDVMLENYCHFVSVGFHMAKPDMIRKLEQGEELWTQRIFPSYSYLEEDGKTEDVLVKFKEYQDRHSRPLIFINHKKLIKERSNIYGKTFTLGKNRISKTILCEYKPDGKVLKNISELVIRNISPIKEKFGDSTGWEKSLLNTKHEKIHPAVNLHKQTERVLSGKQELIQHQKVQAPEQPFDHNECEKSFLMKGMLFTHTRAHRGERTFEYNKDGIAFIEKSSLSVHPSNLMEKKPSAYNKYGKFLCRKPVFIMPQRPQTEEKPFHCPYCGNNFRRKSYLIEHQRIHTGEKPYVCNQCGKAFRQKTALTLHEKTHIEGKPFICIDCGKSFRQKATLTRHHKTHTGEKAYECPQCGSAFRKKSYLIDHQRTHTGEKPYQCNECGKAFIQKTTLTVHQRTHTGEKPYICNECGKSFCQKTTLTLHQRIHTGEKPYICNECGKSFRQKAILTVHHRIHTGEKSNGCPQCGKAFSRKSNLIRHQKTHTGEKPYECKQCGKFFSCKSNLIVHQKTHKVETTGIQ

SEQ ID NO: 91682 - DNA, 1650 bp, Artificial Sequence
  derived and/or modified sequence
atgagccagggcagcgtgagcttcaaggacgtgaccgtggacttcacccaggaggagtggcagcagctggaccccgcccagaaggccctgtacagagacgtgatgctggagaactactgccacttcgtgagcgtgggcttccacatggccaagcccgacatgatcagaaagctggagcagggcgaggagctgtggacccagagaatcttccccagctacagctacctggaggaggacggcaagaccgaggacgtgctggtgaagttcaaggagtaccaggacagacacagcagacccctgatcttcatcaaccacaagaagctgatcaaggagagaagcaacatctacggcaagaccttcaccctgggcaagaacagaatcagcaagaccatcctgtgcgagtacaagcccgacggcaaggtgctgaagaacatcagcgagctggtgatcagaaacatcagccccatcaaggagaagttcggcgacagcaccggctgggagaagagcctgctgaacaccaagcacgagaagatccaccccgccgtgaacctgcacaagcagaccgagagagtgctgagcggcaagcaggagctgatccagcaccagaaggtgcaggcccccgagcagcccttcgaccacaacgagtgcgagaagagcttcctgatgaagggcatgctgttcacccacaccagagcccacagaggcgagagaaccttcgagtacaacaaggacggcatcgccttcatcgagaagagcagcctgagcgtgcaccccagcaacctgatggagaagaagcccagcgcctacaacaagtacggcaagttcctgtgcagaaagcccgtgttcatcatgccccagagaccccagaccgaggagaagcccttccactgcccctactgcggcaacaacttcagaagaaagagctacctgatcgagcaccagagaatccacaccggcgagaagccctacgtgtgcaaccagtgcggcaaggccttcagacagaagaccgccctgaccctgcacgagaagacccacatcgagggcaagcccttcatctgcatcgactgcggcaagagcttcagacagaaggccaccctgaccagacaccacaagacccacaccggcgagaaggcctacgagtgcccccagtgcggcagcgccttcagaaagaagagctacctgatcgaccaccagagaacccacaccggcgagaagccctaccagtgcaacgagtgcggcaaggccttcatccagaagaccaccctgaccgtgcaccagagaacccacaccggcgagaagccctacatctgcaacgagtgcggcaagagcttctgccagaagaccaccctgaccctgcaccagagaatccacaccggcgagaagccctacatctgcaacgagtgcggcaagagcttcagacagaaggccatcctgaccgtgcaccacagaatccacaccggcgagaagagcaacggctgcccccagtgcggcaaggccttcagcagaaagagcaacctgatcagacaccagaagacccacaccggcgagaagccctacgagtgcaagcagtgcggcaagttcttcagctgcaagagcaacctgatcgtgcaccagaagacccacaaggtggagaccaccggcatccagtag

SEQ ID NO: 91683 - DNA, 1650 bp, Artificial Sequence
  derived and/or modified sequence
atgtctcagggctctgtgagctttaaagatgtaacagttgatttcacccaggaggagtggcagcagctggatcctgctcagaaagctctgtatagagacgttatgctggaaaactactgtcacttcgtatcagtgggttttcatatggcaaagccggatatgattaggaaacttgagcaaggcgaagagctgtggacacagcgaattttcccttcctattcctatttagaggaggacggaaagacagaggacgtcctagtgaaattcaaggaataccaggatcggcatagccgcccgctgatattcatcaatcacaaaaagctgatcaaagagcgcagcaatatttacggcaagactttcaccctgggcaagaatcgcattagtaagaccatcctgtgcgaatacaagccagacggcaaggtgctaaaaaacataagcgagcttgtcattcggaatatcagtcctatcaaggaaaagtttggggactccactggctgggagaaatcactgctcaatactaagcacgaaaaaattcatcctgccgtgaatctgcacaagcagaccgagagggtgttgagcggcaaacaagagctgattcagcaccagaaggtgcaggcccctgagcagccctttgaccacaacgaatgtgagaaatccttcctcatgaagggcatgctgttcacacataccagagctcataggggagaacgtacattcgagtacaacaaagacggaattgcttttatcgagaagtccagtttatcagtgcacccatccaacctgatggagaaaaaacccagcgcctacaacaaatatggaaagttcctgtgccgcaagcccgtgttcatcatgccacaacggccacagacagaagaaaagccatttcattgcccatattgcggaaataattttaggcgcaagagctaccttatagaacaccagcgtattcacaccggcgagaaaccgtacgtgtgcaatcagtgtgggaaagcctttcgccaaaaaacagcgttgacactgcatgaaaaaacacacatcgaaggaaaacccttcatatgcattgactgcggcaaaagtttcagacagaaggcgacgctaacccgccaccacaagacacatactggtgaaaaggcatatgaatgtccacagtgtggatccgccttcagaaaaaaatcctacttgatcgaccaccagaggacccacacaggagaaaagccttatcagtgcaatgagtgcggaaaggcattcattcagaagactacgttgacagtgcaccagaggactcacactggggagaaaccttatatctgcaatgaatgcggaaagagcttctgccaaaagacaacactgactctccaccagcgcattcatacaggtgaaaagccctacatctgtaacgaatgtggaaagtcttttagacaaaaggcgatcctaactgtgcaccatcgcattcatactggggagaaaagcaatgggtgtccacagtgcgggaaagccttttctaggaagtcaaaccttataagacatcagaaaacccacaccggggaaaagccatacgaatgcaaacagtgtggtaaattcttcagctgcaagagcaatctcattgtccaccagaagacccacaaagtagagactactgggatccaatag

SEQ ID NO: 91684 - DNA, 1650 bp, Artificial Sequence
  derived and/or modified sequence
atgagccagggctctgtgtccttcaaggatgtgacagtggacttcacccaggaggagtggcagcagctggaccctgcccagaaggccctgtacagagatgtgatgctggagaactactgccactttgtgtctgtgggcttccacatggccaagccagacatgatcaggaagctggagcagggcgaggagctgtggacccagaggatcttccccagctacagctacctggaggaggatggcaagacagaagatgtgctggtgaagttcaaggagtaccaggacagacacagccggcccctcatcttcatcaaccacaagaagctgatcaaggagaggagcaacatctacggcaagaccttcaccctgggcaagaaccgcatcagcaagaccatcctgtgtgagtacaagccagatggcaaggtgctgaagaacatcagcgagctggtgatccggaacatcagccccatcaaggagaagtttggagacagcacaggctgggagaagagcctgctgaacaccaagcatgagaagatccaccctgctgtgaacctgcacaagcagacagagcgggtgctgagcggcaagcaggagctgatccagcaccagaaggtgcaggcccctgagcagccctttgaccacaatgaatgtgagaagagcttcctgatgaagggcatgctgttcacccacacccgggcccacagaggagagaggacctttgagtacaacaaggatggcatcgccttcatcgagaagagcagcctgtctgtgcaccccagcaacctgatggagaagaagcccagcgcctacaacaagtatggcaagttcctgtgcaggaagcctgtgttcatcatgccccagaggccccagacagaggagaagcccttccactgcccctactgcggcaacaacttccggaggaagagctacctgattgagcaccagaggatccacactggagagaagccctacgtgtgcaaccagtgtgggaaggccttccggcagaagacagccctgaccctgcacgagaagacccacatcgagggcaagcccttcatctgcatcgactgtgggaagagcttccggcagaaggccaccctgaccaggcaccacaagacccacactggagagaaggcctatgagtgcccccagtgtggcagcgccttcaggaagaagagctacctgattgaccaccagaggacccacactggagagaagccctaccagtgcaatgaatgtgggaaggccttcatccagaagaccaccctgactgtgcaccagaggacccacactggagagaagccctacatctgcaatgaatgtgggaagagcttctgccagaagaccaccctgaccctgcaccagaggatccacactggagagaagccctacatctgcaatgaatgtgggaagagcttccggcagaaggccatcctgactgtgcaccaccgcatccacactggagagaagagcaatggctgcccccagtgtgggaaggccttcagcaggaagagcaacctgatccgccaccagaagacccacactggagagaagccctatgagtgcaagcagtgtgggaagttcttcagctgcaagagcaacctgattgtgcaccagaagacccacaaggtggagaccaccggcatccagtag

SEQ ID NO: 91685 - DNA, 1650 bp, Artificial Sequence
  derived and/or modified sequence
atgagccagggcagcgtgagcttcaaggacgtgaccgtggacttcacacaggaggagtggcagcaactggacccagcacaaaaggccctatatagagacgttatgctagaaaactactgccactttgtcagtgtgggcttccacatggcaaaacctgacatgatcagaaaactggagcagggggaagagctgtggacccagcgaatatttccgtcatattcttacctggaggaggacggaaagaccgaagacgtattggtgaagtttaaagagtaccaggatcggcactcaaggccacttatctttatcaatcacaagaaactcattaaagaacgctccaatatctatgggaagacattcactctcggcaaaaataggatttctaagaccattttgtgcgaatataagcccgatggcaaggttttgaaaaacatcagtgaattggtcatcaggaatatctctcctatcaaagagaaatttggcgatagtacagggtgggaaaaaagccttctgaatacaaagcacgagaaaatccaccccgcagttaatctgcataagcagaccgagcgcgtcctctcgggaaagcaagagctgatccagcaccagaaggtgcaagccccggagcagccttttgatcacaacgagtgcgagaaatcgtttctgatgaagggcatgctgttcacccacactagggctcacaggggggagcgcacgttcgagtataacaaggacggcattgcgtttatcgagaaaagtagcttgtccgtacacccgtccaatctcatggagaagaaacctagtgcctataataagtatggtaagtttctgtgtcgtaaacccgtgttcatcatgccacaaagaccacagactgaagaaaaaccttttcattgtccttattgtggcaacaatttccggcgaaagagctatctcatcgagcatcagagaatccacacaggggagaaaccctatgtctgtaatcagtgtgggaaagccttcaggcagaaaaccgcacttactctacatgagaaaacgcacatcgaaggcaagccatttatttgtattgactgtggcaaaagctttaggcagaaggccaccctgacccggcaccataagacgcacactggggagaaggcctacgaatgtccacagtgtggcagcgcttttagaaagaagtcctacttgatcgaccatcagagaacccataccggagagaaaccctaccagtgcaacgaatgcggcaaagccttcatacagaagactaccctgactgtccaccaaagaacacatactggtgaaaaaccttatatctgcaacgaatgcggcaagagcttctgtcagaagacgaccctcacccttcaccagcgcatacacaccggggaaaagccgtacatttgcaacgagtgtggcaagagcttccggcagaaggccatcctcacagtgcaccacaggattcacactggtgagaaatcaaacgggtgcccacagtgcggcaaggcctttagtagaaagtcaaacctcattcgtcatcagaagacccatactggagagaagccatacgaatgcaaacagtgcgggaaattcttctcttgtaaatccaatctcatcgtccatcaaaagactcacaaggtggagaccaccgggatccaatag

SEQ ID NO: 91686 - DNA, 1650 bp, Artificial Sequence
  derived and/or modified sequence
atgtctcaaggatccgttagcttcaaggacgttaccgtggatttcacccaggaggagtggcagcagctcgatcccgcacagaaggcactatatagagatgtcatgctggaaaactactgccactttgtttcagttggtttccacatggccaagccggacatgattcgcaagttggaacagggcgaagagctatggacacagaggatattcccttcctattcgtacttggaagaagatggcaagacagaggacgtgctggtcaaatttaaagagtatcaagacaggcactctcggccacttatttttattaaccataaaaaacttataaaagaacgcagcaacatttacggaaagaccttcactctcgggaagaaccgcatctccaagacaatcttatgtgagtataaaccagacggcaaagtgctgaagaatatatctgaattggtgattcgcaacataagccccattaaagagaagttcggggactcaaccggatgggaaaaatctttgctgaacaccaagcatgaaaagatccacccagctgtgaatcttcacaagcaaaccgagcgcgtgctttccggaaaacaggaattaatccagcaccagaaagttcaggcaccagagcagccatttgaccacaacgagtgtgagaagtctttcttgatgaagggcatgctcttcacacacacacgtgcgcaccgaggcgaaaggaccttcgagtacaataaggatggcatcgctttcatcgagaaaagctcactgtctgtgcatccttctaacctgatggagaagaagcccagcgcttataataaatatggcaaatttctatgccggaagccagtttttataatgccacagcggccacaaaccgaggagaagccgtttcattgcccctattgtggtaacaatttcagacggaagtcctacttgatcgaacaccagcggatacacaccggcgagaagccttatgtctgcaatcagtgtggcaaggcctttaggcagaagactgctcttactttgcatgaaaagacacacattgagggaaagcccttcatttgcatcgactgcggcaaatcatttcgacagaaagcaacactgactcggcaccacaaaacccacacaggagagaaagcttatgaatgtccccagtgcgggtcagcctttcgcaagaagtcatacctaatagatcatcagaggacgcatacaggcgaaaaaccctatcagtgtaacgagtgcgggaaagcttttatccagaaaactaccctcaccgtccatcaaagaacccacaccggtgaaaaaccctacatctgcaatgaatgtgggaaatccttttgccaaaaaactacgctaacactgcatcagcgtatccacacaggcgaaaagccatacatctgtaatgagtgtggtaaaagtttccggcaaaaggccattttaaccgttcaccatcgcatacatactggagagaaatctaacgggtgtccgcagtgcggtaaagcattcagtcggaagagtaacctcatccgccaccagaaaacgcatactggtgagaagccctatgaatgtaaacagtgcgggaagtttttcagctgtaagagcaacctcatcgtccaccaaaaaacacataaggtcgaaaccacggggatccagtag

SEQ ID NO: 91687 - DNA, 2742 bp, Artificial Sequence
  derived and/or modified sequence
ggggtgaggcttggactgtttctttttccaaaagaggagctcaaaagagaaagttcatctagaaatctcaaagccatgtctcagggatcagtgtcattcaaggatgtgactgtggacttcacccaggaggagtggcagcaactagaccctgctcagaaggcgctttacagggatgtgatgttggaaaactattgccacttcgtatctgtggggtttcacatggctaagcctgatatgatccgcaagttggaacaaggagaagagctatggacacagagaatttttccaagttacagctacctagaagaagatgggaaaactgaagatgtcttagtgaagttcaaagaataccaagacaggcattctagacccctcatattcatcaaccacaaaaaactaattaaggagagaagtaatatttatggtaaaacatttactctaggcaagaaccgtatttcaaaaacaatactatgtgaatataaacctgatggaaaagttttgaaaaatatttcagaactagtcattagaaatataagccccataaaagagaagtttggtgacagtactggatgggagaaatcactcctcaataccaagcatgagaaaattcatcctgcagtgaatctccataaacaaacagaaagagttctcagtggtaaacaggagcttattcagcatcagaaggttcaagctccagagcaaccatttgaccataatgaatgtgaaaaatccttcctgatgaaaggaatgctatttacacatactagagctcacagaggagaaagaacctttgaatacaataaagatggaattgccttcatagaaaagtcaagcctcagtgtccatccaagtaatcttatggaaaagaagccctctgcctacaacaaatatgggaaattcctctgcagaaagcctgtttttattatgcctcagagacctcaaacagaagagaaaccctttcactgtccttactgtgggaataactttagaaggaagtcatacctcattgaacatcagcgaattcacacaggtgaaaaaccttatgtttgcaatcaatgtggaaaggccttccgtcagaagacagccctcacccttcatgagaaaacacatatagaggggaaaccctttatttgtatcgattgtgggaagtccttccgccagaaggccaccctcactagacatcacaaaacacatacgggggagaaagcctatgaatgtcctcagtgtggaagtgcctttaggaagaagtcatacctcattgatcaccagagaactcacacaggagagaaaccgtatcagtgtaatgagtgtgggaaggcatttatccagaagacaaccctcactgttcatcagagaactcacacaggagagaaaccctatatttgcaatgaatgtgggaagtccttctgccaaaagacaaccctcactctccaccagagaattcacacgggggaaaaaccctatatttgtaatgaatgtgggaagtccttccgccagaaggcaatcctcactgttcatcacagaatacatacaggagaaaaatccaatgggtgtcctcagtgtgggaaagccttcagtaggaaatcaaacctcattcgccatcagaaaactcacacaggcgagaaaccatatgaatgtaaacagtgtgggaagttcttcagttgtaagtcaaacctcattgtccatcagaaaactcacaaggtagaaaccacgggaattcagtaagtaatgtggctttttttgtaaaaaaatgttaagtcatagtaaaccctgtagatgatgttgcttgcaagcgtaatatccaacagtttaaggtactataccacatggtaacctactgtttgccagcctgtaaaacacacacacacacacacacacacacacaaatattattagacaaattagatgacaaaaatcattaagaagtccaaactttttttttattactagcttcagcagacaaaaacttcctctgtcaaggtgttataaacatttaaaatcacattttccatttccatacatatctttttgttcatcagtaataactagttggccaactgactgtggtccatggactacacagtgagtagaggttctttaaaagaaggaggtatgaactgtatttctcattgcaaatacaaaataaaaattagttgttacctcctcacagttgaccatgattctgacttctaacattacaaattagtttttactattataaacctttctataaattggattatatatcatgtattctttcatatacagcttattaccttcatcatgtccgtgagtctaatcattagtacgtgtggcagaagtttatttatttttatccagtatagaattcaattatatgattatatcacaatttatccattctgctgttgatggacttttacattgtttacagcttagggtcataataaatcatgcttctgagaacatacttgtcttggtgtacatacatgtatttctcttgtgtatatacttaggagtggaatcgctgggtcttagagcatgtgtgtattcagtcagatactggcagacaattcagaactttcaccacatgagataattgacactgaagggaaacagctataaattttatcaatatggtgctggttcaaaccagagaattcatgctgcagggaaactcaatcaatgttattgtgaaaactgggaatgtgaatgtaatatatgtagaaaaacatttagccacagcccaaatcttccaggcaa

SEQ ID NO: 91688 - protein, 186 aa, Artificial Sequence
  derived and/or modified sequence
MWLPWALLLLWVPASTSMTPASITAAKTSTITTAFPPVSSTTLFAVGATHSASIQEETEEVVNSQLPLLLSLLALLLLLLVGASLLAWRMFQKWIKAGDHSELSQNPKQAATQSELHYANLELLMWPLQEKPAPPREVEVEYSTVASPREELHYASVVFDSNTNRIAAQRPREEEPDSDYSVIRKT

SEQ ID NO: 91689 - protein, 103 aa, Artificial Sequence
  derived and/or modified sequence
MWLPWALLLLWVPAGDHSELSQNPKQAATQSELHYANLELLMWPLQEKPAPPREVEVEYSTVASPREELHYASVVFDSNTNRIAAQRPREEEPDSDYSVIRKT

SEQ ID NO: 91690 - DNA, 561 bp, Artificial Sequence
  derived and/or modified sequence
atgtggctgccctgggccctgctgctgctgtgggtgcccgccagcaccagcatgacccccgccagcatcaccgccgccaagaccagcaccatcaccaccgccttcccccccgtgagcagcaccaccctgttcgccgtgggcgccacccacagcgccagcatccaggaggagaccgaggaggtggtgaacagccagctgcccctgctgctgagcctgctggccctgctgctgctgctgctggtgggcgccagcctgctggcctggagaatgttccagaagtggatcaaggccggcgaccacagcgagctgagccagaaccccaagcaggccgccacccagagcgagctgcactacgccaacctggagctgctgatgtggcccctgcaggagaagcccgccccccccagagaggtggaggtggagtacagcaccgtggccagccccagagaggagctgcactacgccagcgtggtgttcgacagcaacaccaacagaatcgccgcccagagacccagagaggaggagcccgacagcgactacagcgtgatcagaaagacctag

SEQ ID NO: 91691 - DNA, 561 bp, Artificial Sequence
  derived and/or modified sequence
atgtggctgccatgggcactcctgttgctgtgggtgccggctagtaccagcatgacgcccgcttcgattactgccgccaagactagcactatcaccacagccttcccaccagtgtcctccactacactgttcgcagtcggggccacgcatagtgcgagtatccaggaagaaacggaagaagtggtgaattcacaattgcccctgctactgagtttgctcgcactactgctattactgctggtgggtgccagcctattggcttggaggatgtttcagaagtggataaaggccggtgaccactccgagctgagccaaaaccccaagcaggcggctacacaaagcgagttgcactacgccaatctggaactactgatgtggccgctgcaagaaaaacccgctccccccagagaggtcgaagtagaatattctactgtggcctctccacgcgaggaactccactacgcaagcgtagttttcgacagtaacaccaatcgcattgcagcgcagcggccaagagaagaagaacccgactccgattacagcgtgatccgcaaaacttag

SEQ ID NO: 91692 - DNA, 561 bp, Artificial Sequence
  derived and/or modified sequence
atgtggctgccctgggccctgctgctgctgtgggtgcctgccagcacctccatgaccccagccagcatcacagctgccaagaccagcaccatcaccacagccttcccccctgtgagcagcaccaccctgtttgctgtgggcgccacccacagcgccagcatccaggaggagacagaggaggtggtgaacagccagctgcccctgctgctgagcctgctggccctgctgctgctgctgctggtgggcgccagcctgctggcctggaggatgttccagaagtggatcaaggccggggaccacagcgagctgagccagaaccccaagcaggccgccacccagagcgagctgcactacgccaacctggagctgctgatgtggcccctgcaggagaagccagccccaccccgggaggtggaggtggagtacagcacagtggccagcccccgggaggagctgcactacgcctctgtggtgtttgacagcaacaccaacagaattgctgcccagaggccccgggaggaggagccagacagcgactacagcgtcatcaggaagacctag

SEQ ID NO: 91693 - DNA, 561 bp, Artificial Sequence
  derived and/or modified sequence
atgtggctgccctgggccctgctgctgctgtgggtgcccgccagcacgtctatgacacccgcctccattacagcagcaaagacctctactattacaaccgcttttcctcctgttagctcaacgactctctttgccgtcggggcgactcattccgcctctatacaggaagaaacagaggaagttgtaaactctcaactgcctctacttctctcactgctggcccttctactgctgctgctggtgggggccagcctgctggcttggcgaatgtttcagaagtggattaaagcgggagaccattccgagctgagccagaatccaaagcaggcggctacccagtctgagctgcactatgctaacttagagctcttgatgtggcctctgcaagagaagccagcgcctccaagggaggtagaggtggagtactcaacagtggcatccccacgggaggaacttcactatgcttcagtggtattcgacagcaatacaaaccgaatcgccgcccagcgcccccgggaggaggagcctgactcagactactcagtgattagaaagacttag

SEQ ID NO: 91694 - DNA, 561 bp, Artificial Sequence
  derived and/or modified sequence
atgtggctgccttgggccttgctattactgtgggttcctgctagcacatctatgacccccgctagcattactgcagccaaaacttccacaatcacaacagcctttccccctgtgtcttctaccactctgtttgctgtcggagcgacgcatagcgcttctatccaggaggagactgaggaagtcgtaaatagtcaactacctctgctccttagcctgctggcacttctgttattgcttttggtcggcgcttccctcctggcctggaggatgtttcagaaatggatcaaggctggtgaccacagtgaacttagccaaaaccctaagcaggcagccacccagtccgagcttcactatgctaacctggagctcctgatgtggcctttgcaggagaaacctgccccaccccgagaggtggaggttgaatattccaccgttgcctcccctagagaagaactgcattatgctagtgtggttttcgattccaacactaatcggatagccgcacagcgcccacgggaggaagagcctgacagcgactatagcgtcattcgtaaaacttag

SEQ ID NO: 91695 - DNA, 631 bp, Artificial Sequence
  derived and/or modified sequence
caagtgccgcctgtgctggggaagggaccatgtggctgccttgggctctgttgcttctctgggtcccagcatcaacgtcaatgacacctgcaagtatcactgcggccaagacctcaacaatcacaactgcatttccacctgtatcatccactaccctgtttgcagtgggtgccacccacagtgccagcatccaggaggaaactgaggaggtggtgaactcacagctcccgctgctcctctccctgctggcattgttgctgcttctgttggtgggggcctccctgctagcctggaggatgtttcagaaatggatcaaagctggtgaccattcagagctgtcccagaaccccaagcaggctgccacgcagagtgagctgcactacgcaaatctggagctgctgatgtggcctctgcaggaaaagccagcaccaccaagggaggtggaggtggaatacagcactgtggcctcccccagggaagaacttcactatgcctcggtggtgtttgattctaacaccaacaggatagctgctcagaggcctcgggaggaggaaccagattcagattacagtgtgataaggaagacataggcttttgtcctgcctcgccatcggagctctcatgggcccca

SEQ ID NO: 91696 - protein, 310 aa, Artificial Sequence
  derived and/or modified sequence
MTDVLPQPDCSPKAGREPLALEESGSKRPPNTGARLWGRVRNKLLRNKLDPQTVETKNWHTDVIEMNGIKVEFSMKFTSRDMSLKRTPSKKQTGVFGVKISVVTKRERSKVPYIVRQCVEEVEKRGIEEVGIYRISGVATDIQALKAVFDANNKDILLMLSDMDINAIAGTLKLYFRELPEPLLTDRLYPAFMEGIALSDPAAKENCMMHLLRSLPDPNLITFLFLLEHLKRVAEKEPINKMSLHNLATVFGPTLLRPSEVESKAHLTSAADIWSHDVMAQVQVLLYYLQHPPISFAELKRNTLYFSTDV

SEQ ID NO: 91697 - DNA, 933 bp, Artificial Sequence
  derived and/or modified sequence
atgaccgatgtactgccgcaaccagactgtagtcctaaggctggaagagagcccctggctcttgaggaatctggctctaagcgcccccccaataccggggcacggctatgggggcgagtccggaataagctcctccgaaacaagctcgatccccagactgttgagacaaagaattggcatactgacgtgatcgaaatgaacgggatcaaggtggaattctctatgaaattcacctcccgcgatatgagcctgaaacggacaccttccaagaaacagactggcgtgttcggcgttaagatttccgtggtgaccaagcgagaacgatctaaagtgccgtacattgtaagacaatgcgtagaggaagtagagaagcgtggcatagaggaggtcggaatctatcggattagcggcgtagcaacagacattcaggctctgaaagctgtatttgatgctaataacaaagatatcttgcttatgctttctgacatggatataaacgcaatcgccggcaccctcaagctgtatttcagggaacttccagaacccctgcttacagataggctgtaccccgcattcatggaaggcattgctctgtccgacccagccgcaaaagaaaactgcatgatgcatctcctgaggtccctcccagacccgaatttgatcacattcctgtttctcctggagcatttgaaaagagtggccgagaaggaacctattaataagatgtccctgcataatcttgctaccgtcttcgggccaacacttctgaggccctccgaggtcgagtctaaagctcacctcacatctgctgcagacatctggtcccacgatgtgatggcacaggtccaggtgctcctctactaccttcagcatccgccaatttcatttgcggagctgaaacggaataccctgtacttttccaccgacgtctag

SEQ ID NO: 91698 - DNA, 933 bp, Artificial Sequence
  derived and/or modified sequence
atgacagatgtgctgccccagcctgactgcagccccaaggccggccgggagcccctggccctggaggagagcggcagcaagaggcctcccaacacaggagcccggctgtggggccgggtgaggaacaagctgctgaggaacaagctggacccccagacagtggagaccaagaactggcacacagatgtgattgagatgaatggcatcaaggtggagttctccatgaagttcaccagccgggacatgagcctgaagaggacccccagcaagaagcagacaggagtgtttggagtgaagatctctgtggtgaccaagcgggagaggagcaaggtgccctacatcgtgcggcagtgtgtggaggaggtggagaagaggggcatcgaggaggtgggcatctaccgcatcagcggcgtggccacagacatccaggccctgaaggctgtgtttgatgccaacaacaaggacatcctgctgatgctgagtgacatggacatcaatgccatcgccggcaccctgaagctgtacttccgggagctgcctgagcccctgctgacagaccggctgtacccagccttcatggagggcatcgccctgagtgaccctgctgccaaggagaactgcatgatgcacctgctgcggagcctgcctgaccccaacctgatcaccttcctgttcctgctggagcacctgaagagggtggccgagaaggagcccatcaacaagatgagcctgcacaacctggccaccgtgtttggccccaccctgctgcggcccagcgaggtggagagcaaggcccacctgaccagcgctgctgacatctggagccatgatgtgatggcccaggtgcaggtgctgctgtactacctgcagcacccccccatcagctttgctgagctgaagaggaacaccctgtacttcagcacagatgtgtag

SEQ ID NO: 91699 - DNA, 933 bp, Artificial Sequence
  derived and/or modified sequence
atgaccgacgtgctgccccagcccgactgcagccccaaggccggccgcgagccactggccctcgaagaatctggatccaaacgaccccccaacacaggagctagattgtggggccgggtgcgtaacaagctgctaagaaacaaactagaccctcagacagtcgaaactaaaaactggcacactgacgtgattgaaatgaatgggataaaagtggaattttcaatgaagtttacgagcagggatatgagtctgaagcgcaccccctctaagaaacaaaccggagtatttggcgtgaaaatctctgtggtgacaaaacgggaacgctccaaagttccttatatagtaaggcagtgtgtcgaagaagtggagaaacgcggaatcgaggaagtaggtatatacagaatatctggtgtggccacggacatacaggccctgaaagccgtatttgatgcaaacaataaggacatcctactgatgctctccgacatggacataaacgcgattgcaggcactctaaagctgtactttcgcgaactgcccgagcccctcctcacggatcgactatacccagctttcatggagggcatcgcactgagcgaccccgcagcaaaggagaattgcatgatgcatctgctcagatcattgccagaccctaacctaatcacttttctgttcctgctcgagcacctcaagagagtcgcagagaaggaacccataaacaaaatgagtctgcacaacctggccacagtgttcggccctacactgctgaggccctctgaggtcgagtccaaagcccacttgacaagcgctgcagatatctggtcgcacgatgtgatggcccaggtccaggttttattgtactatcttcagcacccccccattagctttgctgagctcaagcggaacaccctatattttagcacggacgtttag

SEQ ID NO: 91700 - DNA, 933 bp, Artificial Sequence
  derived and/or modified sequence
atgactgacgtgctccctcaacctgattgcagcccgaaagctggacgggagcctcttgcactggaggaatccggttccaagagacccccaaataccggcgcacgactgtggggcagagttaggaacaagttactacgaaacaagctagatccccagactgtggagactaagaattggcacaccgatgtcattgaaatgaatggcataaaggtggaattcagcatgaagtttacctctcgagacatgagtcttaaacgcacacccagcaaaaagcaaacaggcgtatttggtgtcaagattagcgtcgtgactaagcgcgagaggtcgaaagtcccttacattgttagacaatgtgtggaagaagtggaaaagagggggatcgaagaagtcggtatttatagaatatccggggtggccacagacatacaggccctgaaagccgtgttcgacgccaataacaaggacatcctgctgatgctgagcgatatggacataaatgccatcgccggtactctgaaactgtatttcagagagttgccagagcccttgctgacagacagactctaccctgcttttatggagggaatagctctcagcgatcctgccgctaaggagaactgcatgatgcacctgctgcggagtctgcccgatccgaacttgataacctttttgttcttattggagcaccttaagagggtggctgagaaggaacccattaacaagatgagcttgcataacctggctacggtgtttggccctaccttgctacgcccatctgaagtggagagcaaggcacatttgacctctgccgctgacatatggtcccacgacgtcatggctcaggtacaggtcttgctttactatctgcaacatccccctatctcgttcgccgagcttaagcgcaacaccctgtacttttccactgatgtctag

SEQ ID NO: 91701 - DNA, 933 bp, Artificial Sequence
  derived and/or modified sequence
atgaccgacgtgctgccccagcccgactgcagccccaaggccggcagagagcccctggccctggaggagagcggcagcaagagaccccccaacaccggcgccagactgtggggcagagtgagaaacaagctgctgagaaacaagctggacccccagaccgtggagaccaagaactggcacaccgacgtgatcgagatgaacggcatcaaggtggagttcagcatgaagttcaccagcagagacatgagcctgaagagaacccccagcaagaagcagaccggcgtgttcggcgtgaagatcagcgtggtgaccaagagagagagaagcaaggtgccctacatcgtgagacagtgcgtggaggaggtggagaagagaggcatcgaggaggtgggcatctacagaatcagcggcgtggccaccgacatccaggccctgaaggccgtgttcgacgccaacaacaaggacatcctgctgatgctgagcgacatggacatcaacgccatcgccggcaccctgaagctgtacttcagagagctgcccgagcccctgctgaccgacagactgtaccccgccttcatggagggcatcgccctgagcgaccccgccgccaaggagaactgcatgatgcacctgctgagaagcctgcccgaccccaacctgatcaccttcctgttcctgctggagcacctgaagagagtggccgagaaggagcccatcaacaagatgagcctgcacaacctggccaccgtgttcggccccaccctgctgagacccagcgaggtggagagcaaggcccacctgaccagcgccgccgacatctggagccacgacgtgatggcccaggtgcaggtgctgctgtactacctgcagcacccccccatcagcttcgccgagctgaagagaaacaccctgtacttcagcaccgacgtgtag

SEQ ID NO: 91702 - DNA, 1033 bp, Artificial Sequence
  derived and/or modified sequence
agggaactagcgggactggcagccgggactgagcgctccacaggcgccttctctccagcgccgcgtcccgtcccccccggcatgaccgacgtcctgccccagcccgactgcagcccgaaggcggggcgcgaacccctggcgctggaggagtcggggagcaagcgcccccccaacaccggcgcccggctctggggccgcgtgcgcaacaagctgctccgaaacaagctggacccacaaaccgtggagaccaagaactggcacacggacgtgattgagatgaacgggatcaaagtggaattttccatgaaattcaccagccgagatatgagcctgaagaggaccccgtccaaaaagcagaccggcgtcttcggtgtgaagatcagcgtggtgacgaagcgggagcgctccaaggtgccctacatcgtccggcagtgtgtggaggaggtggagaagaggggtatcgaggaggttggcatctacaggatatcgggcgtggccacggacatccaggcgctcaaggccgtcttcgatgccaataacaaggacatcctgctgatgctgagtgacatggacatcaacgccatcgccgggacgctcaagctgtacttccgggaactgcccgagccgctcctcacggaccgactctacccagccttcatggagggcatcgccctgtcagaccctgctgccaaggaaaactgcatgatgcacctgctccgctccctgcccgaccccaacctcatcaccttcctcttcctgctggaacacttgaaaagggttgccgagaaggagcccatcaacaaaatgtcacttcacaacctggctaccgtgtttggacccacgttactgagaccctcagaagtggagagcaaagcacacctcacctcggctgcggacatctggtcccatgacgtcatggcgcaggtccaggtcctcctctactacctgcagcacccccccatttccttcgcagaactcaagcggaacacactgtacttctccaccgacgtgtagcccgaggcagggtggctgc

SEQ ID NO: 91703 - protein, 1010 aa, Artificial Sequence
  derived and/or modified sequence
RMDGKRRPGPGPGVPPKRARGGLWDDDDAPRPSQFEEDLALMEEMEAEHRLQEQEEEELQSVLEGVADGQVPPSAIDPRWLRPTPPALDPQTEPLIFQQLEIDHYVGPAQPVPGGPPPSRGSVPVLRAFGVTDEGFSVCCHIHGFAPYFYTPAPPGFGPEHMGDLQRELNLAISRDSRGGRELTGPAVLAVELCSRESMFGYHGHGPSPFLRITVALPRLVAPARRLLEQGIRVAGLGTPSFAPYEANVDFEIRFMVDTDIVGCNWLELPAGKYALRLKEKATQCQLEADVLWSDVVSHPPEGPWQRIAPLRVLSFDIECAGRKGIFPEPERDPVIQICSLGLRWGEPEPFLRLALTLRPCAPILGAKVQSYEKEEDLLQAWSTFIRIMDPDVITGYNIQNFDLPYLISRAQTLKVQTFPFLGRVAGLCSNIRDSSFQSKQTGRRDTKVVSMVGRVQMDMLQVLLREYKLRSYTLNAVSFHFLGEQKEDVQHSIITDLQNGNDQTRRRLAVYCLKDAYLPLRLLERLMVLVNAVEMARVTGVPLSYLLSRGQQVKVVSQLLRQAMHEGLLMPVVKSEGGEDYTGATVIEPLKGYYDVPIATLDFSSLYPSIMMAHNLCYTTLLRPGTAQKLGLTEDQFIRTPTGDEFVKTSVRKGLLPQILENLLSARKRAKAELAKETDPLRRQVLDGRQLALKVSANSVYGFTGAQVGKLPCLEISQSVTGFGRQMIEKTKQLVESKYTVENGYSTSAKVVYGDTDSVMCRFGVSSVAEAMALGREAADWVSGHFPSPIRLEFEKVYFPYLLISKKRYAGLLFSSRPDAHDRMDCKGLEAVRRDNCPLVANLVTASLRRLLIDRDPEGAVAHAQDVISDLLCNRIDISQLVITKELTRAASDYAGKQAHVELAERTRCSCWSTACPLTRSTTWSSSWPSPSCASSSPSWARAVPRLCYCGGTTRAARRCSRARWAASWPSPNAATAALAAAQCSATREPCVSSASPGSLSCIRRRYPI

SEQ ID NO: 91704 - protein, 1107 aa, Artificial Sequence
  derived and/or modified sequence
MDGKRRPGPGPGVPPKRARGGLWDDDDAPRPSQFEEDLALMEEMEAEHRLQEQEEEELQSVLEGVADGQVPPSAIDPRWLRPTPPALDPQTEPLIFQQLEIDHYVGPAQPVPGGPPPSRGSVPVLRAFGVTDEGFSVCCHIHGFAPYFYTPAPPGFGPEHMGDLQRELNLAISRDSRGGRELTGPAVLAVELCSRESMFGYHGHGPSPFLRITVALPRLVAPARRLLEQGIRVAGLGTPSFAPYEANVDFEIRFMVDTDIVGCNWLELPAGKYALRLKEKATQCQLEADVLWSDVVSHPPEGPWQRIAPLRVLSFDIECAGRKGIFPEPERDPVIQICSLGLRWGEPEPFLRLALTLRPCAPILGAKVQSYEKEEDLLQAWSTFIRIMDPDVITGYNIQNFDLPYLISRAQTLKVQTFPFLGRVAGLCSNIRDSSFQSKQTGRRDTKVVSMVGRVQMDMLQVLLREYKLRSYTLNAVSFHFLGEQKEDVQHSIITDLQNGNDQTRRRLAVYCLKDAYLPLRLLERLMVLVNAVEMARVTGVPLSYLLSRGQQVKVVSQLLRQAMHEGLLMPVVKSEGGEDYTGATVIEPLKGYYDVPIATLDFSSLYPSIMMAHNLCYTTLLRPGTAQKLGLTEDQFIRTPTGDEFVKTSVRKGLLPQILENLLSARKRAKAELAKETDPLRRQVLDGRQLALKVSANSVYGFTGAQVGKLPCLEISQSVTGFGRQMIEKTKQLVESKYTVENGYSTSAKVVYGDTDSVMCRFGVSSVAEAMALGREAADWVSGHFPSPIRLEFEKVYFPYLLISKKRYAGLLFSSRPDAHDRMDCKGLEAVRRDNCPLVANLVTASLRRLLIDRDPEGAVAHAQDVISDLLCNRIDISQLVITKELTRAASDYAGKQAHVELAERMRKRDPGSAPSLGDRVPYVIISAAKGVAAYMKSEDPLFVLEHSLPIDTQYYLEQQLAKPLLRIFEPILGEGRAEAVLLRGDHTRCKTVLTGKVGGLLAFAKRRNCCIGCRTVLSHQGAVCEFCQPRESELYQKEVSHLNALEERFSRLWTQCQRCQGSLHEDVICTSRDCPIFYMRKKVRKDLEDQEQLLRRFGPPGPEAW

SEQ ID NO: 91705 - protein, 773 aa, Artificial Sequence
  derived and/or modified sequence
MILDTDYITEDGKPVIRIFKKENGEFKIDYDRNFEPYIYALLKDDSAIEDVKKITAERHGTTVRVVRAEKVKKKFLGRPIEVWKLYFTHPQDVPAIRDKIKEHPAVVDIYEYDIPFAKRYLIDKGLIPMEGDEELKMLAFDIETLYHEGEEFAEGPILMISYADEEGARVITWKNIDLPYVDVVSTEKEMIKRFLKVVKEKDPDVLITYNGDNFDFAYLKKRSEKLGVKFILGREGSEPKIQRMGDRFAVEVKGRIHFDLYPVIRRTINLPTYTLEAVYEAIFGQPKEKVYAEEIAQAWETGEGLERVARYSMEDAKVTYELGKEFFPMEAQLSRLVGQSLWDVSRSSTGNLVEWFLLRKAYERNELAPNKPDERELARRRESYAGGYVKEPERGLWENIVYLDFRSLYPSIIITHNVSPDTLNREGCEEYDVAPQVGHKFCKDFPGFIPSLLGDLLEERQKVKKKMKATIDPIEKKLLDYRQRAIKILANSFYGYYGYAKARWYCKECAESVTAWGRQYIETTIREIEEKFGFKVLYADTDGFFATIPGADAETVKKKAKEFLDYINAKLPGLLELEYEGFYKRGFFVTKKKYAVIDEEDKITTRGLEIVRRDWSEIAKETQARVLEAILKHGDVEEAVRIVKEVTEKLSKYEVPPEKLVIYEQITRDLKDYKATGPHVAVAKRLAARGIKIRPGTVISYIVLKGSGRIGDRAIPFDEFDPAKHKYDAEYYIENQVLPAVERILRAFGYRKEDLRYQKTRQVGLGAWLKPKT

SEQ ID NO: 91706 - DNA, 3033 bp, Artificial Sequence
  derived and/or modified sequence
cgcatggatggaaaacgcagacctggccccgggcccggggtccccccgaagcgcgcaaggggaggtctgtgggacgatgacgacgccccgagaccatctcaattcgaagaggatctggctctgatggaagagatggaggccgaacaccgcctgcaagagcaggaagaggaggagctccagagtgtgctcgagggagttgccgatgggcaagtaccacctagcgccatcgatcctcggtggctaaggcccaccccgcctgctctagatcctcagacagaacctctgattttccaacaattggagattgaccattatgtgggccccgcccagcccgtaccagggggacccccgccgtctcgcggtagcgtaccggttcttagggcctttggcgttactgacgagggattctccgtgtgctgtcacatccacggctttgccccttatttctatacccccgcccctccaggatttggaccagagcacatgggcgacctccagagggaactgaacctggctatttcacgcgactcccggggcgggagagagctcaccgggcccgctgtcctggcggtggaactgtgttcaagagaaagcatgttcggctaccacggccacgggccatcgccctttctacgcatcaccgtagcgctgccgagactcgtcgcgccagctagacgcttgctcgagcaggggatccgggtggctggacttgggacgccgagctttgctccctacgaggccaacgtggacttcgagatacgctttatggtagacactgatatagtaggatgtaactggctggagctgccagccggaaagtacgcactgcgccttaaagagaaagccactcagtgtcagctggaggcggacgtcctctggtctgatgttgtgtctcatcctcctgagggaccgtggcagcgcattgctccccttcgagttctctcattcgatatcgagtgcgctggtcggaagggaattttcccagagcccgaacgtgatcctgtaatccagatatgttcactaggcctgaggtggggagagccagagcccttccttagactggcactcactctgaggccttgcgcccccattctgggggcgaaagtacagagttatgaaaaagaggaagaccttcttcaggcctggtccacctttattcggatcatggatccagatgtgattactggttacaatattcaaaacttcgacttgccttacctgatcagcagggcccaaacgctgaaggtccagacattcccattcctgggacgtgtggccgggctctgttctaatattcgggactctagcttccagtctaagcagacaggtagacgggacactaaggtggtctccatggtgggaagagttcagatggacatgttgcaggtgttgttgagagaatataagctgcggagttataccctgaacgccgtatcattccacttcctcggggaacaaaaggaagatgtacagcattcgatcatcacagacctgcagaatggaaacgaccagaccagaaggaggctggcagtgtattgtctcaaggatgcgtacttaccgcttcgcctcttggagcggctgatggtgttggtcaacgctgtcgagatggcgagagtgacaggtgttccactctcctatctgctgtccagggggcagcaggttaaggtcgtatcgcagctcctgagacaggctatgcacgagggcctcctgatgcctgtggtgaagagcgaaggcggcgaagactatactggtgctaccgtcatcgagccactcaagggttattacgatgtccctattgctacactggacttcagttcattgtaccccagtatcatgatggcgcataatttgtgctatacaaccctgctacggccaggtactgcccagaaactagggctgacagaggatcagttcatcagaacacccacaggagacgaatttgtcaagacgtcggttcgaaaagggctactgcctcagatcctcgaaaatctcctcagcgcccgcaaaagagccaaggccgaactggctaaagaaaccgacccccttcgcaggcaggttctggacggcaggcagctagcactgaaagtctccgccaatagtgtctacgggttcacaggtgctcaggtgggaaaactgccctgcctagagattagccagagtgttaccggctttggccgccagatgattgaaaagacgaaacaactggtggagagcaagtacacagtcgaaaacggatactcaaccagcgccaaagtggtctatggtgataccgattctgtgatgtgcagattcggggtaagcagtgtggctgaggcaatggccctgggtagggaagcagccgactgggtgtccggccacttcccctctcctattaggttggagtttgagaaagtgtattttccatacctcctaatctctaagaagaggtatgctggtttactcttcagcagtcggcccgacgcgcacgatagaatggattgtaaggggctggaggctgtgcgacgggataactgccctctcgtcgctaatctggtcacggcttcattgcgccggctgctgatcgacagggaccctgagggggccgtcgcccacgcacaagacgtgatttccgatctcctgtgtaataggatcgacatcagccagctcgtgataacgaaagaactcaccagggctgccagcgactatgctggaaaacaggcacacgttgagttagccgagaggacgcgttgcagctgttggtccacggcatgccctctgacacgatctacgacttggagctcatcttggccctccccttcatgtgcctccagcagtccttcttgggcaagggcggtgccccgcctgtgctattgtggcgggacaaccagagctgcacggcggtgttcccgcgctcgctgggctgcttcttggccaagtccaaatgctgcaacagcggctctcgcagccgctcagtgcagtgctacacgtgaaccttgcgtatcctccgccagtcccggaagcctgtcttgtattaggagacgttacccaatttag

SEQ ID NO: 91707 - DNA, 3324 bp, Artificial Sequence
  derived and/or modified sequence
atggatggcaaacggagacctggcccagggccaggtgtgcctccaaaaagggctcgcggaggactctgggacgatgatgatgccccacgtcctagtcaatttgaggaagacctcgctctcatggaggagatggaggctgagcaccggctgcaggagcaggaagaagaagaactccagtcagtactggaaggagttgctgacggacaggtgccacctagtgccatcgacccaaggtggctccgtccgaccccacccgccctcgacccgcagacagaaccattgatatttcagcagctcgaaatcgaccactatgtaggaccagcccagcccgtgcccggcggaccaccccctagcaggggatccgtgcccgtgctcagagcattcggcgtgaccgacgaaggttttagcgtgtgctgccacatccacggcttcgctccctacttctacacccccgcaccccctggttttggcccagaacacatgggagacctgcagcgcgagctcaacctggcaatcagcagagactccaggggtggaagggaattaactgggccggcagtcctggctgtcgagctctgctccagagaatcgatgttcggctaccatgggcatggaccatctccatttctgaggatcactgtggctctacctagactggtggcaccagccaggaggctactggagcagggcatacgagtcgccggcctgggcacacctagcttcgccccttacgaagctaacgtggacttcgagataaggttcatggtggacacggacattgtcgggtgcaactggctggagttacccgctggaaaatacgcactacggctgaaagaaaaggccactcaatgtcaactcgaagccgatgtcctttggtccgatgtggtctcgcacccaccggagggcccctggcagcgtattgccccccttcgggtcctatcatttgatattgagtgcgctggacgaaagggaatcttccctgagcccgagagagatcccgtgatacagatttgctcacttgggctccgatggggagagccagaaccgtttttacgactcgcactcaccctgcgaccctgcgccccaatcctgggcgccaaagtgcagtcctatgaaaaggaggaagacctactgcaggcctggagcacttttatcaggatcatggaccccgatgtgataacagggtacaatatccaaaactttgatctaccatacctgatttctagagcccagactttgaaagtgcagacctttccattcctcggccgggtagccggactttgctcgaatatcagagattcttcgttccagagtaagcagacgggtcgcagggacaccaaagtggtgtcaatggtagggagagtacagatggacatgctgcaggtcctcctgcgagagtataagctcaggagctatacattgaacgcagtcagcttccatttcctcggtgagcagaaggaagacgtacagcactccatcataacagacctgcagaatgggaacgaccagacccgccgacggctcgccgtatattgcctaaaggacgcctatctacccctacgacttctggaaaggctgatggtccttgttaacgcagtagaaatggctagggtcactggagtgcctctatcttatctgctgtcacggggccagcaggtgaaggttgtgtcacagctgctcagacaggctatgcacgaaggcctgctcatgccagttgtcaagagtgagggaggtgaggactacaccggcgccactgtcatcgaaccattaaaagggtactatgatgtcccgattgctaccctagatttctcttctctgtaccctagtatcatgatggcccacaatctttgttataccacactgttgcggccaggtactgctcagaagttgggtctcaccgaggatcagttcatccgtacacccaccggggacgaatttgtgaagactagcgtgagaaaagggctccttccacagatccttgagaacctcctgagtgctcggaaaagggcaaaggccgagctggctaaagagaccgacccgctgcggagacaggtgctcgatggaaggcaacttgctctgaaagtatcagccaatagtgtctatgggttcactggggcgcaagttggcaagttgccatgtctggaaatcagccagagcgtgacgggtttcggtagacagatgatcgaaaagacaaagcagcttgttgagagcaaatacactgtggaaaacgggtacagcacgtccgcgaaggttgtttatggagatactgactccgtgatgtgccgattcggcgttagttcggtagccgaggcaatggccctcggacgagaagcagcagattgggtgagtggccattttccgtcccccataagactggagttcgaaaaagtctattttccatatcttttgatttcaaagaaacgctacgcaggactgctgttcagtagccgccctgatgcccacgaccgaatggactgcaaagggctggaagccgttaggcgtgataattgccccctggtggccaatctggttaccgcctccctaaggcggctgctgatcgatagggaccccgaaggagccgtggcacatgcccaggatgttatcagcgatctgttgtgcaataggattgatataagtcaactcgtaatcacaaaggagctcacccgcgcagcatcggattatgccggtaagcaggctcatgtggaactcgcggagaggatgagaaagagggacccaggtagcgctccaagtctgggcgatagggtcccttatgtcattatctcagccgctaaaggcgttgccgcctacatgaagagtgaggaccccctcttcgtgctcgagcactcgctccctatcgatactcagtattatcttgagcagcagctggctaaaccccttctaagaatattcgagccaatcttgggggagggtagggcagaggccgtcctgcttaggggcgaccacacacgatgcaagaccgtcctgacaggcaaggtgggcggcctgctggcatttgccaaaagacgtaattgctgcataggctgtcgcacagtgcttagccaccagggggcagtttgtgaattctgccagccacgggagagtgaactgtaccaaaaggaagtgtctcatcttaatgccttggaggaacgatttagtcgcctctggactcaatgtcagcgctgccagggaagcttacacgaagacgtgatttgcaccagccgggactgccccattttctacatgaggaagaaagttcggaaggaccttgaggatcaggaacaactgctgcggcgcttcggaccccctgggccggaagcgtggtag

SEQ ID NO: 91708 - DNA, 3033 bp, Artificial Sequence
  derived and/or modified sequence
aggatggatggcaagaggcggcccggccctggccctggggtgccccccaagagggcccggggcggcctgtgggatgatgatgatgccccccggcccagccagtttgaggaggacctggccctgatggaggagatggaggccgagcaccggctgcaggagcaggaggaggaggagctgcagagcgtgctggagggcgtggctgatggccaggtgccccccagcgccatcgacccccgctggctgcggcccaccccaccagccctggacccccagacagagcccctcatcttccagcagctggagattgaccactacgtgggccctgcccagcctgtgcctgggggccccccacccagccggggctctgtgcctgtgctgcgggcctttggagtgacagatgagggcttctctgtgtgctgccacatccacggctttgccccctacttctacaccccagcccctcctggctttggacctgagcacatgggagacctgcagcgggagctgaacctggccatcagccgggacagcagaggaggccgggagctgaccggccctgctgtgctggccgtggagctgtgcagccgggagagcatgtttggctaccacggccacggccccagccccttcctgcgcatcaccgtggccctgccccggctggtggccccagcccggcggctgctggagcagggcatccgggtggccggcctgggcacccccagctttgccccctatgaggccaacgtggactttgagatccgcttcatggtggacacagacatcgtgggctgcaactggctggagctgcctgctgggaagtatgccctgcggctgaaggagaaggccacccagtgccagctggaggctgatgtgctgtggagcgatgtggtgagccaccccccagagggcccctggcagagaattgcccccctgcgggtgctgagctttgatattgaatgtgccggcaggaagggcatcttccctgagcctgagcgggaccccgtcatccagatctgcagcctgggcctgcgctggggcgagcctgagcccttcctgcggctggccctgaccctgcggccctgtgcccccatcctgggcgccaaggtgcagagctatgagaaggaggaggacctgctgcaggcctggagcaccttcatccgcatcatggaccctgatgtgatcaccggctacaacatccagaactttgacctgccctacctgatcagccgggcccagaccctgaaggtgcagaccttccccttcctgggccgggtggccggcctgtgcagcaacatccgggacagcagcttccagagcaagcagacaggccggcgggacaccaaggtggtgtccatggtgggccgggtgcagatggacatgctgcaggtgctgctgcgggagtacaagctgcggagctacaccctgaatgctgtgtccttccacttcctgggggagcagaaggaggatgtgcagcacagcatcatcacagacctgcagaatggaaatgaccagacccggcggcggctggccgtgtactgcctgaaggatgcctacctgcccctgcggctgctggagcggctgatggtgctggtgaatgctgtggagatggcccgggtgactggagtgcccctgagctacctgctgagccggggccagcaggtgaaggtggtgtcccagctgctgcggcaggccatgcatgagggcctgctgatgcctgtggtgaagtctgagggcggggaggactacacaggagccaccgtcatcgagcccctgaagggctactatgatgtgcccatcgccaccctggacttcagcagcctgtaccccagcatcatgatggcccacaacctgtgctacaccaccctgctgcggcctggaacagcccagaagctgggcctgacagaggaccagttcatccgcacccccactggagatgaatttgtgaagacctctgtgaggaagggcctgctgccccagatcctggagaacctgctgagcgccaggaagagggccaaggccgagctggccaaggagacagaccccctgcggcggcaggtgctggatggccggcagctggccctgaaggtgtctgccaacagcgtgtatggcttcaccggggcccaggtgggcaagctgccctgcctggagatcagccagagcgtgacaggcttcggccggcagatgattgagaagaccaagcagctggtggagagcaagtacacagtggagaatggctacagcaccagcgccaaggtggtgtatggagacacagattctgtgatgtgccgcttcggcgtgtcctctgtggccgaggccatggccctgggccgggaggccgctgactgggtgtctggccacttccccagccccatccggctggagtttgagaaggtgtacttcccctacctgctgatcagcaagaagagatatgccggcctgctcttcagcagcaggccagatgcccatgacaggatggactgcaagggcctggaggccgtgcggcgggacaactgccccctggtggccaacctggtgacagccagcctgcggcggctgctgattgaccgggaccctgagggcgctgtggcccacgcccaggatgtgatcagtgacctgctgtgcaacagaattgacatcagccagctggtgatcaccaaggagctgaccagggctgccagtgactatgctgggaagcaggcccacgtggagctggccgagaggacccgctgcagctgctggagcacagcctgccccctgaccaggagcaccacctggagcagctcctggcccagccccagctgtgccagcagcagccccagctgggcccgggctgtgccccggctgtgctactgcggcggcaccaccagggctgcccggcgctgcagccgggcccgctgggccgcctcctggcccagccccaatgctgccacagctgccctggccgccgcccagtgcagcgccacccgggagccctgtgtgtcctctgccagccctggcagcctgagctgcatcagaagacgctaccccatctag

SEQ ID NO: 91709 - DNA, 3324 bp, Artificial Sequence
  derived and/or modified sequence
atggatggcaagagaagacctggccctggccctggggtgccccccaagagggcccggggcggcctgtgggatgatgatgatgccccccggcccagccagtttgaggaggacctggccctgatggaggagatggaggccgagcaccggctgcaggagcaggaggaggaggagctgcagagcgtgctggagggcgtggctgatggccaggtgcccccatctgccatcgacccccgctggctgcggcccaccccaccagccctggacccccagacagagcccctcatcttccagcagctggagattgaccactacgtgggccctgcccagcctgtgcctgggggccccccacccagccggggctctgtgcctgtgctgcgggccttcggcgtgacagatgagggcttctctgtgtgctgccacatccacggctttgccccctacttctacaccccagcccctcctggcttcggccctgagcacatgggagacctgcagcgggagctgaacctggccatcagccgggacagccggggcggccgggagctgactggacctgctgtgctggccgtggagctgtgcagccgggagagcatgtttggctaccacggccacggccccagccccttcctgcgcatcaccgtggccctgccccggctggtggccccagcccggcggctgctggagcagggcatccgggtggccggcctgggcacccccagctttgccccctatgaggccaacgtggactttgagatccgcttcatggtggacacagacatcgtgggctgcaactggctggagctgcctgctgggaagtatgccctgcggctgaaggagaaggccacccagtgccagctggaggctgatgtgctgtggagcgatgtggtgagccaccccccagagggcccctggcagagaattgcccccctgcgggtgctgagctttgatattgaatgtgccggcaggaagggcatcttccctgagcctgagcgggaccctgtgatccagatctgcagcctgggcctgcgctggggcgagcctgagcccttcctgcggctggccctgaccctgcggccctgtgcccccatcctgggcgccaaggtgcagagctatgagaaggaggaggacctgctgcaggcctggagcaccttcatccgcatcatggaccctgatgtgatcaccggctacaacatccagaactttgacctgccctacctgatcagccgggcccagaccctgaaggtgcagaccttccccttcctgggccgggtggccggcctgtgcagcaacatccgggacagcagcttccagagcaagcagacaggaagaagagacaccaaggtggtgtccatggtgggccgggtgcagatggacatgctgcaggtgctgctgcgggagtacaagctgcggagctacaccctgaatgctgtgtccttccacttcctgggggagcagaaggaggatgtgcagcacagcatcatcacagacctgcagaatggaaatgaccagacccggcggcggctggccgtgtactgcctgaaggatgcctacctgcccctgcggctgctggagcggctgatggtgctggtgaatgctgtggagatggcccgggtgactggagtgcccctgagctacctgctgagccggggccagcaggtgaaggtggtgtcccagctgctgcggcaggccatgcatgagggcctgctgatgcctgtggtgaagtctgagggcggggaggactacaccggggccaccgtgattgagcccctgaagggctactatgatgtgcccatcgccaccctggacttcagcagcctgtaccccagcatcatgatggcccacaacctgtgctacaccaccctgctgcggcccggcacagcccagaagctgggcctgacagaggaccagttcatccgcacccccactggagatgaatttgtgaagacctctgtgaggaagggcctgctgccccagatcctggagaacctgctgagcgccaggaagagggccaaggccgagctggccaaggagacagaccccctgcggcggcaggtgctggatggccggcagctggccctgaaggtgtctgccaacagcgtgtatggcttcaccggggcccaggtgggcaagctgccctgcctggagatcagccagagcgtgactggatttggccggcagatgattgagaagaccaagcagctggtggagagcaagtacacagtggagaatggctacagcaccagcgccaaggtggtgtatggagacacagacagcgtgatgtgccgctttggagtgtcctctgtggccgaggccatggccctgggccgggaggccgctgactgggtgtctggccacttccccagccccatccggctggagtttgagaaggtgtacttcccctacctgctgatcagcaagaagagatatgccggcctgctcttcagcagcaggccagatgcccatgacaggatggactgcaagggcctggaggccgtgagaagagacaactgccccctggtggccaacctggtgacagccagcctgcggcggctgctgattgaccgggaccctgagggcgctgtggcccacgcccaggacgtcatcagtgacctgctgtgcaacagaattgacatcagccagctggtgatcaccaaggagctgacccgggccgccagtgactatgccggcaagcaggcccacgtggagctggccgagaggatgaggaagagggaccccggcagcgcccccagcctgggggacagagtgccctacgtgatcatctctgctgccaagggcgtggccgcctacatgaagtctgaggaccccctgtttgtgctggagcacagcctgcccatcgacacccagtactacctggagcagcagctggccaagcccctgctgcgcatctttgagcccatcctgggggagggccgggcagaggccgtgctgctgcggggggaccacacccgctgcaagacagtgctgaccgggaaggtgggcggcctgctggcctttgccaagagaagaaactgctgcatcggctgcaggacagtgctgagccaccagggcgctgtgtgtgagttctgccagccccgggagagcgagctgtaccagaaggaggtgagccacctgaatgccctggaggagcgcttcagccggctgtggacccagtgccagcgctgccagggcagcctgcatgaagatgtgatctgcaccagccgggactgccccatcttctacatgaggaagaaggtgaggaaggacctggaggaccaggagcagctgctgcggagatttggacctcctggccctgaggcctggtag

SEQ ID NO: 91710 - DNA, 3033 bp, Artificial Sequence
  derived and/or modified sequence
cggatggacggcaagcggcggcccggccccggccccggcgtgccccccaagagagctagaggaggtctctgggacgatgacgatgcaccaagaccctcccagtttgaggaggatctcgccctgatggaggagatggaggccgaacaccgcctgcaggaacaggaggaagaggaactgcagtcggtcctggagggcgtcgccgatggccaagtacctccgagcgctatcgatccacgttggctgcggcccacaccccctgccctggacccacagactgagccactgatcttccagcagcttgagatagaccactacgtcggaccagcccaacctgtcccgggaggcccaccaccatctcgaggttctgtccccgttcttcgcgcctttggagtaaccgatgagggcttcagcgtctgctgtcacatccacggcttcgccccgtacttctacactcctgccccgcctggcttcgggccggagcacatgggtgatttgcagagggaactgaatctcgctattagccgggactctcgagggggccgggaattgaccggccctgccgtgctggccgtggagttgtgttcccgagaatctatgtttggttaccacgggcatggcccttcccccttcctgcgtatcaccgtcgccctgcctagattggtagcacctgccagaaggctgcttgaacagggcatccgcgtggccggcctgggaactcctagctttgccccatatgaagccaacgttgactttgagatccggtttatggtggataccgacatcgtcggctgcaattggctcgaactcccagccgggaagtacgccctgaggctgaaggaaaaagcaacgcagtgccagctcgaggctgacgtactgtggagtgacgtggttagtcaccctcccgagggtccctggcagcggattgcgcctctgcgagtgttgagctttgacattgagtgcgctggccgaaaagggatctttccagaacccgagcgggatcccgtgatccagatttgcagtttaggcttgagatggggtgagcccgagcccttcctgcgcttggcactcacacttcggccatgtgccccaattttaggagcaaaagtccaatcctatgagaaggaggaggatcttttgcaggcttggagtactttcatcagaattatggaccccgatgttatcaccggatacaatatccagaatttcgatctaccctacctgatcagccgcgcccagacattaaaggtgcagactttcccctttctcggaagggttgccggactgtgtagtaacattcgggattcttcattccagtccaaacagacgggcagacgagacactaaagtggtttctatggtgggtagagtacagatggacatgctgcaggtcctactgagagaatataaactgaggagctacaccctgaacgctgtgtctttccatttcttgggtgagcagaaggaagacgtgcagcacagcatcatcaccgaccttcagaatggcaatgaccaaacgcgccgccgactcgccgtgtattgcctgaaggatgcctatctacctcttcgattgttagagaggctgatggtattggtaaatgctgtggaaatggccagagtgactggcgtacctctgtcctaccttctttcaaggggacaacaagtgaaggtggtgagtcaactcctccggcaggctatgcacgagggattgctgatgcccgtggtcaaatctgaggggggcgaggactatacaggcgcgaccgtgatagagccccttaaaggctattacgacgtgcctattgctactctggatttctcatctctgtatccttccataatgatggcccacaacctctgctacactacgctcttgcgcccaggaacggctcagaagctcggcctcactgaagatcagtttatcaggaccccaaccggcgatgagttcgtaaaaacttctgtacggaaaggcctgctgccacagattctggaaaacttgctctccgctcggaaacgtgctaaggcagagcttgccaaggaaactgacccactgcgaaggcaggtccttgacggcaggcagctggccctgaaagtctccgcaaatagcgtctacggattcaccggagctcaggtgggtaagctgccatgtctggagatttcccagagtgtcacaggtttcggccgccagatgattgagaaaactaagcagctcgtggaatccaagtatacagtggaaaacgggtactcaacttcagcgaaggtggtctacggcgacaccgacagtgtgatgtgccgcttcggcgtctcttccgtggccgaagccatggcgcttggcagagaggctgctgattgggtttctggtcatttcccgtctcctattcggctggagttcgaaaaggtatactttccctacctcctcatctcgaagaaacgatacgccggtctgctcttctccagccggcctgacgctcatgatcgaatggactgtaagggtctggaagccgtgcgccgcgataactgccctctggtggcaaatctggtaaccgcctccctccgacggctgttaattgatcgcgatccggagggagccgtggcacatgctcaggacgtgatcagcgatctgctctgcaacagaattgatatctcgcagcttgtcatcaccaaggaattaactagggccgcttcagattatgccggaaaacaggcccacgtggaactggctgagagaacgcggtgctcctgctggagcaccgcctgcccactgacacgttctacgacctggagtagtagctggcctagtccttcctgtgcctctagcagccctagctgggcaagggccgtgccacggctttgttattgtggcgggacaactcgcgccgctcgaaggtgtagtagggcgcggtgggccgcatcttggccctcacctaacgccgcgactgctgccttggccgcagcccagtgtagcgccacacgggagccttgcgtatccagcgcaagcccagggtcattatcctgtattaggcgtcggtaccctatctag

SEQ ID NO: 91711 - DNA, 3324 bp, Artificial Sequence
  derived and/or modified sequence
atggacggcaagcggcggcccggccccggccccggcgtgccccccaaacgggcccgaggagggctctgggacgacgacgacgccccacggcccagccagttcgaggaagaccttgcactgatggaggaaatggaggcagaacacagactgcaggaacaggaggaagaagagttacagagcgtactggagggcgtcgctgacggccaagtcccccccagcgcgattgacccgaggtggctaagacccacaccccctgcactggatcctcagacggagcccctgattttccagcagttagagatcgaccactacgtgggcccagcacagccagtccctggggggccaccccctagtagaggatctgtcccggtgctcagggcattcggcgttactgatgagggattctctgtctgttgtcatatccacggatttgccccatacttttatacacctgcaccgccgggctttggtccagagcacatgggcgatttgcaacgcgagcttaacctcgccataagccgggattcaagaggggggcgggagttgacgggccccgctgtgttggctgtagaactctgttcaagagaatcgatgttcggctatcacggccacggtccgtcaccttttttacgaattactgtggccttgccacggctcgtcgcacccgctcgccgactcttggaacaaggtatccgggtggccggtctcggaaccccctctttcgcaccctatgaagccaacgtagatttcgaaattaggttcatggtggatactgatatcgtgggctgtaattggctcgaactaccagcgggtaagtatgcactccggctcaaggagaaagccacacaatgccaactagaagccgacgtcttgtggtctgatgtggtctctcaccccccagagggcccctggcagcgtatagctcccttgagagttctgtctttcgacatcgagtgcgctggcagaaaagggatatttcccgaacctgaaagggaccccgtaatccaaatttgttcactggggctgaggtggggcgaaccagagccattcctgaggctggccctgacgctgcggccttgcgcgcctattttgggcgccaaagttcagtcctacgagaaagaggaggaccttttgcaggcctggtcaacttttattcggattatggacccggacgtgatcacagggtataatatccagaacttcgacttaccttatcttatctcacgagcacagacactgaaggtccagactttcccattccttgggcgtgttgctggactctgcagcaacatccgtgactcaagttttcaatccaagcagacgggccggagggataccaaagtggtttctatggtggggcgggtccagatggacatgcttcaggtgctgctgcgggagtacaagctacggagctataccctcaatgccgtgtcttttcacttcctgggtgagcagaaagaagatgtgcagcatagtattatcactgatctgcagaatgggaatgatcagacgcgccgtcggctagccgtgtactgccttaaggatgcctacctgccgctgagattgctcgaaagactgatggtgctggttaatgccgtcgaaatggcacgggtgaccggagttcccctatcctacctgctctccagggggcagcaagtcaaagtcgtgtcccaactgctccgccaggcaatgcatgaaggtctgctgatgcctgtggtcaagagcgagggcggggaagactacacaggagctacagtgatcgagccactgaaggggtattatgacgtgcctatcgccaccctggatttctcttccctgtacccctccattatgatggcacacaatctttgctacaccaccttattaaggcctggaacagcccagaagctaggtctgaccgaggatcagtttattagaacaccaactggtgacgagttcgtgaagacaagtgtgcgcaagggccttcttcctcaaatattggaaaatctcctctccgcacgaaagcgcgctaaggctgagcttgccaaggaaactgaccccctgaggagacaagtcctggacggacggcagctcgcgttgaaggtgtctgctaatagtgtgtatggctttaccggtgcacaggttggcaagttgccttgcctggaaatatctcagagcgtgaccggcttcggccgacaaatgatagagaaaactaagcagttagttgagagcaagtacacagtcgaaaatgggtattctacctcggccaaggtggtctacggcgatactgacagtgtcatgtgtaggtttggcgtgagttcagtggctgaggccatggcactgggcagagaggcggccgattgggtgagtggccacttcccatcccccatccgcctcgagttcgaaaaggtatactttccgtatttattaatttcaaaaaaacgctacgccggcctgctgttctcctcaaggccagacgctcacgatcgtatggactgtaaaggactcgaggcagttagacgggataattgccccctggtggccaacctcgtgaccgcctctttacgtcggctcctgatcgatcgcgaccctgagggcgctgtcgcacatgcacaggatgtcatttctgacctgctctgtaacagaattgatatatcccaacttgttataactaaagagttgactagggctgcttccgactatgcagggaagcaggcccacgtggagctggcggagcgcatgcgtaaaagagatcccggttccgcgccaagcctaggtgaccgggtgccgtatgtcatcattagcgctgcaaagggtgtcgccgcatacatgaagtcagaggatccactgttcgtcttagaacattctctacccatcgacacacagtattatctcgagcagcagctagcaaagccgctgcttcgcatcttcgaaccaattctgggcgagggccgcgctgaagcagtccttctgagaggggatcatacccggtgtaagaccgtgctgactggaaaggtgggcgggctgcttgcatttgcaaagaggaggaattgttgcattgggtgccggacagttctgtcacatcagggtgcggtctgcgagttttgtcaacctcgagaatccgagttataccaaaaagaggtttcacatcttaatgcgctggaggaacgcttcagtcggctgtggacgcagtgtcagaggtgccaggggagcctccatgaggacgtgatttgcacctcaagagattgtcccatcttctacatgagaaagaaggttcgaaaggacctggaggaccaggagcagctgctcaggagatttggccccccaggaccagaagcttggtag

SEQ ID NO: 91712 - DNA, 3331 bp, Artificial Sequence
  derived and/or modified sequence
cggcggcgtaggctgtggcgggaaacgctgtttgaagcggcaggatggatggcaagcggcggccaggcccagggcccggggtgcccccaaagcgggcccgtgggggcctctgggatgatgatgatgcacctcggccatcccaattcgaggaggacctggcactgatggaggagatggaggcagaacacaggctgcaggagcaggaggaggaggagctgcagtcagtcctggagggggttgcagacgggcaggtcccaccatcagccatagatcctcgctggcttcggcccacaccaccagcgctggacccccagacagagcccctcatcttccaacagttggagattgaccattatgtgggcccagcgcagcctgtgcctggggggcccccaccatcccgcggctccgtgcctgtgctccgcgccttcggggtcaccgatgaggggttctctgtctgctgccacatccacggcttcgctccctacttctacaccccagcgccccctggtttcgggcccgagcacatgggtgacctgcaacgggagctgaacttggccatcagccgggacagtcgcggggggagggagctgactgggccggccgtgctggctgtggaactgtgctcccgagagagcatgtttgggtaccacgggcacggcccctccccgttcctgcgcatcaccgtggcgctgccgcgcctcgtggccccggcccgccgtctcctggaacagggcatccgtgtggcaggcctgggcacgcccagcttcgcgccctacgaggccaacgtcgactttgagatccggttcatggtggacacggacatcgtcggctgcaactggctggagctcccagctgggaaatacgccctgaggctgaaggagaaggctacgcagtgccagctggaggcggacgtgctgtggtctgacgtggtcagtcacccaccggaagggccatggcagcgcattgcgcccttgcgcgtgctcagcttcgatatcgagtgcgccggccgcaaaggcatcttccctgagcctgagcgggaccctgtcatccagatctgctcgctgggcctgcgctggggggagccggagcccttcctacgcctggcgctcaccctgcggccctgtgcccccatcctgggtgccaaggtgcagagctacgagaaggaggaggacctgctgcaggcctggtccaccttcatccgtatcatggaccccgacgtgatcaccggttacaacatccagaacttcgaccttccgtacctcatctctcgggcccagaccctcaaggtacaaacattccctttcctgggccgtgtggccggcctttgctccaacatccgggactcttcattccagtccaagcagacgggccggcgggacaccaaggttgtcagcatggtgggccgcgtgcagatggacatgctgcaggtgctgctgcgggagtacaagctccgctcctacacgctcaatgccgtgagcttccacttcctgggcgagcagaaggaggacgtgcagcacagcatcatcaccgacctgcagaatgggaacgaccagacccgccgccgcctggctgtgtactgcctgaaggatgcctacctgccactgcggctgctggagcggctcatggtgctggtgaacgccgtggagatggcgagggtcactggcgtgcccctcagctacctgctcagtcgtggccagcaggtcaaggtcgtatcccagctgttgcggcaggccatgcacgaggggctgctgatgcccgtggtgaagtcagagggcggcgaggactacacgggagccactgtcatcgagcccctcaaagggtactacgacgtccccatcgccaccctggacttctcctcgctgtacccgtccatcatgatggcccacaacctgtgttacaccacgctccttcggcccgggactgcacagaaactgggcctgactgaggatcagttcatcaggacccccaccggggacgagtttgtgaagacctcagtgcggaaggggctgctgccccagatcctggagaacctgctcagtgcccggaagagggccaaggccgagctggccaaggagacagaccccctccggcgccaggtcctggatggacggcagctggcgctgaaggtgagcgccaactccgtatacggcttcactggcgcccaggtgggcaagttgccgtgcctggagatctcacagagcgtcacggggttcggacgtcagatgatcgagaaaaccaagcagctggtggagtctaagtacacagtggagaatggctacagcaccagtgccaaggtggtgtatggtgacactgactccgtcatgtgccgattcggcgtgtcctcggtggctgaggcgatggccctggggcgggaggccgcggactgggtgtcaggtcacttcccgtcgcccatccggctggagtttgagaaggtctacttcccatacctgcttatcagcaagaagcgctacgcgggcctgctcttctcctcccggcccgacgcccacgaccgcatggactgcaagggcctggaggccgtgcgcagggacaactgccccctcgtggccaacctggtcactgcctcactgcgccgcctgctcatcgaccgagaccctgagggcgcggtggctcacgcacaggacgtcatctcggacctgctgtgcaaccgcatcgatatctcccagctggtcatcaccaaggagctgacccgcgcggcctccgactatgccggcaagcaggcccacgtggagctggccgagaggacccgctgttcgtgctggagcacagcctgcccattgacacgcagtactacctggagcagcagctggccaagcccctcctgcgcatcttcgagcccatcctgggcgagggccgtgccgaggctgtgctactgcggggggaccacacgcgctgcaagacggtgctcacgggcaaggtgggcggcctcctggccttcgccaaacgccgcaactgctgcattggctgccgcacagtgctcagccaccagggagccgtgtgtgagttctgccagccccgggagtctgagctgtatcagaaggaggtatcccatctgaatgccctggaggagcgcttctcgcgcctctggacgcagtgccagcgctgccagggcagcctgcacgaggacgtcatctgcaccagccgggactgccccatcttctacatgcgcaagaaggtgcggaaggacctggaagaccaggagcagctcctgcggcgcttcggaccccctggacctgaggcctggtgaccttgcaagcatcccatggggcgggggcgggaccagggagaattaataaagttctggacttttgct

SEQ ID NO: 91713 - DNA, 3446 bp, Artificial Sequence
  derived and/or modified sequence
gggagtcaggggtcacggcggcgtaggctgtggcgggaaacgctgtttgaagcgggatggatggcaagcggcggccaggcccagggcccggggtgcccccaaagcgggcccgtgggggcctctgggatgatgatgatgcacctcggccatcccaattcgaggaggacctggcactgatggaggagatggaggcagaacacaggctgcaggagcaggaggaggaggagctgcagtcagtcctggagggggttgcagacgggcaggtcccaccatcagccatagatcctcgctggcttcggcccacaccaccagcgctggacccccagacagagcccctcatcttccaacagttggagattgaccattatgtgggcccagcgcagcctgtgcctggggggcccccaccatcccgcggctccgtgcctgtgctccgcgccttcggggtcaccgatgaggggttctctgtctgctgccacatccacggcttcgctccctacttctacaccccagcgccccctggtttcgggcccgagcacatgggtgacctgcaacgggagctgaacttggccatcagccgggacagtcgcggggggagggagctgactgggccggccgtgctggctgtggaactgtgctcccgagagagcatgtttgggtaccacgggcacggcccctccccgttcctgcgcatcaccgtggcgctgccgcgcctcgtggccccggcccgccgtctcctggaacagggcatccgtgtggcaggcctgggcacgcccagcttcgcgccctacgaggccaacgtcgactttgagatccggttcatggtggacacggacatcgtcggctgcaactggctggagctcccagctgggaaatacgccctgaggctgaaggagaaggctacgcagtgccagctggaggcggacgtgctgtggtctgacgtggtcagtcacccaccggaagggccatggcagcgcattgcgcccttgcgcgtgctcagcttcgatatcgagtgcgccggccgcaaaggcatcttccctgagcctgagcgggaccctgtcatccagatctgctcgctgggcctgcgctggggggagccggagcccttcctacgcctggcgctcaccctgcggccctgtgcccccatcctgggtgccaaggtgcagagctacgagaaggaggaggacctgctgcaggcctggtccaccttcatccgtatcatggaccccgacgtgatcaccggttacaacatccagaacttcgaccttccgtacctcatctctcgggcccagaccctcaaggtacaaacattccctttcctgggccgtgtggccggcctttgctccaacatccgggactcttcattccagtccaagcagacgggccggcgggacaccaaggttgtcagcatggtgggccgcgtgcagatggacatgctgcaggtgctgctgcgggagtacaagctccgctcctacacgctcaatgccgtgagcttccacttcctgggcgagcagaaggaggacgtgcagcacagcatcatcaccgacctgcagaatgggaacgaccagacccgccgccgcctggctgtgtactgcctgaaggatgcctacctgccactgcggctgctggagcggctcatggtgctggtgaacgccgtggagatggcgagggtcactggcgtgcccctcagctacctgctcagtcgtggccagcaggtcaaggtcgtatcccagctgttgcggcaggccatgcacgaggggctgctgatgcccgtggtgaagtcagagggcggcgaggactacacgggagccactgtcatcgagcccctcaaagggtactacgacgtccccatcgccaccctggacttctcctcgctgtacccgtccatcatgatggcccacaacctgtgttacaccacgctccttcggcccgggactgcacagaaactgggcctgactgaggatcagttcatcaggacccccaccggggacgagtttgtgaagacctcagtgcggaaggggctgctgccccagatcctggagaacctgctcagtgcccggaagagggccaaggccgagctggccaaggagacagaccccctccggcgccaggtcctggatggacggcagctggcgctgaaggtgagcgccaactccgtatacggcttcactggcgcccaggtgggcaagttgccgtgcctggagatctcacagagcgtcacggggttcggacgtcagatgatcgagaaaaccaagcagctggtggagtctaagtacacagtggagaatggctacagcaccagtgccaaggtggtgtatggtgacactgactccgtcatgtgccgattcggcgtgtcctcggtggctgaggcgatggccctggggcgggaggccgcggactgggtgtcaggtcacttcccgtcgcccatccggctggagtttgagaaggtctacttcccatacctgcttatcagcaagaagcgctacgcgggcctgctcttctcctcccggcccgacgcccacgaccgcatggactgcaagggcctggaggccgtgcgcagggacaactgccccctcgtggccaacctggtcactgcctcactgcgccgcctgctcatcgaccgagaccctgagggcgcggtggctcacgcacaggacgtcatctcggacctgctgtgcaaccgcatcgatatctcccagctggtcatcaccaaggagctgacccgcgcggcctccgactatgccggcaagcaggcccacgtggagctggccgagaggatgaggaagcgggaccccgggagtgcgcccagcctgggcgaccgcgtcccctacgtgatcatcagtgccgccaagggtgtggccgcctacatgaagtcggaggacccgctgttcgtgctggagcacagcctgcccattgacacgcagtactacctggagcagcagctggccaagcccctcctgcgcatcttcgagcccatcctgggcgagggccgtgccgaggctgtgctactgcggggggaccacacgcgctgcaagacggtgctcacgggcaaggtgggcggcctcctggccttcgccaaacgccgcaactgctgcattggctgccgcacagtgctcagccaccagggagccgtgtgtgagttctgccagccccgggagtctgagctgtatcagaaggaggtatcccatctgaatgccctggaggagcgcttctcgcgcctctggacgcagtgccagcgctgccagggcagcctgcacgaggacgtcatctgcaccagccgggactgccccatcttctacatgcgcaagaaggtgcggaaggacctggaagaccaggagcagctcctgcggcgcttcggaccccctggacctgaggcctggtgaccttgcaagcatcccatggggcgggggcgggaccagggagaattaataaagttctggacttttgct

SEQ ID NO: 91714 - DNA, 3033 bp, Artificial Sequence
  derived and/or modified sequence
cgtatggatggcaaaaggcgccctggccctgggcctggagtgcccccaaagagagccagagggggattatgggatgacgacgacgcccctaggccgtctcagttcgaggaagatttagcactgatggaagagatggaggccgagcaccggctacaggagcaggaggaggaggagttgcagtctgtcttagaaggagtggccgatggtcaggtgccacccagcgccattgatccaaggtggctgcggccaactccacctgcgctggatccacagaccgaaccactcatatttcaacagctggaaatagaccactacgtgggccctgcgcaaccagtccctgggggtcctcctcccagccgtggcagcgtgcctgtgctgcgggctttcggcgtgacagacgagggcttcagcgtctgttgtcacattcacgggtttgctccctacttttacacccccgcaccccctggatttggaccagagcatatgggcgatttgcagcgggaactgaacctggcaatttcccgggattcacggggtggcagggagctgactggcccagcggtgctcgccgtggaactctgtagccgagaatcaatgtttggctaccacggccacggaccatccccctttctgcgcatcacagtcgcactgccacgactcgtcgcccctgctcgcagactcctagagcaggggatacgcgtagccggtcttggaacgccctcttttgccccttatgaggctaacgtagatttcgagattcgatttatggttgacaccgacatcgtggggtgtaactggctggaactgcctgcaggtaagtatgcactaaggttgaaggagaaagcaacacagtgtcagttggaagctgatgtgctgtggtctgacgtggtctcacaccctccggaggggccttggcaacggattgctccactgcgagttctgtcattcgacattgaatgcgccggaaggaaaggaatctttccggagcctgagagggatccggttattcagatttgctccctcggacttcgctggggagaaccggagccattcctaaggcttgcgttgacactccggccatgtgcaccaattttgggcgctaaagtccaatcttacgagaaggaagaagatctgctgcaagcttggagcacattcatccgtattatggaccctgatgtgattacgggctacaacatacaaaactttgaccttccttatctgatcagtcgagctcagactctgaaagtccaaactttcccttttctgggtagggtcgctggcctttgctcaaacatcagggatagttcttttcaatctaagcaaactggcagacgagacacaaaggtagtgtctatggtcggacgggtccaaatggacatgctgcaggtattgctcagagagtataaactgcgaagctacactttgaacgccgtctcattccactttctgggggagcagaaggaggatgtacaacacagtatcatcaccgacttgcagaatggcaacgaccagacgaggcgacgcttagccgtgtactgtttaaaggacgcctatctgcctctacgacttctcgagcgtctgatggtactggtcaatgccgtggaaatggcccgagttaccggcgtgccactatcttacctcttgtctcgaggtcagcaggtgaaggtggtatcccaactactcaggcaggccatgcacgagggactgctgatgcccgtagtgaagtccgaggggggtgaggactataccggagcaaccgtcatcgagccactcaaaggttattatgacgtgcctatcgccacgttggatttctcatcactatatcctagcattatgatggcccacaacctctgttacactacactactgagaccgggtacagcccagaagctggggttaaccgaggaccagtttatccggaccccgaccggcgacgaatttgtaaaaacttcggtgagaaagggcttgctcccacagatactcgaaaacctgctgagtgccagaaaacgcgctaaggctgaactcgcaaaagagactgatccattgaggaggcaagttcttgacggtcgccaattggccctcaaggtgtcagcgaatagcgtgtacggcttcacaggggctcaggttggtaaacttccttgtttggaaatcagtcaaagcgtcactggctttggcagacagatgatcgagaagaccaagcagctggtcgagtccaaatacaccgtcgaaaacgggtactcaacttcagccaaggtcgtctatggagataccgattcagtgatgtgtcggtttggcgtcagctccgttgccgaggccatggccctcggcagggaggcagctgattgggtgtccggccactttccttctccaatacggctcgagttcgaaaaagtttatttcccatacctcttaatctcgaaaaagcgctacgccggtctgttgttcagcagtcggccagatgcacacgaccggatggattgcaagggcttagaggcagttagacgagataattgtccattggtcgccaatcttgttacggctagcctccgcaggctgctcatcgaccgcgatcctgagggggcagtcgcccacgcacaggacgtgatatcagatctgctctgtaacaggatcgacatatctcagctggtgattactaaggagctcactagggccgcttcagattatgccggaaaacaagcacatgttgagttagccgagagaacacgctgctcctgttggtcgaccgcatgtcctctgacacgctctacaacttggtcatcatcctggccaagcccctcctgtgctagtagttcaccgtcttgggctagggccgtcccacggctctgctattgtggcggtaccacgagggccgctcgacgatgcagtcgcgcaaggtgggcggcttcctggccctctccaaacgccgcaaccgccgcactcgcggctgcacagtgttcagcgaccagggagccctgcgttagctcggctagtcctggatctttatcatgcattagacggcgttaccctatatag

SEQ ID NO: 91715 - DNA, 3324 bp, Artificial Sequence
  derived and/or modified sequence
atggatggaaagaggagaccagggcctgggccaggggtccctcccaaacgggctcggggagggttatgggatgacgacgacgcacctcgcccaagtcagttcgaagaggatctagctctgatggaggaaatggaggctgaacatcgcctgcaggagcaggaggaagaggagttgcaatcggttcttgaaggcgtggccgacgggcaggtgcccccatcagccatcgatcccagatggctgcggcctaccccacctgcgttagatccacagactgagcccctgatctttcaacagctcgagattgatcactacgtgggtcccgctcagcctgtccctggtgggccacctcccagccgaggtagcgtccctgtgttgagagcattcggcgtcaccgacgaaggatttagtgtttgttgtcatattcatggctttgcaccttatttttacacgccagcccctccaggctttggccctgagcacatgggcgacttacagagagaactcaacctggccataagccgtgacagccggggtggccgagagctgaccgggccagcagttctcgcggtcgaactgtgttctcgggagagtatgtttgggtatcacggtcacggtcccagcccattcctccgcataacagtcgcccttcccagattggtggccccagcccgtcgacttctggaacagggcatcagagttgccggactgggcacaccaagcttcgctccctacgaggccaacgtagattttgaaattcggtttatggtggataccgatatcgtaggatgtaactggcttgagctccctgctggaaaatacgctctgagacttaaagagaaggcgactcagtgtcaattagaggcggatgttctctggtcggacgttgtgtcacatccacctgaaggaccttggcagcgcatcgcacctctgcgcgttctgtcctttgacattgagtgtgccggaagaaagggtatatttccagagcctgagagggatcccgttatccagatttgttcccttggccttagatggggcgaaccagaaccctttctgagactggccttgacactgcggccatgcgcaccaattctgggtgcaaaggtccagtcttatgaaaaagaagaagatctgctgcaggcttggtccacctttatacgcatcatggatcccgacgtgataactggatataacatccagaatttcgaccttccttatctgatatccagggctcagaccctgaaagtccagacatttccatttctgggccgagtggctggcctttgctcaaatatacgcgattcgtcctttcagtcaaagcaaaccggtaggagggacaccaaggtggtctcaatggtgggtcgggtgcagatggatatgctgcaagtgctgctgcgagaatacaaacttaggagttacaccctgaacgctgttagcttccactttctaggcgagcagaaggaggatgtccaacattcaatcattacggatctgcagaacggaaatgatcaaacccgtcggagactcgctgtgtattgcctgaaggatgcgtacctccctctgcgcctgttagagcgtttgatggttctagtcaatgccgtcgagatggcaagagtcaccggtgtgcccctttcatatctgctgtccagagggcagcaggtaaaagtcgtgtcccaactcctaagacaggcgatgcacgaagggctgctgatgccagtggtgaaaagcgaaggcggagaagactatacaggagctacagttatcgagcctctgaaaggctactacgacgttccaatcgctaccctcgacttttccagtctttatccatccatcatgatggcacacaacctgtgctatactactctgttgcgccctgggacagcccagaaattggggctgactgaggatcaattcatcagaacccctacgggcgatgagtttgttaagactagtgtacggaagggccttttgcctcagatcctggaaaaccttctcagcgctcgaaagagagcaaaagcggaattggcaaaggagaccgatccattacgacgtcaggtgctcgatggcaggcagctcgccctaaaagtgagcgctaactctgtgtatgggtttacaggggcacaggtaggcaaacttccttgtctggaaatctcacagagcgtcaccggctttgggcgacagatgattgaaaaaactaaacagctggtggagagcaaatataccgtcgagaatggctacagtacctccgccaaggtggtgtatggggacacagatagcgtaatgtgtcgctttggtgtgagtagtgtcgccgaagcaatggcccttgggagagaagcggctgattgggtgagtgggcatttcccctcgcccattaggctggagtttgagaaagtctattttccgtatttgctcatatctaagaaacgctatgcaggactgctgttctcaagtcggccagatgctcacgataggatggactgtaagggcctcgaggccgtgaggcgcgacaactgccccctggtggccaatctggttaccgcgtctttacgacgcttgttgatcgatcgggatcccgagggtgctgtggcccacgcccaggatgttatttctgatctcctctgcaaccggatcgatattagccaactcgttatcacgaaagagttaacacgcgcagcttcagattatgctggaaaacaggctcatgttgagctggccgagcggatgcgcaaacgcgatcctggatcggctccttctctgggggatcgggtaccatacgtgattatttcagctgccaagggtgtggccgcttatatgaagtcagaagatcccctgtttgtattggaacacagtctacctatcgatacccagtactacctggagcagcagctggctaagcccctgctgaggatctttgagccaattctgggggaaggcagggctgaggcggttctgttacgtggcgatcacacccggtgcaaaaccgtcttgaccggcaaggtaggaggcctgctcgcatttgcgaaaaggcgaaactgttgcatcggctgtaggaccgtattgtcccaccagggagctgtgtgcgagttctgccaaccacgggagtccgaactgtaccagaaagaggttagccaccttaatgcgttagaggagagattctctagactgtggacgcagtgtcagcgttgccaggggagtttgcatgaggatgtgatctgcacatctcgggactgccccatattttatatgcgtaagaaagtgcgtaaagatctcgaggaccaggagcagctcttgcgcaggtttggaccacctggaccggaagcatggtag

SEQ ID NO: 91716 - DNA, 3033 bp, Artificial Sequence
  derived and/or modified sequence
agaatggacggcaagagaagacccggccccggccccggcgtgccccccaagagagccagaggcggcctgtgggacgacgacgacgcccccagacccagccagttcgaggaggacctggccctgatggaggagatggaggccgagcacagactgcaggagcaggaggaggaggagctgcagagcgtgctggagggcgtggccgacggccaggtgccccccagcgccatcgaccccagatggctgagacccaccccccccgccctggacccccagaccgagcccctgatcttccagcagctggagatcgaccactacgtgggccccgcccagcccgtgcccggcggccccccccccagcagaggcagcgtgcccgtgctgagagccttcggcgtgaccgacgagggcttcagcgtgtgctgccacatccacggcttcgccccctacttctacacccccgccccccccggcttcggccccgagcacatgggcgacctgcagagagagctgaacctggccatcagcagagacagcagaggcggcagagagctgaccggccccgccgtgctggccgtggagctgtgcagcagagagagcatgttcggctaccacggccacggccccagccccttcctgagaatcaccgtggccctgcccagactggtggcccccgccagaagactgctggagcagggcatcagagtggccggcctgggcacccccagcttcgccccctacgaggccaacgtggacttcgagatcagattcatggtggacaccgacatcgtgggctgcaactggctggagctgcccgccggcaagtacgccctgagactgaaggagaaggccacccagtgccagctggaggccgacgtgctgtggagcgacgtggtgagccacccccccgagggcccctggcagagaatcgcccccctgagagtgctgagcttcgacatcgagtgcgccggcagaaagggcatcttccccgagcccgagagagaccccgtgatccagatctgcagcctgggcctgagatggggcgagcccgagcccttcctgagactggccctgaccctgagaccctgcgcccccatcctgggcgccaaggtgcagagctacgagaaggaggaggacctgctgcaggcctggagcaccttcatcagaatcatggaccccgacgtgatcaccggctacaacatccagaacttcgacctgccctacctgatcagcagagcccagaccctgaaggtgcagaccttccccttcctgggcagagtggccggcctgtgcagcaacatcagagacagcagcttccagagcaagcagaccggcagaagagacaccaaggtggtgagcatggtgggcagagtgcagatggacatgctgcaggtgctgctgagagagtacaagctgagaagctacaccctgaacgccgtgagcttccacttcctgggcgagcagaaggaggacgtgcagcacagcatcatcaccgacctgcagaacggcaacgaccagaccagaagaagactggccgtgtactgcctgaaggacgcctacctgcccctgagactgctggagagactgatggtgctggtgaacgccgtggagatggccagagtgaccggcgtgcccctgagctacctgctgagcagaggccagcaggtgaaggtggtgagccagctgctgagacaggccatgcacgagggcctgctgatgcccgtggtgaagagcgagggcggcgaggactacaccggcgccaccgtgatcgagcccctgaagggctactacgacgtgcccatcgccaccctggacttcagcagcctgtaccccagcatcatgatggcccacaacctgtgctacaccaccctgctgagacccggcaccgcccagaagctgggcctgaccgaggaccagttcatcagaacccccaccggcgacgagttcgtgaagaccagcgtgagaaagggcctgctgccccagatcctggagaacctgctgagcgccagaaagagagccaaggccgagctggccaaggagaccgaccccctgagaagacaggtgctggacggcagacagctggccctgaaggtgagcgccaacagcgtgtacggcttcaccggcgcccaggtgggcaagctgccctgcctggagatcagccagagcgtgaccggcttcggcagacagatgatcgagaagaccaagcagctggtggagagcaagtacaccgtggagaacggctacagcaccagcgccaaggtggtgtacggcgacaccgacagcgtgatgtgcagattcggcgtgagcagcgtggccgaggccatggccctgggcagagaggccgccgactgggtgagcggccacttccccagccccatcagactggagttcgagaaggtgtacttcccctacctgctgatcagcaagaagagatacgccggcctgctgttcagcagcagacccgacgcccacgacagaatggactgcaagggcctggaggccgtgagaagagacaactgccccctggtggccaacctggtgaccgccagcctgagaagactgctgatcgacagagaccccgagggcgccgtggcccacgcccaggacgtgatcagcgacctgctgtgcaacagaatcgacatcagccagctggtgatcaccaaggagctgaccagagccgccagcgactacgccggcaagcaggcccacgtggagctggccgagagaaccagatgcagctgctggagcaccgcctgccccctgaccagaagcaccacctggagcagcagctggcccagccccagctgcgccagcagcagccccagctgggccagagccgtgcccagactgtgctactgcggcggcaccaccagagccgccagaagatgcagcagagccagatgggccgccagctggcccagccccaacgccgccaccgccgccctggccgccgcccagtgcagcgccaccagagagccctgcgtgagcagcgccagccccggcagcctgagctgcatcagaagaagataccccatctag

SEQ ID NO: 91717 - DNA, 3324 bp, Artificial Sequence
  derived and/or modified sequence
atggacggcaagagaagacccggccccggccccggcgtgccccccaagagagccagaggcggcctgtgggacgacgacgacgcccccagacccagccagttcgaggaggacctggccctgatggaggagatggaggccgagcacagactgcaggagcaggaggaggaggagctgcagagcgtgctggagggcgtggccgacggccaggtgccccccagcgccatcgaccccagatggctgagacccaccccccccgccctggacccccagaccgagcccctgatcttccagcagctggagatcgaccactacgtgggccccgcccagcccgtgcccggcggccccccccccagcagaggcagcgtgcccgtgctgagagccttcggcgtgaccgacgagggcttcagcgtgtgctgccacatccacggcttcgccccctacttctacacccccgccccccccggcttcggccccgagcacatgggcgacctgcagagagagctgaacctggccatcagcagagacagcagaggcggcagagagctgaccggccccgccgtgctggccgtggagctgtgcagcagagagagcatgttcggctaccacggccacggccccagccccttcctgagaatcaccgtggccctgcccagactggtggcccccgccagaagactgctggagcagggcatcagagtggccggcctgggcacccccagcttcgccccctacgaggccaacgtggacttcgagatcagattcatggtggacaccgacatcgtgggctgcaactggctggagctgcccgccggcaagtacgccctgagactgaaggagaaggccacccagtgccagctggaggccgacgtgctgtggagcgacgtggtgagccacccccccgagggcccctggcagagaatcgcccccctgagagtgctgagcttcgacatcgagtgcgccggcagaaagggcatcttccccgagcccgagagagaccccgtgatccagatctgcagcctgggcctgagatggggcgagcccgagcccttcctgagactggccctgaccctgagaccctgcgcccccatcctgggcgccaaggtgcagagctacgagaaggaggaggacctgctgcaggcctggagcaccttcatcagaatcatggaccccgacgtgatcaccggctacaacatccagaacttcgacctgccctacctgatcagcagagcccagaccctgaaggtgcagaccttccccttcctgggcagagtggccggcctgtgcagcaacatcagagacagcagcttccagagcaagcagaccggcagaagagacaccaaggtggtgagcatggtgggcagagtgcagatggacatgctgcaggtgctgctgagagagtacaagctgagaagctacaccctgaacgccgtgagcttccacttcctgggcgagcagaaggaggacgtgcagcacagcatcatcaccgacctgcagaacggcaacgaccagaccagaagaagactggccgtgtactgcctgaaggacgcctacctgcccctgagactgctggagagactgatggtgctggtgaacgccgtggagatggccagagtgaccggcgtgcccctgagctacctgctgagcagaggccagcaggtgaaggtggtgagccagctgctgagacaggccatgcacgagggcctgctgatgcccgtggtgaagagcgagggcggcgaggactacaccggcgccaccgtgatcgagcccctgaagggctactacgacgtgcccatcgccaccctggacttcagcagcctgtaccccagcatcatgatggcccacaacctgtgctacaccaccctgctgagacccggcaccgcccagaagctgggcctgaccgaggaccagttcatcagaacccccaccggcgacgagttcgtgaagaccagcgtgagaaagggcctgctgccccagatcctggagaacctgctgagcgccagaaagagagccaaggccgagctggccaaggagaccgaccccctgagaagacaggtgctggacggcagacagctggccctgaaggtgagcgccaacagcgtgtacggcttcaccggcgcccaggtgggcaagctgccctgcctggagatcagccagagcgtgaccggcttcggcagacagatgatcgagaagaccaagcagctggtggagagcaagtacaccgtggagaacggctacagcaccagcgccaaggtggtgtacggcgacaccgacagcgtgatgtgcagattcggcgtgagcagcgtggccgaggccatggccctgggcagagaggccgccgactgggtgagcggccacttccccagccccatcagactggagttcgagaaggtgtacttcccctacctgctgatcagcaagaagagatacgccggcctgctgttcagcagcagacccgacgcccacgacagaatggactgcaagggcctggaggccgtgagaagagacaactgccccctggtggccaacctggtgaccgccagcctgagaagactgctgatcgacagagaccccgagggcgccgtggcccacgcccaggacgtgatcagcgacctgctgtgcaacagaatcgacatcagccagctggtgatcaccaaggagctgaccagagccgccagcgactacgccggcaagcaggcccacgtggagctggccgagagaatgagaaagagagaccccggcagcgcccccagcctgggcgacagagtgccctacgtgatcatcagcgccgccaagggcgtggccgcctacatgaagagcgaggaccccctgttcgtgctggagcacagcctgcccatcgacacccagtactacctggagcagcagctggccaagcccctgctgagaatcttcgagcccatcctgggcgagggcagagccgaggccgtgctgctgagaggcgaccacaccagatgcaagaccgtgctgaccggcaaggtgggcggcctgctggccttcgccaagagaagaaactgctgcatcggctgcagaaccgtgctgagccaccagggcgccgtgtgcgagttctgccagcccagagagagcgagctgtaccagaaggaggtgagccacctgaacgccctggaggagagattcagcagactgtggacccagtgccagagatgccagggcagcctgcacgaggacgtgatctgcaccagcagagactgccccatcttctacatgagaaagaaggtgagaaaggacctggaggaccaggagcagctgctgagaagattcggcccccccggccccgaggcctggtag

SEQ ID NO: 91718 - protein, 180 aa, Artificial Sequence
  derived and/or modified sequence
KVPEVPKKPVLEEKPAVPVPERAESPPPEVYEEPEEIAPEEEIAPEEEKPVPVAEEEEPEVPPPAVPEEPKKIIPEKKVPVIKKPEAPPPKEPEPEKVIEKPKLKPRPPPPPPAPPKEDVKEKIFQLKAIPKKKVPEKPQVPEKVELTPLKVPGGEKKVRKLLPERKPEPKEEVVLKSGI

SEQ ID NO: 91719 - protein, 564 aa, Artificial Sequence
  derived and/or modified sequence
MCSMPRSLWLGCSSLADSMPSLRCLYNPGTGALTAFQTYNSCARLCLNQETVCLASTAMKTENCVAKTKLANGTSSMIVPKQRKLSASYEKEKELCVKYFEQWSESDQVEFVEHLISQMCHYQHGHINSYLKPMLQRDFITALPARGLDHIAENILSYLDAKSLCAAELVCKEWYRVTSDGMLWKKLIERMVRTDSLWRGLAERRGWGQYLFKNKPPDGNAPPNSFYRALYPKIIQDIETIESNWRCGRHSLQRIHCRSETSKGVYCLQYDDQKIVSGLRDNTIKIWDKNTLECKRILTGHTGSVLCLQYDERVIITGSSDSTVRVWDVNTGEMLNTLIHHCEAVLHLRFNNGMMVTCSKDRSIAVWDMASPTDITLRRVLVGHRAAVNVVDFDDKYIVSASGDRTIKVWNTSTCEFVRTLNGHKRGIACLQYRDRLVVSGSSDNTIRLWDIECGACLRVLEGHEELVRCIRFDNKRIVSGAYDGKIKVWDLVAALDPRAPAGTLCLRTLVEHSGRVFRLQFDEFQIVSSSHDDTILIWDFLNDPAAQAEPPRSPSRTYTYISR

SEQ ID NO: 91720 - DNA, 1695 bp, Artificial Sequence
  derived and/or modified sequence
atgtgctccatgccgcgtagtctttggctgggatgctcctcactggccgacagtatgccgtctctgaggtgtctttataacccaggcactggcgccctaaccgcattccagacctacaatagctgtgcaaggctgtgtctgaatcaggagaccgtttgccttgccagcactgccatgaagactgagaactgcgtggcgaagacaaagctagccaacggtacctccagcatgatcgttccaaagcagaggaagctgagcgctagctatgagaaagaaaaggagctatgtgtcaagtatttcgaacagtggagcgagagcgaccaggtggaatttgttgaacacctgatctctcagatgtgccactaccaacacggacacattaattcgtacctgaagcccatgttacagcgagactttatcacggcgcttcctgctagaggacttgatcatatagctgagaacatcctgtcatatttggacgcaaaatccctctgtgccgcagagctagtatgtaaggaatggtatcgagtaaccagcgatgggatgttatggaagaaactgattgaacgaatggtgcggaccgactcactatggaggggactggccgaacgtagaggctggggtcagtatctgtttaaaaacaagccacccgatgggaatgctccccccaattcgttctatcgcgccctgtatcctaaaattatccaggatatagaaaccatcgagtccaactggaggtgtggtcggcattccctgcagcgtatacattgcaggtccgagacgtcgaaaggggtctactgtctgcagtacgacgatcaaaaaattgtgtcaggcctgcgggataacacgatcaaaatctgggacaagaacacactggagtgcaaacgtatactcacgggacacactgggtccgtattgtgtctccagtatgacgagcgtgtcataatcaccggaagcagtgactctactgtgcgggtgtgggatgtcaacacaggagaaatgctaaatactctcattcaccactgtgaagccgtgctgcatctgcgattcaataatggcatgatggtcacctgctctaaggacagaagcatcgccgtgtgggatatggcttccccaaccgacattaccttacggcgcgtattggtcggtcaccgcgctgcggttaatgtagtcgatttcgatgataagtacatagtgagtgctagcggagataggactatcaaagtctggaacacttctacatgcgagttcgtcaggacgctcaacggacacaaaaggggcattgcatgcttgcagtaccgggacaggttagtggtctccgggtcttcagacaacacgatcaggttgtgggacatcgaatgcggcgcatgcctccgggtcttagaaggacacgaggaacttgtccggtgcattagattcgacaataaaagaatcgtctccggagcttacgacggaaagattaaggtgtgggatctggtggccgcccttgatcctcgcgccccagccggcacgctgtgcctgcggactttggtcgaacactccggacgcgttttccgattgcagtttgacgaattccaaatcgtatcctccagccatgacgacactattctcatttgggactttctgaatgatccggctgcccaggccgagcctcctagaagcccctctcggacatacacctatattagtagatag

SEQ ID NO: 91721 - DNA, 1695 bp, Artificial Sequence
  derived and/or modified sequence
atgtgcagcatgcccaggagcctgtggctgggctgcagcagcctggccgacagcatgcccagcctgcgctgcctgtacaaccctggcaccggggccctgacagccttccagacctacaacagctgtgcccggctgtgcctgaaccaggagaccgtgtgcctggccagcacagccatgaagacagagaactgtgtggccaagaccaagctggccaacggcaccagctccatgattgtgcccaagcagaggaagctgagcgccagctatgagaaggagaaggagctgtgtgtgaagtactttgagcagtggagcgagagtgaccaggtggagtttgtggagcacctgatcagccagatgtgccactaccagcacggccacatcaacagctacctgaagcccatgctgcagagggacttcatcacagccctgcctgcccggggcctggaccacatcgccgagaacatcctgagctacctggatgccaagagcctgtgtgccgctgagctggtgtgcaaggagtggtacagagtgaccagtgatggcatgctgtggaagaagctgattgaaagaatggtgaggacagacagcctgtggaggggcctggccgagcggcggggctggggccagtacctgttcaagaacaagcccccagatggaaatgccccacccaacagcttctaccgggccctgtaccccaagatcatccaggacatcgagaccatcgagagcaactggaggtgtggccgccacagcctgcagaggatccactgccgctctgagaccagcaaaggagtgtactgcctgcagtatgatgaccagaagatcgtgtctggcctgcgggacaacaccatcaagatctgggacaagaacaccctggagtgcaagaggatcctgaccggccacacaggctctgtgctgtgcctgcagtatgatgagagggtcatcatcaccggcagcagtgacagcacagtgcgggtgtgggatgtgaacacaggagagatgctgaacaccctcatccaccactgtgaggccgtgctgcacctgcgcttcaacaacggcatgatggtgacctgcagcaaggacaggagcattgctgtgtgggacatggccagccccacagacatcaccctgcggcgggtgctggtgggccacagagctgctgtgaatgtggtggactttgatgacaagtacatcgtgtctgccagcggggacaggaccatcaaggtgtggaacaccagcacctgtgaatttgtgaggaccctgaatggccacaagaggggcatcgcctgcctgcagtacagagaccggctggtggtgtctggcagcagtgacaacaccatccggctgtgggacattgaatgtggggcctgcctgcgggtgctggagggccacgaggagctggtgcgctgcatccgctttgacaacaagagaattgtgtctggggcctatgatggcaagatcaaggtgtgggacctggtggccgccctggacccccgggccccagctggcaccctgtgcctgcggaccctggtggagcacagcggccgggtcttccggctgcagtttgatgagttccagatcgtgagcagcagccatgatgacaccatcctgatctgggacttcctgaatgaccctgctgcccaggccgagcccccaagaagccccagcaggacctacacctacatcagcaggtag

SEQ ID NO: 91722 - DNA, 1695 bp, Artificial Sequence
  derived and/or modified sequence
atgtgcagcatgccccggagcctgtggctgggctgcagcagcctggctgacagcatgccctcactaaggtgcctctataacccaggaactggcgccctgacagctttccagacatataattcctgcgcacgactctgcctgaaccaggagacagtttgcctcgcgtcaaccgctatgaagactgagaattgcgtggctaagactaaactcgcaaacgggacctcttccatgatcgtgcctaaacagcgtaagctcagcgcttcatacgagaaagagaaggaactgtgtgtcaaatattttgaacaatggagcgagagtgatcaggttgaatttgtggaacatctgattagccagatgtgccactatcaacacggtcacatcaactcttatctgaagcctatgctgcagagagactttataacagccctaccagcccgcgggctggatcacatcgcagaaaatatattgtcttatcttgacgctaaatctttgtgtgctgctgagctggtgtgcaaagagtggtaccgggtcacctcagatggcatgctgtggaagaaacttattgagcgaatggttcgtactgattccctttggagggggttagctgaaagacggggctggggccaatatctttttaagaacaaaccacccgacggaaatgctcctccaaacagtttttatagagccttatatcccaagatcatccaggacatcgaaactatcgaaagcaattggcgttgtggaaggcactccctgcagcgaatacactgtaggtccgagacctctaagggcgtctactgtttacagtacgacgatcagaagatcgtgagcgggctcagggacaataccatcaagatctgggacaagaataccctagaatgcaagaggatcctgacgggccacactggcagcgtactgtgtctccagtatgacgagcgagtaattatcaccggctccagcgacagtaccgttcgggtgtgggatgtaaatacaggtgaaatgttgaacacactcatacaccactgcgaggcagtgctgcatctgaggttcaacaacggaatgatggtgacctgcagtaaagaccggagtatcgccgtgtgggatatggcctctcccaccgacattacactccggagagtgctggtgggccacagagctgccgtaaatgtcgttgactttgatgacaaatatattgtgtctgctagtggggacagaacaattaaagtctggaataccagcacctgcgagttcgtgaggacactgaatggacacaagaggggcattgcatgtctgcaatatcgagacagactggtcgtgagtggcagcagtgacaacacaattcgtttatgggacattgagtgtggggcctgtctgagggtgctcgagggacacgaagagttggtgaggtgtatcagattcgataataaacggattgtttccggggcgtatgatggaaagatcaaggtgtgggacttagtcgcagcactagacccaagggcccccgctggaactctttgcttgcgtactttggtggaacactctggtagggtcttccggttgcaattcgacgaattccagattgtgagcagctcccatgacgacacaatccttatttgggattttcttaatgacccagcggcccaggccgaacctccacgatccccatccagaacttacacctacatatctcgctag

SEQ ID NO: 91723 - DNA, 1695 bp, Artificial Sequence
  derived and/or modified sequence
atgtgctccatgcctcggtctctgtggttgggatgtagttctctcgcggattctatgccatccctacgatgcctctacaaccccggtaccggggctcttaccgcctttcagacatacaactcatgtgcccgtctgtgcttaaaccaggagacagtatgtctggcatccacagccatgaaaacggagaattgtgtcgcaaagacaaagttggccaacggcaccagcagcatgattgtgccgaagcagagaaaactcagtgcatcttatgagaaggaaaaggagctttgcgtgaagtattttgagcagtggtctgaaagcgatcaagtcgaattcgttgaacatctgatatcccagatgtgccattaccaacacggccatatcaatagctacttgaagccaatgctgcaaagagatttcatcactgctctgccggctagagggctcgaccacatcgccgaaaatattctgtcctacctggacgcaaagtctctgtgcgccgcagaactggtctgtaaggagtggtaccgcgtgaccagcgacggtatgctgtggaaaaaactcatagagaggatggtccggacagatagcctctggcgagggctcgccgagcggaggggttgggggcagtatttgtttaagaataagcccccagatggcaacgcccctcccaatagtttctatagagctctgtacccaaagataatacaggacatagaaaccattgaaagcaactggaggtgcggcaggcactcactgcaacggatacactgtaggagtgaaacatctaaaggggtgtattgcctacaatacgacgaccagaaaatagtgtccggactgcgagataacactatcaaaatttgggacaaaaacaccctggagtgcaaacgtatcctgacagggcacaccggaagcgtgctgtgtcttcagtatgatgagcgggtgattattaccggaagctcggattccaccgtccgggtctgggatgtgaacaccggcgagatgttaaataccttaatccatcactgcgaagctgtgcttcatctccgcttcaacaacggcatgatggtgacgtgcagtaaggacagatccatcgcggtttgggatatggctagcccgactgatattacactccgtagggtgcttgtgggacatagggcagctgttaatgtagttgattttgatgataaatatatcgtttctgcttcaggcgatcgcacgatcaaagtttggaatacttctacatgcgagttcgtgaggaccctgaatggccataaacggggaattgcctgtcttcagtatagggaccggctggttgttagcgggagctccgataatacaatacgcctctgggacattgagtgcggggcatgccttagggtgcttgaaggccacgaggaactggtgcgctgcattagattcgataacaagaggatcgtgagcggtgcttacgacggaaagataaaagtgtgggatctggtggctgccctggatccacgagccccagccggaaccctgtgtctgagaactttggtggaacatagcggccgagtgttccgattgcaatttgacgaattccaaatagtgtcttcgagccacgatgatactatactcatctgggacttcttaaacgaccctgctgcccaggccgaaccccctaggagcccgagccgaacctatacttacatttcgagatag

SEQ ID NO: 91724 - DNA, 5993 bp, Artificial Sequence
  derived and/or modified sequence
atccgggcgctgcgttggctgcggcctggcaccaaaggggcggccccggcggagagcggacccagtggcctcggcgattatggacccggccgaggcggtgctgcaagagaaggcactcaagtttatgtgctctatgcccaggtctctgtggctgggctgctccagcctggcggacagcatgccttcgctgcgatgcctgtataacccagggactggcgcactcacagctttccagacatacaacagctgtgccagactctgcttaaaccaagaaacagtatgtttagcaagcactgctatgaagactgagaattgtgtggccaaaacaaaacttgccaatggcacttccagtatgattgtgcccaagcaacggaaactctcagcaagctatgaaaaggaaaaggaactgtgtgtcaaatactttgagcagtggtcagagtcagatcaagtggaatttgtggaacatcttatatcccaaatgtgtcattaccaacatgggcacataaactcgtatcttaaacctatgttgcagagagatttcataactgctctgccagctcggggattggatcatattgctgagaacattctgtcatacctggatgccaaatcactatgtgctgctgaacttgtgtgcaaggaatggtaccgagtgacctctgatggcatgctgtggaagaagcttatcgagagaatggtcaggacagattctctgtggagaggcctggcagaacgaagaggatggggacagtatttattcaaaaacaaacctcctgacgggaatgctcctcccaactctttttatagagcactttatcctaaaattatacaagacattgagacaatagaatctaattggagatgtggaagacatagtttacagagaattcactgccgaagtgaaacaagcaaaggagtttactgtttacagtatgatgatcagaaaatagtaagcggccttcgagacaacacaatcaagatctgggataaaaacacattggaatgcaagcgaattctcacaggccatacaggttcagtcctctgtctccagtatgatgagagagtgatcataacaggatcatcggattccacggtcagagtgtgggatgtaaatacaggtgaaatgctaaacacgttgattcaccattgtgaagcagttctgcacttgcgtttcaataatggcatgatggtgacctgctccaaagatcgttccattgctgtatgggatatggcctccccaactgacattaccctccggagggtgctggtcggacaccgagctgctgtcaatgttgtagactttgatgacaagtacattgtttctgcatctggggatagaactataaaggtatggaacacaagtacttgtgaatttgtaaggaccttaaatggacacaaacgaggcattgcctgtttgcagtacagggacaggctggtagtgagtggctcatctgacaacactatcagattatgggacatagaatgtggtgcatgtttacgagtgttagaaggccatgaggaattggtgcgttgtattcgatttgataacaagaggatagtcagtggggcctatgatggaaaaattaaagtgtgggatcttgtggctgctttggacccccgtgctcctgcagggacactctgtctacggacccttgtggagcattccggaagagtttttcgactacagtttgatgaattccagattgtcagtagttcacatgatgacacaatcctcatctgggacttcctaaatgatccagctgcccaagctgaacccccccgttccccttctcgaacatacacctacatctccagataaataaccatacactgacctcatacttgcccaggacccattaaagttgcggtatttaacgtatctgccaataccaggatgagcaacaacagtaacaatcaaactactgcccagtttccctggactagccgaggagcagggctttgagactcctgttgggacacagttggtctgcagtcggcccaggacggtctactcagcacaactgactgcttcagtgctgctatcagaagatgtcttctatcttttgtgaatgattggaacttttaaacctcccctcctctcctcctttcacctctgcacctagttttttcccattggttccagacaaaggtgacttataaatatatttagtgttttgccagaatctctcttgctttgccattaagcagaagaactagtttccctgtatagcctgctgggagagacccacttctagggtatgggggatgcagcttcaagcccagtgcccagtgtctccctgttaactgcaggaatgccaagcacctggccagagcagcccagccccaatatgcttaggaggagacagagttccctctgtatagcctctgggacaagaaaaagaaaacacaagaatgtatacactggaagatttgggcctcctgcctgccttctctttgtttctgttcctcttcccatctactcccctacgccccttcaaccttttttctctgtctgcttcacctgagaagaaagtgtacgaagagagtgtcctcctctcacatgagccagatcagccagaaaatgcaacacttggaagagttaaatgctgttcagtgaagatttcagccccaggcctttgctgcaagtgaccctgtggcaacagtggattctcagacatgatactctcatcatatttgcaactcttctctctctttcttccccacacccaagaggaggattggtggtagggggcaggcagagggggtggggagaagtttcctgggctccatcaatggctgcatcttttctggactcagcagtctccttgattccatgtagagtgtggaaaggagttgctgattgcatttcctctcattaacaattgggtgtgtaataaaaagcattgtacttcatcttaaatcactggtaaggctcagcctacagaaagatttgaaatggccagagccaatcgcttggtgcattctgcgtaatggtttccatctccgatttcctcatcagggcctgtgaatacccaggtgcctgtatctttgccaagaccgtgatcaaggtagcttaagagagatggtcaggagaaaacactgtttttgttttttttgttgttttgttttgttttggccagttaaatatcatctctcaaatattgatctcaccgtgtcaaccttgcactgcacaaccttccttctgcttctcccacacccagtatttgcagaagggcaaagctgcttaagagagaggatcagggtgaagtttggcacacagggtttattaatggggcaaaaactgccttttcttcctcctcctgaccttattttgctcttcactctccccagccaataaagcgtctgtggcgattggtgaacagcataaacagctggacctcagcaagggtcaggcaaacccagtcactcggaaggcagctgtgtgagctgccaagctagtgggcttcaggtgcaagggtacctgtgccacaccaacctgggagcacacagaatactattaatgtgcacccagctggtctccccaggcaagaaggtatcctcttcccaaggtgtacccactgaatgttgttactacatattgagagtcattttatgcatatgcattctacctttcctgctttatgagtatttttaagcttttagttcaaggttatattcagaaaatatttcccagtataatgatacatcgtagcctaagaaatattttctcaatgtaattcccttcccagctacccaaatgctacagagaaatgttttctacttggccactatcagggttcgtcatctattgtgttgactattaatggctttttgattgggtaaggattttgctatagatgaaggtagagggctgtcagccctgaaaaacacacaggtcagacatttaaaaggcatgggtttcgagctgtctcaaaatattgcccaatagccataattttaccagcctttctgtcatatgctgctattacaaagtggaagctgttgaatgtttattggtgcccagggttttgctctccaatctaggttcagttgaaggaatattgtttctaagactgttttgagacatgtccagtacatcacaaaggagatcggggcgacccctgcagatgtggagccattagcccagttgaggatattctccaagttgtcctctctcctgctgatggaaatgggaatgaagttaagtggtctgaaaaacttgaatcgttcacatttctcagctctgggggtcatttaccagtttgttgtagaagaaataatcaggtaagttaaaagttcatttccagagaaggtaaaccccacttaccatctctgcatgatttcagtgggaattgattatcactaatccccaactgggctagaataaatgtaaagtttgacctttttaaaacgaaaagagagacaaagtctcagcacattccaaggagtggtagaaacagagctgaaggtgtccccattgtagattagtctcttctcactaaaatttactttccaacgtagggcctaaaggaaacctttcttaaagacaggctgaaaccccttcaaaggcagatgaggaggtacagacacgtgaccttttggtgcacactggagctacttggacaagaccagcatgccttgctgcacgtgtgtgtatttcactgctgagaacatcctttaacttggtgtgcaatttgaaaggatgtgaatcatggatggaaggccatttgtacatgtcccttggcaaaattctttctggtgtctcctaacttcagagacagggactctttttggatctctattgacaagtaataaaagtctggccctcataacttgtttccgaactagaaaagtctgtgagacccctacatcattctggtttttttgcttgagtaagaacaatccttttttatttttcttctgtacagtctaaagctacagagaaaaaaaaatgcactcttcccttgccggctcctggtaccattggtctgaacagctgtagttggtctactccttacttagcacttgattgtgtggggaaacaaaggtgggaggggtggggaatactggaaataatcagggcaatttttttctttcccataattggactagataccttggtactgttgaccttctcagcatctcccttttgccttagatggcaacaccctccagtctgtagcagagcagtccaacccagattagtgcagcccggaggcttagggtgcagcctccctggtcttcctccacacagttgttcaccaacagaccagacctcctttaaccacagtgtcaacatagtatcggaaagagagccatttcttaggggaataaaacagtttcgcttctttagctcatctgtggtgtcagaatccttggagctgaagagagaaatcaaaagagcatgatgatggctgcctggtttcaggtggaacttaatgcattgatctttagaagctccttctgttggaagttgagtacctgtgatctaaaatgtcctggaggcagatgacatctaaaatatgtgctttccaaccagcacagctggcgctcttagctcctgattggttgtgtgttttattaaggatcagtgcagttaagtcgtattttaaagtgttacctcccctcctaacccttccccttcttggacactgaaggaaaaggccaactagggtgttagccctctgggcaccaaggaaactaacagctttctcaaagcggtgaccactcaggccagcccagacaaatctgagggatggccagtgcactccaatgatgggacaggcctaacaacacatgtaagcttccccgagagctttcagctggttcacctctttgttctctagactcttaagtactgactgctttgacttttgtgattatgttatggtgatgtgtagtcagtgtaccaatatgttcacaacctaggatcatgataatggagtgtgttttgggttttttttaactgttcagaaaaaaagtaaattacaaat

SEQ ID NO: 91725 - DNA, 1695 bp, Artificial Sequence
  derived and/or modified sequence
atgtgcagcatgcccagaagcctgtggctgggctgcagcagcctggccgacagcatgcccagcctgagatgcctgtacaaccccggcaccggcgccctgaccgccttccagacctacaacagctgcgccagactgtgcctgaaccaggagaccgtgtgcctggccagcaccgccatgaagaccgagaactgcgtggccaagaccaagctggccaacggcaccagcagcatgatcgtgcccaagcagagaaagctgagcgccagctacgagaaggagaaggagctgtgcgtgaagtacttcgagcagtggagcgagagcgaccaggtggagttcgtggagcacctgatcagccagatgtgccactaccagcacggccacatcaacagctacctgaagcccatgctgcagagagacttcatcaccgccctgcccgccagaggcctggaccacatcgccgagaacatcctgagctacctggacgccaagagcctgtgcgccgccgagctggtgtgcaaggagtggtacagagtgaccagcgacggcatgctgtggaagaagctgatcgagagaatggtgagaaccgacagcctgtggagaggcctggccgagagaagaggctggggccagtacctgttcaagaacaagccccccgacggcaacgccccccccaacagcttctacagagccctgtaccccaagatcatccaggacatcgagaccatcgagagcaactggagatgcggcagacacagcctgcagagaatccactgcagaagcgagaccagcaagggcgtgtactgcctgcagtacgacgaccagaagatcgtgagcggcctgagagacaacaccatcaagatctgggacaagaacaccctggagtgcaagagaatcctgaccggccacaccggcagcgtgctgtgcctgcagtacgacgagagagtgatcatcaccggcagcagcgacagcaccgtgagagtgtgggacgtgaacaccggcgagatgctgaacaccctgatccaccactgcgaggccgtgctgcacctgagattcaacaacggcatgatggtgacctgcagcaaggacagaagcatcgccgtgtgggacatggccagccccaccgacatcaccctgagaagagtgctggtgggccacagagccgccgtgaacgtggtggacttcgacgacaagtacatcgtgagcgccagcggcgacagaaccatcaaggtgtggaacaccagcacctgcgagttcgtgagaaccctgaacggccacaagagaggcatcgcctgcctgcagtacagagacagactggtggtgagcggcagcagcgacaacaccatcagactgtgggacatcgagtgcggcgcctgcctgagagtgctggagggccacgaggagctggtgagatgcatcagattcgacaacaagagaatcgtgagcggcgcctacgacggcaagatcaaggtgtgggacctggtggccgccctggaccccagagcccccgccggcaccctgtgcctgagaaccctggtggagcacagcggcagagtgttcagactgcagttcgacgagttccagatcgtgagcagcagccacgacgacaccatcctgatctgggacttcctgaacgaccccgccgcccaggccgagccccccagaagccccagcagaacctacacctacatcagcagatag

SEQ ID NO: 91726 - protein, 530 aa, Artificial Sequence
  derived and/or modified sequence
MEDDSLYLRGEWQFNHFSKLTSSRPDAAFAEIQRTSLPEKSPLSCETRVDLCDDLAPVARQLAPREKLPLSSRRPAAVGAGLQNMGNTCYVNASLQCLTYTPPLANYMLSREHSQTCHRHKGCMLCTMQAHITRALHNPGHVIQPSQALAAGFHRGKQEDAHEFLMFTVDAMKKACLPGHKQVDHHSKDTTLIHQIFGGYWRSQIKCLHCHGISDTFDPYLDIALDIQAAQSVQQALEQLVKPEELNGENAYHCGVCLQRAPASKTLTLHTSAKVLILVLKRFSDVTGNKIAKNVQYPECLDMQPYMSQPNTGPLVYVLYAVLVHAGWSCHNGHYFSYVKAQEGQWYKMDDAEVTASSITSVLSQQAYVLFYIQKSEWERHSESVSRGREPRALGAEDTDRRATQGELKRDHPCLQAPELDEHLVERATQESTLDHWKFLQEQNKTKPEFNVRKVEGTLPPDVLVIHQSKYKCGMKNHHPEQQSSLLNLSSSTPTHQESMNTGTLASLRGRARRSKGKNKHSKRALLVCQ

SEQ ID NO: 91727 - DNA, 1593 bp, Artificial Sequence
  derived and/or modified sequence
atggaggatgattccttgtatctcagaggagagtggcagtttaaccacttttctaagctgacatcaagccggcctgatgctgcgtttgcagaaattcaacggacgagtctgcctgagaagtcccctctgtcgtgcgagactcgtgttgacctctgtgatgatctggcccccgtcgcgcgccagctggctcccagagaaaaactgccgctgagctcacggagaccagccgcagtaggagcaggtcttcagaatatgggtaatacctgctatgttaatgccagtctccagtgcctaacttacacccccccgctcgccaactatatgctctcccgcgagcatagtcagacctgccaccgccacaaaggctgcatgctttgtaccatgcaggctcacatcacaagagccttgcataatcccggccacgttattcagccaagtcaggcattagccgcagggtttcatcgtgggaagcaggaagacgcccatgaatttctgatgtttaccgtcgacgctatgaaaaaggcctgcttacccgggcataagcaggtggaccatcattctaaggataccaccctcattcaccagatcttcggcggctattggcgttcccagattaaatgtttgcattgtcatgggatatctgacaccttcgacccttatcttgatattgcccttgacatacaggcagcacagagcgttcagcaggctctcgagcaactcgtgaaacctgaggagctcaatggcgagaacgcctatcactgcggcgtgtgtctgcaaagggctcctgccagcaagaccctcaccctacatacaagcgccaaagtgctcatcctcgtcctgaaacgattctccgacgtcacaggtaacaaaattgctaagaatgtgcaataccccgaatgtcttgatatgcagccctatatgtcacagccaaataccggacctttggtatacgtgctttacgccgtgctggtgcacgccggctggagctgccacaatggacactatttcagctacgttaaggctcaagagggtcagtggtataaaatggacgacgccgaggtgacagcctcaagtatcacttcagttttgagtcaacaagcatatgtcttattctacatacaaaaaagcgagtgggagcgtcactctgagagcgtgagccgtggcagggagccccgggctctgggagccgaagatacggacagacgcgctactcagggcgaacttaagagagatcatccttgtcttcaggcccctgaacttgacgagcatctggtcgaacgggctacccaggaaagtacgctggaccattggaagttcctccaggagcagaacaagacaaagcctgagttcaacgtaaggaaggtcgagggaacccttccaccagatgtgctggtcatccaccagtcaaagtataagtgcgggatgaaaaaccatcaccccgagcagcagtcctcccttttaaacctgtcctcatctacacctacgcaccaggaatctatgaataccggtactcttgccagcttacgaggaagagcgagacgaagcaaaggtaagaataagcattccaagcgcgctctcctggtgtgccagtag

SEQ ID NO: 91728 - DNA, 1593 bp, Artificial Sequence
  derived and/or modified sequence
atggaagatgacagcctgtatttgaggggagagtggcagttcaaccacttttccaaattgacctcgtctcgccccgacgccgccttcgccgagattcagaggactagcctccccgagaagtctccgctgagctgcgaaactcgggttgatctctgcgacgacctagcccccgttgccaggcagctggctccaagagagaagcttcccctgtccagcaggcgccccgcagccgtcggcgctggtctgcagaatatgggaaatacttgttacgttaatgcctccctacaatgcctgacctatacccctccactggccaactatatgctctcacgggagcactcacagacctgccataggcataaaggctgtatgctgtgtactatgcaagcccacatcacgcgcgctctgcataatcccgggcatgtgatccagccatcacaagctcttgccgctgggtttcaccgaggaaaacaggaagatgcccacgaattccttatgttcactgtagatgcaatgaaaaaggcctgtctccccgggcacaaacaggttgaccaccatagcaaagatacgaccctcatccaccagatatttggcgggtactggcgaagccaaattaagtgccttcactgtcacggcatttcagacacgttcgacccgtacctggacattgccctggatatccaggccgctcagtctgttcagcaggcactcgagcaattagtgaagccagaagagttaaacggcgaaaatgcgtaccactgcggggtgtgcctgcaaagagcgccggcctctaagacgctcactctccatacaagtgccaaagtgctgatcctggtgctgaaacggttttccgacgtgaccggtaataagatcgccaagaatgtacaatacccggaatgtctcgatatgcagccttatatgagccagcccaataccggcccgctggtgtatgttctgtatgctgttttggttcatgctggatggtcgtgccacaatgggcactacttttcatacgtgaaggctcaggaggggcagtggtacaaaatggacgacgcagaagtgacggcctctagtatcacctccgtgctgagccaacaggcttacgtcctgttttacattcagaaaagcgagtgggaaagacacagcgagtccgtcagtcgcggccgagagccaagggccctgggagcggaagacacagacagaagggccactcagggagaactcaagagggaccatccttgcctgcaggccccagagctcgatgagcatctcgtcgaaagagcaactcaggagtcgacactggaccattggaagtttttgcaagagcaaaacaaaactaagccagagttcaacgtcagaaaggtggagggaactttacctcctgatgtcctcgtgatccatcaatcgaaatacaagtgcggcatgaagaaccaccatcccgagcagcaatcctccctcctgaatctgtcgtcttccacgcccacacaccaggagagtatgaataccggcacccttgcctcgctgcgtggccgtgcccgccgttctaaggggaagaataagcactcaaagagggcacttctggtctgtcagtag

SEQ ID NO: 91729 - DNA, 1593 bp, Artificial Sequence
  derived and/or modified sequence
atggaagatgatagcttgtacctgaggggggagtggcagtttaaccacttttctaaacttacaagtagccgcccagatgctgccttcgctgaaattcagaggacttcactcccagaaaaatcccctctcagctgcgagacgcgtgtagatttatgcgatgatcttgcacctgttgctcggcagctagcaccccgggagaagctcccgctctcctctaggagacccgcagcagtcggagccggtctgcagaatatgggcaacacatgttacgtgaacgcctcattacaatgcctgacatacaccccgccactggctaactacatgctgtctcgcgaacatagccagacatgtcacagacacaagggctgcatgctgtgtaccatgcaagctcacatcacacgtgctcttcataacccagggcacgtgatccagcctagtcaagctctggcagcaggattccatcgagggaagcaggaagacgcacacgagttccttatgtttacagtggacgccatgaaaaaggcttgcctaccaggtcacaagcaagttgatcatcactctaaggacacaaccctgatacatcagatattcggtggatactggcggagtcagataaagtgcctccactgccacggtatctcagacactttcgatccctatcttgacattgccctggacatacaggccgctcagagtgtccagcaggccttggagcagctggttaaacccgaggaactaaacggagaaaatgcttaccactgcggagtctgtttgcagagagctccagctagcaagactcttacccttcacacatcagcaaaggtattgatcttagttctcaagagattctcggacgtcactggaaataagatcgccaagaacgtgcagtatcccgagtgtctagacatgcagccctacatgtcgcagcccaacacaggccccctggtgtacgttctctatgcagtcctggtacatgctggttggtcctgtcacaacgggcattactttagttacgttaaggctcaggaggggcagtggtacaagatggacgatgctgaagttactgccagtagcatcacctcagtattgtcacagcaagcttatgtgctattctacattcagaagagcgagtgggagaggcatagtgagtccgtgtctagaggacgagagcccagggcgctaggcgcagaagatacggatcgccgcgctacacagggcgagttgaagcgcgaccatccttgtctgcaggctcccgagttggatgaacacttagtggagagggctacgcaggagagtactcttgaccattggaagtttctccaggagcaaaataagaccaagccagaattcaacgttagaaaggttgaggggactctcccaccggacgttctggtgatccatcagtcaaagtacaaatgcggcatgaagaatcatcatccagaacagcagagctccctgctgaacctgagcagttccacaccaacgcaccaggagagtatgaacaccgggacccttgccagccttcggggacgagccagaaggtcaaaagggaaaaacaaacacagtaagcgagcactccttgtctgccagtag

SEQ ID NO: 91730 - DNA, 1593 bp, Artificial Sequence
  derived and/or modified sequence
atggaagacgattccctttatcttaggggcgagtggcagtttaatcattttagtaagctgactagtagtagacccgatgctgccttcgcagaaattcagcggactagtctgcccgaaaaatcccctctttcctgcgagactcgagtagacctgtgcgacgatctggctccagtagcacgccagttagccccgcgcgaaaaactgcccctcagtagccgccgacctgcggctgttggggctgggctccagaatatgggcaatacttgctatgttaatgccagtctccagtgtctgacctatacccctcccctggctaattatatgctgagccgagagcatagtcagacctgccaccgtcacaaggggtgtatgctgtgcacgatgcaggcccacatcacgcgcgccctacataatccaggccacgtgattcagcctagccaggctctggctgcagggttccacagagggaaacaggaggatgctcacgagtttttaatgtttaccgtcgatgctatgaaaaaagcatgcctgccagggcacaagcaggttgatcatcatagcaaagacactacactcatccaccagatcttcggcgggtactggcggtctcagattaagtgtcttcactgccatggtatatcagacaccttcgatccttacctggatattgctttggacatacaagctgcccagtccgtccagcaggctttggaacagcttgtcaagccagaggaactgaatggagaaaacgcctaccactgcggggtttgcctccagagggcacctgcttctaagactctgactctgcataccagcgcgaaagtactgatcctggtcctcaagagattctccgacgttaccggcaataagatcgcgaaaaatgttcagtacccggaatgtcttgacatgcagccttatatgagccagccgaacaccggtcctttagtgtacgtactgtatgcagtattagtgcatgcaggatggagctgccataacggccactattttagctatgtaaaggctcaggaaggtcagtggtataaaatggatgacgcagaggtgaccgcttcttccatcaccagtgtcctgagtcagcaggcttacgtgttgttttacatccagaagtccgaatgggagagacactcagagtctgtttcaagaggtagagagcccagggccctaggcgctgaggacaccgacagaagggcaactcaaggggaactgaagcgcgatcacccttgccttcaggctccagagctcgacgagcatcttgtggagcgggcaactcaagagtcaacactggaccactggaaatttctgcaggagcagaacaaaactaagcctgaattcaacgttaggaaagttgaaggcacactgcctcccgatgtgctggtgatccaccagagtaagtacaagtgcggaatgaagaatcaccatccagagcagcaaagctccctgctcaacttgagtagctctactccaacgcaccaagagtctatgaacacgggcaccctcgcctctttgcgcggccgtgctcggcggtctaaaggcaagaataaacattccaagagagctctgctggtgtgccaatag

SEQ ID NO: 91731 - DNA, 1593 bp, Artificial Sequence
  derived and/or modified sequence
atggaagacgatagcttgtatttgagaggagagtggcaattcaaccacttctccaagcttacgagctcacgtcccgatgccgcattcgccgagatccagaggacatctctgccggagaaatccccactgtcctgcgagacaagggtggatctttgcgatgacctggcacctgtcgctagacagctcgcgcctcgggagaaactacctttgtctagtaggagacctgctgccgtgggcgctggtctgcagaacatgggaaatacctgctacgtaaacgcgagcttacagtgtctcacttacaccccaccacttgctaattacatgctgtcacgggagcatagccagacatgtcaccgtcacaagggttgtatgctgtgcactatgcaagcacacataaccagagctctgcataaccccgggcacgtcatccagccaagtcaagcgctggccgctggattccacaggggcaagcaagaagatgcccacgaattcctaatgtttacggtagacgcaatgaagaaagcctgtctgcccgggcacaaacaggttgatcatcatagtaaagatactacgctcattcaccagatctttggtggatactggcgctcgcaaattaaatgcctgcattgtcatggaattagtgatacattcgacccttacctggacattgccttggatattcaggccgcccaatcagttcagcaggctctggagcaactggttaaacctgaagagctcaacggcgagaacgcatatcattgtggggtatgcctccagcgcgctccggcttctaagacattgacactgcatacatctgcgaaggtcctaattctggtgctgaagcgttttagtgatgtcaccggcaacaagatcgctaaaaacgtccagtaccccgagtgcctcgacatgcagccatatatgtctcaacctaacacaggccctctggtgtacgtgttgtacgccgtgctcgtgcacgccgggtggtcttgccacaatggccactacttttcttatgtcaaagctcaggaggggcagtggtacaagatggacgatgctgaagtgacggcttcctctatcactagtgttcttagccaacaggcatatgtgctcttctacatccagaagtccgagtgggagcgacattctgagtccgtaagtcgtggtagagagccacgcgcccttggcgccgaagatacagatcggcgagcaacacaaggggagttgaagcgcgatcatccatgcctgcaagcacctgagctcgacgaacacctcgtcgaaagagccacccaggaaagcactctcgatcattggaagtttctgcaggaacagaataagactaagcctgagtttaacgtgagaaaggtcgagggaacactgccaccggatgttctggtgatccaccaatccaaatataagtgcggcatgaagaatcaccaccccgagcaacagtctagtctcttgaacctgtccagctcaactcccacgcatcaggaaagcatgaacacaggtaccctggccagcctcaggggacgtgcacggaggagcaaaggcaaaaacaaacacagtaaacgcgccctactggtctgccagtag

SEQ ID NO: 91732 - DNA, 1593 bp, Artificial Sequence
  derived and/or modified sequence
atggaagatgacagtctgtatctccggggggagtggcaattcaatcacttttccaaattgacttccagcaggccagatgccgcattcgccgagatacaaagaacctccctccccgaaaagtctccactgtcctgtgaaacaagggtcgatttgtgtgatgatctagcacccgtggcacgacagctggcacccagggaaaaactccctcttagctcccgtagacccgctgccgtcggcgccgggctgcagaacatgggcaacacatgctacgtgaacgcatcactgcagtgtttaacgtacacacctcccctggcaaactatatgctgtcccgcgaacactcccagacctgccacaggcacaaggggtgcatgctgtgcactatgcaagcccacattacaagggcactccataatccagggcacgtcatacagccttcccaggccctggctgctggtttccaccggggcaaacaagaagacgctcacgagtttttgatgtttactgtggacgctatgaagaaagcgtgcctgccaggacacaagcaggtagatcaccattcgaaagatactacactcatccatcagatatttggcggatattggcgttctcagatcaagtgcctccactgccatggaataagcgacacattcgacccttatctggatatcgctctggacatccaggccgcccagagtgtccaacaagccctggagcagctggtaaagcccgaagagctgaatggggagaatgcttaccattgcggcgtgtgcctccaaagagcacctgcgagtaaaaccttaaccctgcacacctcagccaaagtgctgatcctggtgcttaaacggttcagcgacgtgaccggaaataaaatcgcgaagaatgtgcagtatcccgagtgtctcgatatgcagccgtatatgtcccagccaaatacaggtccccttgtctacgtgctgtacgccgttctggtacacgcgggctggtcctgtcacaacggtcactatttcagctacgttaaagcccaggaggggcagtggtataagatggatgacgccgaggtgactgcctcttcaattaccagcgtgctgagccaacaggcctacgtgctgttctacatacaaaagtccgagtgggagagacatagcgaatcagtgtcccggggtagagaaccacgagcactgggagccgaggataccgacaggagagccacacagggagaactgaagcgggatcatccatgtctgcaggcacctgagctggacgagcatctagtggagcgggccacccaagagtctaccctcgaccattggaagttcctccaggaacagaataagaccaagccagagttcaacgtgcggaaggtcgagggtacactcccacctgacgtcctcgtcatccatcaatctaagtacaaatgtggcatgaaaaaccaccaccccgagcagcagtcgtcgctgctaaatctgtcttcatcaacaccaacccaccaggagtccatgaacaccgggaccctggcatccttgaggggccgggcaagaaggagtaagggcaagaacaaacactccaaaagggcacttctggtatgccaatag

SEQ ID NO: 91733 - DNA, 1593 bp, Artificial Sequence
  derived and/or modified sequence
atggaggatgactccttatatttgaggggagagtggcagtttaaccatttcagcaagctaacttcatccagacccgacgccgcatttgcggagattcagcgtacaagcttgcccgagaagtctcctctaagctgcgagactcgcgtcgacctttgtgacgaccttgcacccgtggctcggcagcttgcccctagggagaagctccccctgagtagccgcagaccagcagccgtgggcgctggactgcagaacatgggaaacacttgctacgtgaatgcgagtttacagtgcctaacttataccccccccctggctaactatatgttgagtagagagcacagccagacgtgccacaggcataaaggatgtatgctgtgcaccatgcaggcacacataactcgtgcattgcataatcctggacacgttatccagccaagccaggcactggccgctggcttccacaggggaaaacaagaggatgctcatgagtttttaatgttcacggtggacgctatgaagaaggcatgcctgccaggccacaagcaggtggaccatcatagtaaggatacaactctcattcaccaaatctttggggggtactggagatctcaaatcaagtgtctgcattgccacggcatcagtgacacctttgacccgtatctcgatatcgcactggatatccaggcagcccagagcgtccaacaggctttggaacagcttgtgaagccagaggagctgaacggggagaatgcctatcattgtggtgtttgcctgcagagagcgcctgcctctaagactctgactctgcatacctctgccaaggttttgatattggttctcaaacgtttctcagacgtgaccgggaacaaaatagccaagaatgttcagtacccagaatgcctcgacatgcagccatacatgtctcaacctaataccggccccctggtctatgtgctctacgcagtcctggtgcatgcaggctggagctgtcataatggccactacttctcttatgtgaaggcacaggaggggcaatggtataaaatggacgacgctgaagtgactgcaagctccattacatcagtgttaagtcaacaggcttatgtgctgttctacatccagaagtccgaatgggagcggcactctgagtccgtcagcaggggccgggagccccgggccttgggagcggaagatactgatcgccgtgcaacccagggggagttgaagcgggatcacccgtgtttacaggcgcctgagcttgacgagcaccttgtagagagagctacccaggagagtacgttggatcactggaaattcttgcaggagcagaacaagacaaagccggaatttaacgtgcgaaaagttgagggcacccttccccctgacgtcctggtgatccaccaaagcaagtacaaatgcggtatgaaaaatcatcatccagagcaacagtcttccctgctgaacttatcatcgtccactccaacgcatcaggaaagcatgaacaccggcaccctcgcgtcactccggggaagggcgaggcggtcaaaagggaaaaataagcactcaaagcgggccctgctcgtttgtcagtag

SEQ ID NO: 91734 - DNA, 1593 bp, Artificial Sequence
  derived and/or modified sequence
atggaggatgacagcctgtacctgcggggggagtggcagttcaaccacttcagcaagctgaccagcagcaggccagatgctgcctttgctgagatccagaggaccagcctgcctgagaagagccccctgagctgtgagaccagggtggacctgtgtgatgacctggcccctgtggcccggcagctggccccccgggagaagctgcccctgagcagcagaagacctgctgctgtgggcgccggcctgcagaacatgggcaacacctgctacgtgaatgccagcctgcagtgcctgacctacaccccacccctggccaactacatgctgagccgggagcacagccagacctgccaccgccacaagggctgcatgctgtgcaccatgcaggcccacatcacccgggccctgcacaaccctggccacgtgatccagcccagccaggccctggccgccggcttccaccggggcaagcaggaggatgcccacgagttcctgatgttcaccgtggatgccatgaagaaggcctgcctgcccggccacaagcaggtggaccaccacagcaaggacaccaccctcatccaccagatctttggaggctactggaggagccagatcaagtgcctgcactgccacggcatcagtgacacctttgacccctacctggacatcgccctggacatccaggccgcccagagcgtgcagcaggccctggagcagctggtgaagccagaggagctgaatggagaaaatgcctaccactgcggcgtgtgcctgcagagggccccagccagcaagaccctgaccctgcacaccagcgccaaggtgctgatcctggtgctgaagcgcttcagtgatgtgactggaaacaagatcgccaagaatgtgcagtacccagaatgtctggacatgcagccctacatgagccagcccaacacaggccccctggtgtatgtgctgtatgctgtgctggtgcacgccggctggagctgccacaacggccactacttctcctatgtgaaggcccaggagggccagtggtacaagatggatgatgctgaggtgacagccagcagcatcacctctgtgctgagccagcaggcctacgtgctcttctacatccagaagtctgagtgggagcggcacagcgagagcgtgtcccggggccgggagccccgggccctgggcgctgaggacacagacagaagagccacccagggcgagctgaagagggaccacccctgcctgcaggcccctgagctggatgagcacctggtggagcgggccacccaggagagcaccctggaccactggaagttcctgcaggagcagaacaagaccaagccagagttcaacgtgaggaaggtggagggcaccctgcccccagatgtgctggtgatccaccagagcaagtacaagtgtggcatgaagaaccaccaccctgagcagcagagcagcctgctgaacctgagcagcagcacccccacccaccaggagagcatgaacacaggcaccctggccagcctgcggggccgggcccggcgcagcaagggcaagaacaagcacagcaagagggccctgctggtgtgccagtag

SEQ ID NO: 91735 - DNA, 1593 bp, Artificial Sequence
  derived and/or modified sequence
atggaggacgacagcctgtacctgcggggcgagtggcagttcaaccactttagcaaactgaccagcagtcggcccgatgccgctttcgctgagatccaaagaacttcactcccagaaaaaagccccctgtcctgtgaaacacgtgtggacctgtgtgatgatcttgcacccgttgcacgccagctcgcccccagagaaaaactgcccctgagctcccgccggccagcggccgtgggagcaggtctacaaaatatggggaacacctgctatgtgaacgcaagcctccagtgcctgacttatacaccgccccttgccaactatatgctaagtagagagcactcccagacctgccacaggcacaagggttgcatgctatgtacgatgcaggcccatattacaagggctttgcataaccccgggcacgtgatccagccctcccaggcccttgccgccgggttccaccgggggaagcaggaggacgcgcatgagtttctgatgtttaccgtggatgccatgaaaaaggcctgtctgcctgggcacaaacaggtggatcaccactcaaaggacacgactttgatccatcagatcttcggaggttattggagatcacaaataaaatgtctccactgtcacggtattagtgacacttttgatccctacttggacatcgcccttgacatccaggctgcgcagtccgtacagcaggctctggagcagctggtgaaaccggaagaattgaacggtgaaaacgcgtatcattgtggggtgtgcctacaacgcgctcctgctagtaaaacccttacacttcacaccagtgccaaagtgctgatactggtcctaaaaagattttcagatgtcactggtaacaagattgctaagaacgttcagtatcccgaatgtctggatatgcagccctatatgtctcagccaaacaccggtccgctcgtttacgtgctttatgccgtgctcgtgcacgccggttggtcctgccataatgggcactatttttcctatgtgaaagcacaggaaggccagtggtataagatggatgatgctgaggtgacagcctccagcatcacctcggtgcttagccagcaggcttacgttttgttttatatccaaaagtccgaatgggagagacactccgagtcagtgtccagagggagggaaccccgggccctaggcgccgaggacaccgataggagagctacccagggcgaacttaagcgcgaccatccttgcctccaggctcccgagcttgatgagcatctagtcgaacgcgctacacaggagagcaccctggaccactggaagttccttcaagagcaaaataagacaaaacctgagttcaatgtgcgtaaggtggaaggcacattgcctccggacgtacttgtaattcatcagtccaaatataaatgtggcatgaaaaaccaccacccagagcagcagagttccctcttgaacttgtccagctccacgccgacacaccaggagtctatgaataccggtactttagcaagcctccgcgggcgggcgagacggtccaaggggaagaacaaacactccaaacgggctctgttggtttgtcagtag

SEQ ID NO: 91736 - DNA, 1593 bp, Artificial Sequence
  derived and/or modified sequence
atggaggacgacagcctgtacctgcggggcgagtggcagttcaaccatttctccaagttaacatcaagccggcctgatgcagccttcgcagagatccagagaacgtccttgcccgagaagtctcctctcagctgcgaaacccgcgtagatttgtgtgacgatctggcccccgtcgctaggcagctagctccccgggaaaagctgcctctatcctctaggaggcctgccgccgtgggagcaggcctccagaacatgggtaacacctgctacgtcaatgcaagccttcagtgtctcacctacacccccccactcgcaaactatatgttaagtagggaacattcccagacttgccaccgacacaagggttgtatgctctgtacaatgcaagcccatatcacccgggccttgcacaaccccggacatgtgatacagccttcccaggctctcgcagctggatttcaccgcgggaaacaggaagatgctcacgaattcctgatgtttacagtggatgctatgaagaaggcctgtctacctgggcacaaacaagttgaccaccatagtaaagatactaccttgattcatcaaatcttcggcgggtattggaggtcccagataaaatgcctgcactgccatggaatttccgacaccttcgatccctatcttgacattgctttggacattcaagccgcacaatctgttcagcaggcattggagcaactcgtcaaacccgaggaacttaacggcgaaaacgcgtaccattgcggggtgtgtttgcaacgcgcccctgcttcaaaaacgttgactctccacactagtgctaaagttcttatcctggtcctcaagaggttctccgacgtgacaggcaacaaaatcgcgaagaacgtccaatatcccgagtgcctggatatgcagccttatatgtctcaacctaacaccggccctctggtgtatgttctgtacgcagttctggtgcatgctggttggagttgccacaacggacattattttagttacgtcaaagcccaggagggacagtggtacaagatggatgacgcagaagttactgccagctcaattacctcagtcttatcacagcaagcctatgtgctgttctatatccagaaaagcgaatgggagagacactctgaatcagtcagtcgcggtagggagccgcgtgcgttaggcgctgaggacacggacagacgtgccacccagggtgagctgaaaagggaccacccctgtttgcaggctccagaactagacgagcacctcgtggagcgtgccactcaggagtctacactagatcattggaaatttctgcaggaacagaacaaaacaaaacccgagtttaatgtaagaaaggtagagggaaccttgccccccgatgtcttggtgatccaccagagtaaatacaagtgcggcatgaagaatcatcaccctgaacaacagagttctctgttgaacctcagctcctccactcctacccaccaggaatctatgaacactggtacactcgccagcctgagaggacgcgcgaggcggagcaaaggtaagaacaaacattctaaaagagcactgctagtgtgtcagtag

SEQ ID NO: 91737 - DNA, 1593 bp, Artificial Sequence
  derived and/or modified sequence
atggaggacgacagcctgtacctgcggggcgagtggcagttcaaccacttttcaaagttgacatcctcgcgacccgatgcggccttcgccgagatccagagaacgagtctgccagagaaatcccccctctcttgtgagacgcgggtagacctgtgcgacgacctcgctcctgtggccaggcaactggcacctagagaaaagctcccactctccagcaggcgccccgctgccgtgggagccggcctgcagaacatgggtaatacatgttacgtgaacgcttctctgcagtgcctgacatataccccacctctcgcaaattacatgctatcacgggagcattcacaaacttgccaccgccacaagggatgcatgctctgtactatgcaggcacacattactcgcgccttacacaacccagggcacgtgatacagccctcacaggccctggccgccggcttccacaggggaaagcaggaggatgcacatgaatttcttatgtttaccgtggacgccatgaagaaagcatgccttccaggccacaagcaggtggatcaccacagcaaggatacaaccttaatccaccagatctttggcggctattggcgctctcaaattaagtgtttgcattgccatgggatttcggacacattcgacccatatctggatattgctctcgacattcaggccgcccagtctgttcagcaagcacttgaacaactggtcaaaccggaggaactcaatggcgaaaacgcctaccactgtggagtttgtttgcagagggccccagcatctaagaccttgacacttcacacttcggccaaagtcctgattctcgtgctgaagagatttagcgacgtcaccggcaataagatagcgaagaatgtgcaataccctgagtgcctggatatgcagccatatatgagccagccaaacacaggtccgcttgtgtacgtgctgtacgccgttctggtgcacgctggatggtcctgtcacaatggccattacttctcatacgttaaagcacaggaaggacagtggtacaaaatggatgacgccgaagtgacagcctcaagcatcacttctgtcctttcacagcaggcatacgtgctgttctatattcagaaatccgaatgggaacgccacagcgagagtgttagccggggtcgcgaacctagagccttgggagccgaggacacagatcgcagagccactcaaggagaattgaagcgcgaccacccttgcttacaagcccccgagttggacgagcacttagtggaaagggccacacaggaatcaaccttggaccattggaagttcttgcaagaacagaacaaaaccaagccagagtttaatgtgcgtaaggtggagggcaccctgcccccggacgtgctggtcatccatcagagcaagtataagtgcggaatgaagaatcatcaccctgaacagcagtcatctcttctgaacctgtcatcttcgacaccaactcatcaggagtccatgaatacaggcacactggcgagcctacggggacgggcaagacggtctaaaggaaagaataagcacagtaaaagagcactgctcgtgtgccagtag

SEQ ID NO: 91738 - DNA, 1593 bp, Artificial Sequence
  derived and/or modified sequence
atggaggacgacagcctgtacctgcggggcgagtggcagttcaaccactttagcaagctgacgtctagccgccccgatgctgcctttgccgaaattcaacgaacttctttgccagaaaagtcacccctgagctgcgaaacaagggtggatctgtgtgacgacttagccccggtcgccagacagctggcaccccgcgaaaagctccccctgtctagtagacggcctgccgctgtgggtgctggcctccagaacatgggcaacacatgttatgttaatgcttctctgcagtgcctaacttatacgcctcctttggctaattacatgctctctcgcgagcattctcaaacctgccaccggcacaagggatgcatgctgtgcactatgcaggcgcacatcaccagagccctccacaaccctggacatgtgatacaaccaagccaggcattagcagcaggatttcacaggggtaagcaggaagacgcacacgagttccttatgttcaccgtggatgcaatgaaaaaggcctgtctgcctggacataaacaggtggaccaccacagtaaagacacgactttgatacaccagatcttcggcgggtactggcgcagtcagatcaagtgtctccattgtcatggtattagcgacactttcgacccgtacctggatattgctctcgacattcaggctgcccaatctgttcaacaggctctcgagcagctggtgaaacctgaagagctgaacggtgaaaacgcctatcactgtggagtgtgcctgcaacgtgctcctgccagcaaaactttaactctgcacacctcagccaaggttctgattcttgtgttaaaacgattttctgatgtgactggaaataagattgccaaaaacgttcagtatccagagtgtttggacatgcagccctacatgtcacagcctaacaccggtcccttggtgtatgtgctctacgccgtactggtccatgccgggtggagttgtcacaacggccactacttttcttatgttaaggctcaagaaggtcagtggtacaaaatggacgacgctgaagtaactgccagctctataacatctgtgctcagccagcaggcatatgtcttattttacatccagaagagtgaatgggaaagacacagtgaaagcgtctctcgtggcagagagcccagagcacttggggcggaagataccgaccggagggccactcagggagaactgaagagagatcacccgtgcctacaggctcctgagctcgatgagcatcttgttgaaagagctacacaggagtccactctggatcactggaaattcctccaggagcagaacaagactaaacccgagttcaatgtccgaaaagtggagggaaccctccccccagacgtcctagtgatccaccaaagcaaatacaagtgcggtatgaaaaatcaccaccccgaacaacagagcagtctgcttaatttatcaagtagtacgccaacccatcaggagtcgatgaatactggtacactggctagtttgcgcggcagggcaagacgcagcaaaggcaagaataagcacagcaagagggcactgcttgtgtgtcagtag

SEQ ID NO: 91739 - DNA, 1593 bp, Artificial Sequence
  derived and/or modified sequence
atggaggacgacagcctgtacctgcggggcgagtggcagttcaaccatttcagtaaactgacctcatcccggccggacgcggccttcgcagaaattcagcgtacatccttacctgagaagtcccctctcagttgcgaaacgagggtcgatctgtgtgatgacctggcgcccgttgccaggcaacttgctcctcgtgaaaaactgcctctatcaagcagaagacccgccgctgtgggagccggactccagaatatggggaacacatgctacgtgaacgcctccttgcagtgcctgacttacacccctcctctggcaaactatatgctgtctagggagcatagtcagacctgccataggcataagggatgcatgctgtgtaccatgcaagcacacatcacacgcgccctgcacaacccaggtcatgtcattcaacccagccaagcattggccgccggattccaccggggcaaacaggaggacgctcacgagtttcttatgttcacggttgatgcgatgaaaaaggcttgtcttcccgggcataagcaggttgaccatcatagcaaggataccactcttatccatcagatctttggcgggtactggcgatctcagatcaagtgcctccactgccacggcattagcgacactttcgacccgtatctcgatattgctctcgacatccaggcagcccaatcagttcaacaggctctcgagcaactggtcaagccggaggagctaaatggagaaaatgcataccattgtggtgtgtgcctgcagagagcccctgctagtaagaccctaactctccacacttccgctaaagtactgatcctggttctgaagcggttctcagatgtgaccgggaataagatcgctaagaacgtccagtatccggagtgtctcgatatgcagccctacatgtcccagcctaacacaggacctctcgtgtatgtgctctacgcagttctagtgcatgctggatggtcgtgccacaacggccactatttcagttacgtgaaagctcaggagggtcagtggtataagatggatgacgctgaggtgaccgcatctagcattacttccgtgctatcacaacaggcttacgtccttttctacatccagaagtccgagtgggaacggcattccgaatcggtcagtcggggcagagagccccgggctcttggcgccgaggacacagacaggcgcgctacacagggcgagttgaaacgggatcatccttgcctgcaagcccccgagctggacgagcacctagtcgaacgggctacacaagaaagcaccctcgaccattggaaattcctgcaagagcaaaataagacaaagcctgaattcaacgtgcggaaagtcgaaggaacactgcccccagacgtgctagtcattcaccaatcaaaatacaagtgcggaatgaaaaatcaccaccccgagcagcaatcgtctctgctcaacctcagtagttctacgcctactcatcaggaatccatgaacactggtacacttgcaagtctgagggggcgtgctcggagaagcaaggggaagaataagcactcaaaaagagcactccttgtgtgccagtag

SEQ ID NO: 91740 - DNA, 1593 bp, Artificial Sequence
  derived and/or modified sequence
atggaggacgacagcctgtacctgcggggcgagtggcagttcaaccacttctcaaagttaacatcctcacggcctgatgccgcttttgcggaaattcagcgcactagcctcccagagaaatccccgctaagttgcgagacccgcgtagatttatgtgatgacctcgcacctgtggctcgccaacttgccccccgggagaaattgcctctctcatcccgccgcccggccgccgtgggtgcagggctccaaaacatgggcaatacatgttacgtgaacgcctctctgcagtgtcttacttacacgccacctttggcgaactatatgctgtcacgcgaacacagccagacttgccaccgtcataaaggatgtatgctgtgcactatgcaggcccacattacacgcgccctacataacccaggccatgtcatccaaccatcacaggccctggctgctggattccacagaggcaaacaggaagatgctcatgagtttttgatgtttaccgtggatgccatgaagaaggcctgccttcccggtcacaaacaggttgaccatcattctaaggataccactctgattcatcagatttttggtggttattggcgtagtcagattaagtgtctgcattgtcatgggataagcgatacatttgatccatacctggacatcgctctcgatatccaggcagctcagtcagtgcaacaggcccttgagcaattagtcaagcctgaggaactcaatggggagaacgcttaccactgtggtgtgtgcttgcagagggctcccgcatctaaaaccctcactttgcatacatctgccaaggtattgatactggtgctaaagcggttcagtgatgtgaccggaaacaagatcgcgaaaaatgtccaatatcccgaatgccttgacatgcaaccctacatgagtcagcccaatacggggccgctggtgtacgtcctctacgctgtgctcgtccatgcgggctggtcttgccataacgggcactacttcagctacgtaaaagctcaggaggggcaatggtacaagatggatgacgcggaggtgaccgctagttcaatcacttcagttctttcccagcaagcgtatgtcctgttttatatacagaagagcgaatgggagagacactccgagtcagtcagcagaggccgggaaccacgcgcactgggtgccgaggataccgatcggcgggcgacccagggtgagctcaagagggaccacccatgtttgcaggcgcccgagctagacgaacatctggtagagcgagccacacaggagtccaccctcgatcactggaaatttctgcaggaacagaacaaaaccaaacctgagtttaatgtccggaaggtcgaaggaacattgccccctgatgttttggtgatccatcagagcaaatacaaatgtggcatgaagaaccaccatccagagcaacagtctagtcttttaaacctgtcatcatctacgccaactcaccaggaatccatgaatacaggaaccttggccagtttaagaggccgagcccggaggtctaagggaaaaaataaacattctaagagagccctcctcgtctgccaatag

SEQ ID NO: 91741 - DNA, 1593 bp, Artificial Sequence
  derived and/or modified sequence
atggaggacgacagcctgtacctgcggggcgagtggcagttcaaccacttttcaaagctgacctcctcacgcccagacgccgcattcgctgaaatccagaggacttctttacctgagaaatctccattgtcctgcgagacccgtgtggacctttgtgacgatttggcaccagtcgctagacaactggctcctcgcgaaaagctacccttgtctagtcgcagacccgctgccgttggagctggccttcagaatatggggaatacgtgttacgtgaatgcaagtctccagtgtctgacctataccccccccctggccaattatatgctgtcaagagaacacagtcagacatgccaccgacacaaaggctgtatgctgtgcactatgcaggcccacatcacgagagctttgcataacccaggacatgtaatacagcctagccaagcactggccgctggatttcaccgaggcaagcaggaggacgctcacgaatttctgatgttcacagttgatgcaatgaagaaagcctgtctgcccggccataagcaggtcgaccatcacagtaaagacaccaccttgatccatcagattttcggcgggtattggcggtctcagatcaagtgtctccattgtcatggcatctccgatacattcgacccgtatctggacatcgccctagacatacaagccgcacagagtgtgcagcaggccttagagcaactggttaagcccgaagaactgaatggcgagaatgcctatcactgcggtgtgtgtctccagagagcaccagcatcaaaaacactaactctccacaccagcgctaaggtgctgatcctcgtactgaaacggttctccgatgttaccggcaataagatcgctaagaatgtgcagtaccccgagtgcctggacatgcagccttacatgtcccagcccaataccggccccctagtgtacgttctctacgcggtattggtgcatgccggttggtcctgtcacaatggtcactacttctcatatgttaaagcacaagagggtcaatggtacaaaatggacgacgctgaggtgaccgcttcttccatcacctccgttctgtcacaacaggcctacgtgctgttttatatccagaagagcgagtgggagagacatagtgaatccgtttctcggggcagagagccaagggccctgggggctgaagatactgacagacgtgccacccagggtgagctgaagcgcgaccacccatgcctgcaagcccctgaactcgatgagcacctcgtcgagcgcgccacccaggaaagtacgctcgaccattggaaatttcttcaggagcagaacaaaacaaagcctgaatttaacgtgagaaaagtagagggcaccctgcctccagatgtgcttgtgatacaccagtctaagtacaagtgcggaatgaagaaccaccaccctgaacagcaatcaagtctcctaaatttatcaagtagtacccccacccaccaagagtccatgaataccggcacactcgcctcattgaggggccgcgcccggcgctccaaaggaaagaataaacactctaagcgcgccttactggtctgtcagtag

SEQ ID NO: 91742 - DNA, 1593 bp, Artificial Sequence
  derived and/or modified sequence
atggaagacgatagtttgtatttacggggagagtggcaatttaatcacttttccaagctgacttcaagcagaccggatgccgctttcgctgagattcaacggacaagcctgccggaaaagtctcctctgtcatgtgaaacccgggtggacctatgcgatgacctcgcccctgtagccaggcagctggcccctcgagaaaaactacctctgagctctcggcgacccgcagccgtgggcgctggtctgcagaacatgggtaatacctgttacgtgaacgctagtttgcagtgtttgacttacactccgccactcgccaattatatgctctccagagagcacagtcagacatgccaccggcacaaggggtgcatgctctgcactatgcaggcacatataacgagggccctgcacaacccaggccacgtgatacagccaagccaggccttggccgcaggctttcaccgcggtaagcaggaagatgcacacgagttcttgatgttcacggtggacgccatgaaaaaggcctgtttgcctggccacaaacaggtcgaccatcactctaaggataccacgctcatacaccagatcttcggtgggtactggcgcagccagatcaagtgcctgcactgtcatggcatcagcgacacatttgacccatatctggatattgcactcgatattcaggccgcacagtcagtccagcaggctttggagcagctggttaagccggaggagctgaatggcgagaatgcttatcattgtggagtgtgtttacagagggctccagcgtctaagaccttgactctgcacacctctgctaaagtgctgatactcgtgctaaaaaggttttcggacgtgactggaaacaaaatagccaagaacgtgcagtatcctgaatgccttgatatgcaaccctacatgtcacaacctaatacaggacccctggtttacgttctatacgccgtcctggtgcacgcaggttggtcttgccataatggacattacttctcctatgttaaggcacaagagggtcagtggtataagatggacgacgctgaggtcactgctagttccatcacctccgtgctgtctcagcaggcctacgtgctgttctatatccaaaaatccgagtgggaacgccattcagaatccgtgtcaagaggccgagaaccgagggccctgggggcagaggatacagatcggagggctactcagggcgagctgaagcgcgaccacccttgcctgcaagccccagaactggacgaacatctggttgaaagagccacacaggagagtactctggatcattggaaattcttgcaggagcaaaataaaacgaagccagagtttaacgtgaggaaagtggagggcactttacccccagatgtgctggtgattcatcagtccaagtacaagtgcggaatgaagaaccatcatcctgaacagcagagtagcctgcttaatctaagcagctccaccccgacccatcaggagagcatgaataccggcaccctggctagtcttcgcggacgggctcgccgaagcaagggtaaaaacaagcatagcaaacgggctttgctggtttgtcaatag

SEQ ID NO: 91743 - DNA, 1593 bp, Artificial Sequence
  derived and/or modified sequence
atggaagacgactccctgtatctccgtggcgagtggcaattcaaccattttagcaagttgactagttctcgcccagacgctgcttttgctgagattcaacgaacttcccttcctgagaaatcacctctcagctgcgaaactagagtagacctgtgtgacgatttggcccctgtcgcacggcagctggcgcctcgggaaaaactgcctctgtcttccagacggcctgcggctgtgggcgctggattgcagaacatgggcaacacatgctacgtcaatgcttccctgcaatgtttgacctatactcccccactggccaactacatgctgagtagggagcatagccagacatgccacaggcataagggctgcatgctttgtactatgcaagcccacattactagggccttgcataacccaggccatgtaatccagccttctcaagcattggcagccggatttcaccgcggtaagcaggaggatgcccacgagtttcttatgttcacagtcgacgctatgaaaaaagcctgcctccccggtcataaacaggtcgaccatcactccaaagacactactctcattcatcagatattcggcggttattggagatcccagattaagtgtctgcattgccacggcatctccgacacgttcgatccctacttggatatcgccctggatatccaagctgcacagtctgtccagcaggctctggaacaactggtgaaacctgaagagttgaatggcgaaaacgcataccattgcggggtatgccttcagcgcgctcccgctagcaagactctgaccctgcacacatccgccaaggtgctgatcctcgtgctcaaacggttttccgacgtgaccggaaacaaaatcgccaagaacgttcagtaccccgagtgtttggatatgcagccatacatgagtcagcccaatacagggcctctagtgtatgttctgtacgccgttctggtgcacgcaggatggtcgtgtcacaatggacactacttttcctatgtgaaagctcaagaagggcagtggtataaaatggacgacgcggaggtaacagcctctagtatcacctcagttctctctcagcaggcctatgttttattttacattcagaaatcagaatgggaacgccactccgagtctgtgagccgcggaagggagccacgtgctctaggagcggaagacacagaccggagagccacacaaggtgaactcaaacgggatcatccctgtctccaagccccagagctggacgaacatctggtcgaacgcgcaacgcaggagagcacactggatcactggaagtttctgcaggagcagaataagaccaaaccagagtttaatgtgcgcaaggtggagggtactctgcctccagacgtactggtgatccaccagtccaaatataagtgtggcatgaagaaccaccatcctgagcagcagtcaagcttgctgaacctttcttcatctacacccacacaccaggagagcatgaacaccgggacactggcgtctttgcgcggtcgggctcggcgtagtaaaggcaagaataaacactctaagcgcgcactgcttgtatgccagtag

SEQ ID NO: 91744 - DNA, 1593 bp, Artificial Sequence
  derived and/or modified sequence
atggaggacgatagtttgtacttgagaggagagtggcagtttaaccatttcagtaagttaacatcaagccgtcccgatgccgcatttgccgagattcaaaggactagcctacctgagaaaagccccctctcttgcgaaacacgggtagacctctgcgacgacctcgcaccagtcgccaggcaactcgcccctagagagaagctccctctcagttcacgcaggcctgcggcagtgggagccggactgcaaaacatgggtaatacgtgctacgtgaacgcaagcctccagtgtctgacatatacccctcccctggctaactatatgctcagtagggagcactcacagacatgccaccgacacaaaggctgcatgttgtgtacaatgcaggcgcatattacaagagcgctccacaatccgggtcacgtaatccagccgtcacaggccctcgctgccggatttcaccgtggtaagcaggaggacgctcacgaatttcttatgttcaccgttgacgcgatgaagaaggcatgtctccccggtcataagcaagtggaccaccacagtaaggacaccacactgatccatcagatatttggcggttactggcgaagtcagattaagtgcctgcactgccacggcattagcgacacgttcgacccctacctcgatatagccttggatattcaagccgctcaatccgtgcaacaggcacttgaacagcttgttaagcccgaagagcttaacggggaaaacgcctaccattgcggtgtctgcctccagcgggcacccgctagcaaaacacttacactacacacgtctgccaaggttctgatcctggtcctcaagagatttagcgatgtcaccggtaacaagatcgctaaaaacgttcagtatccagagtgtttagacatgcagccttatatgagccagcccaacactgggccactcgtgtacgtgctgtacgccgtgttagtccatgctggctggtcctgccataatgggcactacttctcatatgtgaaagcacaagagggacagtggtataagatggatgatgccgaggttactgcgtcctctatcacctccgtgctgagccagcaggcatacgttcttttttatatccagaagagcgagtgggagagacactctgagtctgtgagtcgtgggcgtgaaccgagagcattgggggcagaggataccgatcgccgagctacgcagggagagctgaagcgggaccatccttgtctgcaggctccagagttagacgagcacctcgtcgagcgcgctacccaggaaagtacacttgaccattggaagtttctccaagagcaaaataagacgaagcctgaattcaacgtccgcaaagtggagggaaccttaccaccggacgtcttagtcatccaccagtctaagtacaaatgcgggatgaagaatcaccatccagagcagcaaagctctctcctgaatctgagcagcagtacccctacacatcaagagtctatgaacacagggacgttggccagtctgcggggtagagcacgcagaagcaaagggaagaacaagcattctaaaagggctcttctagtttgccagtag

SEQ ID NO: 91745 - DNA, 1593 bp, Artificial Sequence
  derived and/or modified sequence
atggaggacgacagcctatacttgcgcggagagtggcaattcaatcatttcagcaaacttacctctagcagacctgatgccgcattcgccgagattcagcggacatccttgccagagaaatctcctctgtcctgcgaaacaagagtggacctgtgtgacgacctggctcctgttgcgcgacagcttgcccctagggaaaagctgccactgagttctagacgacctgccgcagtcggcgcaggactgcaaaacatgggaaatacttgctacgtgaacgccagtctgcagtgccttacctacaccccacctttggcaaattacatgctcagtcgcgaacacagccagacctgccatcggcacaaagggtgcatgctctgtaccatgcaagcacacatcacccgagcccttcacaacccaggacatgtcatccaaccttctcaggctcttgctgctggttttcacagggggaagcaggaggacgctcacgagtttttaatgttcaccgtcgatgccatgaaaaaggcctgtcttcccggacacaagcaggtagaccaccactccaaagatactactctgatacatcagatcttcggcggatattggcggtcccaaattaagtgtttgcattgccatggaatctccgatacctttgatccgtatttggatattgcactagatatccaggcagctcagagcgtccaacaggctctggaacagctggtcaagccagaggaactgaacggggagaacgcgtatcactgtggggtatgcctgcagcgcgcacctgcttccaaaacactaaccctccatacaagcgctaaagtgctgatcctcgtgctgaagcgttttagcgacgttactggaaacaaaattgcgaagaacgttcagtatccagagtgccttgatatgcagccttacatgtcacagccgaatacaggcccactggtctacgtcctctacgccgtgctggtgcacgccggttggtcgtgccacaatggccattatttcagttatgttaaagcccaggagggacagtggtacaaaatggacgacgccgaggtgacagcctcatccatcacttccgtgctgagccagcaggcatatgtgctgttctatatacagaagtcagagtgggagcgccacagcgaatctgtaagcagaggacgggagcccagagccctgggcgctgaggataccgataggcgggctacccagggagagctgaaacgggaccacccctgtttacaagcccctgagctggatgaacatctagtggaacgggctacgcaagagtccaccctggaccattggaagtttctacaggagcagaataaaaccaagccagagttcaatgtcaggaaggtggaaggaacgctccctcctgatgtgctcgtcatacaccagagtaagtataagtgcggcatgaagaaccaccatcctgaacagcaatccagcttgcttaatctgtcctcctctactccgacccatcaggaatccatgaatacaggcacattggcgtcactgcggggtagggctcgtcgttcaaaggggaagaataagcacagtaagcgagcccttctggtctgtcagtag

SEQ ID NO: 91746 - DNA, 1593 bp, Artificial Sequence
  derived and/or modified sequence
atggaagacgactcattgtacctcagaggagaatggcagtttaatcatttttccaaattgaccagttcccgtccggatgcagccttcgccgaaatccaacgaacttccctgccagaaaagagtcctttgtcctgtgagaccagggtggacctctgtgacgaccttgctcccgtcgcaaggcagttggcacccagagaaaagttacctctctccagccgccgtccagctgccgtaggtgctgggttacagaacatgggaaacacttgctacgtcaacgcgtcgttgcaatgcttgacctataccccccctcttgctaactatatgctgagccgcgaacatagtcagacttgccaccgtcacaagggctgcatgctgtgcaccatgcaggcccatatcactagagccctccacaacccgggtcacgtaattcagcccagtcaagctctcgctgccggattccataggggcaagcaggaagatgcccacgaatttctaatgtttacagtggacgcaatgaagaaagcctgtctccccggacacaaacaggtggaccaccattcgaaggacaccacattaatccaccagatctttggaggctattggaggtcccagattaagtgcctgcactgccacggaatttcggacacctttgacccctacttagacattgctcttgacatacaggctgcgcagtcagtacagcaggcgctggagcagctagtgaagcccgaggagttgaacggggaaaatgcttaccattgtggggtctgcctgcaacgtgccccagcttccaagactctgaccctgcacacgtctgcaaaagtgctgatccttgtcttgaaacggttcagtgacgtgactggaaataagatcgccaagaatgtccagtaccccgagtgcctggacatgcagccttacatgtctcagcccaatactggacctctagtctacgtcctctacgctgtgctggtgcacgccggatggagctgtcacaacgggcactatttctcgtacgtgaaagctcaagaaggacagtggtataagatggacgacgcagaagtcaccgcatcaagcataacatctgtgttatcgcagcaggcctatgtcttgttctacatccagaaatcagagtgggagcgacactccgagagtgtttcgcggggacgcgaacctagagccttgggagcggaagacacggatcgacgagcaacccagggcgaactgaaacgggatcatccatgtctgcaggctccagagcttgacgaacatcttgttgagagagccacccaagaaagtaccctggatcactggaagttcctccaggagcagaataagacaaaacctgagttcaatgtgaggaaggtcgagggaacacttccacctgacgtcctggttatacaccagtccaagtacaaatgtggaatgaagaaccaccaccccgaacagcaaagctcactcctgaatctctctagttccacgccaacccatcaggagagcatgaatactggaaccctcgcaagcctgcgcggacgtgctcgccgtagcaagggtaagaataaacactccaaacgcgctctgttggtttgccaatag

SEQ ID NO: 91747 - DNA, 1593 bp, Artificial Sequence
  derived and/or modified sequence
atggaggacgactctctttaccttcgaggcgaatggcaatttaaccacttttccaagttgacatccagtcgacctgatgcagccttcgcggagatacaaagaaccagcctgcccgagaagtctccactgtcctgtgagactcgggtggatctctgcgatgatctggccccagtggctcggcagttggccccacgcgagaagctgcctttgtcgtcgagacgccctgctgcggtgggagctgggctccagaatatgggaaatacgtgctacgtgaacgcatctcttcagtgtctgacgtacaccccacctctggccaactatatgctttcccgtgagcatagccaaacgtgccaccgacataaagggtgtatgttgtgtactatgcaggcccacataacccgcgctcttcacaatcccggtcatgtgattcagccctcccaggctctggcagcaggatttcaccgtggcaagcaagaagacgcccatgaatttctgatgttcactgtcgatgctatgaagaaagcatgccttcctggtcacaagcaggtagatcaccacagtaaagatacaacactaatccaccagatatttggcggttactggagaagccagatcaagtgtctgcactgtcacggaatttctgacacattcgatccatatctggacatcgccctggacattcaagccgctcaatccgtgcagcaggccttggaacagctggttaagcccgaggagttaaatggcgagaacgcctaccactgtggcgtttgtctacaaagggcccctgcatccaaaacactgacgctacacaccagtgccaaagtgctcatactggtgctaaaacggttttctgacgtaactggcaacaaaatcgctaagaacgtgcagtacccagagtgtctggatatgcagccgtatatgtcccagcctaatactgggcctctcgtctacgtgctttacgcagtcctggttcatgcaggctggtcgtgccataatggacattatttctcctatgtcaaagctcaagaagggcagtggtacaagatggacgacgctgaagttacagcttcaagcatcacgtctgtcctgtcccagcaggcctacgtgcttttttacatccaaaaaagcgagtgggagcgacactccgaaagcgttagtcgtgggagagagcccagagccctgggtgcagaagatacggataggcgggcaacccaaggcgaattgaagagagatcacccatgtctgcaagctcccgagctagacgaacacctggtggagagagccactcaggagtccacactggaccattggaaattcttgcaagagcaaaataagacaaaacctgaatttaacgtccgaaaagtggagggcactctgcctcccgacgtgctggtgattcatcaaagcaagtacaagtgcgggatgaagaatcatcatcctgagcagcagagtagcctactgaatctgagcagcagcacccccactcatcaggagtccatgaacaccggcaccctggccagtctgagggggcgagctcggcgtagcaagggaaaaaacaagcatagcaaaagggccctgcttgtgtgccagtag

SEQ ID NO: 91748 - DNA, 1593 bp, Artificial Sequence
  derived and/or modified sequence
atggaggacgatagcttatatctgcggggtgagtggcagtttaatcacttttccaagctgacctctagccgtccggatgcagcattcgccgagattcagagaacaagcctccccgagaagtcccccctctcgtgcgaaactcgcgttgacctgtgcgatgatttggcccctgtcgccagacagctggcgccacgggagaaactaccactgtcctctcgaagacccgctgcagtcggtgctggtttgcagaacatggggaacacatgttatgtgaacgcatccctgcaatgcctgacttatacgccccctctggccaactacatgttgagtagggagcactcccagacatgccaccggcataaaggatgcatgctctgcaccatgcaagctcacatcacgcgtgccctgcataatcccggacacgtcattcaaccttcccaggcactggccgctggatttcacagaggcaagcaggaagatgcccacgagtttttaatgttcacagtcgatgctatgaaaaaggcctgtctgcccggacataaacaggttgatcatcattccaaggataccacactgatccaccagatttttggcggatactggcgcagccaaatcaagtgcctacattgtcatggcatctcagacaccttcgatccttacctcgatattgccttggatatccaggcagcacagtccgtgcagcaagctctggaacagcttgtgaagccagaggagctgaatggtgagaacgcgtatcattgcggcgtgtgcctccagagggcccctgctagtaaaactttgacactacatacatccgctaaggttcttatactggtcttaaagaggttctcagatgttaccggcaacaagatcgcgaaaaacgttcagtacccagagtgccttgacatgcaaccgtacatgtcccagcccaataccggtcctttagtgtacgtgctctatgccgtcctggtgcacgccggatggagctgccacaatgggcactacttttcctatgtgaaagctcaagagggccagtggtataagatggacgacgccgaagttacggcttcttcgattacctctgtgctttctcagcaggcgtatgtcctcttctatatccagaagtccgagtgggagagacattctgaaagcgtttctcggggaagagaaccacgcgctctcggcgcagaggatactgatcgtcgcgcaactcaaggcgagctcaagagagaccacccttgcttacaggctcccgagctggatgaacatctcgttgagagagctactcaggagagcacgttggaccactggaagttcttgcaggagcaaaacaagactaagccagagttcaatgtgagaaaagtagaaggtaccctgccacctgatgtgctagtcatacatcagagcaagtataagtgtggcatgaaaaaccaccaccccgagcagcagtcctcattattaaatttgagtagttcaacccccacacaccaggagagtatgaatacgggtaccctggctagccttcgtgggcgtgcacgcagatctaagggcaaaaataaacactcaaaacgagcgctactggtctgtcaatag

SEQ ID NO: 91749 - DNA, 1593 bp, Artificial Sequence
  derived and/or modified sequence
atggaggacgactcactctacttgagaggtgagtggcagttcaaccacttttcaaaactcacatcttctcggcccgatgcagcttttgctgaaatccagcggacttctctccctgagaagtcaccactctcatgtgagacccgtgtcgacctctgtgatgatttggctcctgtggcaagacagcttgctcccagggagaagcttcctctgagtagcaggagacctgctgcggtgggggctgggctccagaatatgggaaatacctgctacgtgaacgcttccttgcagtgcctgacatacacaccgccccttgccaactacatgctgtcccgggagcactctcaaacgtgtcatcgtcacaagggctgcatgctctgtactatgcaagctcacatcacacgggccctccacaatcctggccacgtcatccagccctcacaggcattggctgctggcttccatagaggcaagcaggaagatgcccatgaatttctcatgttcactgtggatgccatgaaaaaggcatgccttcccgggcacaagcaggtagatcatcactctaaggacaccaccctcatccaccaaatatttggaggctactggagatctcaaatcaagtgtctccactgccacggcatttcagacacttttgacccttacctggacatcgccctggatatccaggcagctcagagtgtccagcaagctttggaacagttggtgaagcccgaagaactcaatggagagaatgcctatcattgtggtgtttgtctccagagggcgccggcctccaagacgttaactttacacacctctgccaaggtcctcatccttgtattgaagagattctccgatgtcacaggcaacaagattgccaagaatgtgcaatatcctgagtgccttgacatgcagccatacatgtctcagccgaacacaggacctctcgtctatgtcctctatgctgtgctggtccacgctgggtggagttgtcacaacggacattacttctcttatgtcaaagctcaagaaggccagtggtataaaatggatgatgccgaggtcaccgcctctagcatcacttctgtcctgagtcaacaggcctacgtcctcttttacatccagaagagtgaatgggaaagacacagtgagagtgtgtcaagaggcagggaaccaagagcccttggcgcagaagacaccgacaggcgagcaacgcaaggagagctcaagagagaccacccctgcctccaggcccccgagttggacgagcacttggtggaaagagccactcaggaaagcaccttagaccactggaaattccttcaagagcaaaacaaaacgaagcctgagttcaacgtcagaaaagtcgaaggtaccctgcctcccgacgtacttgtgattcatcaatcaaaatacaagtgtgggatgaagaaccatcatcctgaacagcaaagctccctgctaaacctctcttcgtcgaccccgacacatcaggagtccatgaacactggcacactcgcttccctgcgagggagggccaggagatccaaagggaagaacaaacacagcaagagggctctgcttgtgtgccagtga

SEQ ID NO: 91750 - DNA, 1593 bp, Artificial Sequence
  derived and/or modified sequence
atggaggacgacagcctgtacctgagaggcgagtggcagttcaaccacttcagcaagctgaccagcagcagacccgacgccgccttcgccgagatccagagaaccagcctgcccgagaagagccccctgagctgcgagaccagagtggacctgtgcgacgacctggcccccgtggccagacagctggcccccagagagaagctgcccctgagcagcagaagacccgccgccgtgggcgccggcctgcagaacatgggcaacacctgctacgtgaacgccagcctgcagtgcctgacctacaccccccccctggccaactacatgctgagcagagagcacagccagacctgccacagacacaagggctgcatgctgtgcaccatgcaggcccacatcaccagagccctgcacaaccccggccacgtgatccagcccagccaggccctggccgccggcttccacagaggcaagcaggaggacgcccacgagttcctgatgttcaccgtggacgccatgaagaaggcctgcctgcccggccacaagcaggtggaccaccacagcaaggacaccaccctgatccaccagatcttcggcggctactggagaagccagatcaagtgcctgcactgccacggcatcagcgacaccttcgacccctacctggacatcgccctggacatccaggccgcccagagcgtgcagcaggccctggagcagctggtgaagcccgaggagctgaacggcgagaacgcctaccactgcggcgtgtgcctgcagagagcccccgccagcaagaccctgaccctgcacaccagcgccaaggtgctgatcctggtgctgaagagattcagcgacgtgaccggcaacaagatcgccaagaacgtgcagtaccccgagtgcctggacatgcagccctacatgagccagcccaacaccggccccctggtgtacgtgctgtacgccgtgctggtgcacgccggctggagctgccacaacggccactacttcagctacgtgaaggcccaggagggccagtggtacaagatggacgacgccgaggtgaccgccagcagcatcaccagcgtgctgagccagcaggcctacgtgctgttctacatccagaagagcgagtgggagagacacagcgagagcgtgagcagaggcagagagcccagagccctgggcgccgaggacaccgacagaagagccacccagggcgagctgaagagagaccacccctgcctgcaggcccccgagctggacgagcacctggtggagagagccacccaggagagcaccctggaccactggaagttcctgcaggagcagaacaagaccaagcccgagttcaacgtgagaaaggtggagggcaccctgccccccgacgtgctggtgatccaccagagcaagtacaagtgcggcatgaagaaccaccaccccgagcagcagagcagcctgctgaacctgagcagcagcacccccacccaccaggagagcatgaacaccggcaccctggccagcctgagaggcagagccagaagaagcaagggcaagaacaagcacagcaagagagccctgctggtgtgccagtag

SEQ ID NO: 91751 - protein, 79 aa, Artificial Sequence
  derived and/or modified sequence
MGRKRLITDSYPVVKRREGPAGHSKGELAPELGEEPQPRDEEEAELELLRQFDLAWQYGPCTVSGISIPYEAPRKTSCP

SEQ ID NO: 91752 - DNA, 240 bp, Artificial Sequence
  derived and/or modified sequence
atgggtcgtaagaggttaattaccgactcataccccgttgtgaagcgccgagagggacctgccggccatagtaaaggggaacttgcccccgagttgggggaagaaccccagcccagggacgaggaggaggctgagcttgaattgctcaggcagttcgacttggcatggcagtatggaccctgcactgtgtccggcataagcattccgtacgaggcacctcgcaaaacctcttgcccctag

SEQ ID NO: 91753 - DNA, 105 bp, Artificial Sequence
  derived and/or modified sequence
atgggaagaaagcgcctcataacagattcttaccccgtagtgaagcgacgagagggccctgctgggcactccaagggcgagctggccccagaattgggactttag

SEQ ID NO: 91754 - DNA, 240 bp, Artificial Sequence
  derived and/or modified sequence
atgggcaggaagaggctcatcacagacagctaccctgtggtgaagaggcgggagggccctgctggccacagcaaaggagagctggcccctgagctgggggaggagccccagcccagagatgaggaggaggccgagctggagctgctgcggcagtttgacctggcctggcagtatggcccctgcaccgtgtctggcatcagcatcccctatgaggcccccaggaagaccagctgcccctag

SEQ ID NO: 91755 - DNA, 105 bp, Artificial Sequence
  derived and/or modified sequence
atgggcaggaagaggctcatcacagacagctaccctgtggtgaagaggcgggagggccctgctggccacagcaaaggagagctggcccctgagctgggcctgtag

SEQ ID NO: 91756 - DNA, 240 bp, Artificial Sequence
  derived and/or modified sequence
atgggccggaagcggctgatcaccgacagctaccccgtggtgaagcggcgagaaggcccagccgggcactctaaaggcgagttggcacccgagctgggtgaagagccccaacctcgcgacgaagaagaagccgagttggagctgttgaggcagttcgacttggcatggcagtatggaccctgcaccgtgtcaggtattagcatcccttatgaggctccacgaaaaacttcgtgtccatag

SEQ ID NO: 91757 - DNA, 105 bp, Artificial Sequence
  derived and/or modified sequence
atgggccggaagcggctgatcaccgacagctaccccgtggtgaagagacgtgaaggcccagccggccactcaaaaggtgagttggccccggagcttgggctgtag

SEQ ID NO: 91758 - DNA, 714 bp, Artificial Sequence
  derived and/or modified sequence
ccgccgctggcctggccccgtctgtctctctcagcagctgtctttctcgcgcccactggccggtctctcctcttccccgcagttgcctccttctctgcctgcctgggtggccgccatgggccggaagcggctcatcactgattcctacccggttgtgaagaggagggaggggcccgctgggcacagcaagggggagctggcacccgagctaggggaggagccccagccccgcgacgaggaggaagcggagctggagctgctgaggcagtttgacctggcctggcagtacgggccctgcaccgtctctggcatctctatcccctatgaggcaccacgtaagacctcctgcccttagctctcttgctcaccacccaagaacctcaggacagaagcgagagcccattgctcctgctcagctcagcccggctgcggaggaacccttggcaggcagaacctggaggtgtcagaggctcaactcctccatctaaccagcaggctcccagagtccccggaagagcctgcgcagctgaagcagagtgcttctagatggagagtggtcactggggaaaaggacctggccatcaccttccaatacctgctgcctgtctccctgacccatgatctggcaagttaggcacagtcagacatggacagttgatccatgaggaaaagatgctctcccacctaaggccaggaatctgagagcaggactgg

SEQ ID NO: 91759 - DNA, 240 bp, Artificial Sequence
  derived and/or modified sequence
atgggcaggaagagactgattacggactcgtaccccgtggtcaaacgtcgggagggtccagccggtcacagcaagggggagctcgccccagagttaggggaagagcctcagcccagagatgaagaggaagccgaactcgaactgctgcggcagttcgacctggcttggcagtacggcccatgtactgtcagtggaattagcattccatatgaagcccctcggaagacctcctgcccctag

SEQ ID NO: 91760 - DNA, 105 bp, Artificial Sequence
  derived and/or modified sequence
atggggcgaaaacgactgataaccgattcttacccggttgtgaagcgaagagaagggcctgccggacactccaaaggagagctggcacctgagttgggtctgtag

SEQ ID NO: 91761 - DNA, 240 bp, Artificial Sequence
  derived and/or modified sequence
atgggcagaaagagactgatcaccgacagctaccccgtggtgaagagaagagagggccccgccggccacagcaagggcgagctggcccccgagctgggcgaggagccccagcccagagacgaggaggaggccgagctggagctgctgagacagttcgacctggcctggcagtacggcccctgcaccgtgagcggcatcagcatcccctacgaggcccccagaaagaccagctgcccctag

SEQ ID NO: 91762 - DNA, 105 bp, Artificial Sequence
  derived and/or modified sequence
atgggcagaaagagactgatcaccgacagctaccccgtggtgaagagaagagagggccccgccggccacagcaagggcgagctggcccccgagctgggcctgtag

SEQ ID NO: 91763 - protein, 1352 aa, Artificial Sequence
  derived and/or modified sequence
MAHTTKVNGSASGKAGDILSGDQDKEQKDPYFVETPYGYQLDLDFLKYVDDIQKGNTIKRLNIQKRRKPSVPCPEPRTTSGQQGIWTSTESLSSSNSDDNKQCPNFLIARSQVTSTPISKPPPPLETSLPFLTIPENRQLPPPSPQLPKHNLHVTKTLMETRRRLEQERATMQMTPGEFRRPRLASFGGMGTTSSLPSFVGSGNHNPAKHQLQNGYQGNGDYGSYAPAAPTTSSMGSSIRHSPLSSGISTPVTNVSPMHLQHIREQMAIALKRLKELEEQVRTIPVLQVKISVLQEEKRQLVSQLKNQRAASQINVCGVRKRSYSAGNASQLEQLSRARRSGGELYIDYEEEEMETVEQSTQRIKEFRQLTADMQALEQKIQDSSCEASSELRENGECRSVAVGAEENMNDIVVYHRGSRSCKDAAVGTLVEMRNCGVSVTEAMLGVMTEADKEIELQQQTIESLKEKIYRLEVQLRETTHDREMTKLKQELQAAGSRKKVDKATMAQPLVFSKVVEAVVQTRDQMVGSHMDLVDTCVGTSVETNSVGISCQPECKNKVVGPELPMNWWIVKERVEMHDRCAGRSVEMCDKSVSVEVSVCETGSNTEESVNDLTLLKTNLNLKEVRSIGCGDCSVDVTVCSPKECASRGVNTEAVSQVEAAVMAVPRTADQDTSTDLEQVHQFTNTETATLIESCTNTCLSTLDKQTSTQTVETRTVAVGEGRVKDINSSTKTRSIGVGTLLSGHSGFDRPSAVKTKESGVGQININDNYLVGLKMRTIACGPPQLTVGLTASRRSVGVGDDPVGESLENPQPQAPLGMMTGLDHYIERIQKLLAEQQTLLAENYSELAEAFGEPHSQMGSLNSQLISTLSSINSVMKSASTEELRNPDFQKTSLGKITGNYLGYTCKCGGLQSGSPLSSQTSQPEQEVGTSEGKPISSLDAFPTQEGTLSPVNLTDDQIAAGLYACTNNESTLKSIMKKKDGNKDSNGAKKNLQFVGINGGYETTSSDDSSSDESSSSESDDECDVIEYPLEEEEEEEDEDTRGMAEGHHAVNIEGLKSARVEDEMQVQECEPEKVEIRERYELSEKMLSACNLLKNTINDPKALTSKDMRFCLNTLQHEWFRVSSQKSAIPAMVGDYIAAFEAISPDVLRYVINLADGNGNTALHYSVSHSNFEIVKLLLDADVCNVDHQNKAGYTPIMLAALAAVEAEKDMRIVEELFGCGDVNAKASQAGQTALMLAVSHGRIDMVKGLLACGADVNIQDDEGSTALMCASEHGHVEIVKLLLAQPGCNGHLEDNDGSTALSIALEAGHKDIAVLLYAHVNFAKAQSPGTPRLGRKTSPGPTHRGSFD

SEQ ID NO: 91764 - DNA, 2937 bp, Artificial Sequence
  derived and/or modified sequence
atggcccacaccaccaaggtgaacggcagcgccagcggcaaggccggcgacatcctgagcggcgaccaggacaaggagcagaaggacccctacttcgtggagaccccctacggctaccagctggacctggacttcctgaagtacgtggacgacatccagaagggcaacaccatcaagagactgaacatccagaagagaagaaagcccagcgtgccctgccccgagcccagaaccaccagcggccagcagggcatctggaccagcaccgagagcctgagcagcagcaacagcgacgacaacaagcagtgccccaacttcctgatcgccagaagccaggtgaccagcacccccatcagcaagccccccccccccctggagaccagcctgcccttcctgaccatccccgagaacagacagctgcccccccccagcccccagctgcccaagcacaacctgcacgtgaccaagaccctgatggagaccagaagaagactggagcaggagagagccaccatgcagatgacccccggcgagttcagaagacccagactggccagcttcggcggcatgggcaccaccagcagcctgcccagcttcgtgggcagcggcaaccacaaccccgccaagcaccagctgcagaacggctaccagggcaacggcgactacggcagctacgcccccgccgcccccaccaccagcagcatgggcagcagcatcagacacagccccctgagcagcggcatcagcacccccgtgaccaacgtgagccccatgcacctgcagcacatcagagagcagatggccatcgccctgaagagactgaaggagctggaggagcaggtgagaaccatccccgtgctgcaggtgaagatcagcgtgctgcaggaggagaagagacagctggtgagccagctgaagaaccagagagccgccagccagatcaacgtgtgcggcgtgagaaagagaagctacagcgccggcaacgccagccagctggagcagctgagcagagccagaagaagcggcggcgagctgtacatcgactacgaggaggaggagatggagaccgtggagcagagcacccagagaatcaaggagttcagacagctgaccgccgacatgcaggccctggagcagaagatccaggacagcagctgcgaggccagcagcgagctgagagagaacggcgagtgcagaagcgtggccgtgggcgccgaggagaacatgaacgacatcgtggtgtaccacagaggcagcagaagctgcaaggacgccgccgtgggcaccctggtggagatgagaaactgcggcgtgagcgtgaccgaggccatgctgggcgtgatgaccgaggccgacaaggagatcgagctgcagcagcagaccatcgagagcctgaaggagaagatctacagactggaggtgcagctgagagagaccacccacgacagagagatgaccaagctgaagcaggagctgcaggccgccggcagcagaaagaaggtggacaaggccaccatggcccagcccctggtgttcagcaaggtggtggaggccgtggtgcagaccagagaccagatggtgggcagccacatggacctggtggacacctgcgtgggcaccagcgtggagaccaacagcgtgggcatcagctgccagcccgagtgcaagaacaaggtggtgggccccgagctgcccatgaactggtggatcgtgaaggagagagtggagatgcacgacagatgcgccggcagaagcgtggagatgtgcgacaagagcgtgagcgtggaggtgagcgtgtgcgagaccggcagcaacaccgaggagagcgtgaacgacctgaccctgctgaagaccaacctgaacctgaaggaggtgagaagcatcggctgcggcgactgcagcgtggacgtgaccgtgtgcagccccaaggagtgcgccagcagaggcgtgaacaccgaggccgtgagccaggtggaggccgccgtgatggccgtgcccagaaccgccgaccaggacaccagcaccgacctggagcaggtgcaccagttcaccaacaccgagaccgccaccctgatcgagagctgcaccaacacctgcctgagcaccctggacaagcagaccagcacccagaccgtggagaccagaaccgtggccgtgggcgagggcagagtgaaggacatcaacagcagcaccaagaccagaagcatcggcgtgggcaccctgctgagcggccacagcggcttcgacagacccagcgccgtgaagaccaaggagagcggcgtgggccagatcaacatcaacgacaactacctggtgggcctgaagatgagaaccatcgcctgcggccccccccagctgaccgtgggcctgaccgccagcagaagaagcgtgggcgtgggcgacgaccccgtgggcgagagcctggagaacccccagccccaggcccccctgggcatgatgaccggcctggaccactacatcgagagaatccagaagctgctggccgagcagcagaccctgctggccgagaactacagcgagctggccgaggccttcggcgagccccacagccagatgggcagcctgaacagccagctgatcagcaccctgagcagcatcaacagcgtgatgaagagcgccagcaccgaggagctgagaaaccccgacttccagaagaccagcctgggcaagatcaccggcaactacctgggctacacctgcaagtgcggcggcctgcagagcggcagccccctgagcagccagaccagccagcccgagcaggaggtgggcaccagcgagggcaagcccatcagcagcctggacgccttccccacccaggagggcaccctgagccccgtgaacctgaccgacgaccagatcgccgccggcctgtacggcaacttcagccacagccagagcctggccagcggcttctag

SEQ ID NO: 91765 - DNA, 3585 bp, Artificial Sequence
  derived and/or modified sequence
atggagaccagaagaagactggagcaggagagagccaccatgcagatgacccccggcgagttcagaagacccagactggccagcttcggcggcatgggcaccaccagcagcctgcccagcttcgtgggcagcggcaaccacaaccccgccaagcaccagctgcagaacggctaccagggcaacggcgactacggcagctacgcccccgccgcccccaccaccagcagcatgggcagcagcatcagacacagccccctgagcagcggcatcagcacccccgtgaccaacgtgagccccatgcacctgcagcacatcagagagcagatggccatcgccctgaagagactgaaggagctggaggagcaggtgagaaccatccccgtgctgcaggtgaagatcagcgtgctgcaggaggagaagagacagctggtgagccagctgaagaaccagagagccgccagccagatcaacgtgtgcggcgtgagaaagagaagctacagcgccggcaacgccagccagctggagcagctgagcagagccagaagaagcggcggcgagctgtacatcgactacgaggaggaggagatggagaccgtggagcagagcacccagagaatcaaggagttcagacagctgaccgccgacatgcaggccctggagcagaagatccaggacagcagctgcgaggccagcagcgagctgagagagaacggcgagtgcagaagcgtggccgtgggcgccgaggagaacatgaacgacatcgtggtgtaccacagaggcagcagaagctgcaaggacgccgccgtgggcaccctggtggagatgagaaactgcggcgtgagcgtgaccgaggccatgctgggcgtgatgaccgaggccgacaaggagatcgagctgcagcagcagaccatcgagagcctgaaggagaagatctacagactggaggtgcagctgagagagaccacccacgacagagagatgaccaagctgaagcaggagctgcaggccgccggcagcagaaagaaggtggacaaggccaccatggcccagcccctggtgttcagcaaggtggtggaggccgtggtgcagaccagagaccagatggtgggcagccacatggacctggtggacacctgcgtgggcaccagcgtggagaccaacagcgtgggcatcagctgccagcccgagtgcaagaacaaggtggtgggccccgagctgcccatgaactggtggatcgtgaaggagagagtggagatgcacgacagatgcgccggcagaagcgtggagatgtgcgacaagagcgtgagcgtggaggtgagcgtgtgcgagaccggcagcaacaccgaggagagcgtgaacgacctgaccctgctgaagaccaacctgaacctgaaggaggtgagaagcatcggctgcggcgactgcagcgtggacgtgaccgtgtgcagccccaaggagtgcgccagcagaggcgtgaacaccgaggccgtgagccaggtggaggccgccgtgatggccgtgcccagaaccgccgaccaggacaccagcaccgacctggagcaggtgcaccagttcaccaacaccgagaccgccaccctgatcgagagctgcaccaacacctgcctgagcaccctggacaagcagaccagcacccagaccgtggagaccagaaccgtggccgtgggcgagggcagagtgaaggacatcaacagcagcaccaagaccagaagcatcggcgtgggcaccctgctgagcggccacagcggcttcgacagacccagcgccgtgaagaccaaggagagcggcgtgggccagatcaacatcaacgacaactacctggtgggcctgaagatgagaaccatcgcctgcggccccccccagctgaccgtgggcctgaccgccagcagaagaagcgtgggcgtgggcgacgaccccgtgggcgagagcctggagaacccccagccccaggcccccctgggcatgatgaccggcctggaccactacatcgagagaatccagaagctgctggccgagcagcagaccctgctggccgagaactacagcgagctggccgaggccttcggcgagccccacagccagatgggcagcctgaacagccagctgatcagcaccctgagcagcatcaacagcgtgatgaagagcgccagcaccgaggagctgagaaaccccgacttccagaagaccagcctgggcaagatcaccggcaactacctgggctacacctgcaagtgcggcggcctgcagagcggcagccccctgagcagccagaccagccagcccgagcaggaggtgggcaccagcgagggcaagcccatcagcagcctggacgccttccccacccaggagggcaccctgagccccgtgaacctgaccgacgaccagatcgccgccggcctgtacgcctgcaccaacaacgagagcaccctgaagagcatcatgaagaagaaggacggcaacaaggacagcaacggcgccaagaagaacctgcagttcgtgggcatcaacggcggctacgagaccaccagcagcgacgacagcagcagcgacgagagcagcagcagcgagagcgacgacgagtgcgacgtgatcgagtaccccctggaggaggaggaggaggaggaggacgaggacaccagaggcatggccgagggccaccacgccgtgaacatcgagggcctgaagagcgccagagtggaggacgagatgcaggtgcaggagtgcgagcccgagaaggtggagatcagagagagatacgagctgagcgagaagatgctgagcgcctgcaacctgctgaagaacaccatcaacgaccccaaggccctgaccagcaaggacatgagattctgcctgaacaccctgcagcacgagtggttcagagtgagcagccagaagagcgccatccccgccatggtgggcgactacatcgccgccttcgaggccatcagccccgacgtgctgagatacgtgatcaacctggccgacggcaacggcaacaccgccctgcactacagcgtgagccacagcaacttcgagatcgtgaagctgctgctggacgccgacgtgtgcaacgtggaccaccagaacaaggccggctacacccccatcatgctggccgccctggccgccgtggaggccgagaaggacatgagaatcgtggaggagctgttcggctgcggcgacgtgaacgccaaggccagccaggccggccagaccgccctgatgctggccgtgagccacggcagaatcgacatggtgaagggcctgctggcctgcggcgccgacgtgaacatccaggacgacgagggcagcaccgccctgatgtgcgccagcgagcacggccacgtggagatcgtgaagctgctgctggcccagcccggctgcaacggccacctggaggacaacgacggcagcaccgccctgagcatcgccctggaggccggccacaaggacatcgccgtgctgctgtacgcccacgtgaacttcgccaaggcccagagccccggcacccccagactgggcagaaagaccagccccggccccacccacagaggcagcttcgactag

SEQ ID NO: 91766 - DNA, 4059 bp, Artificial Sequence
  derived and/or modified sequence
atggcccacaccaccaaggtgaacggcagcgccagcggcaaggccggcgacatcctgagcggcgaccaggacaaggagcagaaggacccctacttcgtggagaccccctacggctaccagctggacctggacttcctgaagtacgtggacgacatccagaagggcaacaccatcaagagactgaacatccagaagagaagaaagcccagcgtgccctgccccgagcccagaaccaccagcggccagcagggcatctggaccagcaccgagagcctgagcagcagcaacagcgacgacaacaagcagtgccccaacttcctgatcgccagaagccaggtgaccagcacccccatcagcaagccccccccccccctggagaccagcctgcccttcctgaccatccccgagaacagacagctgcccccccccagcccccagctgcccaagcacaacctgcacgtgaccaagaccctgatggagaccagaagaagactggagcaggagagagccaccatgcagatgacccccggcgagttcagaagacccagactggccagcttcggcggcatgggcaccaccagcagcctgcccagcttcgtgggcagcggcaaccacaaccccgccaagcaccagctgcagaacggctaccagggcaacggcgactacggcagctacgcccccgccgcccccaccaccagcagcatgggcagcagcatcagacacagccccctgagcagcggcatcagcacccccgtgaccaacgtgagccccatgcacctgcagcacatcagagagcagatggccatcgccctgaagagactgaaggagctggaggagcaggtgagaaccatccccgtgctgcaggtgaagatcagcgtgctgcaggaggagaagagacagctggtgagccagctgaagaaccagagagccgccagccagatcaacgtgtgcggcgtgagaaagagaagctacagcgccggcaacgccagccagctggagcagctgagcagagccagaagaagcggcggcgagctgtacatcgactacgaggaggaggagatggagaccgtggagcagagcacccagagaatcaaggagttcagacagctgaccgccgacatgcaggccctggagcagaagatccaggacagcagctgcgaggccagcagcgagctgagagagaacggcgagtgcagaagcgtggccgtgggcgccgaggagaacatgaacgacatcgtggtgtaccacagaggcagcagaagctgcaaggacgccgccgtgggcaccctggtggagatgagaaactgcggcgtgagcgtgaccgaggccatgctgggcgtgatgaccgaggccgacaaggagatcgagctgcagcagcagaccatcgagagcctgaaggagaagatctacagactggaggtgcagctgagagagaccacccacgacagagagatgaccaagctgaagcaggagctgcaggccgccggcagcagaaagaaggtggacaaggccaccatggcccagcccctggtgttcagcaaggtggtggaggccgtggtgcagaccagagaccagatggtgggcagccacatggacctggtggacacctgcgtgggcaccagcgtggagaccaacagcgtgggcatcagctgccagcccgagtgcaagaacaaggtggtgggccccgagctgcccatgaactggtggatcgtgaaggagagagtggagatgcacgacagatgcgccggcagaagcgtggagatgtgcgacaagagcgtgagcgtggaggtgagcgtgtgcgagaccggcagcaacaccgaggagagcgtgaacgacctgaccctgctgaagaccaacctgaacctgaaggaggtgagaagcatcggctgcggcgactgcagcgtggacgtgaccgtgtgcagccccaaggagtgcgccagcagaggcgtgaacaccgaggccgtgagccaggtggaggccgccgtgatggccgtgcccagaaccgccgaccaggacaccagcaccgacctggagcaggtgcaccagttcaccaacaccgagaccgccaccctgatcgagagctgcaccaacacctgcctgagcaccctggacaagcagaccagcacccagaccgtggagaccagaaccgtggccgtgggcgagggcagagtgaaggacatcaacagcagcaccaagaccagaagcatcggcgtgggcaccctgctgagcggccacagcggcttcgacagacccagcgccgtgaagaccaaggagagcggcgtgggccagatcaacatcaacgacaactacctggtgggcctgaagatgagaaccatcgcctgcggccccccccagctgaccgtgggcctgaccgccagcagaagaagcgtgggcgtgggcgacgaccccgtgggcgagagcctggagaacccccagccccaggcccccctgggcatgatgaccggcctggaccactacatcgagagaatccagaagctgctggccgagcagcagaccctgctggccgagaactacagcgagctggccgaggccttcggcgagccccacagccagatgggcagcctgaacagccagctgatcagcaccctgagcagcatcaacagcgtgatgaagagcgccagcaccgaggagctgagaaaccccgacttccagaagaccagcctgggcaagatcaccggcaactacctgggctacacctgcaagtgcggcggcctgcagagcggcagccccctgagcagccagaccagccagcccgagcaggaggtgggcaccagcgagggcaagcccatcagcagcctggacgccttccccacccaggagggcaccctgagccccgtgaacctgaccgacgaccagatcgccgccggcctgtacgcctgcaccaacaacgagagcaccctgaagagcatcatgaagaagaaggacggcaacaaggacagcaacggcgccaagaagaacctgcagttcgtgggcatcaacggcggctacgagaccaccagcagcgacgacagcagcagcgacgagagcagcagcagcgagagcgacgacgagtgcgacgtgatcgagtaccccctggaggaggaggaggaggaggaggacgaggacaccagaggcatggccgagggccaccacgccgtgaacatcgagggcctgaagagcgccagagtggaggacgagatgcaggtgcaggagtgcgagcccgagaaggtggagatcagagagagatacgagctgagcgagaagatgctgagcgcctgcaacctgctgaagaacaccatcaacgaccccaaggccctgaccagcaaggacatgagattctgcctgaacaccctgcagcacgagtggttcagagtgagcagccagaagagcgccatccccgccatggtgggcgactacatcgccgccttcgaggccatcagccccgacgtgctgagatacgtgatcaacctggccgacggcaacggcaacaccgccctgcactacagcgtgagccacagcaacttcgagatcgtgaagctgctgctggacgccgacgtgtgcaacgtggaccaccagaacaaggccggctacacccccatcatgctggccgccctggccgccgtggaggccgagaaggacatgagaatcgtggaggagctgttcggctgcggcgacgtgaacgccaaggccagccaggccggccagaccgccctgatgctggccgtgagccacggcagaatcgacatggtgaagggcctgctggcctgcggcgccgacgtgaacatccaggacgacgagggcagcaccgccctgatgtgcgccagcgagcacggccacgtggagatcgtgaagctgctgctggcccagcccggctgcaacggccacctggaggacaacgacggcagcaccgccctgagcatcgccctggaggccggccacaaggacatcgccgtgctgctgtacgcccacgtgaacttcgccaaggcccagagccccggcacccccagactgggcagaaagaccagccccggccccacccacagaggcagcttcgactag

SEQ ID NO: 91767 - DNA, 2937 bp, Artificial Sequence
  derived and/or modified sequence
atggcacataccaccaaggtgaatggctccgccagtggcaaggcaggcgacatactgtccggggatcaggacaaagagcagaaggatccttattttgttgaaaccccatacggataccagctcgacttagactttctaaaatatgttgacgacatacaaaaaggaaatacgattaaacgtctgaatatccaaaaaaggagaaaaccaagtgtaccatgtcctgaaccaaggacaacatctggacaacaaggcatctggacatcgactgaatccctgtccagctctaattctgatgacaacaaacagtgcccaaacttcttgatcgctcgctctcaggtaacctccacccccatttcaaagcctcctccaccgctggagacatcactgccttttctcactatcccagagaaccgccagctaccacccccatcgccacagctccctaagcacaacctccatgtcacaaagacactaatggaaacacgccgaagattagaacaggaaagggctaccatgcagatgaccccgggcgaattccgtcggcctcgcttggcctcatttggcgggatgggcaccacaagtagcctgccgtcctttgtcggatccggaaatcacaatccagcaaaacaccaactccagaatggataccagggaaatggtgattacggaagctacgccccggccgcgccaacaacgagcagtatgggcagctccattaggcatagtcccctcagcagtgggatctcgactccggttacaaatgtatctcccatgcacctgcagcacattagggagcagatggccatcgcccttaaaagactgaaggagctagaagaacaggtgcggaccattcccgtcctgcaggtgaagatatcagtactgcaggaggagaaacggcagctcgtaagtcagctcaagaaccagagagccgcatcccagattaacgtgtgtggagttcgaaaaaggtcatattccgccgggaacgcctcgcagctggaacagttgagccgtgcacgacggtcgggcggcgagctctacatcgattacgaggaagaggaaatggagaccgtcgaacagtcgacccagaggattaaagagttcaggcagcttacagctgacatgcaagccttagagcagaaaatccaggatagctcttgcgaggcatcctcggagctccgggagaatggagaatgtcgaagcgtggcagtgggcgcagaggagaacatgaacgacatcgtggtctaccatcgtggcagtagatcatgtaaggacgcggcagtcgggacactggtggaaatgaggaattgtggggttagtgttactgaggccatgcttggagttatgacagaggcggacaaggagattgagctgcaacagcagaccattgagagtctgaaggagaagatctaccgactggaggtacagctccgcgaaaccacgcatgatagggagatgaccaagctgaagcaagaactgcaagcagcagggtcaaggaagaaagtggataaggccacaatggctcaacccctcgtcttttccaaggtggtggaggccgtagttcaaactcgagaccagatggttggatcccacatggacctggtggatacgtgcgttgggaccagcgttgaaacgaattcagtaggaatctcttgtcaaccagaatgtaagaacaaggtcgttggccccgaattaccaatgaattggtggatagttaaagaacgcgtagaaatgcacgatcgatgtgcaggtagaagtgtggaaatgtgtgacaagagcgtgagtgttgaagtgtctgtgtgtgaaaccggtagtaataccgaggaatcagtgaacgaccttaccctgttgaagaccaatctcaatcttaaggaagtgcggagtatcggctgcggagactgtagcgtagatgtgaccgtgtgttcacctaaggagtgcgcctcacgcggggttaacacagaagccgtctcccaagtggaggcagctgtgatggctgtgccccgtaccgccgatcaagacacatccactgatctggagcaggtacaccagttcacgaataccgagaccgcaaccctgattgaaagttgcacaaacacgtgtctgagtacactcgacaaacaaacaagcacacagaccgtggaaaccaggacagtggccgttggggagggtagagtgaaggacattaactcgtccactaagactaggtctatcggcgtaggtaccctactgagcgggcattcaggcttcgataggccaagcgccgtgaaaaccaaagagagtggtgtcggtcagataaacatcaacgataactacctggtgggactcaagatgcggacgatcgcctgtgggccccctcaacttaccgtgggattgacggctagtcggcgctctgtcggggtgggagacgacccagtgggtgagtccctggagaatcctcaaccacaggcccccctaggtatgatgaccgggctggatcactacatcgagcgtatccagaagctccttgctgaacagcaaactctcctggccgagaactactcagaactagctgaagctttcggagaacctcactcccagatgggctctctgaattcacagctgatctctacattgtccagcatcaattccgtcatgaagtcagcatccactgaagagcttcgcaaccccgatttccaaaagaccagcctaggcaaaataactggaaattatttgggctacacctgcaaatgcgggggcctacagagtggaagtcccttaagttctcagactagtcaaccagagcaggaggttggcacttccgagggcaagcccattagctcccttgacgccttcccaacacaagaaggaactctttcccccgtgaacctgactgacgaccagatagctgctggactctacgggaacttttcccactctcaaagtctggccagcggcttctag

SEQ ID NO: 91768 - DNA, 3585 bp, Artificial Sequence
  derived and/or modified sequence
atggagactcgtaggcggctggagcaagaacgggctacaatgcagatgacgcccggcgagttcagaaggcccaggctggctagttttggggggatgggcacgactagctcgctccccagcttcgtggggagcgggaaccacaatcctgccaagcaccagctgcagaatggttaccagggcaacggtgattacggtagctacgcaccagccgcacccacaactagttccatggggagtagcatccgtcatagcccattgtctagcggcatctccacaccggtcacaaacgtgtcgcccatgcacctccagcatattagggagcagatggcgattgcacttaaacgcctcaaagagcttgaagagcaggtgagaactataccagttctccaggtgaagatctccgtgttgcaggaagagaagcgacagttggtgagtcagctgaaaaatcagcgagccgcctcacagattaacgtctgtggcgtgaggaagcggtcgtactcagctgggaacgcaagtcagctggagcaactatcaagggctagaaggagcgggggggagctgtatatagactacgaagaggaggagatggagaccgtcgagcagagtacacaaaggatcaaggaattcaggcaactgacagcagacatgcaagctctcgagcaaaaaatccaggattcttcttgcgaggctagttccgagctgagggaaaacggcgagtgcaggtctgtggctgtgggcgccgaggagaatatgaatgacatcgttgtttatcacaggggctcaaggtcttgtaaggatgcagccgtggggaccctggtggagatgaggaactgcggcgtgtctgtgaccgaggcaatgcttggcgtgatgactgaggctgacaaagagatcgagcttcagcagcagactatagagtctcttaaggagaagatctatcggctggaggtacagctcagggagactacacacgatcgggaaatgacgaagctgaagcaggagcttcaggcggccggtagtaggaaaaaggtcgacaaggcgacaatggcacaaccactcgtgtttagtaaggtcgtggaggctgtagtccaaacccgggatcagatggtgggatcgcacatggacctcgttgatacctgcgtggggacctctgtagaaaccaactctgtcggaatctcatgtcagcccgagtgcaagaacaaagtcgtaggccccgaactacctatgaattggtggattgtcaaagaacgcgtggaaatgcatgacaggtgtgcgggcagaagcgtggaaatgtgtgacaaaagtgtttctgtcgaagtgtctgtctgtgaaacaggctctaacacggaagagtcagtcaacgacttaaccctcctgaagacaaatttgaatttgaaggaggtcaggtctatcggttgtggcgactgtagcgttgatgtgactgtttgcagtccaaaggaatgcgcatcgcggggcgtcaacactgaggctgtgagccaggttgaggccgccgtgatggcagttcctcggactgctgaccaggatacatccacggatctggagcaggtacaccaattcaccaacaccgaaaccgccacacttatagaatcttgtacaaatacctgcctcagcactcttgataaacagacttcaactcaaacagtagagactcgaacagttgcggttggggagggaagggtaaaggacatcaactcttcaactaaaactagatccatcggagtcggcacacttctttctggtcactcgggcttcgataggccaagcgccgtgaagaccaaggaaagtggcgtcggacaaattaatataaatgataattacttagtgggattgaagatgcggaccattgcctgtgggcctccacagctgacagttggcttaacagcctcacggcgtagtgttggtgtcggagatgatcctgttggtgaatctctagagaatccccagccacaggctccattaggtatgatgactggcctggaccactacatcgagagaatccagaagctcctcgccgaacaacagaccctgctagccgagaattatagtgaactggccgaagcgttcggagagcctcatagccagatgggctcactgaacagccaactaatatcaacactctcttctattaactcagtaatgaagagcgccagcaccgaagaactgaggaacccggattttcagaagactagcctgggtaagatcacggggaattacctcgggtacacctgtaagtgcggagggctccagtccggttctcctctgtcctcacaaaccagtcagccggaacaggaggtcggaaccagcgaagggaaacccatttcctccctcgacgcctttcccacacaggagggaactctgtcccctgttaacttgacggacgaccagatcgcagcggggctctacgcctgtacaaacaatgaaagtactctcaaatctattatgaaaaaaaaagacgggaataaagactcgaatggcgcaaaaaaaaacttgcagttcgttggaatcaatggcggatacgagaccaccagtagcgacgattcgagttccgacgagagctcatcaagcgagagcgatgatgagtgcgacgttattgagtacccattagaagaagaggaagaagaagaagacgaggataccagagggatggccgagggccatcatgccgtaaacattgaaggtctgaaaagcgctcgggtcgaggacgagatgcaggtgcaagagtgtgagcctgagaaagttgagatcagagagcgctacgagttgtcggaaaagatgttgagcgcgtgcaaccttctcaagaataccattaacgatccaaaggccctgacaagtaaagatatgcgattctgtctgaatacattacaacacgagtggtttcgggttagttcacagaagtctgctattccagccatggttggcgactacattgcagcttttgaagccatttcacctgacgttctgcgttacgtgattaatctggctgacgggaatgggaatacagccttgcactattccgtcagtcactctaacttcgaaattgtgaaactcttgcttgatgccgatgtgtgtaatgtggaccatcagaacaaggccggctatactcccattatgcttgccgctctggccgcggtggaggccgagaaagacatgagaatcgtcgaagaactttttggttgcggagatgtgaatgccaaggcatcacaagctggacagacagcacttatgctggctgtgtctcacggacgcattgacatggtgaaaggtctgctagcatgcggagccgatgtgaacattcaagatgatgaagggtcaacagctcttatgtgtgccagcgaacacgggcatgtggagatcgtcaaactgcttctggcccagccagggtgtaacggacatttggaggacaatgacgggagcacagccctgagcatagctcttgaggctgggcacaaagacatagcggtgctcctttacgcacatgtcaattttgccaaggcacaaagccccgggacccctagactaggaaggaagacaagcccaggtcctacacacagaggaagcttcgactag

SEQ ID NO: 91769 - DNA, 4059 bp, Artificial Sequence
  derived and/or modified sequence
atggcgcacaccacaaaagtaaacgggtcagcttctggcaaggccggggatatactgtcgggcgaccaggacaaagagcagaaagacccgtatttcgtggagaccccatacgggtaccagctggacctggactttctcaagtacgtggacgatattcaaaagggcaacacaatcaagaggcttaacatccagaagagaagaaagccttccgtaccatgccccgagcctcgcacaacaagcggacagcaggggatatggacatctaccgaaagcctgtccagttctaatagtgacgataataagcagtgtcctaacttcctgatcgctaggagccaggtcacctctacccctatcagtaagccacctcctccccttgagacctcgttacccttcttgactatccctgagaataggcaactcccgccgccttccccacaacttccgaagcataatttgcacgttactaagaccctaatggagacgcgccgcagacttgagcaggaacgagccacaatgcagatgacgcccggggagtttcggaggccccgactggcctcattcggggggatggggaccaccagcagcctgccctccttcgtaggttctggcaatcacaatcccgccaagcatcagttgcaaaatggctaccagggcaacggagattacggcagctatgcacctgccgcccctaccaccagcagtatgggatcatcaattcgccattcaccactttccagcgggatctcaactcctgtcacaaatgtgtcaccaatgcaccttcagcatatacgggagcaaatggccatcgccctgaagaggttgaaggaattggaagagcaggtgcggacaatcccagtgcttcaggtgaagatcagtgttctgcaggaagaaaaaaggcagctggtgagccaactgaaaaatcagcgagcagctagccagatcaacgtttgtggagtgaggaaaaggtcttattctgccggtaacgcctctcagctggagcagctgagccgcgcaaggagatctggaggagagctgtatatcgactatgaggaagaggaaatggagacagtggaacagtctacgcagcggattaaggaattcaggcagctgacggccgacatgcaggctctcgagcagaagatacaggactcgtcttgcgaagctagcagcgagttgcgcgagaacggcgaatgcagatcagtggccgtgggggccgaggaaaatatgaacgatatagtcgtgtaccatagagggagcaggagctgcaaggacgctgctgtagggacccttgtcgagatgaggaattgcggcgtgagcgtgacagaagctatgctgggcgtgatgaccgaagccgacaaagagattgaactccagcagcagacaatcgaaagccttaaagagaaaatttacagactggaagtgcaactgagggaaacaacccatgatcgtgaaatgactaaactaaagcaggagctgcaggcggctggttctcgcaaaaaggtcgacaaggctacgatggctcagcccctcgtgttctctaaagtggtggaagccgtggttcagacgcgggaccagatggttggatcacatatggacctggtagacacatgtgtggggacaagtgtggaaaccaacagcgtaggcatcagttgccagcctgaatgtaagaacaaggtggtgggtccggagttgcccatgaactggtggatcgtgaaggaaagggtggaaatgcacgatcgatgcgctggacgaagcgtggagatgtgtgataagtctgtctcagtagaagtctctgtttgtgaaacaggaagcaataccgaagaatctgtcaatgacttaactctccttaagacgaatcttaatcttaaagaggtacggtccataggatgcggcgattgctccgttgacgtgacagtttgctctccaaaagaatgcgctagcaggggggttaatacagaggccgtgtctcaggtagaggcagccgtcatggccgtgcctcgaaccgcagaccaggatactagcaccgatctggaacaggtacaccagtttacaaatacagaaacagccactctgattgagtcttgcacaaacacatgcctatccacactggataagcagacgtcaactcagactgtggagaccaggaccgtggcagtaggggaagggcgcgtgaaagatataaattcctccacaaagacccgctctatcggcgttgggacacttctctccggtcacagcggcttcgacaggccaagcgctgtcaagaccaaagaatcaggggtggggcagatcaacataaacgataactacttagtgggcctgaagatgcggacaatcgcttgtggcccaccccaacttacggtcggcttgactgcttctagaagatccgtcggggtgggggatgacccagtgggtgagtctctcgagaatcctcagccacaggcacctctcggcatgatgacagggttagaccattacatcgaacgaatacagaaacttttagcggaacagcagaccctactggccgagaattattcagagctcgccgaggcctttggggaaccccactctcagatggggtcccttaactctcaactcattagcactttatcaagtattaatagtgtgatgaaaagcgcaagtaccgaagaacttcgcaatcctgattttcaaaagacatctcttggcaaaatcaccggtaactatctgggctacacatgcaagtgcggaggtcttcaatctgggtcacccctatcctctcagacttctcagccggagcaggaggtggggacctctgaagggaagccaatctcaagcctggatgccttccccacccaggaaggcactttatcacctgtgaatctgacagatgatcagatagcggctggtctgtatgcttgtaccaataatgagagcaccctaaagagcataatgaaaaagaaagacggaaacaaggattctaacggcgccaagaaaaacctgcaatttgtgggaattaatggaggctatgagacgacctcctctgatgattcttcctctgacgaatcaagttcctctgaatccgatgatgaatgcgatgtgatcgagtaccctttggaggaagaggaagaggaggaagatgaagatactcgcggaatggctgagggacaccatgcggtcaacattgagggcttgaagtctgcccgggtggaggatgaaatgcaagtccaagaatgtgagcccgaaaaagtggagatcagagagagatacgaactgagcgaaaaaatgctttcagcgtgtaacttgctgaagaacacaatcaatgatcctaaggcgctgacatccaaggacatgcgattttgccttaacacactccagcacgagtggtttagagtgagctcccagaagagcgctatccctgcgatggtgggagactatattgccgccttcgaagcgatctcacccgacgtcctgaggtatgtgatcaacctcgctgacggaaacggaaacacagccctgcactacagcgtgtctcactccaattttgagattgtgaaactgctgctggacgccgacgtgtgtaacgtggaccatcagaacaaggctggctatacacctatcatgctagccgcgctggccgccgtcgaagccgagaaggacatgcggattgtggaggaactatttggctgtggcgatgtcaatgccaaggcctctcaggccggacagactgccctgatgctggctgtttcccatgggagaatcgatatggtgaaggggctactagcctgcggcgcagacgtgaacatacaggacgacgagggctccacagcgctaatgtgtgccagcgaacatggacatgttgaaatcgttaaactattgctcgctcaaccgggctgcaatgggcatctcgaggacaatgacggtagtaccgctttgagcatagccctggaggccggccacaaggacatagctgtgctgctgtatgcacatgtcaatttcgctaaagcccaatcccccggcacacccaggctggggcgcaaaactagcccaggacccacacacagaggcagttttgattag

SEQ ID NO: 91770 - DNA, 4059 bp, Artificial Sequence
  derived and/or modified sequence
atggcacacacaaccaaggttaacggaagtgcgtccggtaaagctggggatatactgtccggtgatcaggacaaggagcaaaaggacccctatttcgttgagactccttacggttaccaactagacttggacttcctgaagtacgtggatgacattcagaaaggcaatacaatcaaacggctgaacatccagaagcgccggaaaccgtctgtgccgtgccctgaaccccggaccactagcggtcagcagggcatatggacatccaccgagtcgctgtcttcatcaaactctgacgataacaagcagtgtcctaattttctgatagccagaagccaggttacatccacccctatttcaaagcctccccctcctctggagacctcactgccattcctgacgatcccagaaaaccgccaactacccccaccaagcccccagctgcctaagcacaacctgcacgtcacaaagaccctcatggaaactcgcagacgcttagagcaggaacgcgcaaccatgcagatgaccccgggggagttcaggcggcctcgcttggcttccttcggcggaatgggaactacgtcctccctgcctagcttcgtgggatcaggtaatcacaaccctgcgaagcaccagttacagaacggctatcagggcaacggagactacggatcatacgcacccgcagctccaacaactagttcaatgggatcatccattaggcactctcccctgagtagcggaataagtacacctgtcactaatgtgtccccaatgcatctgcaacacattcgcgaacagatggcgattgcactgaagaggctgaaggagctggaggaacaggtacgcactatcccagtccttcaggtcaaaatcagtgttctgcaggaggaaaaacggcaactggtatcacagctgaagaaccagcgggcggcatcccagattaacgtgtgcggcgtcagaaagaggtcgtactctgcaggcaatgcctcacaactcgagcagctgtcccgagctcggaggagcggtggcgagctgtatatcgattacgaggaggaggagatggaaacagtggaacaatccacccagaggataaaggaatttaggcagctgactgccgatatgcaggccctcgagcaaaagatccaggatagtagctgtgaggcaagtagcgagttgcgcgagaacggtgagtgccgctcggtggcagttggagctgaggaaaacatgaatgatattgtggtgtatcaccgcgggtccaggtcctgtaaggatgctgctgttggtaccctcgtggaaatgaggaactgcggcgtcagcgtgaccgaagctatgctgggcgtgatgactgaagccgataaagagatcgaactgcagcagcagaccattgaaagcctgaaggagaaaatatacagacttgaggtccagctcagagagacaacacatgacagggaaatgacaaaactaaaacaggaactgcaggccgctggatcccgcaagaaagtagacaaggctacaatggcccagcccctcgtttttagtaaggtggtggaggctgtcgtccaaactagagaccagatggtcggctcccacatggatctcgtggacacatgtgtgggcacctcagttgaaacaaacagtgtaggcattagttgccagccagagtgtaaaaataaggtggtgggccctgagttacctatgaactggtggatcgtcaaggaaagggttgagatgcacgatcgatgcgctgggcggagcgtggaaatgtgcgataagtctgtttctgtcgaggtttcagtatgcgagaccggctccaatactgaggagtctgtgaatgatctgactctgctcaaaactaacttgaaccttaaggaggttcgtagcatcggttgcggagactgctcagtagacgttaccgtctgttcacctaaagagtgtgcttccagaggtgtgaacactgaggctgtgtcgcaggtggaggctgctgtcatggccgtgcccaggaccgcagaccaggatactagtaccgatctggaacaggtgcaccagtttacgaacacggaaaccgccacacttattgaaagttgtactaacacttgtctttctaccctggacaagcagacttccacccagacagtcgagacccgaacagtggccgtaggcgaagggcgcgtgaaagatatcaattcatctactaaaacgcgatcaattggcgtcggaacactgctctcaggtcatagtggctttgaccgacccagcgctgtaaagaccaaggagagcggggtcgggcagattaacattaacgacaattacctagtgggactgaaaatgagaaccatcgcctgtggccctccccagctcacagtcggcttgaccgcctcacgcagatcagtgggagtgggtgacgaccctgttggcgaatctctggaaaatccgcaaccacaggctcctctgggcatgatgacgggtctggaccattacatcgaacgcatccagaaattactagcagagcagcagaccttgctggccgagaactactccgagttggctgaggctttcggcgagcctcactcccagatgggatctctcaactcccagctgatatctacactcagttctataaattctgtgatgaagtcggctagcacagaggagctccgcaaccccgattttcagaagacctctctggggaaaatcacaggaaattatcttggatatacatgtaaatgcggcggcttgcagtctggcagcccactgtcatcgcagacatcacagccagaacaggaagtcgggacctcagagggaaagcctatcagttctctggacgcattcccaacccaagagggtacattgagccctgtcaacctcactgacgatcaaattgccgccggactgtacgcgtgcacgaacaacgagtccaccctcaagagtatcatgaagaaaaaagacgggaacaaagattctaacggtgctaaaaaaaacctccagtttgtggggatcaacggtgggtacgaaactaccagctctgacgacagctcgtctgatgagtcctcttcaagtgagagcgatgatgagtgtgacgtgatcgagtacccgctcgaggaggaggaagaagaggaagatgaagacacacgtggcatggccgaaggacatcatgccgtgaatatcgagggtctgaagagcgccagggtggaagacgagatgcaagtacaggagtgcgagcctgagaaagtggagatcagagagcggtatgagctaagtgagaaaatgttgtccgcatgtaatttgttaaaaaacactattaatgatcccaaagcactcactagcaaggatatgagattctgcttaaatacactgcagcatgaatggtttagagtgtctagccagaagagcgctatcccggctatggtgggggattacattgcggcgtttgaggcaattagccctgatgtgctcagatacgtgattaacttggcggacggaaatggtaacactgctttacattactctgtaagccacagcaattttgaaatcgtgaagctgctgctggacgccgatgtgtgtaacgtggaccaccagaacaaggcagggtatacacctattatgctggcagcactcgccgctgttgaggcggaaaaagacatgagaattgtggaagagctattcggctgcggcgacgtcaacgccaaagccagccaagctggtcagaccgccctaatgctggcagtaagccatggacgaattgacatggtcaagggcttgcttgcgtgcggggccgacgttaatattcaggatgacgaggggtccacggcactgatgtgtgcatcagaacacggtcacgtggaaatcgtaaagcttttactggcgcaacctggatgcaatggacatctggaagacaacgacgggtctaccgcactctcaattgcactcgaggccggacataaagatattgccgtcttgctgtatgctcatgtgaatttcgcaaaggcacagtcccccggaacaccacggctggggagaaaaaccagtcccggacctacccaccgcggctccttcgactag

SEQ ID NO: 91771 - DNA, 2937 bp, Artificial Sequence
  derived and/or modified sequence
atggcccacaccaccaaggtgaatggcagcgccagcggcaaggccggggacatcctgagcggggaccaggacaaggagcagaaggacccctactttgtggagaccccctacggctaccagctggacctggacttcctgaagtatgtggatgacatccagaagggcaacaccatcaagaggctgaacatccagaagaggaggaagcccagcgtgccctgcccagagcccaggaccaccagcggccagcagggcatctggaccagcacagagagcctgagcagcagcaacagtgatgacaacaagcagtgccccaacttcctgattgcccggagccaggtgaccagcacccccatcagcaagcccccaccacccctggagaccagcctgcccttcctgaccatccctgagaaccggcagctgcccccacccagcccccagctgcccaagcacaacctgcacgtgaccaagaccctgatggagacccggcggcggctggagcaggagcgggccaccatgcagatgaccccaggagagttccggcggccccggctggccagctttggaggcatgggcaccaccagcagcctgcccagctttgtgggcagcggcaaccacaacccagccaagcaccagctgcagaatggctaccagggcaatggagactatggcagctatgccccagctgcccccaccaccagctccatgggcagcagcatccgccacagccccctgagcagcggcatcagcacccctgtgaccaacgtgagccccatgcacctgcagcacatccgggagcagatggccatcgccctgaagaggctgaaggagctggaggagcaggtgaggaccatccctgtgctgcaggtgaagatctctgtgctgcaggaggagaagaggcagctggtgtcccagctgaagaaccagagagctgccagccagatcaacgtgtgtggggtgaggaagaggagctacagcgctggaaatgccagccagctggagcagctgagccgggccaggagaagtggaggagagctgtacattgattatgaggaggaggagatggagaccgtggagcagagcacccagaggatcaaggagttccggcagctgacagctgacatgcaggccctggagcagaagatccaggacagcagctgtgaggccagcagcgagctgcgggagaatggagaatgtagatctgtggccgtgggcgctgaggagaacatgaatgacatcgtggtgtaccaccggggcagccgcagctgcaaggatgctgctgtgggcaccctggtggagatgaggaactgtggggtgtctgtgacagaggccatgctgggcgtgatgacagaagctgacaaggagattgagctgcagcagcagaccatcgagagcctgaaggagaagatctaccgcctggaggtgcagctgcgggagaccacccatgaccgggagatgaccaagctgaagcaggagctgcaggccgccggcagcaggaagaaggtggacaaggccaccatggcccagcccctggtgttcagcaaggtggtggaggccgtggtgcagacccgggaccagatggtgggcagccacatggacctggtggacacctgtgtgggcacctctgtggagaccaacagcgtgggcatcagctgccagcctgagtgcaagaacaaggtggtgggccctgagctgcccatgaactggtggatcgtgaaggagcgggtggagatgcatgacagatgtgccggccgctctgtggagatgtgtgacaagtctgtgtctgtggaggtgtctgtgtgtgagaccggcagcaacacagaggagagcgtgaatgacctgaccctgctgaagaccaacctgaacctgaaggaggtgcgcagcatcggctgtggggactgcagcgtggatgtgacagtgtgcagccccaaggaatgtgccagcagaggagtgaacacagaggccgtgtcccaggtggaggccgctgtgatggctgtgcccaggacagctgaccaggacaccagcacagacctggagcaggtgcaccagttcaccaacacagaaacagccaccctcatcgagagctgcaccaacacctgcctgagcaccctggacaagcagaccagcacccagacagtggagaccaggacagtggccgtgggggagggccgggtgaaggacatcaacagcagcaccaagaccaggagcattggagtgggcaccctgctgagcggccacagcggctttgaccggcccagcgctgtgaagaccaaggagagcggcgtgggccagatcaacatcaatgacaactacctggtgggcctgaagatgaggaccatcgcctgtggccccccccagctgactgtgggcctgacagccagccgccgctctgtgggcgtgggagatgatcctgtgggggagagcctggagaacccccagccccaggcccccctgggcatgatgacaggcctggaccactacatcgagcgcatccagaagctgctggccgagcagcagaccctgctggccgagaactacagcgagctggccgaggccttcggggagccccacagccagatgggcagcctgaacagccagctgatcagcaccctgagcagcatcaacagcgtgatgaagagcgccagcacagaggagctgaggaacccagacttccagaagaccagcctgggcaagatcactggaaactacctgggctacacctgcaagtgtggcggcctgcagagcggcagccccctgagcagccagaccagccagcctgagcaggaggtgggcaccagcgagggcaagcccatcagcagcctggatgccttccccacccaggagggcaccctgagccctgtgaacctgacagatgaccagattgctgctggcctgtatggcaacttcagccacagccagagcctggccagcggcttctag

SEQ ID NO: 91772 - DNA, 3585 bp, Artificial Sequence
  derived and/or modified sequence
atggagacccggcggcggctggagcaggagcgggccaccatgcagatgaccccaggagagttccggcggccccggctggccagctttggaggcatgggcaccaccagcagcctgcccagctttgtgggcagcggcaaccacaacccagccaagcaccagctgcagaatggctaccagggcaatggagactatggcagctatgccccagctgcccccaccaccagctccatgggcagcagcatccgccacagccccctgagcagcggcatcagcacccctgtgaccaacgtgagccccatgcacctgcagcacatccgggagcagatggccatcgccctgaagaggctgaaggagctggaggagcaggtgaggaccatccctgtgctgcaggtgaagatctctgtgctgcaggaggagaagaggcagctggtgtcccagctgaagaaccagagagctgccagccagatcaacgtgtgtggggtgaggaagaggagctacagcgctggaaatgccagccagctggagcagctgagccgggccaggagaagtggaggagagctgtacattgattatgaggaggaggagatggagaccgtggagcagagcacccagaggatcaaggagttccggcagctgacagctgacatgcaggccctggagcagaagatccaggacagcagctgtgaggccagcagcgagctgcgggagaatggagaatgtagatctgtggccgtgggcgctgaggagaacatgaatgacatcgtggtgtaccaccggggcagccgcagctgcaaggatgctgctgtgggcaccctggtggagatgaggaactgtggggtgtctgtgacagaggccatgctgggcgtgatgacagaagctgacaaggagattgagctgcagcagcagaccatcgagagcctgaaggagaagatctaccgcctggaggtgcagctgcgggagaccacccatgaccgggagatgaccaagctgaagcaggagctgcaggccgccggcagcaggaagaaggtggacaaggccaccatggcccagcccctggtgttcagcaaggtggtggaggccgtggtgcagacccgggaccagatggtgggcagccacatggacctggtggacacctgtgtgggcacctctgtggagaccaacagcgtgggcatcagctgccagcctgagtgcaagaacaaggtggtgggccctgagctgcccatgaactggtggatcgtgaaggagcgggtggagatgcatgacagatgtgccggccgctctgtggagatgtgtgacaagtctgtgtctgtggaggtgtctgtgtgtgagaccggcagcaacacagaggagagcgtgaatgacctgaccctgctgaagaccaacctgaacctgaaggaggtgcgcagcatcggctgtggggactgcagcgtggatgtgacagtgtgcagccccaaggaatgtgccagcagaggagtgaacacagaggccgtgtcccaggtggaggccgctgtgatggctgtgcccaggacagctgaccaggacaccagcacagacctggagcaggtgcaccagttcaccaacacagaaacagccaccctcatcgagagctgcaccaacacctgcctgagcaccctggacaagcagaccagcacccagacagtggagaccaggacagtggccgtgggggagggccgggtgaaggacatcaacagcagcaccaagaccaggagcattggagtgggcaccctgctgagcggccacagcggctttgaccggcccagcgctgtgaagaccaaggagagcggcgtgggccagatcaacatcaatgacaactacctggtgggcctgaagatgaggaccatcgcctgtggccccccccagctgactgtgggcctgacagccagccgccgctctgtgggcgtgggagatgatcctgtgggggagagcctggagaacccccagccccaggcccccctgggcatgatgacaggcctggaccactacatcgagcgcatccagaagctgctggccgagcagcagaccctgctggccgagaactacagcgagctggccgaggccttcggggagccccacagccagatgggcagcctgaacagccagctgatcagcaccctgagcagcatcaacagcgtgatgaagagcgccagcacagaggagctgaggaacccagacttccagaagaccagcctgggcaagatcactggaaactacctgggctacacctgcaagtgtggcggcctgcagagcggcagccccctgagcagccagaccagccagcctgagcaggaggtgggcaccagcgagggcaagcccatcagcagcctggatgccttccccacccaggagggcaccctgagccctgtgaacctgacagatgaccagattgctgctggcctgtatgcctgcaccaacaatgaaagcaccctgaagagcatcatgaagaagaaggatggcaacaaggacagcaatggagccaagaagaacctgcagtttgtgggcatcaatggaggctatgagaccaccagcagtgatgacagcagcagtgatgagagcagcagcagcgagagtgatgatgaatgtgatgtgattgagtaccccctggaggaggaggaggaggaggaggatgaggacacccggggcatggccgagggccaccacgctgtgaacatcgagggcctgaagagcgcccgggtggaggatgagatgcaggtgcaggagtgtgagcctgagaaggtggagatccgggagagatatgagctgtctgagaagatgctgagcgcctgcaacctgctgaagaacaccatcaatgaccccaaggccctgaccagcaaggacatgaggttctgcctgaacaccctgcagcacgagtggttccgggtgagcagccagaagagcgccatcccagccatggtgggggactacatcgccgcctttgaggccatcagcccagatgtgctgcgctacgtgatcaacctggctgatggaaatggaaacacagccctgcactacagcgtgagccacagcaactttgaaattgtgaagctgctgctggatgctgatgtgtgcaatgtggaccaccagaacaaggccggctacacccccatcatgctggccgccctggccgctgtggaggccgagaaggacatgagaattgtggaggagctgtttggctgtggagatgtgaatgccaaggccagccaggccggccagacagccctgatgctggccgtgagccacggcagaattgacatggtgaagggcctgctggcctgtggggctgatgtgaacatccaggatgatgagggcagcacagccctgatgtgtgccagcgagcacggccacgtggagatcgtgaagctgctgctggcccagcccggctgcaatggccacctggaggacaatgatggcagcacagccctgagcatcgccctggaggccggccacaaggacattgctgtgctgctgtatgcccacgtgaactttgccaaggcccagagccctggcaccccccggctgggcaggaagaccagccctggccccacccaccggggcagctttgattag

SEQ ID NO: 91773 - DNA, 4059 bp, Artificial Sequence
  derived and/or modified sequence
atggcccacaccaccaaggtgaatggcagcgccagcggcaaggccggggacatcctgagcggggaccaggacaaggagcagaaggacccctactttgtggagaccccctacggctaccagctggacctggacttcctgaagtatgtggatgacatccagaagggcaacaccatcaagaggctgaacatccagaagaggaggaagcccagcgtgccctgcccagagcccaggaccaccagcggccagcagggcatctggaccagcacagagagcctgagcagcagcaacagtgatgacaacaagcagtgccccaacttcctgattgcccggagccaggtgaccagcacccccatcagcaagcccccaccacccctggagaccagcctgcccttcctgaccatccctgagaaccggcagctgcccccacccagcccccagctgcccaagcacaacctgcacgtgaccaagaccctgatggagacccggcggcggctggagcaggagcgggccaccatgcagatgaccccaggagagttccggcggccccggctggccagctttggaggcatgggcaccaccagcagcctgcccagctttgtgggcagcggcaaccacaacccagccaagcaccagctgcagaatggctaccagggcaatggagactatggcagctatgccccagctgcccccaccaccagctccatgggcagcagcatccgccacagccccctgagcagcggcatcagcacccctgtgaccaacgtgagccccatgcacctgcagcacatccgggagcagatggccatcgccctgaagaggctgaaggagctggaggagcaggtgaggaccatccctgtgctgcaggtgaagatctctgtgctgcaggaggagaagaggcagctggtgtcccagctgaagaaccagagagctgccagccagatcaacgtgtgtggggtgaggaagaggagctacagcgctggaaatgccagccagctggagcagctgagccgggccaggagaagtggaggagagctgtacattgattatgaggaggaggagatggagaccgtggagcagagcacccagaggatcaaggagttccggcagctgacagctgacatgcaggccctggagcagaagatccaggacagcagctgtgaggccagcagcgagctgcgggagaatggagaatgtagatctgtggccgtgggcgctgaggagaacatgaatgacatcgtggtgtaccaccggggcagccgcagctgcaaggatgctgctgtgggcaccctggtggagatgaggaactgtggggtgtctgtgacagaggccatgctgggcgtgatgacagaagctgacaaggagattgagctgcagcagcagaccatcgagagcctgaaggagaagatctaccgcctggaggtgcagctgcgggagaccacccatgaccgggagatgaccaagctgaagcaggagctgcaggccgccggcagcaggaagaaggtggacaaggccaccatggcccagcccctggtgttcagcaaggtggtggaggccgtggtgcagacccgggaccagatggtgggcagccacatggacctggtggacacctgtgtgggcacctctgtggagaccaacagcgtgggcatcagctgccagcctgagtgcaagaacaaggtggtgggccctgagctgcccatgaactggtggatcgtgaaggagcgggtggagatgcatgacagatgtgccggccgctctgtggagatgtgtgacaagtctgtgtctgtggaggtgtctgtgtgtgagaccggcagcaacacagaggagagcgtgaatgacctgaccctgctgaagaccaacctgaacctgaaggaggtgcgcagcatcggctgtggggactgcagcgtggatgtgacagtgtgcagccccaaggaatgtgccagcagaggagtgaacacagaggccgtgtcccaggtggaggccgctgtgatggctgtgcccaggacagctgaccaggacaccagcacagacctggagcaggtgcaccagttcaccaacacagaaacagccaccctcatcgagagctgcaccaacacctgcctgagcaccctggacaagcagaccagcacccagacagtggagaccaggacagtggccgtgggggagggccgggtgaaggacatcaacagcagcaccaagaccaggagcattggagtgggcaccctgctgagcggccacagcggctttgaccggcccagcgctgtgaagaccaaggagagcggcgtgggccagatcaacatcaatgacaactacctggtgggcctgaagatgaggaccatcgcctgtggccccccccagctgactgtgggcctgacagccagccgccgctctgtgggcgtgggagatgatcctgtgggggagagcctggagaacccccagccccaggcccccctgggcatgatgacaggcctggaccactacatcgagcgcatccagaagctgctggccgagcagcagaccctgctggccgagaactacagcgagctggccgaggccttcggggagccccacagccagatgggcagcctgaacagccagctgatcagcaccctgagcagcatcaacagcgtgatgaagagcgccagcacagaggagctgaggaacccagacttccagaagaccagcctgggcaagatcactggaaactacctgggctacacctgcaagtgtggcggcctgcagagcggcagccccctgagcagccagaccagccagcctgagcaggaggtgggcaccagcgagggcaagcccatcagcagcctggatgccttccccacccaggagggcaccctgagccctgtgaacctgacagatgaccagattgctgctggcctgtatgcctgcaccaacaatgaaagcaccctgaagagcatcatgaagaagaaggatggcaacaaggacagcaatggagccaagaagaacctgcagtttgtgggcatcaatggaggctatgagaccaccagcagtgatgacagcagcagtgatgagagcagcagcagcgagagtgatgatgaatgtgatgtgattgagtaccccctggaggaggaggaggaggaggaggatgaggacacccggggcatggccgagggccaccacgctgtgaacatcgagggcctgaagagcgcccgggtggaggatgagatgcaggtgcaggagtgtgagcctgagaaggtggagatccgggagagatatgagctgtctgagaagatgctgagcgcctgcaacctgctgaagaacaccatcaatgaccccaaggccctgaccagcaaggacatgaggttctgcctgaacaccctgcagcacgagtggttccgggtgagcagccagaagagcgccatcccagccatggtgggggactacatcgccgcctttgaggccatcagcccagatgtgctgcgctacgtgatcaacctggctgatggaaatggaaacacagccctgcactacagcgtgagccacagcaactttgaaattgtgaagctgctgctggatgctgatgtgtgcaatgtggaccaccagaacaaggccggctacacccccatcatgctggccgccctggccgctgtggaggccgagaaggacatgagaattgtggaggagctgtttggctgtggagatgtgaatgccaaggccagccaggccggccagacagccctgatgctggccgtgagccacggcagaattgacatggtgaagggcctgctggcctgtggggctgatgtgaacatccaggatgatgagggcagcacagccctgatgtgtgccagcgagcacggccacgtggagatcgtgaagctgctgctggcccagcccggctgcaatggccacctggaggacaatgatggcagcacagccctgagcatcgccctggaggccggccacaaggacattgctgtgctgctgtatgcccacgtgaactttgccaaggcccagagccctggcaccccccggctgggcaggaagaccagccctggccccacccaccggggcagctttgattag

SEQ ID NO: 91774 - DNA, 6912 bp, Artificial Sequence
  derived and/or modified sequence
ggtccgcggcggagcgagcgagcggccggcaggttgggaggagcggccgaaggttgaatgcctttgagaacttgatgcataaaatttgcatgactcctcactcctttctggatctctcattggactcaagccagcatggctcacaccacaaaggttaacggcagtgcctcaggaaaagcaggtgatattctcagtggagaccaggacaaggaacagaaagacccttactttgtggagaccccctatggttatcaactagacttagatttcctcaaatatgtggatgacatacagaagggaaataccatcaaaagactgaacatccagaagaggcggaagccgtccgtgccatgcccagaacccaggaccacatctggtcagcaaggtatatggacttccactgaatccctctcatcctccaacagtgatgacaacaagcagtgccccaacttcctcatagccagaagtcaagttacatcaactccaatctcaaagccacctccccctctggagacctcactcccttttcttaccatcccagaaaatcgacagctgccacctccctcaccacaactcccaaagcataaccttcatgtcaccaagacactgatggagacccggagaagactggaacaggagagagccaccatgcagatgacaccgggtgagttcagaaggcccaggctggccagttttggaggcatgggcaccacaagctccctcccttcttttgtgggttctggaaaccacaatcctgccaagcaccagcttcagaatggataccaaggtaatggggattatggtagctatgccccagctgctcccaccacttcctccatggggagctccatccgccacagccccctgagctcagggatctccaccccagtgaccaacgtgagccccatgcacctgcagcacatccgcgagcagatggccattgctctgaaacgcctgaaggagctggaggagcaggtgcgaaccatccctgtgctccaggtaaagatctctgtcttgcaagaagagaaaaggcagttggtctcacagctgaaaaaccaaagggctgcatcccagatcaatgtctgtggtgtgaggaagcggtcctatagtgcggggaacgcctcccagctggaacagctctcccgggcccgaagaagtggcggggaattatacattgactatgaggaggaagaaatggagaccgtagaacagagcacgcagaggataaaggagttccggcaacttacagcagacatgcaagccctggagcagaagatccaggacagcagctgtgaggcctcctcagagctcagggagaatggagagtgccggtctgtggctgtgggtgccgaggagaacatgaacgacatcgtcgtgtaccacagaggctccaggtcctgtaaggatgcagctgtagggacacttgttgagatgagaaattgtggggtcagcgtgacagaggccatgcttggagtgatgactgaagctgacaaagaaattgagctgcaacagcagaccatagaatccttgaaggaaaagatctatcgcctagaagtacagcttagagaaaccacccatgaccgggagatgactaaactgaaacaagagctgcaggctgctggatcgaggaaaaaggttgacaaagccacgatggcccagccgcttgttttcagtaaggtggtggaggcagtggtgcagaccagagaccaaatggtcggcagtcacatggacctggtggacacgtgtgttgggacctccgtggaaacaaacagtgtaggcatctcctgccagcctgaatgtaagaataaagtcgtagggcctgagctgcctatgaattggtggattgttaaggagagggtggaaatgcatgaccgatgtgctgggaggtctgtggaaatgtgtgacaagagtgtgagtgtggaagtcagcgtctgcgaaacaggcagcaacacagaggagtctgtgaacgacctcacactcctcaagacaaacttgaatctcaaagaagtgcggtctatcggttgtggagattgttctgttgacgtgaccgtctgctctccaaaggagtgcgcctcccggggcgtgaacactgaggctgttagccaggtggaagctgccgtcatggcagtgcctcgtactgcagaccaggacactagcacagatttggaacaggtgcaccagttcaccaacaccgagacggccaccctcatagagtcctgcaccaacacttgtctaagcactttggacaagcagaccagcacccagactgtggagacgcggacagtagctgtaggagaaggccgtgtcaaggacatcaactcctccaccaagacgcggtccattggtgttggaacgttgctttctggccattctgggtttgacaggccatcagctgtgaagaccaaagagtcaggtgtggggcagataaatattaacgacaactatctggttggtctcaaaatgaggactatagcttgtgggccaccacagttgactgtggggctgacagccagcagaaggagcgtgggggttggggatgaccctgtaggggaatctctggagaacccccagcctcaagctccacttggaatgatgactggcctggatcactacattgagcgtatccagaagctgctggcagaacagcagacactgctggctgagaactacagtgaactggcagaagctttcggggaacctcactcacagatgggctccctcaactctcagctcatcagcaccctgtcgtctatcaactctgtcatgaaatctgcaagcactgaagagctgaggaaccctgacttccagaaaaccagtctgggtaaaatcacaggcaattatttgggatatacctgtaagtgtgggggccttcagtcaggaagtcccttaagctcccagacatcccagcctgagcaagaagtggggacctcagaaggaaagccaatcagcagcctggatgccttccccactcaggaaggtacgctgtctccagtgaacctgacagacgaccagatcgccgctggcctctatggtaacttttctcactcacagtcattggcatcaggattctagggccagcattgccagcattccaatttaatgtcaatgtaccttttaaattgacctggaagaaagttaatatcgttatttggaaggtaggcccagaatatctttaaataaggttaccaaagaggccgggcatggtggctcacacctgtgatcccagcactttgggaggccaaggcaggcagatcatttgaggccaggagttcgagaccagcctggccaacatggtgaaaccccatctctactaaaaaatacaaaaattagccaggcatggtggtgcacacctgtagtcccagctactccggcggctgaggtgggagaatcacttgaacctgggaggtggaggttgcagtgagctgagatcacgccactgcactccagcctgggtgacagaaagaggccctgtctcaaaattacgaaagaaagctgtacaagaaagcttacctgatattacaaattatgaaatattttaaatagcattttattcacgttctggcaggcataagttttttcaggttatctcagctgaagaagaataataatccctgtttagtacgtaaatggtccttgaggctcgtgagacacgacatcactttataagcagtaaagccggatacaaatgtcagttttcactggctttgttatgtctggaaggactaattgatttttttcccatgtgaagaatgttattaatggaactttgaattattttctttgcatgcacacactttcccattgaattttgtggaaacttctcacatatatatgccaagatctacatttacatgcatgagaaaagaactgtacaggaaaaaagatcatttaacatgtatgggtgtgagttttcatttttattgccttgactttttcacagcatgtacaaacaatgaaagtacactgaagtccatcatgaagaagaaagatggtaacaaagattcaaatggcgcaaaaaagaatcttcagtttgttggcattaatggagggtaaggaaagatggtggttctagaggctaatgctgtcagtctcctttacctcctgcctaagtcacatttcaaggcgcctagtcggggaagcggccacagcgcagtgatgaaagattccctcctcagaaaggcagaaaggtgcatttgggctttgctttcctcctctggtgctgtctttaaggatttgtcactctcttaaggatacctgatgaagctgagcggtttacatctcctcacctctgatctgaaagaaatagtcttcagcgaacgcagcagggttcctgcactgtgttggacaacttgtacttacctatacgagaactcacaattgagcagaaaaagactgagagcatcactctctgggccaacgatcgtcatcttttccttcaaaatgggtccttttgcttagctctccatgtttacgacccaaattgtagggcctttcacaattgataaccacatcaccagtttgctttctaaatagaatggttattgtttgttccttctctttgcattggcccacgtacatagttaagcccctttgttgtcctacaattgaatcaaatcaatgaattgatacatggcccccacaagaaagaaataatacaaagtgtaccattagggtttaaccttatggtgcctgttttccaaatctagaagttttattcagtgataatggccaggagattttggagggcatacaccagaaaaactatcgattgcctatgtaatctattccccttgatactgggagaattaataggatgaaataggaagacatggggtgggggggggacaaaaagcacctaccgatctgttttccataaagtatgttttctcatgatttatgctaagccggagatgccattattttctttaacaagtgttacatgataccaattggttatatgataccgataaccagtttaagttagagtccattcaaaaccaccaggcatttaaatagaccttactttgaacttctaagtgcaggatctaaaaccactagtgaaatttctggagtcaattagcaaatcccttcatagaaatttctatcactgggtcttcgtgagcacaccttgcatctcctgaaatcccaattgccacctaggtatgaaacaacttcaagtgatgattccagctcagatgaaagctcttcttccgagtcagatgacgagtgtgatgtcattgagtatcctcttgaagaagaggaggaggaggaggatgaagacactcggggaatggcagaagggcaccatgcagttaatattgaaggtttgaagtctgccagggtggaagatgaaatgcaggttcaagaatgtgaacctgagaaggtggaaatcagagagaggtgtggtacattccccttccctcccttgcccctcccacatttaatgtactttggcaatagagttggccagttcagagcttttgtaattaaatgtttgcttttatctgttcctcagaggtatacacatcttgagatactaatatatacaagtgcagagtattacaactcttagatctcttatggtagaatggcctggtacctaatcacccttgttttctgaaaccttaactctgctatataatttaacatatggaaccacaatccactaaaacttgcattgtttgaacaccttaccttatatttaaagacattttaattttttggtggccagcctactttaagatttcagattttatgtttagccatttatcttgatacaggtgtatcattattacaggatcattgtgtggatgaggcctcagccaaagatcacatatactgtaaagatgatgcatatcacttacatgtttgtattttgttacacattgaatgatcaggaataccacaagaatggatttgggtatatcataaatagtagctgaaaaacactctggttggctgaaatatgtgcctcagaatgtaagttttcaagaccattagataaggatttgatgctcataaaatagagagtagaaaaggtggaaacttcagtatggtttttcagtatgtgaaatataaatagaacatttcagaaaacttacctctatttaatttggcaaatgaaagtttaactgcattaaaacaaggtaagtgtttttagtttatatttccaagtgtttcacatggctttttaacagctttgagatgtaatttatataccatatgtcatttttttacttttcatatgggttaaacacttgagtcaccaaatgtgggttcagatgtgtggtttactggtcagcacgatggatatatggtaatttgtggaaagtcaaggcaagaggatcgcttgagcacaggagtttgagactagcctggacaatatagtaagacctcatccctacaaaaatatcaattacctgggcatggtgtcacatgccagctgctctggaggataaggtgggaggatcacttgaaccctggaggttgaggctgcagtgagccagtgcactccagtctgggtgacagagcaagaccctgtctcagaaaaaaagtaatttgggtctccttcaacccccttaaaattaaaaatattttttaaaaacttagaacaggttgggcacagtggctcacacccataatgccaatactttgggaggctgaggcaggcaggcagatagcttgagcccaagagttcgagaccagcctgggcaacatggtgaaaccctgtctctacaaatacaaagccgggtgtggtggcacacacgtgtaatcccagttacttgggaagctgaggtaggaagattgcttgagcctgggacagcaaaactacagtgagccgtgattgcaccactgcactccagcctgggcaacagagtgagaccttgtctcaaaaaaaaaaaaaaaaaaaaa

SEQ ID NO: 91775 - DNA, 5249 bp, Artificial Sequence
  derived and/or modified sequence
gaaaaacagagcctctctgtagagatgcttaaagtgctagctttatttaaaaatcagctggcaaagcgggagtgaagaacacacattttcagaagataccggtttcctgttttcattaagaaaacagggaatgcggaacagctgagtgcggcgggggtggtgtcactgcagccggagggagacctcgccggtgaaagctcagcctatggcatccgagcgtggccggccaagtttacacgaatgttgaaacttctcctcacggggtgaggatcgagggcgcccgaggccgggtccggctgagctggagcgagctgtgcggggcagcgcgggctggcggggagcgcggcgggcgccacgtggaaaagcaggtgatattctcagtggagaccaggacaaggaacagaaagacccttactttgtggagaccccctatggttatcaactagacttagatttcctcaaatatgtggatgacatacagaagggaaataccatcaaaagactgaacatccagaagaggcggaagccgtccgtgccatgcccagaacccaggaccacatctggtcagcaaggtatatggacttccactgaatccctctcatcctccaacagtgatgacaacaagcagtgccccaacttcctcatagccagaagtcaagttacatcaactccaatctcaaagccacctccccctctggagacctcactcccttttcttaccatcccagaaaatcgacagctgccacctccctcaccacaactcccaaagcataaccttcatgtcaccaagacactgatggagacccggagaagactggaacaggagagagccaccatgcagatgacaccgggtgagttcagaaggcccaggctggccagttttggaggcatgggcaccacaagctccctcccttcttttgtgggttctggaaaccacaatcctgccaagcaccagcttcagaatggataccaaggtaatggggattatggtagctatgccccagctgctcccaccacttcctccatggggagctccatccgccacagccccctgagctcagggatctccaccccagtgaccaacgtgagccccatgcacctgcagcacatccgcgagcagatggccattgctctgaaacgcctgaaggagctggaggagcaggtgcgaaccatccctgtgctccaggtaaagatctctgtcttgcaagaagagaaaaggcagttggtctcacagctgaaaaaccaaagggctgcatcccagatcaatgtctgtggtgtgaggaagcggtcctatagtgcggggaacgcctcccagctggaacagctctcccgggcccgaagaagtggcggggaattatacattgactatgaggaggaagaaatggagaccgtagaacagagcacgcagaggataaaggagttccggcaacttacagcagacatgcaagccctggagcagaagatccaggacagcagctgtgaggcctcctcagagctcagggagaatggagagtgccggtctgtggctgtgggtgccgaggagaacatgaacgacatcgtcgtgtaccacagaggctccaggtcctgtaaggatgcagctgtagggacacttgttgagatgagaaattgtggggtcagcgtgacagaggccatgcttggagtgatgactgaagctgacaaagaaattgagctgcaacagcagaccatagaatccttgaaggaaaagatctatcgcctagaagtacagcttagagaaaccacccatgaccgggagatgactaaactgaaacaagagctgcaggctgctggatcgaggaaaaaggttgacaaagccacgatggcccagccgcttgttttcagtaaggtggtggaggcagtggtgcagaccagagaccaaatggtcggcagtcacatggacctggtggacacgtgtgttgggacctccgtggaaacaaacagtgtaggcatctcctgccagcctgaatgtaagaataaagtcgtagggcctgagctgcctatgaattggtggattgttaaggagagggtggaaatgcatgaccgatgtgctgggaggtctgtggaaatgtgtgacaagagtgtgagtgtggaagtcagcgtctgcgaaacaggcagcaacacagaggagtctgtgaacgacctcacactcctcaagacaaacttgaatctcaaagaagtgcggtctatcggttgtggagattgttctgttgacgtgaccgtctgctctccaaaggagtgcgcctcccggggcgtgaacactgaggctgttagccaggtggaagctgccgtcatggcagtgcctcgtactgcagaccaggacactagcacagatttggaacaggtgcaccagttcaccaacaccgagacggccaccctcatagagtcctgcaccaacacttgtctaagcactttggacaagcagaccagcacccagactgtggagacgcggacagtagctgtaggagaaggccgtgtcaaggacatcaactcctccaccaagacgcggtccattggtgttggaacgttgctttctggccattctgggtttgacaggccatcagctgtgaagaccaaagagtcaggtgtggggcagataaatattaacgacaactatctggttggtctcaaaatgaggactatagcttgtgggccaccacagttgactgtggggctgacagccagcagaaggagcgtgggggttggggatgaccctgtaggggaatctctggagaacccccagcctcaagctccacttggaatgatgactggcctggatcactacattgagcgtatccagaagctgctggcagaacagcagacactgctggctgagaactacagtgaactggcagaagctttcggggaacctcactcacagatgggctccctcaactctcagctcatcagcaccctgtcgtctatcaactctgtcatgaaatctgcaagcactgaagagctgaggaaccctgacttccagaaaaccagtctgggtaaaatcacaggcaattatttgggatatacctgtaagtgtgggggccttcagtcaggaagtcccttaagctcccagacatcccagcctgagcaagaagtggggacctcagaaggaaagccaatcagcagcctggatgccttccccactcaggaaggtacgctgtctccagtgaacctgacagacgaccagatcgccgctggcctctatgcatgtacaaacaatgaaagtacactgaagtccatcatgaagaagaaagatggtaacaaagattcaaatggcgcaaaaaagaatcttcagtttgttggcattaatggagggtatgaaacaacttcaagtgatgattccagctcagatgaaagctcttcttccgagtcagatgacgagtgtgatgtcattgagtatcctcttgaagaagaggaggaggaggaggatgaagacactcggggaatggcagaagggcaccatgcagttaatattgaaggtttgaagtctgccagggtggaagatgaaatgcaggttcaagaatgtgaacctgagaaggtggaaatcagagagaggtatgaattaagtgaaaagatgttgtctgcatgcaacttactgaaaaatactataaatgaccccaaagctttgaccagcaaagatatgaggttctgtctgaacaccctccagcacgagtggttccgcgtgtccagtcagaagtcagccattccagccatggtgggggactacatagctgcttttgaggccatttccccagatgtcctccgctatgtcatcaacttggcagacggcaacggcaacacagccctccattacagcgtgtcccactccaacttcgagattgtgaagctgctgttagatgccgatgtgtgtaatgtggatcaccagaacaaggcaggctacacccccatcatgttggcggccctcgccgctgtggaagcagagaaggacatgcggattgtggaagaactcttcggctgtggggatgtgaatgccaaagctagtcaggcgggacagacggccctcatgctggcggtcagtcacggacggatagacatggtgaagggccttctggcctgtggggctgatgtcaacatccaggatgacgagggctccacggccctcatgtgtgccagcgagcacggacacgtggagattgtcaagctgctgctggcccagcccggctgcaacggtcacctagaggacaacgatggcagcactgcgctctcaatcgccctggaagcaggacacaaggacatcgctgttcttctgtatgcccatgtcaactttgcaaaagcccagtctccgggcacccctaggcttggaaggaagacgtctcctggccccacccaccgaggttcatttgattgattgtatgcaaatagccctttatttacatgccactattaagctgctaattgttcctgttggggtgacagatactgaatgtatacgtattgtgcctgagctcaccagcaaacagaagcatcaagcccaggggtaaaggctgaagctttcacagtgcagagactgctagcctgggcacacacacctcctttctggccgtcttctgtgtagggcacactttaacccagtctctgttgctgttgagtctctgctccgttttgtacagtcacagggaattctgatctgaaggggcaccttctgttcactcccacaaagtggtgtctggttctcactgagacgttttaagatttttccacaaatatttatatgtactaaatgtggaaccattagaaagttcttccaaaatctcattccagcatagttttggatttttcttttgtcttattttaaaataaggaagtcgagatgactttgatcattggtaacttgggcctgggccagacaaagtataaaacttacaaaagaatattctcatttggtcttaactaggtagatgtaatatatgactttttataaaaagggtatctatatgaacttgacacagtattttcagcttttgtattccatactaaagccatgaagaactacacgtaacatcatcatttgtattaattgcacaactccaatgctaaaggttggattgtgttagaggaatcggctctgtatttgcctctagagaaacacagtgttctctttgtatttatggattcctttttaccgtgtcacatttactttggtcctctatgtatttaaatgtttgaagtgccttagactcttgccatattttcaaaataaaattccattaagctct

SEQ ID NO: 91776 - DNA, 5051 bp, Artificial Sequence
  derived and/or modified sequence
gcgagcgagcggccggcaggttgggaggagcggccgaaggttgaatgcctttgagaacttgatgcataaaatttgcatgactcctcactcctttctggatctctcattggactcaagccagcatggctcacaccacaaaggttaacggcagtgcctcaggaaaagcaggtgatattctcagtggagaccaggacaaggaacagaaagacccttactttgtggagaccccctatggttatcaactagacttagatttcctcaaatatgtggatgacatacagaagggaaataccatcaaaagactgaacatccagaagaggcggaagccgtccgtgccatgcccagaacccaggaccacatctggtcagcaaggtatatggacttccactgaatccctctcatcctccaacagtgatgacaacaagcagtgccccaacttcctcatagccagaagtcaagttacatcaactccaatctcaaagccacctccccctctggagacctcactcccttttcttaccatcccagaaaatcgacagctgccacctccctcaccacaactcccaaagcataaccttcatgtcaccaagacactgatggagacccggagaagactggaacaggagagagccaccatgcagatgacaccgggtgagttcagaaggcccaggctggccagttttggaggcatgggcaccacaagctccctcccttcttttgtgggttctggaaaccacaatcctgccaagcaccagcttcagaatggataccaaggtaatggggattatggtagctatgccccagctgctcccaccacttcctccatggggagctccatccgccacagccccctgagctcagggatctccaccccagtgaccaacgtgagccccatgcacctgcagcacatccgcgagcagatggccattgctctgaaacgcctgaaggagctggaggagcaggtgcgaaccatccctgtgctccaggtaaagatctctgtcttgcaagaagagaaaaggcagttggtctcacagctgaaaaaccaaagggctgcatcccagatcaatgtctgtggtgtgaggaagcggtcctatagtgcggggaacgcctcccagctggaacagctctcccgggcccgaagaagtggcggggaattatacattgactatgaggaggaagaaatggagaccgtagaacagagcacgcagaggataaaggagttccggcaacttacagcagacatgcaagccctggagcagaagatccaggacagcagctgtgaggcctcctcagagctcagggagaatggagagtgccggtctgtggctgtgggtgccgaggagaacatgaacgacatcgtcgtgtaccacagaggctccaggtcctgtaaggatgcagctgtagggacacttgttgagatgagaaattgtggggtcagcgtgacagaggccatgcttggagtgatgactgaagctgacaaagaaattgagctgcaacagcagaccatagaatccttgaaggaaaagatctatcgcctagaagtacagcttagagaaaccacccatgaccgggagatgactaaactgaaacaagagctgcaggctgctggatcgaggaaaaaggttgacaaagccacgatggcccagccgcttgttttcagtaaggtggtggaggcagtggtgcagaccagagaccaaatggtcggcagtcacatggacctggtggacacgtgtgttgggacctccgtggaaacaaacagtgtaggcatctcctgccagcctgaatgtaagaataaagtcgtagggcctgagctgcctatgaattggtggattgttaaggagagggtggaaatgcatgaccgatgtgctgggaggtctgtggaaatgtgtgacaagagtgtgagtgtggaagtcagcgtctgcgaaacaggcagcaacacagaggagtctgtgaacgacctcacactcctcaagacaaacttgaatctcaaagaagtgcggtctatcggttgtggagattgttctgttgacgtgaccgtctgctctccaaaggagtgcgcctcccggggcgtgaacactgaggctgttagccaggtggaagctgccgtcatggcagtgcctcgtactgcagaccaggacactagcacagatttggaacaggtgcaccagttcaccaacaccgagacggccaccctcatagagtcctgcaccaacacttgtctaagcactttggacaagcagaccagcacccagactgtggagacgcggacagtagctgtaggagaaggccgtgtcaaggacatcaactcctccaccaagacgcggtccattggtgttggaacgttgctttctggccattctgggtttgacaggccatcagctgtgaagaccaaagagtcaggtgtggggcagataaatattaacgacaactatctggttggtctcaaaatgaggactatagcttgtgggccaccacagttgactgtggggctgacagccagcagaaggagcgtgggggttggggatgaccctgtaggggaatctctggagaacccccagcctcaagctccacttggaatgatgactggcctggatcactacattgagcgtatccagaagctgctggcagaacagcagacactgctggctgagaactacagtgaactggcagaagctttcggggaacctcactcacagatgggctccctcaactctcagctcatcagcaccctgtcgtctatcaactctgtcatgaaatctgcaagcactgaagagctgaggaaccctgacttccagaaaaccagtctgggtaaaatcacaggcaattatttgggatatacctgtaagtgtgggggccttcagtcaggaagtcccttaagctcccagacatcccagcctgagcaagaagtggggacctcagaaggaaagccaatcagcagcctggatgccttccccactcaggaaggtacgctgtctccagtgaacctgacagacgaccagatcgccgctggcctctatgcatgtacaaacaatgaaagtacactgaagtccatcatgaagaagaaagatggtaacaaagattcaaatggcgcaaaaaagaatcttcagtttgttggcattaatggagggtatgaaacaacttcaagtgatgattccagctcagatgaaagctcttcttccgagtcagatgacgagtgtgatgtcattgagtatcctcttgaagaagaggaggaggaggaggatgaagacactcggggaatggcagaagggcaccatgcagttaatattgaaggtttgaagtctgccagggtggaagatgaaatgcaggttcaagaatgtgaacctgagaaggtggaaatcagagagaggtatgaattaagtgaaaagatgttgtctgcatgcaacttactgaaaaatactataaatgaccccaaagctttgaccagcaaagatatgaggttctgtctgaacaccctccagcacgagtggttccgcgtgtccagtcagaagtcagccattccagccatggtgggggactacatagctgcttttgaggccatttccccagatgtcctccgctatgtcatcaacttggcagacggcaacggcaacacagccctccattacagcgtgtcccactccaacttcgagattgtgaagctgctgttagatgccgatgtgtgtaatgtggatcaccagaacaaggcaggctacacccccatcatgttggcggccctcgccgctgtggaagcagagaaggacatgcggattgtggaagaactcttcggctgtggggatgtgaatgccaaagctagtcaggcgggacagacggccctcatgctggcggtcagtcacggacggatagacatggtgaagggccttctggcctgtggggctgatgtcaacatccaggatgacgagggctccacggccctcatgtgtgccagcgagcacggacacgtggagattgtcaagctgctgctggcccagcccggctgcaacggtcacctagaggacaacgatggcagcactgcgctctcaatcgccctggaagcaggacacaaggacatcgctgttcttctgtatgcccatgtcaactttgcaaaagcccagtctccgggcacccctaggcttggaaggaagacgtctcctggccccacccaccgaggttcatttgattgattgtatgcaaatagccctttatttacatgccactattaagctgctaattgttcctgttggggtgacagatactgaatgtatacgtattgtgcctgagctcaccagcaaacagaagcatcaagcccaggggtaaaggctgaagctttcacagtgcagagactgctagcctgggcacacacacctcctttctggccgtcttctgtgtagggcacactttaacccagtctctgttgctgttgagtctctgctccgttttgtacagtcacagggaattctgatctgaaggggcaccttctgttcactcccacaaagtggtgtctggttctcactgagacgttttaagatttttccacaaatatttatatgtactaaatgtggaaccattagaaagttcttccaaaatctcattccagcatagttttggatttttcttttgtcttattttaaaataaggaagtcgagatgactttgatcattggtaacttgggcctgggccagacaaagtataaaacttacaaaagaatattctcatttggtcttaactaggtagatgtaatatatgactttttataaaaagggtatctatatgaacttgacacagtattttcagcttttgtattccatactaaagccatgaagaactacacgtaacatcatcatttgtattaattgcacaactccaatgctaaaggttggattgtgttagaggaatcggctctgtatttgcctctagagaaacacagtgttctctttgtatttatggattcctttttaccgtgtcacatttactttggtcctctatgtatttaaatgtttgaagtgccttagactcttgccatattttcaaaataaaattccattaagctcttt

SEQ ID NO: 91777 - DNA, 5581 bp, Artificial Sequence
  derived and/or modified sequence
gcccgagggtgtttcggggcgtccgaagcgggcgtgctccagcctgctcagcagcgagtggttggaaattagcaaagtgagagggtgaaaggaagcaggaggaggagggagttctagcgaagacttcggagggaagcaacccatcccctgccacaagaaagcaccgccactccagtgggaacggacacgcgtgcacacagccacgagtgaggagagaatacagcagttccaaggacaagggattcgtaccactgctcctcactcagtaaatagcagagacagaatttgaacggtctcactctgtcacctgagctagagtgcagtggtgcgatcacagcttactgcagcattgaactcctgggctcaagtgatcctcttgcctcagcctcccaagtaactgtgactgcagtgtccttgctggccttgcaaaatgagtttggaagggttgattccatcctcttcagttgttggaaagagtttaagaagggttggtgttaattcttctctttaaatatttgatgaaattcaccagtgaagccgtgacatcctgggatattctttgttgagaggttgaatgcctttgagaacttgatgcataaaatttgcatgactcctcactcctttctggatctctcattggactcaagccagcatggctcacaccacaaaggttaacggcagtgcctcaggaaaagcaggtgatattctcagtggagaccaggacaaggaacagaaagacccttactttgtggagaccccctatggttatcaactagacttagatttcctcaaatatgtggatgacatacagaagggaaataccatcaaaagactgaacatccagaagaggcggaagccgtccgtgccatgcccagaacccaggaccacatctggtcagcaaggtatatggacttccactgaatccctctcatcctccaacagtgatgacaacaagcagtgccccaacttcctcatagccagaagtcaagttacatcaactccaatctcaaagccacctccccctctggagacctcactcccttttcttaccatcccagaaaatcgacagctgccacctccctcaccacaactcccaaagcataaccttcatgtcaccaagacactgatggagacccggagaagactggaacaggagagagccaccatgcagatgacaccgggtgagttcagaaggcccaggctggccagttttggaggcatgggcaccacaagctccctcccttcttttgtgggttctggaaaccacaatcctgccaagcaccagcttcagaatggataccaaggtaatggggattatggtagctatgccccagctgctcccaccacttcctccatggggagctccatccgccacagccccctgagctcagggatctccaccccagtgaccaacgtgagccccatgcacctgcagcacatccgcgagcagatggccattgctctgaaacgcctgaaggagctggaggagcaggtgcgaaccatccctgtgctccaggtaaagatctctgtcttgcaagaagagaaaaggcagttggtctcacagctgaaaaaccaaagggctgcatcccagatcaatgtctgtggtgtgaggaagcggtcctatagtgcggggaacgcctcccagctggaacagctctcccgggcccgaagaagtggcggggaattatacattgactatgaggaggaagaaatggagaccgtagaacagagcacgcagaggataaaggagttccggcaacttacagcagacatgcaagccctggagcagaagatccaggacagcagctgtgaggcctcctcagagctcagggagaatggagagtgccggtctgtggctgtgggtgccgaggagaacatgaacgacatcgtcgtgtaccacagaggctccaggtcctgtaaggatgcagctgtagggacacttgttgagatgagaaattgtggggtcagcgtgacagaggccatgcttggagtgatgactgaagctgacaaagaaattgagctgcaacagcagaccatagaatccttgaaggaaaagatctatcgcctagaagtacagcttagagaaaccacccatgaccgggagatgactaaactgaaacaagagctgcaggctgctggatcgaggaaaaaggttgacaaagccacgatggcccagccgcttgttttcagtaaggtggtggaggcagtggtgcagaccagagaccaaatggtcggcagtcacatggacctggtggacacgtgtgttgggacctccgtggaaacaaacagtgtaggcatctcctgccagcctgaatgtaagaataaagtcgtagggcctgagctgcctatgaattggtggattgttaaggagagggtggaaatgcatgaccgatgtgctgggaggtctgtggaaatgtgtgacaagagtgtgagtgtggaagtcagcgtctgcgaaacaggcagcaacacagaggagtctgtgaacgacctcacactcctcaagacaaacttgaatctcaaagaagtgcggtctatcggttgtggagattgttctgttgacgtgaccgtctgctctccaaaggagtgcgcctcccggggcgtgaacactgaggctgttagccaggtggaagctgccgtcatggcagtgcctcgtactgcagaccaggacactagcacagatttggaacaggtgcaccagttcaccaacaccgagacggccaccctcatagagtcctgcaccaacacttgtctaagcactttggacaagcagaccagcacccagactgtggagacgcggacagtagctgtaggagaaggccgtgtcaaggacatcaactcctccaccaagacgcggtccattggtgttggaacgttgctttctggccattctgggtttgacaggccatcagctgtgaagaccaaagagtcaggtgtggggcagataaatattaacgacaactatctggttggtctcaaaatgaggactatagcttgtgggccaccacagttgactgtggggctgacagccagcagaaggagcgtgggggttggggatgaccctgtaggggaatctctggagaacccccagcctcaagctccacttggaatgatgactggcctggatcactacattgagcgtatccagaagctgctggcagaacagcagacactgctggctgagaactacagtgaactggcagaagctttcggggaacctcactcacagatgggctccctcaactctcagctcatcagcaccctgtcgtctatcaactctgtcatgaaatctgcaagcactgaagagctgaggaaccctgacttccagaaaaccagtctgggtaaaatcacaggcaattatttgggatatacctgtaagtgtgggggccttcagtcaggaagtcccttaagctcccagacatcccagcctgagcaagaagtggggacctcagaaggaaagccaatcagcagcctggatgccttccccactcaggaaggtacgctgtctccagtgaacctgacagacgaccagatcgccgctggcctctatgcatgtacaaacaatgaaagtacactgaagtccatcatgaagaagaaagatggtaacaaagattcaaatggcgcaaaaaagaatcttcagtttgttggcattaatggagggtatgaaacaacttcaagtgatgattccagctcagatgaaagctcttcttccgagtcagatgacgagtgtgatgtcattgagtatcctcttgaagaagaggaggaggaggaggatgaagacactcggggaatggcagaagggcaccatgcagttaatattgaaggtttgaagtctgccagggtggaagatgaaatgcaggttcaagaatgtgaacctgagaaggtggaaatcagagagaggtatgaattaagtgaaaagatgttgtctgcatgcaacttactgaaaaatactataaatgaccccaaagctttgaccagcaaagatatgaggttctgtctgaacaccctccagcacgagtggttccgcgtgtccagtcagaagtcagccattccagccatggtgggggactacatagctgcttttgaggccatttccccagatgtcctccgctatgtcatcaacttggcagacggcaacggcaacacagccctccattacagcgtgtcccactccaacttcgagattgtgaagctgctgttagatgccgatgtgtgtaatgtggatcaccagaacaaggcaggctacacccccatcatgttggcggccctcgccgctgtggaagcagagaaggacatgcggattgtggaagaactcttcggctgtggggatgtgaatgccaaagctagtcaggcgggacagacggccctcatgctggcggtcagtcacggacggatagacatggtgaagggccttctggcctgtggggctgatgtcaacatccaggatgacgagggctccacggccctcatgtgtgccagcgagcacggacacgtggagattgtcaagctgctgctggcccagcccggctgcaacggtcacctagaggacaacgatggcagcactgcgctctcaatcgccctggaagcaggacacaaggacatcgctgttcttctgtatgcccatgtcaactttgcaaaagcccagtctccgggcacccctaggcttggaaggaagacgtctcctggccccacccaccgaggttcatttgattgattgtatgcaaatagccctttatttacatgccactattaagctgctaattgttcctgttggggtgacagatactgaatgtatacgtattgtgcctgagctcaccagcaaacagaagcatcaagcccaggggtaaaggctgaagctttcacagtgcagagactgctagcctgggcacacacacctcctttctggccgtcttctgtgtagggcacactttaacccagtctctgttgctgttgagtctctgctccgttttgtacagtcacagggaattctgatctgaaggggcaccttctgttcactcccacaaagtggtgtctggttctcactgagacgttttaagatttttccacaaatatttatatgtactaaatgtggaaccattagaaagttcttccaaaatctcattccagcatagttttggatttttcttttgtcttattttaaaataaggaagtcgagatgactttgatcattggtaacttgggcctgggccagacaaagtataaaacttacaaaagaatattctcatttggtcttaactaggtagatgtaatatatgactttttataaaaagggtatctatatgaacttgacacagtattttcagcttttgtattccatactaaagccatgaagaactacacgtaacatcatcatttgtattaattgcacaactccaatgctaaaggttggattgtgttagaggaatcggctctgtatttgcctctagagaaacacagtgttctctttgtatttatggattcctttttaccgtgtcacatttactttggtcctctatgtatttaaatgtttgaagtgccttagactcttgccatattttcaaaataaaattccattaagctcttt

SEQ ID NO: 91778 - DNA, 5131 bp, Artificial Sequence
  derived and/or modified sequence
ggtccgcggcggagcgagcgagcggccggcaggttgggaggagcggccgaaggttgaatgcctttgagaacttgatgcataaaatttgcatgactcctcactcctttctggatctctcattggactcaagccagcatggctcacaccacaaaggttaacggcagtgcctcaggaaaagcaggtgatattctcagtggagaccaggacaaggaacagaaagacccttactttgtggagaccccctatggttatcaactagacttagatttcctcaaatatgtggatgacatacagaagggaaataccatcaaaagactgaacatccagaagaggcggaagccgtccgtgccatgcccagaacccaggaccacatctggtcagcaaggtatatggacttccactgaatccctctcatcctccaacagtgatgacaacaagcagtgccccaacttcctcatagccagaagtcaagttacatcaactccaatctcaaagccacctccccctctggagacctcactcccttttcttaccatcccagaaaatcgacagctgccacctccctcaccacaactcccaaagcataaccttcatgtcaccaagacactgatggagacccggagaagactggaacaggagagagccaccatgcagatgacaccgggtgagttcagaaggcccaggctggccagttttggaggcatgggcaccacaagctccctcccttcttttgtgggttctggaaaccacaatcctgccaagcaccagcttcagaatggataccaaggtaatggggattatggtagctatgccccagctgctcccaccacttcctccatggggagctccatccgccacagccccctgagctcagggatctccaccccagtgaccaacgtgagccccatgcacctgcagcacatccgcgagcagatggccattgctctgaaacgcctgaaggagctggaggagcaggtgcgaaccatccctgtgctccaggtaaagatctctgtcttgcaagaagagaaaaggcagttggtctcacagctgaaaaaccaaagggctgcatcccagatcaatgtctgtggtgtgaggaagcggtcctatagtgcggggaacgcctcccagctggaacagctctcccgggcccgaagaagtggcggggaattatacattgactatgaggaggaagaaatggagaccgtagaacagagcacgcagaggataaaggagttccggcaacttacagcagacatgcaagccctggagcagaagatccaggacagcagctgtgaggcctcctcagagctcagggagaatggagagtgccggtctgtggctgtgggtgccgaggagaacatgaacgacatcgtcgtgtaccacagaggctccaggtcctgtaaggatgcagctgtagggacacttgttgagatgagaaattgtggggtcagcgtgacagaggccatgcttggagtgatgactgaagctgacaaagaaattgagctgcaacagcagaccatagaatccttgaaggaaaagatctatcgcctagaagtacagcttagagaaaccacccatgaccgggagatgactaaactgaaacaagagctgcaggctgctggatcgaggaaaaaggttgacaaagccacgatggcccagccgcttgttttcagtaaggtggtggaggcagtggtgcagaccagagaccaaatggtcggcagtcacatggacctggtggacacgtgtgttgggacctccgtggaaacaaacagtgtaggcatctcctgccagcctgaatgtaagaataaagtcgtagggcctgagctgcctatgaattggtggattgttaaggagagggtggaaatgcatgaccgatgtgctgggaggtctgtggaaatgtgtgacaagagtgtgagtgtggaagtcagcgtctgcgaaacaggcagcaacacagaggagtctgtgaacgacctcacactcctcaagacaaacttgaatctcaaagaagtgcggtctatcggttgtggagattgttctgttgacgtgaccgtctgctctccaaaggagtgcgcctcccggggcgtgaacactgaggctgttagccaggtggaagctgccgtcatggcagtgcctcgtactgcagaccaggacactagcacagatttggaacaggtgcaccagttcaccaacaccgagacggccaccctcatagagtcctgcaccaacacttgtctaagcactttggacaagcagaccagcacccagactgtggagacgcggacagtagctgtaggagaaggccgtgtcaaggacatcaactcctccaccaagacgcggtccattggtgttggaacgttgctttctggccattctgggtttgacaggccatcagctgtgaagaccaaagagtcaggtgtggggcagataaatattaacgacaactatctggttggtctcaaaatgaggactatagcttgtgggccaccacagttgactgtggggctgacagccagcagaaggagcgtgggggttggggatgaccctgtaggggaatctctggagaacccccagcctcaagctccacttggaatgatgactggcctggatcactacattgagcgtatccagaagctgctggcagaacagcagacactgctggctgagaactacagtgaactggcagaagctttcggggaacctcactcacagatgggctccctcaactctcagctcatcagcaccctgtcgtctatcaactctgtcatgaaatctgcaagcactgaagagctgaggaaccctgacttccagaaaaccagtctgggtaaaatcacaggcaattatttgggatatacctgtaagtgtgggggccttcagtcaggaagtcccttaagctcccagacatcccagcctgagcaagaagtggggacctcagaaggaaagccaatcagcagcctggatgccttccccactcaggaaggtacgctgtctccagtgaacctgacagacgaccagatcgccgctggcctctatgcatgtacaaacaatgaaagtacactgaagtccatcatgaagaagaaagatggtaacaaagattcaaatggcgcaaaaaagaatcttcagtttgttggcattaatggagggtatgaaacaacttcaagtgatgattccagctcagatgaaagctcttcttccgagtcagatgacgagtgtgatgtcattgagtatcctcttgaagaagaggaggaggaggaggatgaagacactcggggaatggcagaagggcaccatgcagttaatattgaaggtttgaagtctgccagggtggaagatgaaatgcaggttcaagaatgtgaacctgagaaggtggaaatcagagagaggtatgaattaagtgaaaagatgttgtctgcatgcaacttactgaaaaatactataaatgaccccaaagctttgaccagcaaagatatgggccaggtgcagtggctgacacctatgatcccaacacttcgggaggccgatgcaggtggatcacatgagaggttctgtctgaacaccctccagcacgagtggttccgcgtgtccagtcagaagtcagccattccagccatggtgggggactacatagctgcttttgaggccatttccccagatgtcctccgctatgtcatcaacttggcagacggcaacggcaacacagccctccattacagcgtgtcccactccaacttcgagattgtgaagctgctgttagatgccgatgtgtgtaatgtggatcaccagaacaaggcaggctacacccccatcatgttggcggccctcgccgctgtggaagcagagaaggacatgcggattgtggaagaactcttcggctgtggggatgtgaatgccaaagctagtcaggcgggacagacggccctcatgctggcggtcagtcacggacggatagacatggtgaagggccttctggcctgtggggctgatgtcaacatccaggatgacgagggctccacggccctcatgtgtgccagcgagcacggacacgtggagattgtcaagctgctgctggcccagcccggctgcaacggtcacctagaggacaacgatggcagcactgcgctctcaatcgccctggaagcaggacacaaggacatcgctgttcttctgtatgcccatgtcaactttgcaaaagcccagtctccgggcacccctaggcttggaaggaagacgtctcctggccccacccaccgaggttcatttgattgattgtatgcaaatagccctttatttacatgccactattaagctgctaattgttcctgttggggtgacagatactgaatgtatacgtattgtgcctgagctcaccagcaaacagaagcatcaagcccaggggtaaaggctgaagctttcacagtgcagagactgctagcctgggcacacacacctcctttctggccgtcttctgtgtagggcacactttaacccagtctctgttgctgttgagtctctgctccgttttgtacagtcacagggaattctgatctgaaggggcaccttctgttcactcccacaaagtggtgtctggttctcactgagacgttttaagatttttccacaaatatttatatgtactaaatgtggaaccattagaaagttcttccaaaatctcattccagcatagttttggatttttcttttgtcttattttaaaataaggaagtcgagatgactttgatcattggtaacttgggcctgggccagacaaagtataaaacttacaaaagaatattctcatttggtcttaactaggtagatgtaatatatgactttttataaaaagggtatctatatgaacttgacacagtattttcagcttttgtattccatactaaagccatgaagaactacacgtaacatcatcatttgtattaattgcacaactccaatgctaaaggttggattgtgttagaggaatcggctctgtatttgcctctagagaaacacagtgttctctttgtatttatggattcctttttaccgtgtcacatttactttggtcctctatgtatttaaatgtttgaagtgccttagactcttgccatattttcaaaataaaattccattaagctct

SEQ ID NO: 91779 - DNA, 2937 bp, Artificial Sequence
  derived and/or modified sequence
atggcccacaccaccaaggtgaacggcagcgccagcggcaaggccggcgacatactttccggagaccaagataaggagcagaaggacccgtacttcgtcgaaaccccttatgggtatcagctggaccttgactttctaaaatacgttgacgatatccaaaagggcaacacaattaaaagactaaacatccagaagagacggaagccatctgtcccctgccccgagccccggacaacctccggccagcaaggcatctggacatctaccgagagcctgagttcctccaacagtgatgataataagcagtgtccaaacttccttattgcaagatcacaggttactagcactcctatctccaaaccccctccacctctggagacaagtcttcctttcctgaccatccctgaaaaccgccagctccctccaccatctccgcaactacccaagcataacctgcacgtgacaaagaccttgatggaaacacgccggagactcgaacaggagcgcgccaccatgcagatgacccctggcgagttccgcaggccgaggctggcatcttttggaggaatgggcacgacatcatcgctgccaagctttgtgggctctgggaaccacaaccccgccaagcaccagctgcagaacggttaccagggaaatggagactacggttcatacgcccccgctgcacctaccaccagttccatgggaagttccatacgacactccccattgtcatcggggatctcaaccccggttaccaatgtcagccccatgcacctgcagcacataagagaacagatggccattgcattaaaaagactgaaagagctggaagagcaggtcaggacaattccggtgctccaggtgaagatatcagtgctccaggaggaaaaacgccagctcgtctctcagctgaaaaaccagcgtgctgccagccagatcaatgtatgtggagtgcggaaaaggtcttactctgccggcaatgcaagccaactcgaacaactgtctagagcgcggagatctggaggcgagctttacattgactatgaagaggaagagatggaaacagtcgaacagagcacacagaggattaaagagtttagacagctcaccgcggatatgcaggccctggagcagaaaatacaggacagttcttgcgaagcttcatccgagttgagagaaaatggggagtgccgtagcgtcgctgtgggggctgaagaaaacatgaacgatatcgttgtgtaccaccgcggcagcagaagctgcaaagatgctgctgttggtacgcttgtcgaaatgaggaactgtggagttagcgtgacagaagcaatgctcggggtgatgacagaagctgataaagagattgagctccagcagcagaccattgagagtctgaaagagaaaatctacagattggaagtgcagctcagagaaaccacccatgaccgtgagatgaccaaactaaagcaggaactccaggcggctggaagccggaagaaggtagacaaagctaccatggctcagccgcttgtgtttagcaaggtggtggaggctgtggtccagaccagggatcagatggttggaagccatatggacctggtggacacgtgtgtgggcacctccgtggaaactaatagcgtcggtatcagctgccagcctgagtgtaaaaataaggttgtggggcccgagctgcccatgaactggtggattgtgaaagaaagggtggagatgcatgaccggtgcgccgggaggtcggtcgagatgtgcgacaagtcggtatctgtggaggttagtgtgtgcgagactggaagtaacacagaagaaagcgtgaacgacttgacccttctcaaaacaaacctcaacttaaaggaggttcgaagtatcggctgtggggactgcagcgtggacgttacagtctgttctcctaaggagtgcgccagtcggggggtcaatactgaagccgtgtcgcaggtggaggcggcagttatggctgtgccacggaccgcagaccaggatacctcaacagacctcgaacaagtgcaccagttcaccaacaccgagactgctacccttatagagtcctgtaccaacacctgtctttcaaccctggataaacaaacttcaacgcagacagtggaaaccagaaccgtagcggtcggcgagggtcgcgtaaaggatatcaatagttctaccaaaacacgaagtattggcgttgggactttgctctccggccattcagggttcgacaggccaagtgccgtgaagactaaggagtctggcgtgggtcagattaacataaatgacaactacctcgtaggtctcaaaatgcggactattgcatgcggcccaccccagctgacagttggtcttaccgcgagcagacggtctgttggtgtgggcgacgatcccgtcggcgagtccctggagaacccccagcctcaggcgccactgggaatgatgacaggtctggaccactacatagagaggatccagaagttactggctgagcagcagactttgttagctgaaaattactcagagttagctgaggcttttggtgaaccacatagccagatggggagcctcaattctcagctgatctctacactgagctccatcaactctgtgatgaaaagcgcctccactgaggaactgcgcaaccccgactttcagaagacaagccttggtaaaattaccgggaactacctgggctacacttgtaagtgcggtggccttcagtctggatcccccctgagctctcaaactagtcagccagagcaggaggtcggcacatccgaagggaagcctatcagctctctggatgcctttccaacacaggagggaactctatcgccggtcaatctgaccgacgaccagatcgcggcgggcttgtatggcaatttttcacattcacagagtttggcttccggcttctag

SEQ ID NO: 91780 - DNA, 3585 bp, Artificial Sequence
  derived and/or modified sequence
atggagacccggcggcggctggagcaggagcgggccaccatgcagatgacccctggtgaatttagaagaccacggctggctagcttcggcggcatgggaactacatcgtctctcccctctttcgtgggtagcggtaaccataaccccgcaaaacaccagctgcaaaacgggtaccagggcaacggcgattatgggagctatgctccagctgctccaaccacctcgagcatgggatcctccattcgtcactctcccctgtccagcggcatatcgactccagtaactaacgtctctcccatgcatctgcaacacatccgcgaacagatggctattgctctgaagcgccttaaagagcttgaggaacaggtccgaaccatcccagttttgcaggttaaaattagcgtgttgcaggaggagaagagacagttggtgagccagctgaagaatcaaagagccgcatcacagataaacgtctgcggagtcaggaaaagaagctacagcgctggaaatgcatcccaactagagcagctgtcccgggctcgccgctcgggcggagagctgtacattgactatgaggaagaggaaatggaaacagtagaacagagtactcagagaatcaaagagttccgtcaattgaccgctgacatgcaggcgctcgagcagaagatacaggattcttcttgcgaagcctcaagcgagttacgggaaaacggcgagtgtcggagtgtggccgtcggcgctgaggaaaatatgaatgacatcgtcgtataccaccggggatctcgatcctgtaaagatgctgcggtaggcacacttgttgagatgcggaattgcggggtctccgttaccgaggctatgctcggcgtgatgacagaagccgataaggagatcgaactccagcagcaaaccattgagagcctgaaggagaaaatctataggctcgaagtgcagttaagggaaacaacacatgatagagaaatgacaaaactgaaacaggagctgcaggccgctggttctcggaagaaagttgacaaagcgactatggcccaaccccttgtgttttcaaaggtagtggaagccgtggtacaaaccagagaccagatggtaggaagccacatggatctggtcgacacgtgtgttggaaccagcgtggagacaaacagcgttggaatttcatgtcagcctgagtgtaagaacaaggtggtcggtcctgagctgccaatgaactggtggatagtgaaagagagggtcgagatgcacgataggtgtgcagggagaagtgtggagatgtgcgacaagtcagtgtcagtcgaagtctcagtttgcgagaccggctcgaatacggaagaatccgtcaatgatctgacattactcaagaccaaccttaacctgaaggaagtgagaagtatcggatgtggagactgttccgtggatgtgaccgtttgttcacccaaagagtgcgccagtaggggcgttaacaccgaagcagtgtcccaggtggaggcagcagtaatggccgtgccgcggactgccgatcaggatacgagcacagatctcgaacaggttcaccagttcaccaacacagaaacagcaacactcattgagagttgcaccaacacctgcctgtcaacactggacaagcagacttcaactcaaactgtggagacccggactgtggccgtgggggagggccgcgttaaggacattaacagtagtactaagacacgttccattggggtcggaaccctgctgagtggccatagcgggtttgaccgcccatctgcagtgaaaaccaaggagtccggggttgggcaaataaatataaacgacaactatcttgtcgggttgaaaatgagaacaatagcttgcggccctccgcagctgacagttgggttgactgcttctcgacggtctgtcggggtgggcgatgaccccgtcggtgaaagccttgagaacccgcagcctcaagctcccctggggatgatgaccggcctggatcattatatcgagcgtatccagaaactgctggctgagcaacaaacgctgctggctgaaaattattcggaattggccgaggcatttggcgagccccattcacagatggggagtctaaactctcagctgattagtactttgtctagcatcaattctgtgatgaaaagcgcttccaccgaggaactacgaaatccggactttcaaaaaacaagcttaggcaaaataacagggaattacttgggctatacatgtaaatgcggtgggctgcaaagcgggagtcccctaagcagccagacaagtcaacctgagcaggaagtgggtactagtgaagggaaaccaataagtagcttggacgccttccccacacaagagggcacactgagtcccgtgaacttgactgacgaccagatcgctgcgggcttgtacgcctgcacaaataatgagtcgacacttaagagcatcatgaagaagaaagacggaaataaagactcaaacggagccaagaagaacttgcagttcgtgggaattaacggagggtacgagaccacctcttcagatgacagtagcagcgacgaaagctcttcaagtgagtccgatgatgaatgcgacgtgattgagtacccactggaggaagaagaagaggaggaagacgaggatactagagggatggcagaagggcaccacgctgtgaacattgagggcctcaagtcagcccgggtagaggatgaaatgcaggtccaagaatgtgagcctgagaaggtggaaattcgggaaagatatgaactcagcgaaaagatgctgtcggcttgcaatctactcaaaaacactatcaacgaccctaaggctcttacttcaaaagacatgcgtttctgcttaaataccctgcagcacgagtggttccgcgtttcttcacaaaaatctgccataccggctatggtgggagactacattgccgcttttgaggccatcagtcctgacgtcctgcgatatgtgattaatctggctgatggaaacggcaatacagcattgcattatagtgtaagccactcaaattttgaaatcgtcaagcttttgcttgacgccgatgtttgcaatgtcgatcaccagaacaaggctggttacacaccaatcatgctggccgcactcgccgcagtggaagctgagaaagacatgcggatcgtcgaggaactctttggctgcggcgacgtgaacgcgaaagcctcacaggccggacaaactgcgctcatgctggctgtatctcacggcaggatcgatatggtgaagggcctactagcttgcggagcagatgttaatatccaagatgacgaaggttccacagcacttatgtgtgcaagtgaacatggtcatgtagaaatcgtaaaattactgttggcacagcccgggtgtaatggccatctggaagacaatgacggatctacggcactttcaatcgctctggaggccgggcacaaggacatcgcagtgctgttgtacgcacatgtcaactttgcaaaagcgcagtctcccgggactccgaggctgggccggaagacaagccctgggcccacccatagaggcagctttgactag

SEQ ID NO: 91781 - DNA, 4059 bp, Artificial Sequence
  derived and/or modified sequence
atggcccacaccaccaaggtgaacggcagcgccagcggcaaggccggggatatcttatcaggcgatcaggacaaagagcagaaggatccctatttcgtggaaaccccttacggatatcagctagatctggacttcctgaagtacgttgatgatatccagaaaggaaacacaattaagcgattaaacatacagaagagaaggaaacctagtgtcccttgtccagaaccacgaaccacttccgggcagcagggcatctggaccagtacagaaagtctttcctcgagtaattcagacgacaacaagcagtgtcctaactttctgattgctagatctcaggtgactagcaccccaatcagcaaaccacctcccccgttggaaacgagcctcccattcctgactatccctgagaacagacagctacctccaccttccccccaactccccaagcataacctgcatgtcaccaagacacttatggaaaccaggaggcgattggagcaggaaagagcaaccatgcagatgacaccaggggaattccgacgcccccgtctggcttctttcgggggtatgggaactactagcagcctgccgtcttttgtgggctctggtaatcataaccctgccaagcaccagcttcagaacgggtaccagggaaacggcgattacgggtcatatgcaccagcagcacccacaactagctcaatgggaagctcaattagacactctcccttgagctctggcattagtaccccggtaactaatgtgtctcccatgcatctgcagcatatacgggagcagatggctatcgcactcaaacgactcaaagaattagaagagcaagtgagaactattccggtgcttcaggttaagatatcagtactgcaggaagagaaaaggcagttggttagtcagttgaaaaaccagcgggccgcctctcagataaacgtctgtggcgtgaggaaaaggtcatactcagcaggcaacgcatcccagcttgaacaactctcgagggccaggagatccggcggcgagctgtacattgactatgaagaggaggagatggagaccgtggaacagagcacccagaggatcaaagagtttaggcagctcaccgcagacatgcaagccttagaacagaaaatccaggattcatcctgcgaggcatcaagcgaactccgggagaacggggaatgcagatcagttgccgtgggcgccgaagaaaacatgaatgatatagtggtgtaccacagaggttctcggtcttgtaaagacgcagccgtcggtactcttgtagagatgcgcaactgtggtgtgtcggtaactgaggccatgctgggagtgatgacagaggcagataaggagattgagctgcagcaacagaccattgagagtctgaaggaaaaaatctatcgcctggaagtgcagctcagggagacaacccacgaccgggaaatgactaaattaaagcaggaactgcaggccgccggctcgaggaagaaagtcgacaaggccaccatggcgcaacccctggtcttttctaaagtcgttgaggcagtggtacagactagagaccagatggttggctcccatatggacctggtcgatacatgcgttggaacatcagtagagaccaactccgttggaatcagttgccagccagaatgcaagaacaaggtcgtgggtccagaattgccaatgaactggtggatcgtgaaggagcgggtcgagatgcacgacaggtgcgctggccgaagcgtcgagatgtgtgacaagtccgtcagcgtcgaagtgtctgtttgcgagaccggcagtaatacagaagaatcagtgaacgatctgaccctcctgaaaactaatctgaatcttaaggaggtgaggagcattgggtgcggagattgcagcgtggatgtgaccgtatgttcacctaaagagtgcgccagccggggcgtaaacactgaggctgtgtctcaggtcgaagcagccgtgatggcagtgccccggacagctgaccaggatacaagcactgatctggaacaagttcatcagttcaccaacaccgagacggctaccttaatcgagagttgtaccaacacttgcctgagcaccctggacaagcagacatcgacccagactgtcgaaacgaggaccgtggctgttggcgaaggtcgcgtgaaggacatcaactcctccacgaaaaccaggagcattggcgttggaactttgctgtctggccactcaggattcgatcgacctagcgctgtaaaaaccaaggaaagcggcgtggggcaaattaatatcaacgataattatcttgtgggactaaagatgaggaccattgcctgcggcccaccccagctaaccgttggcctaacagcttcacgtcggtccgtaggggtgggcgatgaccccgtgggcgaatctctcgaaaatcctcaaccccaggctcccttgggtatgatgaccgggctggatcattacattgaaagaattcaaaagctgctggccgaacaacagactttgctggctgagaattactccgaactggcggaagcgtttggggaaccacactcacagatgggcagcttaaacagccagttgatatctacactgtcctccatcaatagcgtcatgaaatctgcctccactgaggaattacgtaaccctgatttccagaagactagtctgggtaagatcaccggcaattacttagggtatacttgtaagtgtggcggtctgcagtctggcagtcccctgagcagccagactagccaacccgagcaggaagtagggacgtcggaaggcaagcccattagctccctcgatgcctttccaacccaagagggcaccctgtcccctgtcaacctcaccgacgaccagatcgcggcaggcctatacgcctgtaccaacaacgagtctactctgaagtctattatgaagaagaaggacggtaacaaagatagcaacggagcgaagaaaaacctccagttcgtgggaattaatggcggctacgagacaacttctagcgatgactccagctctgatgagagtagctcaagcgagtcggacgatgaatgtgacgtaattgagtaccccctagaagaagaggaggaggaggaagacgaagatacccggggcatggccgaggggcaccacgcagtcaacatcgagggtttgaaatccgctagagtggaggacgagatgcaggttcaagaatgcgagcccgagaaagtagagatccgggaacgttacgagctttcagaaaaaatgctctcagcatgtaaccttctcaagaacacgataaatgatcctaaagctttgaccagcaaagacatgcgattctgcctcaatacactacagcacgaatggtttagagtttccagtcagaagtcagccattccagccatggtgggcgactatatagctgcattcgaagcaatcagtcccgacgttctacggtatgtaattaatctcgctgacggcaacggaaacactgccctccattattcagtgtctcacagcaactttgagattgtaaaactcctgttggatgccgatgtgtgcaacgtcgatcaccagaataaggcagggtatactcccataatgctcgccgcactggccgctgttgaagcggagaaagacatgcgtatcgtagaggagttgttcggctgcggagacgtcaatgcaaaagccagccaagccggccagacggcactaatgctcgctgtttctcacggcaggattgatatggtcaagggcctcttggcttgcggggcggacgtaaatatacaggacgacgagggttctacagcactgatgtgtgcctccgagcatggacacgttgagatcgtgaagctcctcctggcacagcctggctgtaacggacaccttgaggacaacgatgggtcaaccgcactgtctatcgctctggaagcggggcataaggacatcgccgtcttgttgtacgcccatgtgaatttcgccaaagcacagtcccccgggacacctaggttgggcaggaagacttcccctggccctacccaccgtgggagctttgactag

SEQ ID NO: 91782 - DNA, 4059 bp, Artificial Sequence
  derived and/or modified sequence
atggcccacaccaccaaggtgaacggcagcgccagcggcaaggccggggatatcctctcaggtgatcaggataaagagcagaaagacccgtacttcgtggaaactccgtacgggtatcaactggacctggattttctgaaatacgttgacgatattcagaagggaaacactattaagcggctaaatattcagaagaggcggaagcccagcgtaccctgtccagaacctcgcactacctcaggccagcagggaatatggaccagcacggaatctctgagctcgtccaatagtgatgacaataagcagtgccctaatttcttgattgcgaggagtcaggttacttcaacccccatctccaaacctccgccaccgctggaaacttctttaccttttctgactattccagagaacaggcagctgcccccgccgagcccacagctacccaagcataatcttcacgtcaccaaaacactgatggagactcgcaggcgattagagcaagaaagagcaactatgcagatgacacccggcgaattccgcaggccccggctcgcctcgttcggtgggatggggactactagctcactcccatcctttgtgggctcaggtaaccataatccggcaaagcaccagctgcaaaatggctatcaggggaatggcgactatggaagctatgcacctgcagcccctactactagctcaatgggaagtagtattcgccactcccccctatcttctgggatatccacacctgtgaccaacgtctcccccatgcaccttcagcatatacgggagcagatggctattgcgcttaaaaggctgaaagagctggaagaacaggtgaggaccatccctgtgttgcaggtcaaaatctctgtgcttcaggaggagaagcggcagcttgtttctcaattgaaaaaccaaagagctgcaagccaaattaacgtttgcggcgtgcggaaacgctcttattctgccggaaacgcgagccaactcgagcaactttctcgcgccagacgcagcgggggggaactttacattgactacgaagaagaggagatggagaccgtagaacagagcacccagcgaattaaggagttcaggcagttgaccgccgacatgcaggcattagagcagaagatccaggattccagctgcgaagcctcttccgagctgagagagaacggcgagtgtcgaagcgtggccgttggagccgaagaaaacatgaacgatatcgttgtgtatcacaggggctcccgctcgtgtaaggacgctgctgtcggaaccctggtggaaatgcgcaactgcggtgtgtcagtgactgaggcgatgcttggtgttatgaccgaggccgataaagagatcgagctccagcagcaaacaatcgaatcgctgaaagaaaagatatacaggctggaggtccagcttcgcgagactacccacgaccgagagatgaccaagcttaagcaggaactgcaggccgcgggatctcgaaaaaaggtggataaggctacaatggctcaacctctcgtattctctaaggtagtggaggccgtggtccagacgcgcgaccaaatggtgggctcacacatggatctcgttgatacatgtgtggggacttccgtggaaaccaatagtgttggaataagttgccagcccgagtgcaagaacaaggtcgtgggtccggagctgcccatgaattggtggatcgtgaaggagagagttgaaatgcacgaccggtgcgctggccgcagtgtagagatgtgtgacaagtccgtgagtgttgaagtgagcgtctgtgagaccgggtctaacacagaggaaagcgtcaatgatctgaccctcctgaaaacaaatcttaacctgaaggaggtcagaagtatcggctgtggagactgctccgtggatgtcacagtgtgcagccctaaggaatgtgcatctagaggtgtgaatacggaagccgtatctcaggtagaggccgctgttatggcagttccgcggaccgccgaccaggatacttcaaccgatctggagcaagtacatcagtttactaacactgagactgcaactttgatcgagagctgcacaaacacatgcctaagcaccctggacaagcagacaagcacccagactgtcgaaacacgtaccgtcgcagtcggagagggcagagtcaaggacataaattcaagcactaagacgcggagcattggcgtgggcacccttttgtccggccactcaggcttcgaccggccgagcgccgtaaagacaaaggagtcaggggttgggcagatcaacatcaatgacaactacctggttggcctgaagatgcgtaccattgcctgtggaccccctcagttgaccgtgggcctcaccgcatcacgccgctctgtgggcgttggagatgaccccgttggagagagcctggagaacccacaacctcaagctcccctcggtatgatgactggtttggatcactatatcgaaaggattcagaaactcctggctgagcagcagacgctcctcgctgaaaattattcggaattggccgaagcattcggggaacctcacagccagatgggcagcttgaattcgcagctcataagtacactatctagcattaactctgttatgaagtcagcctctacagaagagcttcgcaaccctgacttccagaagactagcctgggtaagattactggcaactacctggggtacacatgcaaatgcggaggactccaatcagggtcaccattatcaagccagacatcacaacctgagcaggaagttggcactagcgaaggcaagccaatctcgtcactggatgcgttcccaactcaggaaggaacattaagccctgtgaatctgacggacgatcagatcgctgctgggctgtatgcctgcaccaacaacgagagcactctgaaatccatcatgaagaaaaaagacggaaacaaagatagcaacggggccaaaaagaatttgcagtttgtgggtattaacgggggctatgagactacttcttcagacgactcaagttcagatgagagttcctccagtgaatccgacgatgagtgtgacgtgatagaataccccctggaggaggaggaagaagaagaagatgaagacaccagaggtatggccgagggccatcacgcagtgaatatcgagggcctgaagtctgctagggtcgaagacgagatgcaggtgcaggaatgcgagcctgagaaagtcgaaatccgggaacgctatgagctgtcggaaaagatgctctccgcatgtaatctcttaaagaatacaatcaacgatcctaaggccctgacaagtaaggacatgaggttttgcctgaacaccctccaacatgagtggtttagggtaagtagccaaaagtccgcgattcctgcaatggtgggagactatatagccgctttcgaagccatcagcccagacgtgctgcgctacgtgatcaatcttgccgacggcaacggaaacaccgctcttcattattctgtgtcccactccaattttgaaatcgtgaagctgctattggatgcagatgtctgcaacgtcgatcatcaaaataaggccggctatactcccatcatgcttgccgccctggccgccgtcgaagctgagaaagacatgcgcatcgtcgaggagctgttcgggtgcggcgacgtcaatgccaaggcgagccaagctggccagacagctctgatgctggcggtatctcatggcaggattgacatggtcaagggattgttagcgtgtggcgccgacgtgaatatccaagatgacgaaggctctaccgccctgatgtgcgcatctgaacatgggcatgtggaaatcgtaaagttactcctcgcccaacctggctgcaatggacacctggaagacaacgatggaagcacagccctgtccattgccttggaagctggtcacaaggatatcgctgttttgttgtacgcccatgtaaattttgccaaggctcagagccctggtacacctagactgggcaggaaaacgtcaccaggccccacacatcgggggagttttgactag

SEQ ID NO: 91783 - DNA, 2937 bp, Artificial Sequence
  derived and/or modified sequence
atggcacacacgacgaaagtcaacggtagcgcatccgggaaagctggcgacattttgtccggtgaccaggacaaggaacagaaggatccatactttgtggaaaccccctacgggtaccaactggaccttgattttctgaaatatgtcgacgacatccagaagggaaacaccataaagaggttgaatatacaaaagagaaggaagccctcggtcccttgtcccgagccaaggactacgtctggtcagcagggtatttggacctctacagagtcattgtcaagttctaactcggacgacaataaacagtgtcccaattttcttattgcaagatcccaggtgacaagtacacctatctcaaagccacccccacctctcgagacatcactgccgttccttacaatcccagaaaataggcaattgcccccaccctccccacagctgcccaagcacaacttgcacgtcactaagacattgatggagacccgccgtaggttggaacaggaacgcgctaccatgcagatgaccccgggtgaatttcggaggccccgtctcgccagttttgggggaatgggcactacgagtagcctcccctctttcgtggggtcgggtaaccacaatcccgctaagcatcagctgcagaacgggtaccagggtaatggggattacggttcctatgcaccagctgcccctactacatcttctatggggtccagcatacgccatagccccctttcttccggcatcagcaccccagtcacaaacgtgtcaccaatgcacctacagcacatcagggaacagatggctatcgcgctgaagcgcctcaaagagctggaagagcaggtccggaccatacccgtgctccaggtgaagatctccgttcttcaggaggagaagagacagctcgtgtcacagttaaaaaaccaacgcgctgcctcccagattaacgtgtgcggagtcaggaagcgcagctattctgctggaaatgcatctcagctagaacagctgagtcgggcacggagaagcggcggagagctctacatagattatgaggaggaggagatggagaccgtcgagcagtctacgcagagaatcaaggaatttcggcaactaactgccgacatgcaggcattggagcagaaaatccaggactctagttgtgaggccagtagcgagcttcgagagaatggggaatgccgctctgtggctgttggggctgaagagaacatgaacgacattgtagtctaccaccggggatcacgcagttgtaaggacgctgctgtgggcaccctagtagaaatgcgcaattgtggtgtgtccgtgactgaggcaatgctcggcgtcatgacagaagccgacaaggagatagagctgcagcaacagacaattgaatccctgaaagaaaaaatttaccggctagaagtgcagctgcgtgaaacaacccacgatcgagaaatgacaaagctaaagcaggagctgcaggccgctggaagcagaaagaaagtcgataaggcgaccatggctcagcccctggtgtttagcaaggtagttgaagccgtggtgcaaacgagggatcagatggtgggatctcacatggatttagttgatacttgtgttggtacctccgttgagaccaattccgtgggtatatcttgccagcctgagtgtaaaaacaaagtcgtcggacccgagctgcctatgaattggtggatagttaaggaacgcgtggagatgcatgacaggtgtgccggtcgcagtgttgagatgtgtgataagagcgtctccgtggaggtttccgtctgcgaaacggggagtaacacagaggagtccgttaacgatctcacattgctcaagaccaatctaaaccttaaggaggtccgcagtatcgggtgtggagactgcagtgtggatgtcaccgtttgtagtcccaaagaatgcgcctcacgtggcgtcaatactgaggctgtgtcacaggtcgaagctgccgtgatggctgttcctagaaccgcagaccaggatacatccaccgatttggagcaggtgcaccagttcaccaacactgaaactgccacgttaatcgaatcttgtactaatacgtgcctgtctaccctggataagcagacctcgacacagaccgtggaaaccagaaccgtggctgttggcgaaggcagggtgaaggatatcaattccagcacgaagacaaggagcatcggagtgggcaccctattgtctgggcatagcggctttgaccgaccatctgctgtcaaaacgaaagagtctggcgtgggccagatcaatattaatgataattaccttgtcggcttaaagatgcgcacaattgcctgcggacctccacaactgaccgtaggactaaccgcgtccagaagaagtgtgggagtgggtgatgaccccgtgggcgagagccttgagaaccctcagccccaggccccactgggaatgatgacaggactcgatcattatatagaaaggatccagaaattgttagcggagcagcagactctgctcgctgagaactattccgaactggccgaggccttcggagagccacactctcagatgggttctctgaattcccagctgattagcacccttagcagcattaacagcgttatgaagagcgccagcacagaggagttaagaaatcccgatttccaaaagacatcactcggaaagataacggggaattatctcggttacacttgtaagtgtgggggattacagagcggcagccctttaagctctcagacctcccagccagaacaggaagtgggtacaagtgagggcaagcctatttcctccctggatgccttccccacacaagaagggactctctctcctgtaaacctgactgacgatcagatcgccgcaggcctgtatgggaatttctcgcactcccaatctctggctagcgggttctag

SEQ ID NO: 91784 - DNA, 3585 bp, Artificial Sequence
  derived and/or modified sequence
atggagactcgcagaaggctggagcaagaacgggctaccatgcagatgacacccggtgagttcaggaggcccaggctggcaagttttggaggcatgggaacaacctcgtccctccccagttttgtaggctctggtaaccataaccccgcaaaacatcagctgcagaatggctatcagggcaacggcgactatgggtcatacgcccctgccgcaccaacaaccagcagcatgggatcctcgatcaggcactcgcctctgtctagtggcatctccacccccgtcaccaacgtgagccctatgcatcttcaacatatacgcgagcagatggcgattgcccttaaacggctaaaggagctcgaggaacaagttcgcaccatccctgttcttcaggtaaaaattagtgtgctccaggaggaaaagcggcagctagtctcacagcttaagaaccagcgggctgcctcccagattaacgtttgcggggtaaggaaacgttcatatagtgctggcaacgcctcacagctcgagcagttaagtcgagcccgtcggagtgggggtgaactatatatcgactatgaagaggaggagatggaaaccgtcgaacagtccacccagcggatcaaagaattccgccagttgacagccgacatgcaggccctggagcaaaagattcaagattcctcgtgcgaggcatcgtccgagctgcgagagaacggggagtgcaggagtgttgccgttggagccgaagagaatatgaacgacatcgtcgtttatcaccgcggatcccggagttgcaaagacgccgcagtcgggaccttggtcgaaatgaggaattgcggcgtctccgtcaccgaggcaatgctaggggtgatgaccgaagcagacaaggagatagagctgcaacaacagacgattgaatcccttaaggaaaaaatttaccggttggaggttcagctgagggaaaccacccacgacagagaaatgacaaaactgaaacaagaactccaagccgctggctcccgaaaaaaagtggataaagcgactatggcccagcccctcgtgttcagcaaagtagtggaggctgtagtccaaacaagagaccaaatggttggctctcatatggacctagtagatacatgcgtgggaacttccgtagagaccaattcagtcggcataagctgccagcccgagtgtaagaacaaggtggttggacccgaactgcccatgaactggtggattgtgaaagagagggttgagatgcacgatagatgtgcaggccgtagcgtggaaatgtgcgacaagagtgtgtccgtggaggtctctgtgtgtgagacagggagtaataccgaagaaagcgtcaatgatctcacactactcaagacaaacctgaacctgaaggaggtacggtctatcggatgcggcgactgttcagtggacgtaaccgtgtgctctcctaaagagtgtgcctcccgcggtgtgaatacggaggcagtgtcccaagttgaagcagctgtaatggcagtaccaagaaccgccgatcaggacactagcaccgatctggaacaagtacaccaattcacaaataccgagacagccaccctgatagaatcctgtaccaatacgtgtttgtcaacactagataagcaaacctcaacacagacagtggagacgagaacggtagctgttggagaaggcagagtcaaagatattaactcaagcacaaagacccggtccataggggtcggcactctcctgagtggccattccgggttcgacaggccaagcgcagttaagaccaaagaatctggcgtggggcaaatcaacataaacgacaattatttagttggattgaagatgaggaccatcgcgtgtggcccaccacagctgactgtgggtctaacagcaagtcgtagatcagtcggggtgggcgacgatcccgtgggcgagtcgctcgagaacccccagccccaggctcctctgggcatgatgactggcctcgatcattatattgagaggatccagaaattgttggccgaacaacagaccctgttggcagagaattattctgagctggcggaggctttcggagaaccccattcgcagatggggagcctgaatagccaactgattagtactctaagctcaatcaattccgttatgaagagtgcctctactgaagagctcagaaaccctgatttccagaaaacatccctaggcaagatcaccgggaactatttgggctacacctgtaagtgtggcggtttacaatccggctcccccctgtctagccagacatcccagccagaacaggaagtaggcacctctgagggcaagcctatttcttccctggacgcttttccgacccaagagggaacgctctccccagtcaaccttacagacgatcagattgccgctgggctctacgcctgtacaaataatgagagcaccttgaaaagtataatgaaaaaaaaggacgggaataaggacagcaatggcgcaaaaaagaacctccagttcgtggggattaatggcggatacgaaactaccagctcagacgactcttcctccgacgagtccagttctagcgaatccgacgacgaatgcgatgtgatcgaatatccattggaagaggaagaggaagaggaggacgaggatacccgcggtatggccgaggggcaccacgctgtgaacattgagggactgaagagtgcacgggtggaagacgagatgcaggtccaggaatgcgaacctgaaaaggttgagataagggagagatacgaactgagcgagaaaatgctgagtgcatgcaacctgctgaaaaatactattaatgatcctaaggccctaacgagtaaggatatgcggttttgtctaaacactctccagcatgaatggttcagagtgagctcacagaagtccgccatcccagcgatggtcggagactacatcgccgcatttgaagcgatctccccagatgtgctgcggtacgtcattaacctggctgacggtaacggaaatactgcgttacactactcagtcagccatagcaacttcgagattgtaaagctgttactcgacgctgatgtgtgtaacgtggaccaccagaataaggcaggctatacaccaatcatgctggctgcactggccgctgtagaagccgaaaaagacatgcggattgtggaggagctgtttgggtgcggtgacgtcaatgccaaggccagtcaagccggtcagacggccctgatgctggctgtaagccacggacgcatagatatggttaagggactcctggcttgcggcgctgacgtaaacatccaggacgatgaagggagtaccgcgttgatgtgcgcatccgagcatggacacgtcgagatcgtgaagctgcttctggcacagcctggatgtaatggtcatctggaggacaatgacggcagtaccgcactgtccatcgcactggaggctggccacaaagatatagccgtgctgttatatgcccacgtcaacttcgccaaagcccagagccccggaacccctcgtctcgggagaaagacgtccccaggacctacacatcgcggatcgttcgattag

SEQ ID NO: 91785 - DNA, 4059 bp, Artificial Sequence
  derived and/or modified sequence
atggcccacacaaccaaggttaacggtagcgcctctgggaaggccggtgacatcttatctggggatcaagataaagagcaaaaggatccttacttcgtggagaccccctacggctaccagctggacctcgattttctaaagtatgtcgacgatatccagaagggcaacaccatcaagcgtcttaatatccaaaagcggaggaaacctagcgttccctgcccggaacctaggactacttctgggcagcagggcatctggacttctacagagtctcttagctctagcaactccgacgataataaacaatgtcctaactttctgattgccaggtcccaggtaacctcaacacctatatctaagccgcctcccccactcgaaacaagcttgcctttcctgactattccagagaatcgccaactcccacccccatccccacaactgcccaagcataatctgcacgtgactaagactctgatggagactaggcgacggttggagcaggagagggctaccatgcaaatgacgccaggtgagtttagaagacccaggttggcatcatttggcggtatgggcacaacaagttctttaccatccttcgtcgggagtggaaaccacaatcctgctaaacaccaattgcagaatgggtatcaaggcaacggggactatggctcttatgcccctgctgctccgaccacgtccagcatggggagcagcatccgccattcaccgcttagttcaggcataagcacacccgttactaacgtcagtcctatgcacctgcagcacatacgcgaacaaatggccatagctctgaagcgactcaaggaattggaagagcaggtgagaacaattcctgtgcttcaagtgaagatcagcgtcctgcaggaagagaagcggcagcttgtctcccagttgaaaaaccagagggctgcttctcagattaatgtgtgcggggtgcgtaaaagatcttattcagctggcaacgcctctcagctggagcaactctcaagagctcgtagatccggaggggaattatacattgattatgaggaggaagaaatggaaaccgtggagcaatcgactcaacggattaaagaattcaggcagttgactgcagacatgcaggccttagaacagaagatacaggattcaagttgcgaagccagctctgagttaagggagaacggagaatgcagatctgtggccgtcggtgccgaagaaaatatgaacgacatcgtggtttaccacagggggtcccgctcctgtaaagacgccgcagtgggtacgctcgtagaaatgcgcaactgcggggtttctgtcacagaggccatgctaggtgtgatgaccgaggcagataaggagatcgaactgcaacagcagactattgagagtctaaaggagaagatctacagactggaggttcagctaagggagactacacatgatagagagatgacgaagctgaaacaggagctgcaggcggctggtagcaggaaaaaggtggataaagccactatggcccagccactggtctttagcaaagtcgtggaggccgtagtccaaacgcgtgatcagatggtgggtagccacatggatctagtagatacttgcgtggggacctcggttgagaccaattccgttggtatcagctgtcagcctgaatgcaaaaataaggtcgtcgggcctgagctacccatgaactggtggatcgtgaaagaaagggtggaaatgcatgatagatgcgccggaagatccgtagagatgtgcgacaaaagcgtgtctgttgaagtaagcgtctgcgaaaccggcagtaatactgaagaatcagtgaatgatcttacccttctgaagactaacctcaacctgaaagaggtgcggagtatcggctgcggagactgctctgttgatgtgacagtgtgttcccctaaggagtgcgctagtcggggagtcaacaccgaagcggtgagtcaggttgaagccgctgttatggccgtccccaggacagcagatcaggacacttcaaccgacctggagcaggtgcatcagttcacgaacactgagactgccactctgatcgagagctgtaccaacacatgtttgtccaccttggacaaacagacatcaacccaaactgtggagacacgaaccgtggctgtaggcgaaggtcgggtgaaggacattaactcgtccactaagaccagaagcattggggtaggtaccttgctgagcgggcactccggatttgaccgaccctcagcggtcaagaccaaggagtcaggagtcggacagataaacatcaatgacaactacctggtggggctaaaaatgcgcaccatagcttgcggccctcctcaacttaccgtgggcctgaccgcctcgcggaggtccgtgggtgtgggcgacgaccctgtgggcgagtcactggagaatccccagccacaggcacctctggggatgatgaccgggctggaccattacattgagaggatacaaaaactgctggcagagcaacagacattgctggccgaaaactatagtgagctcgctgaagccttcggtgaaccccacagtcagatgggttcgttgaactcccagcttatttcgaccctatctagtattaactcagtaatgaagtcagcatccacagaggagctgcggaatcccgattttcagaaaacatctctcggaaagattacaggcaactatctggggtacacgtgtaagtgtgggggactgcagagcggctcacccctgtccagtcagacctcccaaccagaacaggaagtgggtacttcggaaggcaaacctatttctagcctagatgctttccccacccaggaggggactctcagtcctgtcaacctgaccgatgatcagattgcagctggtctgtatgcttgcaccaacaacgaatccacacttaagagcattatgaagaagaaggacgggaacaaagacagtaacggagcaaaaaagaacctgcaattcgtgggaatcaacggcggttacgagaccacgagctcggacgattccagcagtgacgaaagcagtagctcagagtcagatgatgagtgcgacgttattgagtatccactcgaagaggaggaggaggaagaggatgaggataccaggggaatggccgaaggccatcacgcggtgaacatcgagggcttaaagagtgcgagggtagaggacgaaatgcaagtgcaagagtgcgagccagaaaaggtagagattcgtgagcggtatgaactgagtgagaaaatgctgtctgcatgcaatttgctcaagaatacaatcaacgaccccaaggctcttacgagcaaggatatgcgcttttgtctcaacacactccagcacgagtggttcagggtcagctctcagaaaagcgcaatcccggcaatggtgggggactacatagccgcattcgaagctataagccccgacgttctgcggtatgtgatcaatctcgcagacggaaatggaaataccgcactgcactacagcgtgtcccactcgaacttcgaaatcgtaaaattgttgttagatgccgatgtgtgcaatgttgatcaccagaacaaggccggatacacacccattatgctggctgcacttgccgctgtcgaagcagagaaagacatgcggattgtggaagaactattcgggtgcggcgacgtcaatgctaaagcatcccaggccggacagacggcccttatgctcgccgtctctcatggtcggattgatatggtcaaaggattgctcgcatgtggcgctgacgtcaatatccaagatgacgagggatctaccgcacttatgtgcgcctcagagcatgggcatgtggagatcgtgaaactgctgctggcacaaccaggctgcaacggccatcttgaggataatgacggatccactgctttatctattgcgctggaggccggacataaagacatagctgtcctcctgtacgcccatgtcaatttcgctaaagcgcaaagtccagggaccccaaggcttggcagaaaaactagcccaggcccaacccatcgagggtcgttcgattag

SEQ ID NO: 91786 - DNA, 4059 bp, Artificial Sequence
  derived and/or modified sequence
atggcgcataccaccaaagtaaacggcagcgcctccggcaaagccggagatatcctgagcggggaccaggacaaagaacagaaagatccatacttcgtcgagactccgtacggatatcagctggacctagactttcttaagtacgtggatgacatccaaaaggggaacactatcaagcgactgaatatacagaaacgcagaaagccttccgtgccctgcccggaaccgagaacaacttctggacaacaaggcatctggacttccaccgaaagccttagctcatccaattctgatgacaataagcagtgccccaactttctgatagccaggagccaggttacaagcacacctataagcaaacctccgccacctcttgagacttcactcccgtttctgaccattccagaaaacagacagcttccccctcccagccctcagttgcccaagcataacctccacgtgacaaagaccttaatggagaccagaagacgcctagagcaggagcgcgctacgatgcagatgacacctggagagtttcgcaggccgcgtctggcctctttcgggggtatgggaacgaccagctcactccctagctttgtcgggtccggtaatcataacccagccaaacatcaacttcagaacggctaccaggggaacggcgactacggaagctatgcccctgctgctcccaccacctcaagcatgggcagtagcattcggcatagtcccctgagttccggcatctcaacgcccgtaactaatgtgagccctatgcaccttcagcatataagagagcagatggccattgcccttaaaagactgaaggagctcgaagagcaggtacgcacaataccagttctgcaggtgaagatatcagtcttgcaggaagagaaaaggcagctggtgtctcagctaaagaatcagagagccgcatcacaaatcaacgtatgcggagtgaggaagagatcatactcggccggaaacgccagtcagctagagcagctctcccgggcacggcgaagcggcggagaattgtacatcgattacgaggaagaagagatggaaacggtcgaacagtcaacccagagaattaaggaattcagacagctgacagctgacatgcaggccctcgaacagaagatccaggacagtagctgcgaggcaagctctgaactgagggagaacggcgaatgccgttccgtggcagttggtgccgaagagaacatgaatgacatagtggtgtaccatcgaggatcacgtagttgcaaagacgctgctgtgggcacattggtagagatgcgaaattgcggcgtttctgtgactgaggctatgctcggcgtcatgacagaggcagacaaggagattgaactccagcaacagactattgagtcccttaaggaaaagatttacagattggaagtgcagctgcgggagaccacgcatgatcgcgaaatgacaaagttaaagcaagagctgcaggccgctggctcccgcaagaaagtggacaaagccaccatggcgcagcccttggttttttcgaaggtcgtagaggcggttgtacagacccgtgaccagatggtcggcagccacatggacctggtggatacatgtgtggggacatctgtagagaccaattccgtgggtattagctgtcaacccgaatgtaaaaataaggtcgtcggcccagaactgccaatgaactggtggatagtaaaggaacgagtggaaatgcacgaccggtgtgccggacgatccgtagagatgtgtgataaatctgtcagtgttgaagttagcgtatgcgagactgggagcaataccgaggagtccgttaatgacctgaccctgttaaaaaccaacctgaacctcaaggaagttaggagtatagggtgtggagattgcagcgtggatgtgaccgtgtgtagtcccaaagagtgcgcaagcagaggagtcaataccgaagcagtatctcaagtagaagccgctgtgatggcggtccctcggaccgccgaccaagacaccagtaccgatctggagcaggtgcaccaatttaccaacactgagacagcgaccctcatcgagagctgcaccaacacatgcctatcaacgctggataagcagacatccacccagaccgtggaaacacgcaccgtagccgtcggagagggccgtgtcaaggacatcaatagtagcacaaagacacggtccattggtgtagggacactcctgagcggtcattctggatttgaccggccatcggccgtgaagactaaagagtctggagtcgggcagattaacattaatgacaactaccttgtgggactcaagatgcgtacaatcgcttgcgggcctccccagctaaccgtcggcctgacagcttccagaagaagcgtcggggtcggggacgaccctgttggagagagtctggagaacccccaaccacaggccccacttgggatgatgacgggtctcgatcactacattgaaagaatacagaaactcttggctgagcagcagacactgcttgctgaaaactactccgagttggccgaggctttcggtgagccccactctcaaatgggtagcctcaatagtcagctgattagcaccctttcaagcattaacagcgttatgaagtctgcatccactgaagaactgaggaatcccgacttccagaaaacttcactcggcaagattaccgggaattacttgggatatacatgtaagtgcggcggactccaatccggaagtcctctgagttcacagacaagccagcccgaacaagaagtgggtacttctgagggcaagccgatatccagtctggacgccttcccaacccaggagggtacactgtcccccgttaatctaaccgatgatcagattgcagccggactttatgcatgcaccaacaatgagtcgacactaaagtcaattatgaagaaaaaagacgggaataaggactctaatggagcaaagaagaatctgcagtttgtcggcattaacggaggatatgagactacctcatccgatgacagcagctcagatgagtcaagcagttctgagtcagacgacgagtgcgacgttatcgaatatcctctggaagaggaagaggaggaggaggacgaagacacacgtggcatggctgagggacaccatgccgtaaatatagagggtctgaagagcgccagagtcgaagatgagatgcaggtgcaagagtgcgagcctgaaaaggtcgaaattcgtgaacgttatgaactgagtgagaaaatgctgtctgcgtgcaacctactgaagaacaccatcaacgatcctaaagcgctgactagtaaggatatgaggttttgcctcaacactctccagcatgaatggttccgggtgtcctcacagaagtctgccattcctgctatggtgggcgactatatcgccgcattcgaagcaatctcacctgacgtgttgaggtatgtaataaacctggctgacggaaacggtaatacggccctgcattacagcgtgtctcacagcaacttcgagattgtgaaactgctgctggacgctgacgtatgcaatgtggaccaccaaaataaggctggatatactcccattatgttggccgcactagcagccgtcgaagcagaaaaagacatgcggattgttgaggagttgtttgggtgcggagacgtaaatgccaaggcctcacaggcagggcagacagccctgatgctggctgtgtctcacggcagaattgatatggttaaagggttactcgcttgcggcgcagacgtaaacatccaggatgacgaagggtccaccgcacttatgtgtgccagtgagcatggccatgtggagattgtgaaattgctattggcacagccaggatgcaacggacacctggaggacaatgacggatctacggctctatcaattgcactggaagccggtcacaaggatattgctgtgttattgtatgctcacgtgaactttgccaaggcccaaagccccggaacccccagactcggtagaaagaccagtccagggccaacccatagaggtagctttgactag

SEQ ID NO: 91787 - DNA, 447 bp, Artificial Sequence
  derived and/or modified sequence
atgttctcagaacaggctgcccagagagcccatactctcctcagtcctccatcggccaataatgcaacattcgctagagtgcccgtcgcaacttacaccaactctagtcagcccttcaggctgggtgagaggagcttttcccggcaatatgcccacatttacgcaactagactcatccaaatgcggcctttcctggaaaacagagcccagcaacattggggctcaggcgttggggtcaaaaagctttgcgagctgcagcctgaggagaaatgctgtgtagtggggacccttttcaaggccatgccactgcaaccatctatcctcagagaagtgtcagaggagcacaacctcttgccacagccacctaggagcaagtatatacatccggacgatgaactagtgctggaagacgagctgcagcggatcaaactcaaagggaccatttag

SEQ ID NO: 91788 - DNA, 663 bp, Artificial Sequence
  derived and/or modified sequence
atgtttagtgagcaggccgcccagagagctcacaccctgcttagccccccatcagcgaacaatgctacatttgctagagtgcccgtggccacttatacgaactcatcacagccatttaggctcggcgaacgctcattttcgcggcagtacgctcacatctacgccactcgtctgattcagatgaggccattcctggagaatcgcgcccagcagcattgggggtcaggggtcggagttaagaaattgtgcgagttgcagcctgaggagaaatgctgcgtggtcggaacgctattcaaagctatgcctctgcaaccaagcattctgcgtgaggtgtcggaagagcacaacctgctgcctcagccgccacgatctaaatatatccatccagatgacgaattagtgctcgaagatgagctacagcggattaagcttaaaggcacaatcgacgtgagcaaacttgtcacaggcaccgtcctggcagtattcggttctgtgagggatgatgggaagtttttggtggaggactactgtttcgccgaccttgcacctcaaaaaccagcccctccactggataccgatcgatttgtgctcctggtgagcggattagggctagggggcggaggcggagaaagcctccttgggacccagcttttggtggactag

SEQ ID NO: 91789 - DNA, 468 bp, Artificial Sequence
  derived and/or modified sequence
atgttctccgaacaagctgctcagagagcacatactttgttgtctccaccctcggcaaacaatgccacattcgccagagtcccagtggctacgtataccaactcttcccagcccttccgtctcggcgagcgctcatttagtaggcaatatgctcatatttatgccactaggcttatccaaatgcggccgttccttgagaatagagcacaacagcattggggatctggggttggagtaaaaaagctctgcgaactacagcccgaagaaaaatgttgcgtggtcggtaccctctttaaagccatgcctttgcagccttctatcctgcgcgaggtcagcgaagagcacaacctgttaccccaacctccacggtccaaatatatccaccccgatgacgaactggttctcgaagacgagctccagaggatcaagttaaaagggactattgatgtatccaaattagttacctag

SEQ ID NO: 91790 - DNA, 447 bp, Artificial Sequence
  derived and/or modified sequence
atgttttctgagcaggccgcccagagggcccacaccctgctgagcccccccagcgccaacaatgccacctttgcccgggtgcctgtggccacctacaccaacagcagccagcccttccggctgggggagaggagcttcagccggcagtatgcccacatctatgccaccaggctcatccagatgaggcccttcctggagaacagagcccagcagcactggggcagcggcgtgggcgtgaagaagctgtgtgagctgcagcctgaggagaagtgctgcgtggtgggcaccctcttcaaggccatgcccctgcagcccagcatcctgcgggaggtgtctgaggagcacaacctgctgccccagcccccaagaagcaagtacatccacccagatgatgagctggtgctggaggatgagctgcagaggatcaagctgaagggcaccatctag

SEQ ID NO: 91791 - DNA, 663 bp, Artificial Sequence
  derived and/or modified sequence
atgttttctgagcaggccgcccagagggcccacaccctgctgagcccccccagcgccaacaatgccacctttgcccgggtgcctgtggccacctacaccaacagcagccagcccttccggctgggggagaggagcttcagccggcagtatgcccacatctatgccaccaggctcatccagatgaggcccttcctggagaacagagcccagcagcactggggcagcggcgtgggcgtgaagaagctgtgtgagctgcagcctgaggagaagtgctgcgtggtgggcaccctcttcaaggccatgcccctgcagcccagcatcctgcgggaggtgtctgaggagcacaacctgctgccccagcccccaagaagcaagtacatccacccagatgatgagctggtgctggaggatgagctgcagaggatcaagctgaagggcaccattgatgtgtccaagctggtgactggaacagtgctggccgtgtttggatctgtgagagatgatggcaagttcctggtggaggactactgctttgctgacctggccccccagaagccagccccacccctggacacagacagatttgtgctgctggtgtctggcctgggcctgggcggcggcggcggggagagcctgctgggcacccagctgctggtggactag

SEQ ID NO: 91792 - DNA, 468 bp, Artificial Sequence
  derived and/or modified sequence
atgttttctgagcaggccgcccagagggcccacaccctgctgagcccccccagcgccaacaatgccacctttgcccgggtgcctgtggccacctacaccaacagcagccagcccttccggctgggggagaggagcttcagccggcagtatgcccacatctatgccaccaggctcatccagatgaggcccttcctggagaacagagcccagcagcactggggcagcggcgtgggcgtgaagaagctgtgtgagctgcagcctgaggagaagtgctgcgtggtgggcaccctcttcaaggccatgcccctgcagcccagcatcctgcgggaggtgtctgaggagcacaacctgctgccccagcccccaagaagcaagtacatccacccagatgatgagctggtgctggaggatgagctgcagaggatcaagctgaagggcaccattgatgtgtccaagctggtgacctag

SEQ ID NO: 91793 - DNA, 447 bp, Artificial Sequence
  derived and/or modified sequence
atgttcagcgagcaggccgcccagcgggcccacaccctgctgagccccccctccgctaataacgccactttcgcaagagtgcccgtggcgacatatacgaactcctctcaaccattccgactcggcgagaggtccttcagtcgccagtatgcacatatatatgcaactcgactgatccagatgaggccgttcttagagaacagggcacaacagcactggggcagtggcgtgggggttaagaaattgtgtgagctccaacccgaggagaagtgttgcgtggttgggactctgtttaaagcaatgccactgcaaccctctattctcagggaagtgagcgaagagcataacttgctcccccaaccaccacggtccaaatatatccatccagatgacgaactagtcctggaagatgagcttcagaggatcaaactgaagggcacaatatag

SEQ ID NO: 91794 - DNA, 663 bp, Artificial Sequence
  derived and/or modified sequence
atgttcagcgagcaggccgcccagcgggcccacaccctgctgagccccccatcagccaacaatgcaacctttgcacgggtgccggttgcaacctacaccaacagctcacagcccttccgtcttggcgaacggtctttttctcggcagtatgcccacatctacgcgactcgactgatccaaatgcgccctttcctcgagaaccgcgcacagcagcattggggctctggagtgggagtgaagaagctgtgtgaattgcagcccgaggagaagtgctgtgtggttgggacactgtttaaggcaatgcctctccagccctctattctcagagaggtgtcagaagagcacaacctgctcccccagcctcccagatctaagtatatccatcccgacgacgagctagtgcttgaggacgagcttcagcgtatcaaattgaagggcactattgatgtctctaagctcgtgacaggaacggtgctggctgtatttggatcagtgcgggatgacggaaagtttttggtggaagactactgtttcgctgatctcgccccacaaaagccagccccaccgctggatacggatcgcttcgtgttgttggtctcaggacttggattgggcggaggcggcggcgagtccctgctaggcactcagctcctcgtcgattag

SEQ ID NO: 91795 - DNA, 468 bp, Artificial Sequence
  derived and/or modified sequence
atgttcagcgagcaggccgcccagcgggcccacaccctgctgagcccccccagtgctaacaacgctacttttgctagggtccccgtggcaacttacaccaacagttcccagccctttagactgggtgagcggtcatttagtcggcaatacgcccacatctatgcgactaggctaatccaaatgagaccattcctggaaaaccgcgctcagcagcattggggctctggggtgggcgtgaagaagctgtgtgaacttcagccggaagagaagtgctgtgtcgtcggaactctgttcaaagccatgcctctgcaaccctctattttgagagaagtgagtgaggagcataatctgcttccacagccccctcggtccaaatacattcaccctgatgatgagctggtgctggaggacgagctccagcggataaagctgaagggcacaatcgatgtttcaaaattggttacgtag

SEQ ID NO: 91796 - DNA, 447 bp, Artificial Sequence
  derived and/or modified sequence
atgttcagtgagcaggctgcccagagagcgcatactctactgtcaccgcctagtgctaataatgcgacgttcgcaagggttcccgtggctacctacaccaattcatcccaaccctttagacttggggagcgaagcttcagccggcagtatgctcacatttatgccaccaggctgattcagatgcgaccctttctcgagaatcgagcccagcagcattgggggtcaggagtaggagtgaagaaactttgtgagctacagcccgaggagaagtgctgtgttgttgggactctgtttaaggccatgcccctgcagccctccatcttacgtgaggtttccgaagagcataacctcttgcctcagccacctcgatccaagtacatacaccccgatgacgagctggtcctggaggatgaactacagcgaatcaagctgaagggcacaatctag

SEQ ID NO: 91797 - DNA, 663 bp, Artificial Sequence
  derived and/or modified sequence
atgttttcagaacaggcagcgcagagggcacacactctcctgtctccaccttcggccaataacgcgacattcgctcgcgttccagtggccacctatactaattcttcccagccttttagactcggcgaacggtcatttagccgacagtatgcacatatctacgcaactaggttgatccagatgaggccatttctggagaaccgagcccagcaacactggggctctggtgtgggagttaaaaaattgtgtgagctgcagccagaagagaaatgttgcgttgtgggtacactgtttaaagctatgcccttgcaaccatctatactgcgggaggtgtctgaggagcataatttactgcctcagccccctcgctccaagtacattcacccggacgacgagttggtgctggaggacgagttgcaacgcattaagctgaaggggactatcgacgtgtcaaagctcgtaaccggcaccgtcctagccgtatttggctctgttcgtgatgatggtaagttcctggtggaggactattgctttgcagacctcgctccgcaaaagccagcccctcccttagacaccgaccgattcgttctactggttagtggcttagggctggggggagggggaggagaatccctattggggacacagttgctggtcgattag

SEQ ID NO: 91798 - DNA, 468 bp, Artificial Sequence
  derived and/or modified sequence
atgttcagcgagcaggccgcacaacgcgcacacactctccttagccccccatcagctaataacgccaccttcgcacgcgtgccagtcgctacctacactaacagcagtcaaccttttcgcttaggagaaagaagtttctcacggcagtatgctcacatttacgccacgcggttaatccagatgcggccatttctggaaaacagggcacaacagcattggggctctggggtaggtgtgaaaaaactgtgcgagctacagcccgaggaaaagtgttgtgtggtaggaactctgtttaaggccatgcccctgcaaccgtctatactgagagaagtgtctgaggaacataaccttctgccacagcctcctcgcagtaagtatatacaccctgatgacgagctcgttttggaggatgaattacaacgcatcaagctgaagggaaccattgatgtgagcaaactggtgacctag

SEQ ID NO: 91799 - DNA, 447 bp, Artificial Sequence
  derived and/or modified sequence
atgttcagcgagcaggccgcccagagagcccacaccctgctgagcccccccagcgccaacaacgccaccttcgccagagtgcccgtggccacctacaccaacagcagccagcccttcagactgggcgagagaagcttcagcagacagtacgcccacatctacgccaccagactgatccagatgagacccttcctggagaacagagcccagcagcactggggcagcggcgtgggcgtgaagaagctgtgcgagctgcagcccgaggagaagtgctgcgtggtgggcaccctgttcaaggccatgcccctgcagcccagcatcctgagagaggtgagcgaggagcacaacctgctgccccagccccccagaagcaagtacatccaccccgacgacgagctggtgctggaggacgagctgcagagaatcaagctgaagggcaccatctag

SEQ ID NO: 91800 - DNA, 663 bp, Artificial Sequence
  derived and/or modified sequence
atgttcagcgagcaggccgcccagagagcccacaccctgctgagcccccccagcgccaacaacgccaccttcgccagagtgcccgtggccacctacaccaacagcagccagcccttcagactgggcgagagaagcttcagcagacagtacgcccacatctacgccaccagactgatccagatgagacccttcctggagaacagagcccagcagcactggggcagcggcgtgggcgtgaagaagctgtgcgagctgcagcccgaggagaagtgctgcgtggtgggcaccctgttcaaggccatgcccctgcagcccagcatcctgagagaggtgagcgaggagcacaacctgctgccccagccccccagaagcaagtacatccaccccgacgacgagctggtgctggaggacgagctgcagagaatcaagctgaagggcaccatcgacgtgagcaagctggtgaccggcaccgtgctggccgtgttcggcagcgtgagagacgacggcaagttcctggtggaggactactgcttcgccgacctggccccccagaagcccgccccccccctggacaccgacagattcgtgctgctggtgagcggcctgggcctgggcggcggcggcggcgagagcctgctgggcacccagctgctggtggactag

SEQ ID NO: 91801 - DNA, 468 bp, Artificial Sequence
  derived and/or modified sequence
atgttcagcgagcaggccgcccagagagcccacaccctgctgagcccccccagcgccaacaacgccaccttcgccagagtgcccgtggccacctacaccaacagcagccagcccttcagactgggcgagagaagcttcagcagacagtacgcccacatctacgccaccagactgatccagatgagacccttcctggagaacagagcccagcagcactggggcagcggcgtgggcgtgaagaagctgtgcgagctgcagcccgaggagaagtgctgcgtggtgggcaccctgttcaaggccatgcccctgcagcccagcatcctgagagaggtgagcgaggagcacaacctgctgccccagccccccagaagcaagtacatccaccccgacgacgagctggtgctggaggacgagctgcagagaatcaagctgaagggcaccatcgacgtgagcaagctggtgacctag

SEQ ID NO: 91802 - protein, 180 aa, Artificial Sequence
  derived and/or modified sequence
MQYGGAPGGPAFPGQTQDPLYGYFAAVAGQDGQIDADELQRCLTQSGIAGGYKPFNLETCRLMVSMLDRDMSGTMGFNEFKELWAVLNGWRQHFISFDTDRSGTVDPQELQKALTTMGFRLSPQAVNSIAKRYSTNGKITFDDYIACCVKLRALTDSFRRRDTAQQGVVNFPYDDVSLRN

SEQ ID NO: 91803 - DNA, 543 bp, Artificial Sequence
  derived and/or modified sequence
atgcagtacggcggcgcccccggcggccccgccttccccggccagacccaggaccccctgtacggctacttcgccgccgtggccggccaggacggccagatcgacgccgacgagctgcagagatgcctgacccagagcggcatcgccggcggctacaagcccttcaacctggagacctgcagactgatggtgagcatgctggacagagacatgagcggcaccatgggcttcaacgagttcaaggagctgtgggccgtgctgaacggctggagacagcacttcatcagcttcgacaccgacagaagcggcaccgtggacccccaggagctgcagaaggccctgaccaccatgggcttcagactgagcccccaggccgtgaacagcatcgccaagagatacagcaccaacggcaagatcaccttcgacgactacatcgcctgctgcgtgaagctgagagccctgaccgacagcttcagaagaagagacaccgcccagcagggcgtggtgaacttcccctacgacgacgtgagcctgagaaactag

SEQ ID NO: 91804 - DNA, 543 bp, Artificial Sequence
  derived and/or modified sequence
atgcagtacggcggtgcccccgggggtccagccttcccaggtcagactcaagacccattatatggatacttcgccgccgtcgcaggtcaagacggccagattgacgccgatgagctgcaacgctgcctaacacaatctggaattgcaggcgggtataaaccctttaacctcgaaacttgtagactcatggtgtccatgttggatagagacatgagcgggacaatgggttttaatgagttcaaagagctgtgggctgtgctgaacgggtggcggcagcactttatatcatttgatactgatcggagtggaaccgtggatccccaggagctgcaaaaggccctgaccaccatggggtttagacttagcccccaggcggtcaacagtattgccaaaagatacagcacaaacggaaagatcacctttgatgactacatcgcctgctgcgtaaagctgcgtgcccttaccgattcttttcgcagaagggacacagcccagcaaggcgttgtgaattttccatacgatgacgtatctctgcgcaattag

SEQ ID NO: 91805 - DNA, 543 bp, Artificial Sequence
  derived and/or modified sequence
atgcagtatggaggagcccctgggggccctgccttccctggccagacccaggaccccctgtatggctactttgctgctgtggccggccaggacggccagattgatgctgatgagctgcagcgctgcctgacccagagcggcattgctgggggctacaagcccttcaacctggagacctgccgcctgatggtgtccatgctggaccgggacatgagcggcaccatgggcttcaatgagttcaaggagctgtgggccgtgctgaatggctggaggcagcacttcatcagctttgacacagacaggagcggcaccgtggacccccaggagctgcagaaggccctgaccaccatgggcttccggctgagcccccaggccgtgaacagcatcgccaagcgctacagcaccaacgggaagatcacctttgatgactacatcgcctgctgcgtgaagctgcgggccctgacagacagcttcagaagaagagacacagcccagcagggcgtggtgaacttcccctatgatgatgtgtccctgagaaattag

SEQ ID NO: 91806 - DNA, 543 bp, Artificial Sequence
  derived and/or modified sequence
atgcagtacggcggcgcccccggcggccccgccttccccggccagacgcaggatccgctgtacggttacttcgctgcggtcgcgggccaagatgggcagattgacgccgacgaactgcagagatgccttacgcagagcggcatcgccggtggctataagccattcaacctcgagacttgtagattgatggtttctatgctcgatagagacatgagcggaaccatggggtttaatgagtttaaagagctgtgggctgtattaaatggttggcgacaacatttcattagcttcgatacagaccgctccggaacagtggacccacaagaactccagaaggcattaacaaccatgggatttcgcctgagtcctcaggctgtaaatagtattgcaaagcggtacagtactaatggcaaaattaccttcgatgattatatcgcgtgttgcgtgaagttaagggcattgaccgactcatttcgaaggagagataccgctcagcagggggtggttaacttcccatatgacgatgtgtctcttaggaactag

SEQ ID NO: 91807 - DNA, 543 bp, Artificial Sequence
  derived and/or modified sequence
atgcagtatggaggtgcacccggtggcccagcattcccgggacagacgcaggacccgctttacggatatttcgccgcagtggcgggtcaagatggtcagatcgatgctgacgagctgcagaggtgtctgacccagtctggcatcgcagggggatacaagccattcaaccttgaaacttgcagactgatggtgagtatgctggatcgcgatatgtctgggaccatgggattcaatgagttcaaggaactgtgggccgtccttaacggatggcgacaacattttatttccttcgatacagatcgctccggcactgtggacccacaggaactccagaaagcattaaccaccatgggctttagattatctcctcaggcagtcaactctatagccaagcgatactcaacaaacgggaaaattacattcgacgattatatagcgtgttgtgtaaaactccgcgcactgaccgactcatttcgcaggcgagacacagcccagcagggtgtggtaaatttcccctatgacgacgtgtcactccgcaactag

SEQ ID NO: 91808 - DNA, 1418 bp, Artificial Sequence
  derived and/or modified sequence
actctgcaagaaggcaatcctctaaggatcaccagcttctacctataagacttcaactcaagatgcagtatggaggggctcccggagggcctgcgtttcccggacaaactcaggatccgctgtatggttactttgctgctgtagctggacaggatgggcagatagatgctgatgaattgcagagatgtctgacacagtctggcattgctggaggatacaaaccttttaacctggagacttgccggcttatggtttcaatgctggatagagatatgtctggcacaatgggtttcaatgaatttaaagaactctgggctgtactgaatggctggagacaacactttatcagttttgacactgacaggagtggaacagtagacccacaagaattgcagaaggccctgacaacaatgggatttaggttgagtccccaggctgtgaattcaattgcaaaacgatacagcaccaatggaaagatcaccttcgacgactacatcgcctgctgcgtcaaactgagggctcttacagacagctttcgaagacgggatactgctcagcaaggtgttgtgaatttcccatatgatgatgtaagtcttagaaattaagagatacagtagatgaaaaggatgtacaccagatgggtatccctttgaaattagctgttaagaatatcttaaggttaaggatgccagagacataagggattcaaaagttagaaagagttatcatccagaatttattaatttcatttattagtcttaactatagtgagaccatgatttgatttgcattcagagacctgggttcaagacccagcttgttgtatttattagctgggtcacttaagcaggtttcttaattgctgtgacactatatgaataaagaagatatagtagtaatgcctttttcactgagccattgtaagatttctattagaaatgcccttgaaaaacactatgcagatatactatctgcttttgtcttctgtaaacaaatcatgtcagtcactgagaatagataacagctcaatagttttgcatacctatgttcttcattgagggcataaggcaggcaacaacttaaatcacaattttttttttttttttgagatggagtctcgctctgttgcccaggttggagtgcagtggcgcaatgtcagctcactgcaacctccacgtctcgggttctagcgattctcctgcctcagcctcctgagggactataggcatgtgccaccatacctggttaagtttttttgtatttttagtagagacggggtttcactgtgttagccaggatggtctcgatctcctgtccttgtgatctgtccgcttaggcctcccaaagtgctgggattacaggcgtgagccactgctcccggctaaatcacaatttaaaacaagttatttactaaacag

SEQ ID NO: 91809 - protein, 228 aa, Artificial Sequence
  derived and/or modified sequence
MLDEGEAIIVYRLPWTWKCSKLLMKSIHAGLNAVAAILAIISVVAVFENHNVNNIANMYSLHSWVGLIAVICYLLQLLSGFSVFLLPWAPLSLRAFLMPIHVYSGIVIFGTVIATALMGLTEKLIFSLRDPAYSTFPPEGVFVNTLGLLILVFGALIFWIVTRPQWKRPKEPNSTILHPNGGTEQGARGSMPAYSGNNMDKSDSELNSEVAARKRNLALDEAGQRSTM

SEQ ID NO: 91810 - DNA, 1493 bp, Artificial Sequence
  derived and/or modified sequence
gttactgaagccctctgcgagcttggatgctggacgagggagaggccatcatcgtctacagactgccgtggacctggaaatgcagcaagctcctgatgaaatccatccatgcagggttaaatgcagttgctgccattcttgcaattatctctgtggtggccgtgtttgagaaccacaatgttaacaatatagccaatatgtacagtctgcacagctgggttggactgatagctgtcatatgctatttgttacagcttctttcaggtttttcagtctttctgcttccatgggctccgctttctctccgagcatttctcatgcccatacatgtttattctggaattgtcatctttggaacagtgattgcaacagcacttatgggattgacagagaaactgattttttccctgagagatcctgcatacagtacattcccgccagaaggtgttttcgtaaatacgcttggccttctgatcctggtgttcggggccctcattttttggatagtcaccagaccgcaatggaaacgtcctaaggagccaaattctaccattcttcatccaaatggaggcactgaacagggagcaagaggttccatgccagcctactctggcaacaacatggacaaatcagattcagagttaaacagtgaagtagcagcaaggaaaagaaacttagctctggatgaggctgggcagagatctaccatgtaaaatgttgtagagatagagccatataacgtcacgtttcaaaactagctctacagttttgcttctcctattagccatatgataattgggctatgtagtatcaatatttactttaatcacaaaggatggtttcttgaaataatttgtattgattgaggcctatgaactgacctgaattggaaaggatgtgattaatataaataatagcagatataaattgtggttatgttacctttatcttgttgaggaccacaacattagcacggtgccttgtgcagaatagatactcaatatgtgaatatgtgtctactagtagttaattggataaactggcagcatccctggcctgttgtcatgcagtcatttcctgttaattctgggagacaatgatttcacaactagcgggaagcagtcctaaaagtttaaaatccgataaggaatatctgggacagggtttagatcatgactctacacagataccatgatgagagtatattaaagaaatttaggaaagcacctggttcctttctccccatgcctgccttctgctccctccccagctggtttgggctcaaattgtccctggagactagggtttatgttagggtattgatagattagagcaggtggttgaagagatcttctctggtcagacttggaagaatttccaaaactgaagttagccccaagacttccctagggttgatgtactttatgatccagatgctaaacttcttagaatgaaaatatgcttcaacacttaagtagcatacactgccctac

SEQ ID NO: 91811 - DNA, 687 bp, Artificial Sequence
  derived and/or modified sequence
atgctggacgagggcgaggccatcatcgtgtacagactgccctggacctggaagtgcagcaagctgctgatgaagagcatccacgccggcctgaacgccgtggccgccatcctggccatcatcagcgtggtggccgtgttcgagaaccacaacgtgaacaacatcgccaacatgtacagcctgcacagctgggtgggcctgatcgccgtgatctgctacctgctgcagctgctgagcggcttcagcgtgttcctgctgccctgggcccccctgagcctgagagccttcctgatgcccatccacgtgtacagcggcatcgtgatcttcggcaccgtgatcgccaccgccctgatgggcctgaccgagaagctgatcttcagcctgagagaccccgcctacagcaccttcccccccgagggcgtgttcgtgaacaccctgggcctgctgatcctggtgttcggcgccctgatcttctggatcgtgaccagaccccagtggaagagacccaaggagcccaacagcaccatcctgcaccccaacggcggcaccgagcagggcgccagaggcagcatgcccgcctacagcggcaacaacatggacaagagcgacagcgagctgaacagcgaggtggccgccagaaagagaaacctggccctggacgaggccggccagagaagcaccatgtag

SEQ ID NO: 91812 - DNA, 687 bp, Artificial Sequence
  derived and/or modified sequence
atgctggatgagggagaggctataatcgtgtatagactgccttggacttggaaatgcagtaagctcttgatgaaaagcattcatgcgggactcaatgctgtggccgcaatccttgccatcattagtgtcgtggctgtctttgagaaccacaacgtgaacaacatcgccaatatgtactcactgcacagctgggtgggccttattgcggttatatgttacctcctccagttgctgtccgggttttcggtgtttctcctcccgtgggctcccctgagcttgcgggcgttcttgatgcccatccacgtctatagcggcatagtcatttttggaaccgtgatcgcgactgctcttatgggtttgacggagaagctcattttttcactgcgggacccagcctactcaactttccctcccgaaggtgtgtttgtgaatactctcggtctcctcatcctggtgtttggtgcattaatcttttggatagtcacccgcccccagtggaagagacctaaggagcctaatagcacaatcctgcaccccaacggggggaccgagcagggggctcgcggcagtatgcccgcctacagtggcaataacatggataaatcagatagtgagctcaactctgaagtcgccgccaggaaacgcaacctcgccttggatgaagcaggacagcgaagcaccatgtag

SEQ ID NO: 91813 - DNA, 687 bp, Artificial Sequence
  derived and/or modified sequence
atgctggatgaaggagaggccatcatcgtgtaccgcctgccctggacctggaagtgcagcaagctgctgatgaagagcatccatgctggcctgaatgctgtggccgccatcctggccatcatctctgtggtggccgtgtttgagaaccacaacgtgaacaacatcgccaacatgtacagcctgcacagctgggtgggcctgattgctgtgatctgctacctgctgcagctgctgagcggcttcagcgtcttcctgctgccctgggcccccctgagcctgcgggccttcctgatgcccatccacgtgtacagcggcatcgtcatctttggaacagtgattgccacagccctgatgggcctgacagagaagctgatcttcagcctgcgggaccctgcctacagcaccttccccccagagggcgtgtttgtgaacaccctgggcctgctgatcctggtgtttggagccctgatcttctggatcgtgacccggccccagtggaagaggcccaaggagcccaacagcaccatcctgcaccccaacggcggcacagagcagggcgcccggggctccatgcctgcctacagcggcaacaacatggacaagagtgacagcgagctgaacagcgaggtggccgccaggaagaggaacctggccctggatgaggccggccagaggagcaccatgtag

SEQ ID NO: 91814 - DNA, 687 bp, Artificial Sequence
  derived and/or modified sequence
atgctggacgagggcgaggccatcatcgtgtaccggctgccctggacctggaagtgcagtaagcttctcatgaagagtattcatgcaggactcaacgccgtggcagctattcttgcgattatttcagtggtggcagtgttcgagaaccataacgtgaacaatattgcgaatatgtatagtctccattcttgggtcgggctcattgccgtaatttgctacctgctacagctgctctcaggctttagcgtctttctgctgccttgggcgcctctgagcctgagagcctttctgatgccaattcatgtgtactccgggatagtcatcttcggtacagttatagcaacagcactcatgggactcaccgaaaaactgatattctctcttagggatcctgcttattccacctttccccctgaaggcgttttcgtcaatacactgggcctcctcattttggtcttcggcgctttaattttttggattgtgactagacctcagtggaagaggccgaaggaacctaattccactatcttacacccgaatggaggcaccgagcagggggcacgtgggtccatgccggcttattctggcaacaatatggacaaatcagattccgagttgaacagtgaggtggcggcccgaaaaagaaacctggcgctcgacgaggcagggcaaagatcaaccatgtag

SEQ ID NO: 91815 - DNA, 687 bp, Artificial Sequence
  derived and/or modified sequence
atgctcgacgaaggagaggccattatagtgtataggttaccctggacatggaagtgcagtaagttgctcatgaagagtattcacgctggtttgaatgctgtggccgctatcctggcaatcatttctgtggtcgcagtgtttgaaaatcacaatgtgaacaacatagccaatatgtacagcttgcactcttgggtcggactcatagctgtaatttgttacctcctgcagctgctgtcagggttcagcgtgttcctgcttccatgggctcctttaagtctaagggccttcctcatgccaatacatgtgtacagtggtatcgttattttcggcaccgtgatcgcaactgctctcatggggctcacagaaaaattgatcttttccctgagggatccggcttactcaaccttccccccagagggggtgtttgtcaataccctcggattgctgattctggtgtttggggctctcattttctggatcgtcactcggccacagtggaagcggccaaaggaacccaacagtaccatcttgcatcctaacgggggtacggagcagggcgctcgtggctccatgcccgcttactctgggaacaatatggataagagcgacagcgagctgaactcagaagtggcggcacgtaagaggaacctggccctggacgaagctggccagaggtctactatgtag

SEQ ID NO: 91816 - DNA, 126 bp, Artificial Sequence
  derived and/or modified sequence
atggacacggagtccaaccgtagagcaaacctggcactgccccaggaacccagtagcgtcccagcttttgaagtcctggaaatctccccacaggaagttagctctgggaggttacttaaatcttag

SEQ ID NO: 91817 - DNA, 126 bp, Artificial Sequence
  derived and/or modified sequence
atggacacagagagcaacagaagagccaacctggccctgccccaggagcccagctctgtgcctgcctttgaggtgctggagatcagcccccaggaggtgagcagcggccgcctgctgaagagctag

SEQ ID NO: 91818 - DNA, 126 bp, Artificial Sequence
  derived and/or modified sequence
atggacaccgagagcaaccggcgggccaacctggccctgccccaggagccatctagtgttccggccttcgaggttctcgaaattagtccccaggaggtgagctccgggagattgctaaagagctag

SEQ ID NO: 91819 - DNA, 126 bp, Artificial Sequence
  derived and/or modified sequence
atggatactgagagcaatcggagagctaatcttgcattgcctcaggagccttcatcggtccccgcatttgaagttcttgaaatctctcctcaggaggtcagctccgggagactgcttaaatcctag

SEQ ID NO: 91820 - DNA, 126 bp, Artificial Sequence
  derived and/or modified sequence
atggacaccgagagcaacagaagagccaacctggccctgccccaggagcccagcagcgtgcccgccttcgaggtgctggagatcagcccccaggaggtgagcagcggcagactgctgaagagctag

SEQ ID NO: 91821 - protein, 666 aa, Artificial Sequence
  derived and/or modified sequence
MTDLKEGVCLSAFWYSHEQCCWTSNETTFEDRDKCPLWQKWSELLVNQSEGASAYILNYLMYILWALLFAFLAVSLVRVFAPYACGSGIPEIKTILSGFIIRGYLGKWTLLIKTVTLVLVVSSGLSLGKEGPLVHVACCCGNFFSSLFSKYSKNEGKRREVLSAAAAAGVSVAFGAPIGGVLFSLEEVSYYFPLKTLWRSFFAALVAAFTLRSINPFGNSRLVLFYVEYHTPWYMAELFPFILLGVFGGLWGTLFIRCNIAWCRRRKTTRLGKYPVLEVIVVTAITAIIAYPNPYTRQSTSELISELFNDCGALESSQLCDYINDPNMTRPVDDIPDRPAGVGVYTAMWQLALALIFKIVVTIFTFGMKIPSGLFIPSMAVGAIAGRMVGIGVEQLAYHHHDWIIFRNWCRPGADCVTPGLYAMVGAAACLGGVTRMTVSLVVIMFELTGGLEYIVPLMAAAVTSKWVADAFGKEGIYEAHIHLNGYPFLDVKDEFTHRTLATDVMRPRRGEPPLSVLTQDSMTVEDVETLIKETDYNGFPVVVSRDSERLIGFAQRRELILAIKNARQRQEGIVSNSIMYFTEEPPELPANSPHPLKLRRILNLSPFTVTDHTPMETVVDIFRKLGLRQCLVTRSGRLLGIITKKDVLRHMAQMANQDPESIMFN

SEQ ID NO: 91822 - protein, 98 aa, Artificial Sequence
  derived and/or modified sequence
MAHEHGHEHGHHKMELPDYRQWKIEGTPLETIQKKLAAKGLRDPWGRNEAWRYMGGFAKSVSFSDVFFKGFKWGFAAFVVAVGAEYYLESLNKDKKHH

SEQ ID NO: 91823 - protein, 65 aa, Artificial Sequence
  derived and/or modified sequence
MAHEHGHEHGHHKMELPDYRQWKIEGTPLETIQKKLAAKGLRDPWGRNEAWRYMGGFAKSVSFSD

SEQ ID NO: 91824 - DNA, 297 bp, Artificial Sequence
  derived and/or modified sequence
atggcccatgagcacggacacgagcacggacaccacaaaatggagttgcccgactaccggcagtggaaaatcgaaggtacccctctggaaaccatccaaaagaagctcgctgccaaggggctcagagacccctggggccgaaacgaggcttggagatacatgggagggttcgctaaatcagtctccttttcagacgtttttttcaaggggtttaagtggggatttgcagctttcgtggtcgcagtgggggcagagtactaccttgaatccctcaataaggacaagaagcaccattag

SEQ ID NO: 91825 - DNA, 297 bp, Artificial Sequence
  derived and/or modified sequence
atggcgcacgagcatgggcacgaacatgggcatcacaagatggagctgcccgattataggcagtggaagatcgagggtactcccctggaaactatccagaaaaagctggctgctaaaggcctgagggacccttggggacgaaatgaggcctggaggtatatgggcggcttcgctaagagtgtatctttcagtgacgtgttcttcaagggtttcaagtgggggttcgctgccttcgtcgtagcggtgggtgctgagtattatctcgagtctcttaataaggacaagaagcaccattag

SEQ ID NO: 91826 - DNA, 198 bp, Artificial Sequence
  derived and/or modified sequence
atggctcacgagcatgggcacgagcacgggcaccacaagatggagctgcctgactatcggcagtggaaaattgagggaacccccctggagaccatacagaagaagctagccgccaaaggcctcagggatccatgggggcgcaacgaagcatggcgctacatggggggctttgcaaaatccgtgtcattttctgattag

SEQ ID NO: 91827 - DNA, 297 bp, Artificial Sequence
  derived and/or modified sequence
atggcacacgagcatggccatgagcacggccaccataagatggagctccccgactatcgtcagtggaagatcgagggcactccattggagaccattcagaaaaagctggcagctaaggggctccgggacccttggggccggaacgaagcctggcgctacatgggtggcttcgctaaaagtgtgagcttcagcgatgtcttttttaagggtttcaaatggggatttgctgccttcgtggtagccgtaggggcagagtactatctagaatctttaaacaaagacaaaaagcaccactag

SEQ ID NO: 91828 - DNA, 297 bp, Artificial Sequence
  derived and/or modified sequence
atggcccatgaacatggccatgaacatggccaccacaagatggagctgcctgactaccggcagtggaagattgagggcacccccctggagaccatccagaagaagctggccgccaagggcctgcgggacccctggggcagaaatgaggcctggagatacatgggcggctttgccaagtctgtgtccttcagtgatgtgttcttcaagggcttcaagtggggctttgctgcctttgtggtggccgtgggcgctgagtactacctggagagcctgaacaaggacaagaagcaccactag

SEQ ID NO: 91829 - DNA, 198 bp, Artificial Sequence
  derived and/or modified sequence
atggcccatgaacatggccatgaacatggccaccacaagatggagctgcctgactaccggcagtggaagattgagggcacccccctggagaccatccagaagaagctggccgccaagggcctgcgggacccctggggcagaaatgaggcctggagatacatgggcggctttgccaagtctgtgtccttcagtgactag

SEQ ID NO: 91830 - DNA, 755 bp, Artificial Sequence
  derived and/or modified sequence
agtatgccggcagccccgccctgtgtgcggtgtctaaggattccgtccccaagcaaggacaacatattatcttccccgcccttctcttttctacagtatctgttacctcagtcagattgaggatgcacatatactgggaaaataatcgacttccagcgtccctcatgtagtctctacctgattcaggaatctctaacccagtatcggaacgttaagcggcttctccgctttcctgccgtgagaaactcgaggtgacaacctccgtttccggttggctccggttgcagagttgagtgtcctgagaggtcagattgctgtcagacatggcccatgaacatggacatgagcatggacatcataaaatggaacttccagattatagacaatggaagatagaagggacaccattagaaactatccagaagaagctggctgcaaaagggctaagggatccatggggccgcaatgaagcttggagatacatgggtggctttgcaaagagtgtttccttttctgatgtattctttaaaggattcaaatggggatttgctgcatttgtggtagctgtaggagctgaatattacctggagtccctgaataaagataagaagcatcactgaagataatacctggaagcatcatagtggtttcttaactctccaaaataagatttcttctctgtagcctacttgtctggtttatcccttacagaatattagtaagatttaatcaattaaaatatatatatatgccaa

SEQ ID NO: 91831 - DNA, 503 bp, Artificial Sequence
  derived and/or modified sequence
ggttggctccggttgcagagttgagtgtcctgagaggtcagattgctgtcaggcagaagaacagcatcactaaaaacatggcccatgaacatggacatgagcatggacatcataaaatggaacttccagattatagacaatggaagatagaagggacaccattagaaactatccagaagaagctggctgcaaaagggctaagggatccatggggccgcaatgaagcttggagatacatgggtggctttgcaaagagtgtttccttttctgatgtattctttaaaggattcaaatggggatttgctgcatttgtggtagctgtaggagctgaatattacctggagtccctgaataaagataagaagcatcactgaagataatacctggaagcatcatagtggtttcttaactctccaaaataagatttcttctctgtagcctacttgtctggtttatcccttacagaatattagtaagatttaatcaattaaaatatatatata

SEQ ID NO: 91832 - DNA, 462 bp, Artificial Sequence
  derived and/or modified sequence
acgaccctcccaagatgctacctggtttacgagaggttccgggaccaccaacacaccggctaccgcctttccagaccaccctcgccagctcccgtctgtagtttccgcggccgaaggagaagaaaacccctcttcatctagcactttgcctcccccaaagacagcaccgccgcctacctgtcaccctgctgtctccggcttcctaccgccgccgcctcccgcagcagcctgccaactgcagcgcaacaaccaaccctctcattggacatggcccatgaacatggacatgagcatggacatcataaaatggaacttccagattatagacaatggaagatagaagggacaccattagaaactatccagaagaagctggctgcaaaagggctaagggatccatggggccgcaatgaagcttggagatacatgggtggctttgcaaagagtgtttccttttctgat

SEQ ID NO: 91833 - DNA, 547 bp, Artificial Sequence
  derived and/or modified sequence
gagtgtcctgagaggtcagattgctgtcaggtgcttgttcccgcttctgccacacgcaaaattgtctttgtttgcctttggatcgcaaaggcagaagaacagcatcactaaaaacatggcccatgaacatggacatgagcatggacatcataaaatggaacttccagattatagacaatggaagatagaagggacaccattagaaactatccagaagaagctggctgcaaaagggctaagggatccatggggccgcaatgaagcttggagatacatgggtggctttgcaaagagtgtttccttttctgatgtattctttaaaggattcaaatggggatttgctgcatttgtggtagctgtaggagctgaatattacctggagtccctgaataaagataagaagcatcactgaagataatacctggaagcatcatagtggtttcttaactctccaaaataagatttcttctctgtagcctacttgtctggtttatcccttacagaatattagtaagatttaatcaattaaaatatatatatatgccaa

SEQ ID NO: 91834 - DNA, 297 bp, Artificial Sequence
  derived and/or modified sequence
atggcccacgagcacggccacgagcacggccaccacaagatggagttgccggactatagacagtggaagatcgaaggcactcctctagagaccatccagaaaaaacttgccgccaaaggtctcagggacccatggggacgcaacgaagcttggcgctatatggggggcttcgctaaaagcgttagcttctcggacgtgttctttaaaggttttaagtggggattcgccgcttttgttgtcgctgtgggcgcagagtattatcttgagtccctgaataaagataagaaacatcactag

SEQ ID NO: 91835 - DNA, 297 bp, Artificial Sequence
  derived and/or modified sequence
atggcccacgagcacggccacgagcacggccaccacaagatggagctccctgactaccgccaatggaaaatcgagggcacacccttagaaactattcagaaaaaactcgccgcaaaaggcctgcgggacccatggggccgcaacgaggcctggcgctatatgggggggttcgccaaatccgtgagcttcagcgacgtctttttcaagggttttaaatggggcttcgccgcctttgtcgtcgctgttggcgccgagtactaccttgagagcctaaacaaagacaaaaagcaccactag

SEQ ID NO: 91836 - DNA, 198 bp, Artificial Sequence
  derived and/or modified sequence
atggcccacgagcacggccacgagcacggccaccacaagatggagctgccggattaccggcagtggaagattgagggcactccgttggaaacaatacagaaaaaattagctgctaaaggattgagagacccttggggtaggaatgaggcatggcgctatatggggggttttgctaaatccgtttctttttcggactag

SEQ ID NO: 91837 - DNA, 297 bp, Artificial Sequence
  derived and/or modified sequence
atggcccacgagcacggccacgagcacggccaccacaagatggagctgcccgattatcgccagtggaagattgaggggacccctcttgaaactatccagaagaagctggcagcaaagggcctgcgggacccctggggacgaaacgaagcatggcgatacatgggagggttcgccaagtctgtttccttctccgatgttttttttaaagggttcaagtggggctttgctgcgtttgtcgtagccgtgggggccgagtattatttagagtctctcaataaggataagaaacaccattag

SEQ ID NO: 91838 - DNA, 297 bp, Artificial Sequence
  derived and/or modified sequence
atggcccacgaacacgggcacgagcatggtcatcataagatggaactacccgattatcgacagtggaagattgagggaacccccttggaaacaatccaaaagaagttggccgcaaaagggctcagggatccttgggggaggaacgaagcctggcgttatatgggcggattcgctaaatccgtgtccttctcggatgtcttcttcaaaggctttaaatggggctttgccgcttttgtcgtggctgtgggggctgaatattatctggagagtctaaataaggacaaaaaacaccattag

SEQ ID NO: 91839 - DNA, 297 bp, Artificial Sequence
  derived and/or modified sequence
atggcccacgagcatggccacgaacatgggcatcacaaaatggagttgccagactatcgacagtggaagattgagggcactccattagaaacgattcaaaaaaagctggctgccaaaggcctcagagacccgtggggacggaacgaggcttggcgctacatgggcggattcgctaaatcagtctctttctctgatgtctttttcaagggcttcaagtggggatttgcagcattcgtggtggcagtaggcgcagaatactatctggaatccctcaacaaggacaaaaagcaccattag

SEQ ID NO: 91840 - DNA, 198 bp, Artificial Sequence
  derived and/or modified sequence
atggcccacgagcacgggcatgaacatggacatcacaagatggagctccctgattatcgccagtggaaaatagagggtacccccctggaaacaatccagaaaaaactggccgctaaaggtctgcgcgatccttgggggagaaacgaagcctggcgttatatgggcggattcgccaaatctgtgagtttttcagactag

SEQ ID NO: 91841 - DNA, 297 bp, Artificial Sequence
  derived and/or modified sequence
atggcccatgaacatggtcacgagcacggccaccacaaaatggaattaccagattatcgacagtggaagatagagggcaccccactggagacgatacagaaaaaactggcagccaaggggctccgggacccctgggggaggaatgaagcatggcgctatatgggaggatttgctaagtccgtcagcttctctgatgtcttcttcaagggctttaaatggggttttgccgcatttgtagtagctgttggtgccgagtattatctggagtccctcaataaagacaaaaaacatcactag

SEQ ID NO: 91842 - DNA, 297 bp, Artificial Sequence
  derived and/or modified sequence
atggcccacgagcacggccacgagcacggccaccacaagatggagctgcccgactacagacagtggaagatcgagggcacccccctggagaccatccagaagaagctggccgccaagggcctgagagacccctggggcagaaacgaggcctggagatacatgggcggcttcgccaagagcgtgagcttcagcgacgtgttcttcaagggcttcaagtggggcttcgccgccttcgtggtggccgtgggcgccgagtactacctggagagcctgaacaaggacaagaagcaccactag

SEQ ID NO: 91843 - DNA, 198 bp, Artificial Sequence
  derived and/or modified sequence
atggcccacgagcacggccacgagcacggccaccacaagatggagctgcccgactacagacagtggaagatcgagggcacccccctggagaccatccagaagaagctggccgccaagggcctgagagacccctggggcagaaacgaggcctggagatacatgggcggcttcgccaagagcgtgagcttcagcgactag

SEQ ID NO: 91844 - protein, 383 aa, Artificial Sequence
  derived and/or modified sequence
MADKVLKEKRKLFIRSMGEGTINGLLDELLQTRVLNKEEMEKVKRENATVMDKTRALIDSVIPKGAQACQICITYICEEDSYLAGTLGLSAAPQAVQDNPAMPTSSGSEGNVKLCSLEEAQRIWKQKSAEIYPIMDKSSRTRLALIICNEEFDSIPRRTGAEVDITGMTMLLQNLGYSVDVKKNLTASDMTTELEAFAHRPEHKTSDSTFLVFMSHGIREGICGKKHSEQVPDILQLNAIFNMLNTKNCPSLKDKPKVIIIQACRGDSPGVVWFKDSVGVSGNLSLPTTEEFEDDAIKKAHIEKDFIAFCSSTPDNVSWRHPTMGSVFIGRLIEHMQEYACSCDVEEIFRKVRFSFEQPDGRAQMPTTERVTLTRCFYLFPGH

SEQ ID NO: 91845 - DNA, 1152 bp, Artificial Sequence
  derived and/or modified sequence
atggccgataaggtactcaaggaaaagcgcaaactgtttattagaagcatgggcgaagggaccattaacgggctgctggacgagctgcttcagacacgtgtgttgaacaaggaggagatggagaaggttaaacgggagaatgccactgtcatggataaaacccgagcactcattgattccgtaatccccaaaggtgcgcaggcttgtcagatctgcatcacctacatttgtgaggaagactcatatctggcaggcacgctggggcttagtgccgctccgcaggctgtgcaagacaaccccgctatgcctacctcttctggttctgaggggaatgtcaaattatgctcccttgaagaggctcaacgcatctggaagcagaagtccgctgaaatttaccctatcatggacaagagctcgagaacccggctggctctgatcatttgtaacgaagagttcgattcaatccccagacgcactggagctgaggtcgacatcacaggcatgacgatgttgctgcagaatttaggctactctgtggacgtcaagaaaaatctaactgcaagtgatatgacaactgaactcgaggcattcgcccatagacccgaacacaaaacctctgattccacctttttggtctttatgtcacacggcatccgggagggcatctgtgggaagaagcatagtgaacaggtacctgacattctgcaactgaatgctatcttcaacatgctgaatacaaaaaattgcccttcactgaaagataagcccaaggtcatcatcattcaggcttgtaggggggactcccctggggtcgtatggtttaaagactcggtgggagtttccggtaatctgtctttgcccaccacagaggagtttgaagacgatgccattaaaaaggcgcatatcgagaaggatttcatcgctttctgctcatccactccggacaatgtgagctggcggcatcctacaatggggtctgtgttcatcgggcgacttatcgagcacatgcaggaatatgcttgttcatgtgacgtggaagagatcttccgcaaggtgcgctttagctttgaacaacccgacggcagagctcaaatgcccacgaccgagagagtaaccctgacccggtgcttctacctgtttcctggacactag

SEQ ID NO: 91846 - DNA, 1152 bp, Artificial Sequence
  derived and/or modified sequence
atggccgacaaagttttgaaagagaagcgcaaactctttattaggagcatgggggaggggaccatcaatggcctactggatgagctgctgcagaccagggtgctgaataaagaggagatggagaaagtcaaacgggagaatgccactgtcatggacaagacccgcgccctcattgatagcgttatacccaagggcgcccaggcatgccagatttgtattacttatatctgtgaagaggactcatatctagccggtaccctggggctgtcggctgctccgcaggctgtgcaggacaatcccgctatgcctactagctctggtagcgagggcaacgtgaagctgtgctcactggaggaggctcagcgaatatggaaacagaagtcagctgaaatctacccgattatggacaagagctcccgaacaaggctagcgctgatcatatgcaacgaagaattcgactcaattccacgtcggacgggcgcagaggtggatatcactgggatgacaatgctcttacagaacctcggctacagcgttgatgttaagaagaatctgaccgctagtgacatgacgacagagctggaggcgttcgcacaccggcccgaacacaagactagcgatagcacctttctggtttttatgtctcatggaatccgcgaaggaatctgtggaaagaagcactcagagcaggtgccagacatcctacagttaaacgccatttttaatatgctgaacaccaaaaactgtccgagtcttaaggataagcccaaagttattattatccaggcctgcaggggagatagtccaggagtggtctggtttaaagatagtgtcggtgtttcaggaaatctcagcctgcccacaacagaagagttcgaagacgatgcaataaaaaaggcccatatcgagaaggattttatagcgttctgctccagcactcctgacaatgttagttggcgccacccaactatgggcagcgtgtttattggccgcctgattgagcacatgcaggagtatgcctgtagctgtgatgtggaggaaatttttcggaaggttcgcttttccttcgagcaacctgacgggcgggcccagatgcccaccactgagcgcgtaacattgactaggtgtttttatctcttccccggccactag

SEQ ID NO: 91847 - DNA, 1152 bp, Artificial Sequence
  derived and/or modified sequence
atggctgacaaagtgctgaaggagaaacggaagcttttcatcagaagtatgggcgagggcacaataaatggcctactcgatgagctcctccagaccagagtcctgaataaggaggagatggagaaggtgaaacgcgagaacgctaccgtgatggacaaaactagagctctgatcgactctgtgatcccaaagggcgctcaagcctgccagatttgcattacctatatttgtgaggaggactcctacctggctgggactctggggcttagtgccgcacctcaagccgttcaagacaacccagcaatgcccacaagcagtgggagtgaaggcaatgtaaagctctgttcactggaggaagcacagcggatctggaagcagaagtctgctgagatctatcctattatggataaatcctctagaaccaggctggccctgatcatatgtaacgaagagttcgactcaatacctcggcgaaccggtgctgaagtggatatcacaggtatgacaatgttattgcagaacctcggttatagcgtcgacgtgaaaaaaaacctaaccgctagcgatatgaccaccgagcttgaagcttttgctcacaggcccgaacataaaacttccgactccactttcctcgtttttatgtcccatgggattagggaaggtatctgtggcaagaagcacagtgaacaggtaccagatatactgcagctgaatgcaatctttaacatgttgaacacaaaaaactgccctagtttgaaagataagcccaaagttataatcatccaggcatgccgcggtgattctcctggcgttgtctggtttaaggactcagtgggtgtctccgggaacctgtccttacccactacagaggaattcgaagatgatgcgatcaagaaggctcacattgagaaggatttcattgctttctgttcctccacccctgacaacgtctcatggcgtcatccaaccatggggtctgtgttcatcggacggttgatcgagcacatgcaagagtacgcctgttcatgcgatgtagaggagatattcagaaaagtgcggttctcctttgagcagcctgatggacgggcccaaatgcctaccacagagagggttaccctcactcgttgtttttatctctttccaggccattag

SEQ ID NO: 91848 - DNA, 1152 bp, Artificial Sequence
  derived and/or modified sequence
atggctgacaaggtgctgaaggagaagaggaagctgttcatccgctccatgggagagggcaccatcaatggcctgctggatgagctgctgcagaccagggtgctgaacaaggaggagatggagaaggtgaagcgggagaatgccaccgtgatggacaagacccgggccctgattgacagcgtcatccccaagggggcccaggcctgccagatctgcatcacctacatctgtgaagaagattcctacctggccggcaccctgggcctgtctgctgccccccaggccgtgcaggacaacccagccatgcccaccagcagcggcagcgagggcaatgtgaagctgtgcagcctggaggaggcccagaggatctggaagcagaagtctgctgagatctaccccatcatggacaagagcagcaggacccggctggccctgatcatctgcaatgaggagtttgacagcatccccaggagaactggagctgaggtggacatcaccggcatgaccatgctgctgcagaacctgggctacagcgtggatgtgaagaagaacctgacagccagtgacatgaccacagagctggaggcctttgcccacaggcctgagcacaagaccagtgacagcaccttcctggtgttcatgagccacggcatccgggagggcatctgtgggaagaagcacagcgagcaggtgcctgacatcctgcagctgaatgccatcttcaacatgctgaacaccaagaactgccccagcctgaaggacaagcccaaggtgatcatcatccaggcctgccgcggggacagccctggggtggtgtggttcaaggacagcgtgggcgtgtctggcaacctgagcctgcccaccacagaggagtttgaagatgatgccatcaagaaggcccacatcgagaaggacttcatcgccttctgcagcagcaccccagacaacgtgtcctggaggcaccccaccatgggcagcgtcttcatcggccgcctgattgagcacatgcaggagtatgcctgcagctgtgatgtggaggagatcttcaggaaggtgcgcttctcctttgagcagccagatggccgggcccagatgcccaccacagagcgggtgaccctgacccgctgcttctacctgtttcctggccactag

SEQ ID NO: 91849 - DNA, 1152 bp, Artificial Sequence
  derived and/or modified sequence
atggccgacaaggtgctgaaggagaagcggaagctgttcatccggagtatgggcgaggggacaataaatggccttctggatgagttgcttcagacaagagtgttgaacaaagaggagatggagaaagtaaagcgcgaaaatgccactgtcatggataagactcgtgccctcatcgactccgttattcctaaaggtgcgcaagcctgtcagatatgcattacctatatctgcgaggaggactcttatcttgctggaaccctgggcctttcagctgctccacaggcagtacaagataaccccgccatgcccaccagcagtggctctgaggggaacgtgaaactgtgtagtcttgaagaggctcagcgcatctggaagcagaagtcagccgaaatatatcctatcatggacaagtcctcaagaacgaggctagccctcatcatttgcaatgaggagttcgactcaatccccaggcgcaccggcgccgaagtggacatcacaggcatgactatgctgctgcaaaacctaggctatagcgtggacgtgaaaaagaatctcacggcgtccgacatgacaacagagttggaggcctttgctcaccgccctgagcacaagacaagtgatagtacattccttgtctttatgtcccatgggatcagagagggcatctgtgggaaaaagcacagtgagcaggtaccagacattctgcagctgaatgctatcttcaacatgctgaacacgaaaaattgtccttcactgaaggacaaacccaaggtgattataattcaggcctgtaggggtgacagtcccggagtggtttggttcaaggattcagtcggcgtgtcaggcaatctgtctctgcccacgaccgaggaattcgaggacgatgccatcaagaaagcccatatcgagaaagacttcattgctttttgttcctcaacaccggacaatgttagttggaggcatccaactatggggtccgttttcatcggtagattaatcgagcacatgcaagagtatgcatgttcctgcgacgtggaggaaatcttccgcaaggtcaggttttcctttgagcaaccagatggacgtgcacagatgcccactaccgagcgggtgaccttgacacggtgcttttacctgttcccaggacattag

SEQ ID NO: 91850 - DNA, 1152 bp, Artificial Sequence
  derived and/or modified sequence
atggccgacaaggtgctgaaggagaagcggaagctgttcatccggtccatgggcgaaggaaccattaatgggttgcttgatgagctgctgcagactagggtcctaaataaagaagagatggagaaggtcaaacgtgagaacgccaccgtcatggataagaccagagcactaatcgattccgtaattccaaagggggcgcaggcctgtcaaatctgtattacgtatatttgtgaggaagacagttacttggctgggaccttagggctcagtgcagcccctcaggctgtacaggataaccccgcgatgcccacctcatccggatccgagggaaatgtgaagttgtgtagtttagaagaagctcaaaggatctggaagcagaagagtgccgagatctaccccatcatggataaatcctcccgtacacggctggcgctgattatttgtaacgaagaatttgacagcatcccaagacggaccggagctgaggtggacatcaccggcatgactatgctcttacagaacctggggtacagcgtagatgtgaaaaaaaatcttactgcttccgacatgaccactgaactggaggccttcgcacatagacccgagcacaagacatcggactcaactttcctggtatttatgtcacacgggatcagggagggcatttgtggcaaaaagcactctgagcaagtccccgatatcctgcagttaaatgctatattcaatatgctgaacaccaagaactgcccctcccttaaagataagcccaaagtcatcatcattcaggcatgtagaggcgattcccctggagtcgtctggtttaaggattctgtgggagtgagcggtaatctgtccctgccaacgacagaagaatttgaggatgatgcaatcaaaaaggcccacattgaaaaggacttcatcgctttctgctcttccacccccgacaacgtgtcgtggcgacatccaacaatgggcagcgtgtttatcgggcgtctcatcgaacacatgcaggaatatgcctgtagctgcgatgtggaggaaatattcagaaaggtgagattctcattcgagcagcctgacgggcgggctcagatgcccacaaccgaaagggttacactgacaaggtgcttctacctgttccccgggcattag

SEQ ID NO: 91851 - DNA, 1152 bp, Artificial Sequence
  derived and/or modified sequence
atggccgacaaggtgctgaaggagaagcggaagctgttcatccggtctatgggggagggtaccattaacggtctactggacgagctgctccaaactcgggtgctcaataaggaagagatggagaaggtgaaacgcgagaacgcaactgtgatggacaagactcgcgccctcatcgactctgtgatccccaagggggcacaggcatgccaaatctgcatcacgtatatttgcgaggaggacagctaccttgcgggcacgttgggtttgtcagctgctccccaagccgtgcaggacaatcctgccatgccgacctcttctgggtccgagggtaacgtgaaactgtgctccctggaagaggctcaacgcatatggaagcagaagagtgcagagatctatcccattatggataaaagcagccgaactaggctcgctctgatcatctgtaacgaagagttcgacagcatcccacgccgaaccggagccgaggtggacatcacaggcatgactatgctattgcagaacctgggttactccgttgatgtcaagaagaacctgaccgccagtgacatgacgacagaactagaggcgtttgcccatagaccagaacataaaacttctgacagtacctttcttgtcttcatgtcgcacggtatccgagagggtatatgtggaaagaaacactccgagcaagtgccggacattctgcagctgaatgccatcttcaacatgctcaacacaaagaattgcccctctctgaaagacaaaccaaaagtgatcatcattcaagcttgcaggggtgactcacccggagttgtctggttcaaggacagcgtgggtgtctccgggaatctctctctgccgaccactgaggaattcgaggatgacgccattaagaaagcgcatatcgaaaaggacttcatcgccttctgcagttctacgccggataacgtgtcatggaggcatcccactatgggttccgtttttatcggtaggctgatcgaacatatgcaagagtatgcctgcagctgcgacgtcgaagagatcttcagaaaggttcgcttcagcttcgaacaacccgatgggagagcccagatgccaactacggagcgggtgaccctgaccagatgcttctacctctttccgggccactag

SEQ ID NO: 91852 - DNA, 1152 bp, Artificial Sequence
  derived and/or modified sequence
atggccgataaggtcctgaaagaaaagcgtaagctgtttattcgctctatgggtgagggtaccatcaatggactgctcgacgaactcctgcaaactcgcgtgttaaataaagaagaaatggagaaagtgaagagagaaaacgctacagtgatggataagacgagagcactgatcgactcagtcatcccgaaaggcgctcaggcctgtcagatttgcattacatatatttgtgaagaggactcttatctcgctggtacattgggactgagcgctgcccctcaggcggtgcaagataacccagcaatgccaactagtagcggttccgaggggaacgtaaagttgtgctcgctggaagaagctcaacggatatggaagcagaaaagcgccgaaatatatcctatcatggacaaaagctcccggacacgtctggccctgataatctgtaatgaggagtttgactccatcccacgcagaacgggagccgaggtggacatcacaggcatgactatgttgttgcagaatctagggtactcagtggatgtcaagaaaaacttgactgcatctgatatgacaactgagctggaagccttcgcgcaccggcctgagcacaagacaagtgactccacgttcctagtctttatgtctcacggaatcagggagggcatctgtgggaagaagcattcagaacaggtcccagacattttgcagctgaacgcaatttttaatatgctgaacaccaaaaactgcccttctctgaaagacaagccaaaggtgattataatccaggcatgtcggggagactcccccggagtggtgtggtttaaggacagtgtcggtgtgtctggaaatctgtccttgccaaccacagaggaattcgaggacgatgctatcaagaaggcccatatcgagaaagacttcatcgcattctgttcatccacccctgacaacgtgtcttggcgtcaccctaccatgggcagcgtcttcataggccgactgattgaacatatgcaggaatacgcttgttcctgtgatgtcgaagagattttccgaaaggtaaggttctccttcgagcaaccagacggcagagcacagatgcccaccacggaacgggtcacattaacgaggtgcttctacctgtttccaggtcattag

SEQ ID NO: 91853 - DNA, 1152 bp, Artificial Sequence
  derived and/or modified sequence
atggcagataaggtcctcaaggaaaagcggaaactgttcatcaggtcaatgggggaagggactatcaacgggctcttggatgaactgctgcagacccgtgtgctgaataaggaggaaatggaaaaggtgaagagagagaacgctactgttatggacaaaacccgcgcactgatcgacagcgtgatacccaagggagcccaggcttgccagatttgcattacatatatttgcgaggaggactcctacctagctggcactctcggactgtcagccgctccacaagctgtgcaggataaccccgctatgcccacatcttcaggctccgaagggaacgtcaaactttgttccctagaggaagcgcagcggatatggaagcagaaaagcgctgagatttatcctataatggataaaagttctaggacccggctggctctgataatatgtaacgaagaatttgactccatccccaggcggacaggcgctgaagtcgacattactggcatgacaatgctgctgcaaaatctcggttattctgttgatgtcaaaaagaacctgactgcatcagatatgacaaccgagcttgaagcttttgcccaccggcctgaacacaagacctccgactcaacgttcctagtgttcatgtcccacggaatccgagaaggaatatgcgggaaaaagcattctgaacaagtccctgacatactgcagctcaatgctatatttaacatgctcaatacaaagaactgcccaagtctgaaggataagcccaaagtgatcatcatacaggcctgtcgcggtgacagccccggagtcgtctggtttaaggactcagttggagtgtcaggaaacctgagtctgccaaccactgaggagtttgaggatgatgccattaagaaagcccatatcgagaaagactttatcgccttctgctcctccaccccagacaacgtgtcatggagacaccccaccatgggcagtgtctttatcggacgcctgattgaacacatgcaagagtatgcctgctcctgcgacgtggaggaaatcttccggaaagtgcggttcagctttgagcaacctgacgggagggcacagatgccgactaccgagcgcgtgacactcacgcggtgcttttatttatttccaggtcactag

SEQ ID NO: 91854 - DNA, 1152 bp, Artificial Sequence
  derived and/or modified sequence
atggccgacaaggttttgaaggaaaaacgcaaactctttattcggagtatgggagaaggaactattaacggcctattggacgaactccttcaaaccagggttctgaataaagaagaaatggaaaaggtcaaacgggagaatgccacggttatggacaagacaagagctctaattgatagtgtgatccccaagggggctcaggcctgccagatctgtattacctacatatgtgaggaagacagttatttggccggtacactcggcctgtccgccgcaccgcaggccgtgcaagataatcccgctatgcccacatcaagcggatccgagggtaacgtgaagttatgctcactggaagaggcccagaggatttggaagcaaaagtccgccgaaatatatcctatcatggataaaagctctcgtaccagactggcactgataatatgcaacgaggaattcgactctattccaaggcgcacgggcgcagaggtagacatcacagggatgactatgctgctccagaacctcggctacagtgttgacgtcaaaaaaaatcttacggcttctgatatgactaccgaactggaagcgttcgcccatcgcccagagcacaaaaccagcgattcaacattcctggtttttatgtcccacggaatcagggaagggatctgcgggaaaaaacatagtgaacaggttcctgacattctgcaactaaacgctatttttaacatgctgaacacgaagaattgcccgtcattgaaggataaaccaaaagtgattattatccaggcatgccggggtgattctcccggtgtagtatggtttaaagactctgtgggtgtatctggcaacctcagcctccccaccaccgaggagttcgaggacgatgcgattaagaaagcccacattgaaaaagacttcattgctttttgctcctctacacctgacaacgtctcctggagacacccaacaatggggtctgtttttattggacgtctgattgagcatatgcaagagtacgcttgctcctgtgatgtggaagagatattccgaaaggtccggttctccttcgagcagcccgacggtagagcccagatgcccaccacggaacgcgtgacacttactcggtgcttctatctcttcccaggccattag

SEQ ID NO: 91855 - DNA, 1281 bp, Artificial Sequence
  derived and/or modified sequence
gggaggagagaaaagccatggccgacaaggtcctgaaggagaagagaaagctgtttatccgttccatgggtgaaggtacaataaatggcttactggatgaattattacagacaagggtgctgaacaaggaagagatggagaaagtaaaacgtgaaaatgctacagttatggataagacccgagctttgattgactccgttattccgaaaggggcacaggcatgccaaatttgcatcacatacatttgtgaagaagacagttacctggcagggacgctgggactctcagcagctcctcaggcagtgcaggacaacccagctatgcccacatcctcaggctcagaagggaatgtcaagctttgctccctagaagaagctcaaaggatatggaaacaaaagtcggcagagatttatccaataatggacaagtcaagccgcacacgtcttgctctcattatctgcaatgaagaatttgacagtattcctagaagaactggagctgaggttgacatcacaggcatgacaatgctgctacaaaatctggggtacagcgtagatgtgaaaaaaaatctcactgcttcggacatgactacagagctggaggcatttgcacaccgcccagagcacaagacctctgacagcacgttcctggtgttcatgtctcatggtattcgggaaggcatttgtgggaagaaacactctgagcaagtcccagatatactacaactcaatgcaatctttaacatgttgaataccaagaactgcccaagtttgaaggacaaaccgaaggtgatcatcatccaggcctgccgtggtgacagccctggtgtggtgtggtttaaagattcagtaggagtttctggaaacctatctttaccaactacagaagagtttgaggatgatgctattaagaaagcccacatagagaaggattttatcgctttctgctcttccacaccagataatgtttcttggagacatcccacaatgggctctgtttttattggaagactcattgaacatatgcaagaatatgcctgttcctgtgatgtggaggaaattttccgcaaggttcgattttcatttgagcagccagatggtagagcgcagatgcccaccactgaaagagtgactttgacaagatgtttctacctcttcccaggacattaaaataaggaaactgtatgaatgtctgtgggcaggaagtgaagagatccttctgtaaaggtttttggaattatgtctgctgaataataaacttttttgaaataataaatctggt

SEQ ID NO: 91856 - DNA, 1264 bp, Artificial Sequence
  derived and/or modified sequence
atggccgacaaggtcctgaaggagaagagaaagctgtttatccgttccatgggtgaaggtacaataaatggcttactggatgaattattacagacaagggtgctgaacaaggaagagatggagaaagtaaaacgtgaaaatgctacagttatggataagacccgagctttgattgactccgttattccgaaaggggcacaggcatgccaaatttgcatcacatacatttgtgaagaagacagttacctggcagggacgctgggactctcagcagctcctcaggcagtgcaggacaacccagctatgcccacatcctcaggctcagaagggaatgtcaagctttgctccctagaagaagctcaaaggatatggaaacaaaagtcggcagagatttatccaataatggacaagtcaagccgcacacgtcttgctctcattatctgcaatgaagaatttgacagtattcctagaagaactggagctgaggttgacatcacaggcatgacaatgctgctacaaaatctggggtacagcgtagatgtgaaaaaaaatctcactgcttcggacatgactacagagctggaggcatttgcacaccgcccagagcacaagacctctgacagcacgttcctggtgttcatgtctcatggtattcgggaaggcatttgtgggaagaaacactctgagcaagtcccagatatactacaactcaatgcaatctttaacatgttgaataccaagaactgcccaagtttgaaggacaaaccgaaggtgatcatcatccaggcctgccgtggtgacagccctggtgtggtgtggtttaaagattcagtaggagtttctggaaacctatctttaccaactacagaagagtttgaggatgatgctattaagaaagcccacatagagaaggattttatcgctttctgctcttccacaccagataatgtttcttggagacatcccacaatgggctctgtttttattggaagactcattgaacatatgcaagaatatgcctgttcctgtgatgtggaggaaattttccgcaaggttcgattttcatttgagcagccagatggtagagcgcagatgcccaccactgaaagagtgactttgacaagatgtttctacctcttcccaggacattaaaataaggaaactgtatgaatgtctgtgggcaggaagtgaagagatccttctgtaaaggtttttggaattatgtctgctgaataataaacttttttgaaataataaatctggt

SEQ ID NO: 91857 - DNA, 1237 bp, Artificial Sequence
  derived and/or modified sequence
agtttcagtcacacaagaagggaggagagaaaagccatggccgacaaggtcctgaaggagaagagaaagctgtttatccgttccatgggtgaaggtacaataaatggcttactggatgaattattacagacaagggtgctgaacaaggaagagatggagaaagtaaaacgtgaaaatgctacagttatggataagacccgagctttgattgactccgttattccgaaaggggcacaggcatgccaaatttgcatcacatacatttgtgaagaagacagttacctggcagggacgctgggactctcagcagctcctcaggcagtgcaggacaacccagctatgcccacatcctcaggctcagaagggaatgtcaagctttgctccctagaagaagctcaaaggatatggaaacaaaagtcggcagagatttatccaataatggacaagtcaagccgcacacgtcttgctctcattatctgcaatgaagaatttgacagtattcctagaagaactggagctgaggttgacatcacaggcatgacaatgctgctacaaaatctggggtacagcgtagatgtgaaaaaaaatctcactgcttcggacatgactacagagctggaggcatttgcacaccgcccagagcacaagacctctgacagcacgttcctggtgttcatgtctcatggtattcgggaaggcatttgtgggaagaaacactctgagcaagtcccagatatactacaactcaatgcaatctttaacatgttgaataccaagaactgcccaagtttgaaggacaaaccgaaggtgatcatcatccaggcctgccgtggtgacagccctggtgtggtgtggtttaaagattcagtaggagtttctggaaacctatctttaccaactacagaagagtttgaggatgatgctattaagaaagcccacatagagaaggattttatcgctttctgctcttccacaccagataatgtttcttggagacatcccacaatgggctctgtttttattggaagactcattgaacatatgcaagaatatgcctgttcctgtgatgtggaggaaattttccgcaaggttcgattttcatttgagcagccagatggtagagcgcagatgcccaccactgaaagagtgactttgacaagatgtttctacctcttcccaggacattaaaataaggaaactgtatgaatgtctgtgggcaggtacatgtgtatggtcg

SEQ ID NO: 91858 - DNA, 1392 bp, Artificial Sequence
  derived and/or modified sequence
tttcagtcacacaagaagggaggagagaaaagccatggccgacaaggtcctgaaggagaagagaaagctgtttatccgttccatgggtgaaggtacaataaatggcttactggatgaattattacagacaagggtgctgaacaaggaagagatggagaaagtaaaacgtgaaaatgctacagttatggataagacccgagctttgattgactccgttattccgaaaggggcacaggcatgccaaatttgcatcacatacatttgtgaagaagacagttacctggcagggacgctgggactctcagcagatttatccaataatggacaagtcaagccgcacacgtcttgctctcattatctgcaatgaagaatttgacagtattcctagaagaactggagctgaggttgacatcacaggcatgacaatgctgctacaaaatctggggtacagcgtagatgtgaaaaaaaatctcactgcttcggacatgactacagagctggaggcatttgcacaccgcccagagcacaagacctctgacagcacgttcctggtgttcatgtctcatggtattcgggaaggcatttgtgggaagaaacactctgagcaagtcccagatatactacaactcaatgcaatctttaacatgttgaataccaagaactgcccaagtttgaaggacaaaccgaaggtgatcatcatccaggcctgccgtggtgacagccctggtgtggtgtggtttaaagattcagtaggagtttctggaaacctatctttaccaactacagaagagtttgaggatgatgctattaagaaagcccacatagagaaggattttatcgctttctgctcttccacaccagataatgtttcttggagacatcccacaatgggctctgtttttattggaagactcattgaacatatgcaagaatatgcctgttcctgtgatgtggaggaaattttccgcaaggtaagatgctagtggatgctattttcactctacttccctgaatgcttggctattgcaattggaagcatagaaagcagatccagacaagtttatcttccaataatgctcttctttccaaaagagttttggagttctttggagagtggacaaacccaggagcctaatccaatctattaagacccacagccttgagaaaacaatcatttagtttcaccccgctcctgccctgcagagacaaatgaatggactctaatttacctgtgtctctcatggctattagatccagcagcagatttaaaatgccctgaggagggtcattcaatgcttacatacatatatggttatacttgttgcagatggaagtactttttgtttttgtcacttattttgctatatttgttgtagttttttggcataactc

SEQ ID NO: 91859 - DNA, 1152 bp, Artificial Sequence
  derived and/or modified sequence
atggccgacaaggtgctgaaggagaagagaaagctgttcatcagaagcatgggcgagggcaccatcaacggcctgctggacgagctgctgcagaccagagtgctgaacaaggaggagatggagaaggtgaagagagagaacgccaccgtgatggacaagaccagagccctgatcgacagcgtgatccccaagggcgcccaggcctgccagatctgcatcacctacatctgcgaggaggacagctacctggccggcaccctgggcctgagcgccgccccccaggccgtgcaggacaaccccgccatgcccaccagcagcggcagcgagggcaacgtgaagctgtgcagcctggaggaggcccagagaatctggaagcagaagagcgccgagatctaccccatcatggacaagagcagcagaaccagactggccctgatcatctgcaacgaggagttcgacagcatccccagaagaaccggcgccgaggtggacatcaccggcatgaccatgctgctgcagaacctgggctacagcgtggacgtgaagaagaacctgaccgccagcgacatgaccaccgagctggaggccttcgcccacagacccgagcacaagaccagcgacagcaccttcctggtgttcatgagccacggcatcagagagggcatctgcggcaagaagcacagcgagcaggtgcccgacatcctgcagctgaacgccatcttcaacatgctgaacaccaagaactgccccagcctgaaggacaagcccaaggtgatcatcatccaggcctgcagaggcgacagccccggcgtggtgtggttcaaggacagcgtgggcgtgagcggcaacctgagcctgcccaccaccgaggagttcgaggacgacgccatcaagaaggcccacatcgagaaggacttcatcgccttctgcagcagcacccccgacaacgtgagctggagacaccccaccatgggcagcgtgttcatcggcagactgatcgagcacatgcaggagtacgcctgcagctgcgacgtggaggagatcttcagaaaggtgagattcagcttcgagcagcccgacggcagagcccagatgcccaccaccgagagagtgaccctgaccagatgcttctacctgttccccggccactag

SEQ ID NO: 91860 - protein, 57 aa, Artificial Sequence
  derived and/or modified sequence
MPTGKQLADIGYKTFSTSMMLLTVYGGYLCSVRVYHYFQWRRAQRQAAEEQKTSGIM

SEQ ID NO: 91861 - DNA, 708 bp, Artificial Sequence
  derived and/or modified sequence
ggcaagccgaatcctagaggctaacccggcaggtgggagggagaaagttgctttctgcaccaatagctgaggcgttcagggttgtccagggacgctaccctcacgtgtctggttccgagtgctgcgttcggctgtgctgggaagttgcgtagacagtggcctcgagaccctgcctgcctgaggaggcctcggttggatgcgaaggagctgcagcatccagtgcctctccatgagaccataagctcctgtatgacagaagccatgttctttttagcggcctccgtagcatgatgggacaagatgccaactggcaagcagctagctgacattggctataagaccttctctacctccatgatgcttctcactgtgtatggggggtacctctgcagtgtccgagtctaccactatttccagtggcgcagggcccagcgccaggccgcagaagaacagaagacctcaggaatcatgtagaactggggggctttttctcctgagcagagaggcccaaggcatgctgtggagagacttcacctgccaccatttccaggtcaacaggactagagcgttgatggttttcaaaccctgttggaagaaagtgcccatggtttctctggttctgccagtttgacagtttatggaggcttttgaatcgtaatagcaatgtgagggtgaggtacacctacagacattaaataatttgctgtg

SEQ ID NO: 91862 - DNA, 677 bp, Artificial Sequence
  derived and/or modified sequence
gtggcctcgagaccctgcctgcctgaggaggcctcggttggatgcgaaggagctgcagcatccaggtacgctgccggctagggccgagcaggggctgccagtcccactgcctgcgcgcccacctgggccagtctccgcttgccgcgtcctcccatcccctagtctgcaggcctggtgcccttgaattcacccgcttctgttgcgttgcggaccgcgagctgcactgcttcctgcccaagcccaagctcctcgcagcagtaggggacaagatgccaactggcaagcagctagctgacattggctataagaccttctctacctccatgatgcttctcactgtgtatggggggtacctctgcagtgtccgagtctaccactatttccagtggcgcagggcccagcgccaggccgcagaagaacagaagacctcaggaatcatgtagaactggggggctttttctcctgagcagagaggcccaaggcatgctgtggagagacttcacctgccaccatttccaggtcaacaggactagagcgttgatggttttcaaaccctgttggaagaaagtgcccatggtttctctggttctgccagtttgacagtttatggaggcttttgaatcgtaatagcaatgtgagggtgaggtacacctacagacattaaataatttgctgtg

SEQ ID NO: 91863 - DNA, 739 bp, Artificial Sequence
  derived and/or modified sequence
ggaagttcaaagccggcctccagccagagtgacggcctgcgcggactcccgccttagtgggcggagttgtgccgcgtctgatgcgcagttccctttatagcgcggcaagccgaatcctagaggctaacccggcaggtgggagggagaaagttgctttctgcaccaatagctgaggcgttcagggttgtccagggacgctaccctcacgtgtctggttccgagtgctgcgttcggctgtgctgggaagttgcgtagacagtggcctcgagaccctgcctgcctgaggaggcctcggttggatgcgaaggagctgcagcatccaggggacaagatgccaactggcaagcagctagctgacattggctataagaccttctctacctccatgatgcttctcactgtgtatggggggtacctctgcagtgtccgagtctaccactatttccagtggcgcagggcccagcgccaggccgcagaagaacagaagacctcaggaatcatgtagaactggggggctttttctcctgagcagagaggcccaaggcatgctgtggagagacttcacctgccaccatttccaggtcaacaggactagagcgttgatggttttcaaaccctgttggaagaaagtgcccatggtttctctggttctgccagtttgacagtttatggaggcttttgaatcgtaatagcaatgtgagggtgaggtacacctacagacattaaataatttgctgtg

SEQ ID NO: 91864 - DNA, 580 bp, Artificial Sequence
  derived and/or modified sequence
tgcgttcggctgtgctgggaagttgcgtagacagtggcctcgagaccctgcctgcctgaggaggcctcggttggatgcgaaggagctgcagcatccaggcgcggtggctcacgccgtaatcccagcactttgggaggccaaggcgagtggatcacaaggggacaagatgccaactggcaagcagctagctgacattggctataagaccttctctacctccatgatgcttctcactgtgtatggggggtacctctgcagtgtccgagtctaccactatttccagtggcgcagggcccagcgccaggccgcagaagaacagaagacctcaggaatcatgtagaactggggggctttttctcctgagcagagaggcccaaggcatgctgtggagagacttcacctgccaccatttccaggtcaacaggactagagcgttgatggttttcaaaccctgttggaagaaagtgcccatggtttctctggttctgccagtttgacagtttatggaggcttttgaatcgtaatagcaatgtgagggtgaggtacacctacagacattaaataatttgctgtgtctgtg

SEQ ID NO: 91865 - DNA, 174 bp, Artificial Sequence
  derived and/or modified sequence
atgcccaccggcaagcagctggccgacatcggctacaagaccttcagcaccagcatgatgctgctgaccgtgtacggcggctacctgtgcagcgtgagagtgtaccactacttccagtggagaagagcccagagacaggccgccgaggagcagaagaccagcggcatcatgtag

SEQ ID NO: 91866 - DNA, 174 bp, Artificial Sequence
  derived and/or modified sequence
atgcccaccgggaaacagctggcggatatcggttataagaccttctctacgagtatgatgttgcttaccgtgtacggcggatacttgtgttcggtgagagtgtaccattattttcaatggcgccgtgcgcagaggcaagctgccgaagagcagaaaacatctggaatcatgtag

SEQ ID NO: 91867 - DNA, 174 bp, Artificial Sequence
  derived and/or modified sequence
atgcccacagggaagcagttagcagacattggttacaagaccttcagtactagcatgatgctgctgacagtctacgggggctacctgtgctcggtgcgagtctatcactactttcagtggcgcagggcccagcggcaggctgccgaggagcagaagacttccggaatcatgtag

SEQ ID NO: 91868 - DNA, 174 bp, Artificial Sequence
  derived and/or modified sequence
atgccgaccgggaagcagctcgccgacatcgggtataagactttttccacatccatgatgctgctgactgtgtatggtggctacctctgctccgtccgggtgtaccattattttcagtggcggagagctcaacggcaagctgccgaggagcagaaaacatctgggatcatgtag

SEQ ID NO: 91869 - DNA, 174 bp, Artificial Sequence
  derived and/or modified sequence
atgccaactggcaagcaactcgccgatatcgggtataaaacattttccacatcaatgatgcttctgacagtttacggagggtacctgtgttcagtccgtgtctaccactacttccaatggcggcgagcacagagacaggcagcagaagagcaaaagacaagtggtattatgtag

SEQ ID NO: 91870 - DNA, 174 bp, Artificial Sequence
  derived and/or modified sequence
atgcccaccgggaagcagctggccgacatcggctacaagaccttcagcacctccatgatgctgctgactgtgtatggaggctacctgtgcagcgtgcgggtgtaccactacttccagtggaggcgggcccagaggcaggccgctgaggagcagaagaccagcggcatcatgtag

SEQ ID NO: 91871 - DNA, 174 bp, Artificial Sequence
  derived and/or modified sequence
atgcccaccggcaagcagctggccgacatcggctacaagaccttcagtacttccatgatgctcctgactgtttacggagggtacctgtgcagcgtccgggtgtaccattatttccagtggagacgggctcagcggcaggctgcagaagaacagaaaacaagcggaataatgtag

SEQ ID NO: 91872 - DNA, 174 bp, Artificial Sequence
  derived and/or modified sequence
atgcccaccggcaagcagctggccgacatcggctacaagaccttctctacctccatgatgctgctcactgtttacggagggtacctttgtagcgttcgggtctatcattacttccagtggagacgtgcgcagcgccaggccgcggaggaacagaagacatcaggtattatgtag

SEQ ID NO: 91873 - DNA, 174 bp, Artificial Sequence
  derived and/or modified sequence
atgcccaccggcaagcagctggccgacatcggctacaagaccttctccacatccatgatgcttctgacagtttatgggggatacctctgtagcgtgcgcgtttatcattattttcagtggagacgggctcaacgccaggcagccgaggaacagaagactagcggaatcatgtag

SEQ ID NO: 91874 - DNA, 174 bp, Artificial Sequence
  derived and/or modified sequence
atgcccaccggcaagcagctggccgacatcggctacaagaccttctcgacatctatgatgttacttacagtgtacggcgggtatctgtgttccgtgagggtgtaccattactttcagtggcggcgggcacagagacaagctgcagaggagcagaagacctccgggataatgtag

SEQ ID NO: 91875 - DNA, 174 bp, Artificial Sequence
  derived and/or modified sequence
atgccgactggcaaacagctggccgatatcggatataaaaccttctccacctccatgatgttgttgacagtatacggcggatacctttgctcggtcagggtctaccattactttcagtggcgccgagcccaaaggcaggctgcagaggaacagaagacctcaggcattatgtag

SEQ ID NO: 91876 - DNA, 174 bp, Artificial Sequence
  derived and/or modified sequence
atgcctactggtaagcagctggctgacatcggttataaaaccttcagcacatccatgatgcttctgacagtttacggcggatatctctgttcagtgcgcgtgtaccactacttccagtggcgcagagcccagaggcaggctgccgaagaacagaagacatctggcatcatgtag

SEQ ID NO: 91877 - DNA, 174 bp, Artificial Sequence
  derived and/or modified sequence
atgccaacaggcaagcagctggccgacatcggatataagacattcagtacatctatgatgctcctaaccgtttatggtggttatctttgctcagtgcgggtgtaccattattttcagtggcggcgtgctcagaggcaagccgcagaggagcaaaagacatccggaatcatgtag

SEQ ID NO: 91878 - DNA, 174 bp, Artificial Sequence
  derived and/or modified sequence
atgcctactggcaaacagttagcagatataggttacaaaacattcagcacatcaatgatgttacttacagtttacggaggctacctttgctcggtccgcgtgtaccactacttccaatggcggagagcacagcgtcaggctgccgaggaacaaaagacctctggcatcatgtag

SEQ ID NO: 91879 - protein, 903 aa, Artificial Sequence
  derived and/or modified sequence
MSDSGSQLGSMGSLTMKSQLQITVISAKLKENKKNWFGPSPYVEVTVDGQSKKTEKCNNTNSPKWKQPLTVIVTPVSKLHFRVWSHQTLKSDVLLGTAALDIYETLKSNNMKLEEVVVTLQLGGDKEPTETIGDLSICLDGLQLESEVVTNGETTCSENGVSLCLPRLECNSAISAHCNLCLPGLSDSPISASRVAGFTGASQNDDGSRSKDETRVSTNGSDDPEDAGAGENRRVSGNNSPSLSNGGFKPSRPPRPSRPPPPTPRRPASVNGSPSATSESDGSSTGSLPPTNTNTNTSEGATSGLIIPLTISGGSGPRPLNPVTQAPLPPGWEQRVDQHGRVYYVDHVEKRTTWDRPEPLPPGWERRVDNMGRIYYVDHFTRTTTWQRPTLESVRNYEQWQLQRSQLQGAMQQFNQRFIYGNQDLFATSQSKEFDPLGPLPPGWEKRTDSNGRVYFVNHNTRITQWEDPRSQGQLNEKPLPEGWEMRFTVDGIPYFVDHNRRTTTYIDPRTGKSALDNGPQIAYVRDFKAKVQYFRFWCQQLAMPQHIKITVTRKTLFEDSFQQIMSFSPQDLRRRLWVIFPGEEGLDYGGVAREWFFLLSHEVLNPMYCLFEYAGKDNYCLQINPASYINPDHLKYFRFIGRFIAMALFHGKFIDTGFSLPFYKRILNKPVGLKDLESIDPEFYNSLIWVKENNIEECDLEMYFSVDKEILGEIKSHDLKPNGGNILVTEENKEEYIRMVAEWRLSRGVEEQTQAFFEGFNEILPQQYLQYFDAKELEVLLCGMQEIDLNDWQRHAIYRHYARTSKQIMWFWQFVKEIDNEKRMRLLQFVTGTCRLPVGGFADLMGSNGPQKFCIEKVGKENWLPRSHTCFNRLDLPPYKSYEQLKEKLLFAIEETEGFGQE

SEQ ID NO: 91880 - DNA, 2712 bp, Artificial Sequence
  derived and/or modified sequence
atgtcagatagcggatctcagcttggttcaatggggtcgctaacgatgaagtcccagctccagataacggtgatctctgcaaaactcaaggagaataagaagaattggttcggtccctccccctacgtggaggtgaccgttgacggtcagagcaaaaagacggagaagtgtaataacacgaacagcccgaagtggaagcaacctttgacagtgattgtcaccccagtctctaagttgcactttagagtttggtcgcatcagacgttgaagtccgacgttctgctgggcactgcagcgctggacatttatgaaacattgaagtcaaataatatgaagcttgaggaagtggtggttacactgcagctgggaggggacaaggagccgaccgaaacaatcggcgacctttcaatttgcctcgacggtttacagcttgagtcggaagttgtgactaacggggaaactacatgttccgaaaacggtgttagcctgtgtctgcccagattggaatgcaattccgccatttctgcccactgcaatctctgcctccctggcctttctgacagtcccatcagtgccagcagagtggctgggtttacaggagcctcacagaatgatgacggctctaggagcaaggatgagacaagagtgagcactaacggcagcgacgaccccgaggatgccggcgccggtgaaaaccgcagagtcagtggcaacaactcccctagcctgagcaatggggggttcaagccctcccgaccaccgagaccctcccgcccgccccccccgacaccaaggcgcccggcatccgtgaacgggtcaccgtccgccacctcagagagcgacgggtctagtacaggctccttaccgcctacaaatactaacacaaacacatcggagggcgctacaagcggtctcatcatcccactgacgatctctggagggtcaggcccacgccccctgaaccctgttacgcaagcgccactgccccccggatgggagcaacgggtggaccaacacggcagggtgtactatgtggatcacgttgaaaaacggacaacatgggaccggccagaaccccttcccccggggtgggaacggagagttgacaatatgggccggatttactacgttgatcactttacacgcacaaccacgtggcaaagaccgaccctagagtctgtcaggaattatgagcagtggcaacttcagcggagccagctgcagggtgccatgcagcagttcaatcaacggttcatctacggaaaccaggacttattcgccactagtcagtcaaaggagttcgatccgctgggtccattgcctccaggctgggagaagcggaccgactccaatggcagagtgtacttcgtgaaccacaacaccaggatcacccagtgggaagatccacgaagccaaggacagcttaacgagaagccactgccggaggggtgggaaatgcggtttactgtggatggaattccttatttcgtggatcataatcgaagaacaacaacatacattgaccctcgcaccgggaaatccgctctggataacggcccgcagatcgcctatgtcagggacttcaaggctaaggtacagtattttcggttctggtgccagcaactagcgatgccccagcacatcaagattaccgtgactcgcaagaccttgttcgaggactccttccaacagattatgtcttttagtccgcaggacctgcggagaagactctgggtgatcttcccgggtgaagagggcttagattacgggggggttgcccgagagtggttcttcctgctgagccatgaggtgctgaatcccatgtactgtctttttgagtacgcgggaaaagacaactactgccttcagatcaatccggcttcttatattaaccctgaccacctgaagtacttccgctttattggaaggttcatcgcgatggccctgttccacggcaaattcatcgacactggcttcagcctgccattctacaagagaatccttaataagcctgtcggtcttaaggacctggagagcatcgatcccgaattctataactccctcatatgggttaaggagaacaatatcgaggaatgtgatctggagatgtatttctcagtggataaggagatactcggggaaatcaagtctcacgatcttaagcctaatgggggcaacatcctagtcacagaagaaaacaaggaagagtacatccggatggtggctgaatggcgtttaagcaggggggtcgaggagcaaactcaagcattctttgaaggcttcaatgagatattgcctcagcagtacttgcagtacttcgatgccaaagagctggaggttctgctctgtggcatgcaagagatcgatctgaatgactggcagcgccacgcaatctatcggcactacgcacggacaagtaagcaaatcatgtggttttggcagttcgttaaggagattgataatgagaagcggatgcgcctactacagttcgtcacaggaacctgccgactgccagtcggcggttttgctgaccttatgggaagcaacggccctcaaaagttttgcattgagaaggttggcaaagagaattggctgcccagaagccacacctgctttaacaggctggatctgcccccctacaagagctatgaacagctcaaggagaagctgttatttgcaattgaggagactgagggattcggccaggagtag

SEQ ID NO: 91881 - DNA, 3730 bp, Artificial Sequence
  derived and/or modified sequence
gtctagggactgaggagtcgccgccgccccgagtcccggtaccatgcatttcacggtggccttgtggagacaacgccttaacccaaggaagtgactcaaactgtgagaacttcaggttttccaacctattggtggtatgtctgacagtggatcacaacttggttcaatgggtagcctcaccatgaaatcacagcttcagatcactgtcatctcagcaaaacttaaggaaaataagaagaattggtttggaccaagtccttacgtagaggtcacagtagatggacagtcaaagaagacagaaaaatgcaacaacacaaacagtcccaagtggaagcaaccccttacagttatcgttacccctgtgagtaaattacattttcgtgtgtggagtcaccagacactgaaatctgatgttttgttgggaactgctgcattagatatttatgaaacattaaagtcaaacaatatgaaacttgaagaagtagttgtgactttgcagcttggaggtgacaaagagccaacagagacaataggagacttgtcaatttgtcttgatgggctacagttagagtctgaagttgttaccaatggtgaaactacatgttcagaaaatggggtttcgctctgtttgcccaggctggagtgcaatagtgcgatctcggctcactgcaacctctgcctcccgggtttaagtgattctcctatctcagcctcccgagtagctgggtttacaggtgcttctcagaatgatgatggctccagatccaaggatgaaacaagagtgagcacaaatggatcagatgaccctgaagatgcaggagctggtgaaaataggagagtcagtgggaataattctccatcactctcaaatggtggttttaaaccttctagacctccaagaccttcacgaccaccaccacccaccccacgtagaccagcatctgtcaatggttcaccatctgccacttctgaaagtgatgggtctagtacaggctctctgccgccgacaaatacaaatacaaatacatctgaaggagcaacatctggattaataattcctcttactatatctggaggctcaggccctaggccattaaatcctgtaactcaagctcccttgccacctggttgggagcagagagtggaccagcacgggcgagtttactatgtagatcatgttgagaaaagaacaacatgggatagaccagaacctctacctcctggctgggaacggcgggttgacaacatgggacgtatttattatgttgaccatttcacaagaacaacaacgtggcagaggccaacactggaatccgtccggaactatgaacaatggcagctacagcgtagtcagcttcaaggagcaatgcagcagtttaaccagagattcatttatgggaatcaagatttatttgctacatcacaaagtaaagaatttgatcctcttggtccattgccacctggatgggagaagagaacagacagcaatggcagagtatatttcgtcaaccacaacacacgaattacacaatgggaagaccccagaagtcaaggtcaattaaatgaaaagcccttacctgaaggttgggaaatgagattcacagtggatggaattccatattttgtggaccacaatagaagaactaccacctatatagatccccgcacaggaaaatctgccctagacaatggacctcagatagcctatgttcgggacttcaaagcaaaggttcagtatttccggttctggtgtcagcaactggccatgccacagcacataaagattacagtgacaagaaaaacattgtttgaggattcctttcaacagataatgagcttcagtccccaagatctgcgaagacgtttgtgggtgatttttccaggagaagaaggtttagattatggaggtgtagcaagagaatggttctttcttttgtcacatgaagtgttgaacccaatgtattgcctgtttgaatatgcagggaaggataactactgcttgcagataaaccccgcttcttacatcaatccagatcacctgaaatattttcgttttattggcagatttattgccatggctctgttccatgggaaattcatagacacgggtttttctttaccattctataagcgtatcttgaacaaaccagttggactcaaggatttagaatctattgatccagaattttacaattctctcatctgggttaaggaaaacaatattgaggaatgtgatttggaaatgtacttctccgttgacaaagaaattctaggtgaaattaagagtcatgatctgaaacctaatggtggcaatattcttgtaacagaagaaaataaagaggaatacatcagaatggtagctgagtggaggttgtctcgaggtgttgaagaacagacacaagctttctttgaaggctttaatgaaattcttccccagcaatatttgcaatactttgatgcaaaggaattagaggtccttttatgtggaatgcaagagattgatttgaatgactggcaaagacatgccatctaccgtcattatgcaaggaccagcaaacaaatcatgtggttttggcagtttgttaaagaaattgataatgagaagagaatgagacttctgcagtttgttactggaacctgccgattgccagtaggaggatttgctgatctcatggggagcaatggaccacagaaattctgcattgaaaaagttgggaaagaaaattggctacccagaagtcatacctgttttaatcgcctggacctgccaccatacaagagctatgagcaactgaaggaaaagctgttgtttgccatagaagaaacagaaggatttggacaagagtaacttctgagaacttgcaccatgaatgggcaagaacttatttgcaatgtttgtccttctctgcctgttgcacatcttgtaaaattggacaatggctctttagagagttatctgagtgtaagtaaattaatgttctcatttagatttatctcccagtgatttctactcagcgtttccagaaatcaggtctgcaaatgactagtcagaaccttgcttaacatgagattttaacacaacaatgaaatttgccttgtcttattccactagtttattcctttaacaacaatattttatgtgtgtcaaaagtctcacttgggagtagtgtttttttcttttagacattctgcagacatgcagggaagtcctttggtaactgcaatatacaagattttcctattaagcctcttggtaagaggcatttgttaaaagtgcaagcttactcctgcttctggggatgtgagcaaaattcgggcttgtgttctccctctcattttagtctgacttgactattgtttttcctttctggcgcatgaatccatacatcattcctggaagtgaggcaagactcttgcatctctacaaagtagttttgtcaatttgaattcagggaaaagttggtcacagcctgcaaatgacttcatttggaagtctgattgtttcagttgcctgacaaatactacactttacaaacaatgttaacactgtgattccttcattgttttaagaagttaacctagggccgggcatggtggctcatacctgtaatcctagcactctgggaggccgaggcaggaggatccctttagcccaggagttaaagaccagcctgggcaacatagggagaccctgtcttttttttgggcagcgtggtgggggataaataaa

SEQ ID NO: 91882 - DNA, 2712 bp, Artificial Sequence
  derived and/or modified sequence
atgtctgacagcggcagccagctgggctccatgggcagcctgaccatgaagagccagctgcagatcaccgtcatcagcgccaagctgaaggagaacaagaagaactggtttggccccagcccctacgtggaggtgacagtggatggccagagcaagaagacagagaagtgcaacaacaccaacagccccaagtggaagcagcccctgaccgtcatcgtgacccctgtgtccaagctgcacttccgggtgtggagccaccagaccctgaagagtgatgtgctgctgggcacagctgccctggacatctatgagaccctgaagagcaacaacatgaagctggaggaggtggtggtgaccctgcagctgggcggggacaaggagcccacagagaccatcggggacctgagcatctgcctggatggcctgcagctggagagcgaggtggtgaccaatggagagaccacctgcagtgaaaatggagtgtccctgtgcctgccccggctggagtgcaacagcgccatcagcgcccactgcaacctgtgcctgcccggcctgagtgacagccccatcagcgccagccgggtggccggcttcaccggggccagccagaatgatgatggcagccgcagcaaggatgagaccagggtgtccaccaatggaagtgatgatcctgaagatgctggagctggagaaaatagaagagtgtctggcaacaacagccccagcctgagcaatggaggcttcaagcccagcaggcctccccggcccagcaggcctcctccacccaccccaagaagacctgcctctgtgaatggcagccccagcgccaccagcgagagtgatggcagcagcacaggcagcctgccccccaccaacaccaacaccaacaccagcgagggcgccaccagcggcctcatcatccccctgaccatcagcggcggcagcggcccccggcccctgaaccctgtgacccaggcccccctgcccccaggctgggagcagagggtggaccagcacggccgggtgtactacgtggaccacgtggagaagaggaccacctgggacaggcctgagcccctgcccccaggctgggagcggcgggtggacaacatgggccgcatctactacgtggaccacttcaccaggaccaccacctggcagaggcccaccctggagagcgtgagaaattatgagcagtggcagctgcagaggagccagctgcagggcgccatgcagcagttcaaccagcgcttcatctacggcaaccaggacctgtttgccaccagccagagcaaggagtttgaccccctgggccccctgcccccaggctgggagaagaggacagacagcaatggccgggtgtactttgtgaaccacaacacccgcatcacccagtgggaggaccccaggagccagggccagctgaatgagaagcccctgcctgagggctgggagatgaggttcaccgtggatggcatcccctactttgtggaccacaacagaaggaccaccacctacatcgaccccaggacaggcaagagcgccctggacaatggcccccagatcgcctacgtgcgggacttcaaggccaaggtgcagtacttccgcttctggtgccagcagctggccatgccccagcacatcaagatcaccgtgaccaggaagaccctgtttgaagattccttccagcagatcatgtccttcagcccccaggacctgcggcggcggctgtgggtgatcttccctggagaggagggcctggactatggaggagtggcccgggagtggttcttcctgctgagccatgaggtgctgaaccccatgtactgcctgtttgaatatgccggcaaggacaactactgcctgcagatcaacccagccagctacatcaacccagaccacctgaagtacttccgcttcatcggccgcttcatcgccatggccctcttccacggcaagttcatcgacaccggcttcagcctgcccttctacaagaggatcctgaacaagcctgtgggcctgaaggacctggagagcattgatcctgagttctacaacagcctcatctgggtgaaggagaacaacatcgaggagtgtgacctggagatgtacttctctgtggacaaggagatcctgggggagatcaagagccatgacctgaagcccaatggaggcaacatcctggtgacagaggagaacaaggaggagtacatccgcatggtggccgagtggaggctgagcagaggagtggaggagcagacccaggccttctttgagggcttcaatgagatcctgccccagcagtacctgcagtactttgatgccaaggagctggaggtgctgctgtgtggcatgcaggagattgacctgaatgactggcagagacatgccatctaccgccactacgcccggaccagcaagcagatcatgtggttctggcagtttgtgaaggagattgacaatgagaagaggatgaggctgctgcagtttgtgacaggcacctgccgcctgcctgtgggcggctttgctgacctgatgggcagcaatggcccccagaagttctgcatcgagaaggtgggcaaggagaactggctgcccaggagccacacctgcttcaaccggctggacctgcccccctacaagagctatgagcagctgaaggagaagctgctgtttgccatcgaggagacagagggcttcggccaggagtag

SEQ ID NO: 91883 - DNA, 2712 bp, Artificial Sequence
  derived and/or modified sequence
atgagcgacagcggcagccagctgggcagcatgggcagcctgaccatgaagtctcaactccaaatcaccgtgattagtgccaagctgaaggaaaacaagaaaaactggttcggtcctagtccttatgtagaagtgactgttgacgggcagagcaagaagaccgaaaaatgtaataataccaattccccaaagtggaagcagccactgaccgtgatagtgacacctgttagtaaactgcattttcgcgtctggtctcatcagactttgaaaagcgatgtgctgttgggcactgctgccctcgacatttacgaaactctcaagagcaataacatgaagttggaagaagtagttgtgaccttgcagctcgggggtgataaggaacccacagaaactatcggcgacttgagcatttgtctggacggtttgcaattggaatccgaggttgtgacaaacggagagacgacctgtagcgaaaacggcgtatcactgtgtttacccaggttagaatgtaatagtgcaataagcgcacattgcaacctttgtctgcctggcctgagcgattctccaatcagcgcgagcagggtggccgggtttactggcgctagccagaacgacgacgggtctagatccaaggacgagactcgggttagtaccaacggttcagacgatcccgaagatgccggtgccggcgaaaaccgcagggtctcgggtaataatagtccatctctgtccaatgggggcttcaaacctagccgaccgccacggcccagccggcccccaccacccacccctagacgtccagcttctgtaaacggcagcccctcagctactagcgagtctgatggttcaagcacaggttcactaccccccaccaacaccaatacaaacacctccgagggcgctaccagcgggctgatcattccccttacaatctctggcgggtctggcccccgaccccttaatcccgtcactcaagctcccttacctccaggctgggagcagcgggtcgatcaacatgggagagtatactacgtggatcacgtcgagaagaggaccacttgggacaggccagagcctttgcccccaggttgggaaagaagagtggataacatgggccgcatttactacgtagatcacttcaccagaaccacaacctggcagaggcccacgttagagagcgtccggaactacgaacaatggcagctgcagcgctctcagcttcagggcgctatgcaacagttcaaccagcgctttatatatggcaatcaagatctgtttgccaccagtcagtccaaagagttcgatcctctggggcccctccctcccggatgggagaagcgcacagactccaatggcagggtgtacttcgttaaccataatactaggattactcaatgggaggacccccgcagtcagggccagctcaacgagaaacctttaccagaaggctgggagatgagattcacagtggatggaattccctatttcgtcgatcacaatcggcgcaccactacctatatcgacccacgaacaggaaagtccgccctcgataatggacctcagatcgcatatgtgcgcgacttcaaggcaaaggtgcaatatttcagattctggtgccagcaactggcaatgcctcagcatataaaaattacggtcactcgaaagactctctttgaggattctttccaacagattatgtctttcagcccccaggacctgcgccgccgcctatgggtgatctttccaggtgaggaggggctcgactacggtggagtagcacgcgagtggttcttcctcctatcacatgaggttctgaatccaatgtactgtttattcgaatacgccgggaaagacaactactgcttgcaaatcaatcccgcttcctatattaaccctgaccatctcaagtacttccggttcattggccggttcatcgccatggccttgtttcatgggaaattcatcgatacaggtttcagtctgcccttttacaagcggatactcaacaagcccgtcggtctgaaggatcttgaatccatcgatccggagttctataattctttgatctgggtcaaggagaacaacattgaggaatgcgacttggagatgtacttctccgtggataaagaaatcttgggtgagatcaagagccatgatctcaaacctaacggtggaaacattctggtcaccgaggagaacaaagaggagtacattcggatggttgctgagtggcggctctctagaggcgttgaggagcagacccaagccttctttgaaggcttcaatgagatcctgccccagcaatacctccagtacttcgacgcaaaggaattggaagtcctactgtgcggaatgcaagagattgatctcaacgactggcagcgtcacgcaatatataggcactacgcccgaacatcaaagcagataatgtggttttggcagttcgttaaagaaattgacaatgaaaagcgtatgcggctgctgcaattcgttacaggcacatgtagactcccagtgggtggctttgcggatcttatggggtccaatggcccgcagaagttctgcatagaaaaagttggcaaggagaactggcttcctcgatcacatacttgcttcaatcggctagacctccccccttacaagtcatatgaacagcttaaagagaaactcctgtttgcaatcgaggaaacagagggctttggccaagagtag

SEQ ID NO: 91884 - DNA, 2712 bp, Artificial Sequence
  derived and/or modified sequence
atgagcgatagcggcagtcagcttgggtctatggggagtctgaccatgaaaagtcagctgcagattactgtaattagcgcaaagttgaaggagaacaagaagaactggtttggtccttccccatatgtagaggtgacagtcgacgggcagtccaaaaaaactgagaagtgcaataatacgaattctcccaaatggaagcagcctctgaccgtaatcgttacgcccgtgtccaagctgcatttccgcgtttggagtcatcagactctcaaatctgatgttctgcttggcactgcagccctcgatatctatgagaccctgaaaagcaacaatatgaagctggaagaggtagtggtgacactgcaattgggcggtgacaaagaacctaccgaaactatcggagacctcagtatttgtctggacggccttcagcttgagtctgaagtcgtcacaaacggcgaaacgacctgtagtgagaatggggtcagcctctgcctcccgcgtttagagtgcaacagtgcgatttcagcgcactgcaatctgtgtctacctggactctctgattcgcctatttctgcatcacgtgtggccggtttcaccggcgcttcccagaatgacgacggttctcgtagcaaggacgagactcgagtcagcaccaatggcagtgatgacccagaagatgcgggtgctggggaaaaccgccgagttagtggaaacaacagcccctcactgtctaacgggggattcaaaccctccagaccccctaggccaagccggccacccccaccgacaccacgccgtccggctagcgtgaacggaagccctagcgccaccagtgaatctgacggaagtagtactggatctctcccacccactaacaccaatacaaacactagcgaaggcgcaacctccggccttatcatccctttgacaattagcggcggatctgggcctagaccattaaatcccgtcactcaggctcccctgccccctggttgggagcagcgagtggatcagcatggccgagtatactatgtggaccacgtggagaagaggaccacctgggaccggccagagcctctgccccctgggtgggaacggagagtggacaacatgggccgtatctattacgtggaccactttactcgcactaccacctggcagcgccctaccttggagtcggtgaggaattacgaacagtggcagctccagcgctctcagttgcagggagcaatgcagcaattcaaccagcgctttatttatggcaaccaggatctctttgctacctcccagtcaaaagaattcgatcctctgggcccactgccaccgggatgggagaagaggaccgatagcaacgggagggtttattttgtgaaccacaacacgagaatcactcaatgggaagaccctcgctctcaaggacagttgaatgaaaagccccttccagagggatgggagatgcgttttacagtggacggcatcccgtatttcgtcgaccataacagaaggacaactacatacattgaccccaggacggggaaaagcgcccttgataatggaccgcagatcgcctatgttcgcgacttcaaagccaaggtgcagtattttagattttggtgtcagcaactagccatgcctcagcacatcaaaatcacggttactagaaaaactttgtttgaagatagtttccagcaaatcatgtctttcagccctcaggacctgagacgacgactgtgggtcatcttccccggtgaagagggactggattatggcggagttgccagggagtggtttttcctgctcagccatgaggtgctgaaccccatgtattgcctttttgaatacgcagggaaggacaactattgcttgcaaatcaatcctgctagctacatcaatcccgaccacctgaaatactttagattcatagggcgattcatcgccatggcactgtttcatggaaagttcatcgacaccggcttcagtttgcctttttataagcggatactcaacaaacccgtgggattaaaggacctggagtccatcgacccagaattctataattccctgatctgggtgaaggaaaataatattgaggagtgcgacctggagatgtatttttccgtggacaaggagatcctaggcgagatcaaatctcacgacctgaagccaaacggtggtaacatcttagtgactgaagagaacaaggaggaatatatccgtatggtggccgagtggcgactatccaggggcgttgaggagcagacacaagccttcttcgagggattcaacgaaattctcccccagcagtatctgcaatatttcgacgctaaggagttggaagttctcctgtgcggtatgcaggaaattgacctcaatgactggcagcgccacgcaatctacagacactacgccagaacctctaagcaaatcatgtggttttggcagttcgtcaaagaaatagataacgagaaacgcatgcgtctgcttcaatttgtgaccggaacctgtagactgcccgtcggagggttcgctgatttaatgggatcaaatggtccacagaagttctgcatcgaaaaagtcggtaaggagaattggcttccccgaagtcacacgtgcttcaacagactagacctgcccccttataaatcctatgagcagttgaaggagaagttacttttcgcaatagaggagaccgaagggttcgggcaggagtag

SEQ ID NO: 91885 - DNA, 2712 bp, Artificial Sequence
  derived and/or modified sequence
atgagcgacagcggcagccagctgggcagcatgggcagcctgaccatgaagagccagctgcagatcaccgtgatcagcgccaagctgaaggagaacaagaagaactggttcggccccagcccctacgtggaggtgaccgtggacggccagagcaagaagaccgagaagtgcaacaacaccaacagccccaagtggaagcagcccctgaccgtgatcgtgacccccgtgagcaagctgcacttcagagtgtggagccaccagaccctgaagagcgacgtgctgctgggcaccgccgccctggacatctacgagaccctgaagagcaacaacatgaagctggaggaggtggtggtgaccctgcagctgggcggcgacaaggagcccaccgagaccatcggcgacctgagcatctgcctggacggcctgcagctggagagcgaggtggtgaccaacggcgagaccacctgcagcgagaacggcgtgagcctgtgcctgcccagactggagtgcaacagcgccatcagcgcccactgcaacctgtgcctgcccggcctgagcgacagccccatcagcgccagcagagtggccggcttcaccggcgccagccagaacgacgacggcagcagaagcaaggacgagaccagagtgagcaccaacggcagcgacgaccccgaggacgccggcgccggcgagaacagaagagtgagcggcaacaacagccccagcctgagcaacggcggcttcaagcccagcagaccccccagacccagcagaccccccccccccacccccagaagacccgccagcgtgaacggcagccccagcgccaccagcgagagcgacggcagcagcaccggcagcctgccccccaccaacaccaacaccaacaccagcgagggcgccaccagcggcctgatcatccccctgaccatcagcggcggcagcggccccagacccctgaaccccgtgacccaggcccccctgccccccggctgggagcagagagtggaccagcacggcagagtgtactacgtggaccacgtggagaagagaaccacctgggacagacccgagcccctgccccccggctgggagagaagagtggacaacatgggcagaatctactacgtggaccacttcaccagaaccaccacctggcagagacccaccctggagagcgtgagaaactacgagcagtggcagctgcagagaagccagctgcagggcgccatgcagcagttcaaccagagattcatctacggcaaccaggacctgttcgccaccagccagagcaaggagttcgaccccctgggccccctgccccccggctgggagaagagaaccgacagcaacggcagagtgtacttcgtgaaccacaacaccagaatcacccagtgggaggaccccagaagccagggccagctgaacgagaagcccctgcccgagggctgggagatgagattcaccgtggacggcatcccctacttcgtggaccacaacagaagaaccaccacctacatcgaccccagaaccggcaagagcgccctggacaacggcccccagatcgcctacgtgagagacttcaaggccaaggtgcagtacttcagattctggtgccagcagctggccatgccccagcacatcaagatcaccgtgaccagaaagaccctgttcgaggacagcttccagcagatcatgagcttcagcccccaggacctgagaagaagactgtgggtgatcttccccggcgaggagggcctggactacggcggcgtggccagagagtggttcttcctgctgagccacgaggtgctgaaccccatgtactgcctgttcgagtacgccggcaaggacaactactgcctgcagatcaaccccgccagctacatcaaccccgaccacctgaagtacttcagattcatcggcagattcatcgccatggccctgttccacggcaagttcatcgacaccggcttcagcctgcccttctacaagagaatcctgaacaagcccgtgggcctgaaggacctggagagcatcgaccccgagttctacaacagcctgatctgggtgaaggagaacaacatcgaggagtgcgacctggagatgtacttcagcgtggacaaggagatcctgggcgagatcaagagccacgacctgaagcccaacggcggcaacatcctggtgaccgaggagaacaaggaggagtacatcagaatggtggccgagtggagactgagcagaggcgtggaggagcagacccaggccttcttcgagggcttcaacgagatcctgccccagcagtacctgcagtacttcgacgccaaggagctggaggtgctgctgtgcggcatgcaggagatcgacctgaacgactggcagagacacgccatctacagacactacgccagaaccagcaagcagatcatgtggttctggcagttcgtgaaggagatcgacaacgagaagagaatgagactgctgcagttcgtgaccggcacctgcagactgcccgtgggcggcttcgccgacctgatgggcagcaacggcccccagaagttctgcatcgagaaggtgggcaaggagaactggctgcccagaagccacacctgcttcaacagactggacctgcccccctacaagagctacgagcagctgaaggagaagctgctgttcgccatcgaggagaccgagggcttcggccaggagtag

SEQ ID NO: 91886 - DNA, 2259 bp, Artificial Sequence
  derived and/or modified sequence
atgaagttggaagaggtagtggttacacttcagctgggcggcgacaaagagccgacggaaacaattggggatctgtcaatttgtctcgatggcctgcagttggagagcgaggtggtcactaatggtgagaccacctgctccgaatcagcttctcaaaacgatgatggaagtaggagtaaggatgaaaccagagtgtccaccaacggaagtgacgaccctgaagacgccggggctggagaaaataggagagtgtccggcaacaattctccttctctgtctaacggcggcttcaagccttctcgcccacctcgcccatcccggcccccgcctccaacaccccggcgtccagcatctgtaaatggatccccgagcgctacctccgagtcagacggttcctctaccggatctctgcctcctactaataccaatacgaatacatccgaaggcgcaacatccggtcttattattccccttacaatctccggcgggagcgggccccggccattgaatcctgttacgcaagctcccctgcctccaggatgggaacagagagtagaccagcacgggcgggtctattatgtagaccatgtggagaagcggacaacatgggatcggccggagccgttgcccccaggatgggaacggagggtggataatatgggcaggatctactatgtcgatcatttcactcggacaaccacttggcaaaggcccactctggaaagcgtcaggaactacgagcaatggcagctgcaacgatcccaactgcagggcgcaatgcagcagttcaaccaacgctttatttacggcaaccaggatttgtttgccacatctcaatccaaagaattcgaccctttgggtccgctgcccccagggtgggagaaaaggacggatagcaatgggagagtatattttgtgaatcataatacccgtataacccagtgggaagacccacgcagccaaggacaactgaatgagaagccgttgcccgagggttgggagatgcgttttacagttgatgggatcccttattttgtggatcacaacagaagaacaaccacatacatagacccaaggaccggaaaaagtgcgctggacaacggtccacagatagcttatgtgagagattttaaggcaaaagtccagtactttcgcttctggtgccagcagttagccatgcctcagcacattaagatcaccgtcacacgcaaaacgcttttcgaggactctttccaacagatcatgagcttttccccgcaggacctgcggagaagactgtgggtgatcttccccggcgaggagggtctggattacggaggcgtggcgcgggaatggttctttttgctaagtcacgaggtgctgaaccccatgtattgtttgtttgaatacgctggcaaggataactactgtttacagatcaatccagcatcttacataaaccccgaccacttgaagtatttccgcttcatcggtcgcttcatcgccatggccctgtttcacggaaagtttatcgacacagggtttagcctgccgttttacaaacggatcctgaacaagcctgttggactgaaagatctggagtctattgatcccgaattctacaactctctcatttgggttaaggaaaacaacattgaagaatgtgacctagaaatgtacttctcagtcgacaaggaaatcctgggagaaattaagagccacgaccttaagcccaacggcggtaacattttggtgacagaggagaacaaggaggaatatattcgaatggtcgccgagtggcggctgtcgagaggggtggaagaacagacacaggcgttttttgagggatttaacgaaattctcccacagcagtacctgcagtacttcgatgccaaggaactggaagtcttactgtgtgggatgcaagaaatcgacctaaacgattggcagcggcacgcaatctatagacactacgccaggacgtccaagcagattatgtggttctggcaattcgtaaaagagatagataatgaaaaacgcatgcgcttgctgcagtttgtaacagggacctgccgactgcccgtaggcggtttcgccgacctaatgggttccaatggccctcaaaaattttgtattgagaaagtgggaaaagaaaactggctgcctcgttctcatacttgctttaacagactggaccttccaccttacaaatcttatgagcagctgaaagagaaactgctctttgctattgaagagacagagggctttggccaggaatag

SEQ ID NO: 91887 - DNA, 2259 bp, Artificial Sequence
  derived and/or modified sequence
atgaagctggaggaggtggtggtgaccctgcagctgggcggggacaaggagcccacagagaccatcggggacctgagcatctgcctggatggcctgcagctggagagcgaggtggtgaccaatggagagaccacctgcagcgagagcgccagccagaatgatgatggcagccgcagcaaggatgagaccagggtgtccaccaacggcagtgatgatcctgaagatgctggggccggggagaacagaagagtgtctggcaacaacagccccagcctgagcaatggaggcttcaagcccagccggcccccccggcccagccggcccccaccacccaccccccggcggcctgcctctgtgaatggcagccccagcgccaccagcgagagtgatggcagcagcacaggcagcctgccccccaccaacaccaacaccaacaccagcgagggcgccaccagcggcctcatcatccccctgaccatcagcggcggcagcggcccccggcccctgaaccctgtgacccaggcccccctgcccccaggctgggagcagagggtggaccagcacggccgggtgtactacgtggaccacgtggagaagaggaccacctgggacaggcctgagcccctgcccccaggctgggagaggagagtggacaacatgggccgcatctactacgtggaccacttcaccaggaccaccacctggcagaggcccaccctggagagcgtgaggaactatgagcagtggcagctgcagaggagccagctgcagggcgccatgcagcagttcaaccagcgcttcatctacggcaaccaggacctgtttgccaccagccagagcaaggagtttgaccccctgggccccctgcccccaggctgggagaagaggacagacagcaatggccgggtgtactttgtgaaccacaacacccgcatcacccagtgggaggaccccaggagccagggccagctgaatgagaagcccctgcctgagggctgggagatgaggttcaccgtggatggcatcccctactttgtggaccacaacagaaggaccaccacctacatcgaccccaggacaggcaagagcgccctggacaatggcccccagatcgcctacgtgcgggacttcaaggccaaggtgcagtacttccgcttctggtgccagcagctggccatgccccagcacatcaagatcaccgtgaccaggaagaccctgtttgaggacagcttccagcagatcatgtccttcagcccccaggacctgcggcggcggctgtgggtgatcttccctggagaggagggcctggactatggaggagtggcccgggagtggttcttcctgctgagccatgaggtgctgaaccccatgtactgcctgtttgaatatgctgggaaggacaactactgcctgcagatcaacccagccagctacatcaacccagaccacctgaagtacttccgcttcatcggccgcttcatcgccatggccctcttccacggcaagttcatcgacaccggcttcagcctgcccttctacaagaggatcctgaacaagcctgtgggcctgaaggacctggagagcattgatcctgagttctacaacagcctcatctgggtgaaggagaacaacattgaagaatgtgacctggagatgtacttctctgtggacaaggagatcctgggggagatcaagagccatgacctgaagcccaacggcggcaacatcctggtgacagaggagaacaaggaggagtacatccgcatggtggccgagtggaggctgagccggggcgtggaggagcagacccaggccttctttgagggcttcaatgagatcctgccccagcagtacctgcagtactttgatgccaaggagctggaggtgctgctgtgtggcatgcaggagattgacctgaatgactggcagagacatgccatctaccgccactacgcccggaccagcaagcagatcatgtggttctggcagtttgtgaaggagattgacaatgagaagaggatgaggctgctgcagtttgtgacaggcacctgccgcctgcctgtgggcggctttgctgacctgatgggcagcaatggcccccagaagttctgcatcgagaaggtgggcaaggagaactggctgcccaggagccacacctgcttcaaccggctggacctgcccccctacaagagctatgagcagctgaaggagaagctgctgtttgccatcgaggagacagagggcttcggccaggagtag

SEQ ID NO: 91888 - DNA, 2259 bp, Artificial Sequence
  derived and/or modified sequence
atgaagctggaggaggtggtggtgaccctgcagctgggcggcgacaaagaacccacagagacaattggggacttgtctatctgtctggacggccttcagcttgagtctgaggtcgtcaccaatggggagacgacctgctcagagtctgcatcacaaaacgacgatggatcaagaagtaaggatgaaacccgcgtatccactaatggaagcgatgaccccgaagacgctggagcaggagaaaacagaagggtgtctgggaacaattctccatctctctccaatggggggttcaagcccagtcgcccaccacgcccttcccgacctccccctccaacccccagaagacccgcttctgtaaacggtagtccctctgctacatccgaaagtgatggcagtagtactgggtcccttcctcccacaaatacaaacacaaatacatcagaaggcgccacttctggcctcataattccactgacgatatcaggagggtccgggcctcgccccttgaatcccgtgacacaggcgcctctaccccccgggtgggagcagcgggtggaccagcacggaagggtatattatgtggaccacgtcgaaaagcgaaccacctgggatagacctgagccgctgcctcccggatgggagcgaagggttgataatatgggcagaatttactacgtagaccatttcaccaggacaaccacatggcaaaggccgacattggagagcgtgaggaactacgagcaatggcagctgcaacgtagccagcttcagggtgcgatgcagcagtttaatcagcgatttatctatgggaaccaggatctattcgccacaagccagtccaaggaattcgaccccctaggcccacttcctcctgggtgggagaagcgtacagattcaaacggcagggtgtactttgttaatcacaacactcggataacccagtgggaagatccaaggtcacagggccagttgaacgaaaagcctttaccggaaggttgggaaatgagatttaccgtggatggaatcccgtactttgtcgaccacaacaggcggactaccacctatatagatccccggactggcaagagcgccctagacaacggaccccagatcgcatacgtgagggatttcaaagccaaggtccagtattttagattttggtgtcagcaactagccatgccacaacacattaaaattacagtgactcggaaaactctcttcgaggactcttttcaacaaataatgtcttttagcccgcaagaccttagaagacgactgtgggtgatctttcctggcgaagagggtctagattatggtggcgttgctcgtgagtggtttttcttactgagtcatgaagtgctgaaccccatgtattgtctgtttgaatacgcgggaaaagataattattgcttgcagatcaaccccgcctcctatatcaacccggaccatctgaagtactttaggtttataggacgtttcattgcaatggcactgtttcatgggaaatttatcgacacggggttctccttaccattttataagaggatcttaaacaaaccagtgggtttgaaagatctggaaagcattgatcccgaattttacaactcactgatttgggttaaggagaacaacatcgaggagtgcgatctagaaatgtactttagcgttgacaaagagattctgggggaaatcaagagccatgaccttaagcccaacggtggaaatatactggtcactgaagaaaacaaggaagagtacatccgaatggtcgccgaatggcgcctgtcgcgaggagtggaggagcagacgcaggccttcttcgaggggttcaacgaaatactgccacagcaatatctgcaatatttcgatgccaaggagctagaggtattactctgcggaatgcaagaaatagatctaaacgattggcagagacatgctatctaccggcattatgccagaaccagtaaacagattatgtggttttggcagttcgtcaaagagattgacaatgaaaaaagaatgagattgcttcaatttgtgacagggacatgcaggctgccagtcggagggttcgccgatctgatgggttccaatggcccccagaagttctgtatcgaaaaggtgggaaaagagaactggctgcctcgaagtcatacttgtttcaaccgccttgacctccccccttacaagtcttatgaacagctgaaggagaagctcctatttgcaatagaagaaacggaaggatttggccaggagtag

SEQ ID NO: 91889 - DNA, 2259 bp, Artificial Sequence
  derived and/or modified sequence
atgaagctcgaggaagtggtagttaccttgcagctcggtggtgacaaggaaccgacagagacaattggcgatctgagtatatgcttggacggtctgcagctggagagcgaggtcgttacaaatggagagactacttgctccgagtcagcttctcagaacgatgatgggagccgctctaaagacgaaacgcgcgtttctaccaacggaagcgatgatccagaggacgcaggggctggagagaatagaagggtctcagggaataatagtccatccctgtccaatggaggatttaagcctagtcggccaccgaggccatcaagacctcctcctccaacccctaggagacctgcttccgtcaacggcagtccgtccgccaccagtgagtctgatggatcaagtaccggatcactccctcccacaaacacgaacaccaatacaagcgaaggcgctacaagcggactgattatccctctgacaatctctggcggtagcggccctaggcctttaaacccggtgacccaggcccctctgccgcctgggtgggagcaaagggtggaccagcacggccgtgtgtactacgtggaccacgtggagaaacgaactacatgggatcgcccagaacctcttcccccaggctgggaacggagagtggacaatatgggccgtatctactatgtggaccatttcaccaggacaactacgtggcagcggcctactctggagagcgtcaggaattacgaacagtggcaactacagagaagccagctacagggggcaatgcagcagtttaaccagcgttttatttacggaaatcaagatctgttcgccacatcccagagtaaggaatttgaccctctgggccctctgccacctggatgggaaaaacggacggatagcaatggtagagtctacttcgtgaaccataacacacgtatcacccagtgggaggacccgcgttcccagggacaacttaatgaaaagccactcccagaaggctgggagatgaggtttacagttgacggaattccgtacttcgttgaccacaacagacgaactaccacctacattgacccaagaacagggaagtctgcacttgataatgggccacagatcgcttatgttagggactttaaagcaaaagtccagtacttccggttctggtgtcagcagctagccatgccccagcacattaagatcacagtgactagaaaaaccctgttcgaggactcgttccagcaaatcatgtcattttccccccaggacctcagacggaggctgtgggtcatctttccaggagaggagggactcgattacggaggggtcgcgcgtgaatggttttttttgctgtcccacgaggtcctcaaccccatgtactgccttttcgagtacgctggcaaagataactactgcctccagatcaaccccgctagctacattaatcctgatcacctgaaatactttcgatttataggcaggtttattgcaatggctttatttcacggtaaatttatcgacaccggcttctccttgccattctacaagcgtattttgaataagccggtaggtctgaaagacctagagtctatcgacccggagttctacaattctctaatttgggtcaaggaaaacaacatcgaggagtgcgatctggagatgtattttagtgtagataaagagattctgggcgaaatcaagagccatgacctcaaaccgaatgggggaaacatcctggtcacagaggagaacaaggaggaatatatccgtatggtggcagagtggagactttcgcgcggtgttgaggagcaaacgcaagctttcttcgaaggcttcaacgaaatccttccccagcagtatctgcagtatttcgatgccaaggaactggaggtcctgttgtgcggcatgcaggagatcgacctcaatgattggcagcggcatgccatctaccggcactacgcaagaactagcaagcagatcatgtggttctggcagtttgtcaaggagattgataatgagaagcggatgcgcctgctccagttcgtcacggggacatgccgcctgccagtggggggattcgccgatctgatgggctcaaacggaccacaaaagttttgcatcgaaaaggttggtaaggagaattggctcccaaggagccatacttgtttcaatcgactagacctacctccgtacaagtcttacgagcagcttaaagagaaactgttattcgctatagaggagaccgagggatttggtcaggagtag

SEQ ID NO: 91890 - DNA, 2259 bp, Artificial Sequence
  derived and/or modified sequence
atgaagctggaggaggtggtggtgaccctgcagctgggcggcgacaaggagcccaccgagaccatcggcgacctgagcatctgcctggacggcctgcagctggagagcgaggtggtgaccaacggcgagaccacctgcagcgagagcgccagccagaacgacgacggcagcagaagcaaggacgagaccagagtgagcaccaacggcagcgacgaccccgaggacgccggcgccggcgagaacagaagagtgagcggcaacaacagccccagcctgagcaacggcggcttcaagcccagcagaccccccagacccagcagaccccccccccccacccccagaagacccgccagcgtgaacggcagccccagcgccaccagcgagagcgacggcagcagcaccggcagcctgccccccaccaacaccaacaccaacaccagcgagggcgccaccagcggcctgatcatccccctgaccatcagcggcggcagcggccccagacccctgaaccccgtgacccaggcccccctgccccccggctgggagcagagagtggaccagcacggcagagtgtactacgtggaccacgtggagaagagaaccacctgggacagacccgagcccctgccccccggctgggagagaagagtggacaacatgggcagaatctactacgtggaccacttcaccagaaccaccacctggcagagacccaccctggagagcgtgagaaactacgagcagtggcagctgcagagaagccagctgcagggcgccatgcagcagttcaaccagagattcatctacggcaaccaggacctgttcgccaccagccagagcaaggagttcgaccccctgggccccctgccccccggctgggagaagagaaccgacagcaacggcagagtgtacttcgtgaaccacaacaccagaatcacccagtgggaggaccccagaagccagggccagctgaacgagaagcccctgcccgagggctgggagatgagattcaccgtggacggcatcccctacttcgtggaccacaacagaagaaccaccacctacatcgaccccagaaccggcaagagcgccctggacaacggcccccagatcgcctacgtgagagacttcaaggccaaggtgcagtacttcagattctggtgccagcagctggccatgccccagcacatcaagatcaccgtgaccagaaagaccctgttcgaggacagcttccagcagatcatgagcttcagcccccaggacctgagaagaagactgtgggtgatcttccccggcgaggagggcctggactacggcggcgtggccagagagtggttcttcctgctgagccacgaggtgctgaaccccatgtactgcctgttcgagtacgccggcaaggacaactactgcctgcagatcaaccccgccagctacatcaaccccgaccacctgaagtacttcagattcatcggcagattcatcgccatggccctgttccacggcaagttcatcgacaccggcttcagcctgcccttctacaagagaatcctgaacaagcccgtgggcctgaaggacctggagagcatcgaccccgagttctacaacagcctgatctgggtgaaggagaacaacatcgaggagtgcgacctggagatgtacttcagcgtggacaaggagatcctgggcgagatcaagagccacgacctgaagcccaacggcggcaacatcctggtgaccgaggagaacaaggaggagtacatcagaatggtggccgagtggagactgagcagaggcgtggaggagcagacccaggccttcttcgagggcttcaacgagatcctgccccagcagtacctgcagtacttcgacgccaaggagctggaggtgctgctgtgcggcatgcaggagatcgacctgaacgactggcagagacacgccatctacagacactacgccagaaccagcaagcagatcatgtggttctggcagttcgtgaaggagatcgacaacgagaagagaatgagactgctgcagttcgtgaccggcacctgcagactgcccgtgggcggcttcgccgacctgatgggcagcaacggcccccagaagttctgcatcgagaaggtgggcaaggagaactggctgcccagaagccacacctgcttcaacagactggacctgcccccctacaagagctacgagcagctgaaggagaagctgctgttcgccatcgaggagaccgagggcttcggccaggagtag

SEQ ID NO: 91891 - protein, 880 aa, Artificial Sequence
  derived and/or modified sequence
MAELYRVLEAGKIGIFESPTGTGKSLSLICGALSWLRDFEQKKREEEARLLETGTGPLHDEKDESLCLSSSCEGAAGTPRPAGEPAWVTQFVQKKEERDLVDRLKAEQARRKQREERLQQLQHRVQLKYAAKRLRQEEEERENLLRLSREMLETGPEAERLEQLESGEEELVLAEYESDEEKKVASRVDEDEDDLEEEHITKIYYCSRTHSQLAQFVHEVKKSPFGKDVRLVSLGSRQNLCVNEDVKSLGSVQLINDRCVDMQRSRHEKKKGAEEEKPKRRRQEKQAACPFYNHEQMGLLRDEALAEVKDMEQLLALGKEARACPYYGSRLAIPAAQLVVLPYQMLLHAATRQAAGIRLQDQVVIIDEAHNLIDTITGMHSVEVSGSQLCQAHSQLLQYVERYGKRLKAKNLMYLKQILYLLEKFVAVLGGNIKQNPNTQSLSQTGTELKTINDFLFQSQIDNINLFKVQRYCEKSMISRKLFGFTERYGAVFSSREQPKLAGFQQFLQSLQPRTTEALAAPADESQASTLRPASPLMHIQGFLAALTTANQDGRVILSRQGSLSQSTLKFLLLNPAVHFAQVVKECRAVVIAGGTMQPVSDFRQQLLACAGVEAERVVEFSCGHVIPPDNILPLVICSGISNQPLEFTFQKRELPQMMDEVGRILCNLCGVVPGGVVCFFPSYEYLRQVHAHWEKGGLLGRLAARKKIFQEPKSAHQVEQVLLAYSRCIQACGQERGQVTGALLLSVVGGKMSEGINFSDNLGRCVVMVGMPFPNIRSAELQEKMAYLDQTLPRAPGQAPPGKALVENLCMKAVNQSIGRAIRHQKDFASVVLLDQRYARPPVLAKLPAWIRARVEVKATFGPAIAAVQKFHREKSASS

SEQ ID NO: 91892 - protein, 556 aa, Artificial Sequence
  derived and/or modified sequence
EEEPLWQGCSAGLPWLPAEKKKGAEEEKPKRRRQEKQAACPFYNHEQMGLLRDEALAEVKDMEQLLALGKEARACPYYGSRLAIPAAQLVVLPYQMLLHAATRQAAGIRLQDQVVIIDEAHNLIDTITGMHSVEVSGSQLCQAHSQLLQYVERYGKRLKAKNLMYLKQILYLLEKFVAVLGGNIKQNPNTQSLSQTGTELKTINDFLFQSQIDNINLFKVQRYCEKSMISRKLFGFTERYGAVFSSREQPKLAGFQQFLQSLQPRTTEALAAPADESQASTLRPASPLMHIQGFLAALTTANQDGRVILSRQGSLSQSTLKFLLLNPAVHFAQVVKECRAVVIAGGTMQPVSDFRQQLLACAGVEAERVVEFSCGHVIPPDNILPLVICSGISNQPLEFTFQKRELPQMMDEVGRILCNLCGVVPGGVVCFFPSYEYLRQVHAHWEKGGLLGRLAARKKIFQEPKSAHQVEQVLLAYSRCIQACGQERGQVTGALLLSVVGGKMSEGINFSDNLGRCVVMVGMPFPNIRSAELQEKMAYLDQTLAGPSGTRRILPA

SEQ ID NO: 91893 - protein, 301 aa, Artificial Sequence
  derived and/or modified sequence
MSLRRHIGNPEYLMKRIPQNPRYQHIKSRLDTGNSMTKYTEKLEEIKKNYRYKKDELFKRLKVTTFAQLIIQVASLSDQTLEVTAEEIQRLEDNDSAASDPDAETTARTNGKGNPGEQSPSPEQFINNAGAGDSSRSTLQSVISGVGELDLDKGPVKKAEPHTKDKPYPDCPFLLLDVRDRDSYQQCHIVGAYSYPIATLSRTMNPYSNDILEYKNAHGKIIILYDDDERLASQAATTMCERGFENLFMLSGGRLNQANSSGRESKVPGARSAQNLPGGGPASHSNPRSLSSGHLQGKPWK

SEQ ID NO: 91894 - DNA, 906 bp, Artificial Sequence
  derived and/or modified sequence
atgtctctacgtcggcatatcggaaatcctgagtacctgatgaagcgcatccctcagaaccctagataccagcacatcaagagtagactcgataccggaaattccatgacgaaatacaccgagaaactggaggaaattaaaaaaaactaccgctataagaaagatgagctgttcaagcgtcttaaggttacaacttttgcccagttaataatacaagtggcctctctgtctgaccagacgctagaagttactgccgaagagatccagcggctggaggacaacgatagtgccgcatctgatcctgatgcggagactacagccaggacaaacggaaaaggaaatcccggggagcaatcaccatccccagagcagttcataaataatgccggtgccggagattcttcaagatctacccttcaaagtgttatctcaggcgtcggcgagctggacctggacaaaggaccagtgaagaaggccgagccccacaccaaggataagccctaccccgattgcccctttctgctgctggacgtaagggaccgggactcataccagcagtgtcacattgtcggggcctactcttatcccatcgcaaccttgagtcgaacaatgaatccctattccaatgatattttggagtataagaatgcccacggcaagatcatcatcttgtacgacgatgacgagagacttgcctctcaggctgcaacaaccatgtgtgagagaggctttgaaaatttgttcatgctgtctggggggcggctgaaccaggctaattccagcggtcgcgaatcaaaggtgcctggggcccggagcgctcagaatctgcccgggggcggtcctgcctcacactctaatcctcgctcgttgtcctccggccacttacagggtaaaccttggaaatag

SEQ ID NO: 91895 - DNA, 906 bp, Artificial Sequence
  derived and/or modified sequence
atgagcctgcggcggcacatcggcaaccctgagtacctgatgaagaggatcccccagaacccccgctaccagcacatcaagagccggctggacaccggcaacagcatgaccaagtacacagagaagctggaggagatcaagaagaactaccgctacaagaaggatgagctgttcaagaggctgaaggtgaccacctttgcccagctgatcatccaggtggccagcctgagtgaccagaccctggaggtgacagctgaggagatccagaggctggaggacaatgacagcgctgccagtgaccctgatgctgagaccacagcccggaccaacgggaagggcaaccctggagagcagagccccagccctgagcagttcatcaacaatgctggggccggggacagcagccgcagcaccctgcagagcgtcatcagcggcgtgggggagctggacctggacaagggccctgtgaagaaggccgagccccacaccaaggacaagccctacccagactgccccttcctgctgctggatgtgcgggaccgggacagctaccagcagtgccacatcgtgggcgcctacagctaccccatcgccaccctgagcaggaccatgaacccctacagcaatgacatcctggagtacaagaatgcccacggcaagatcatcatcctgtatgatgatgatgagcggctggccagccaggccgccaccaccatgtgtgagcggggctttgaaaatctcttcatgctgagcggcggccgcctgaaccaggccaacagcagcggccgggagagcaaggtgcctggggcccggagcgcccagaacctgcccggcggcggccctgccagccacagcaaccccaggagcctgagcagcggccacctgcagggcaagccctggaagtag

SEQ ID NO: 91896 - DNA, 906 bp, Artificial Sequence
  derived and/or modified sequence
atgagcctgcggcggcacatcggcaaccccgagtacctgatgaagcgcatcccccagaaccctagataccagcacatcaaatccaggctggatacaggaaacagcatgacaaaatataccgaaaagctggaggaaataaaaaagaactataggtataaaaaagacgaactttttaaacgattgaaggtgaccacttttgcgcaattaataatccaggttgcatccctgtccgaccagacgcttgaagtgactgctgaagaaatccagcggttagaagacaacgactccgccgcgagtgatccggacgcagagaccaccgctcggacgaacggaaagggcaatcctggagagcagtccccctcgcctgagcagtttattaataatgcaggggccggtgatagctctcgctctacattacaaagcgttatctcaggtgtgggagaactagatctggacaaaggacctgtcaaaaaagcagaaccccacaccaaagataaaccttaccccgattgtccatttctgttgctggacgtgcgtgatcgagattcataccaacagtgtcatattgttggggcctactcgtatcctatagctaccctatccaggactatgaacccttatagcaacgacatcctggaatacaaaaacgctcatggcaagatcatcatcctgtacgacgacgatgagagactcgcctcacaggccgcaacaacgatgtgcgagaggggtttcgaaaatctcttcatgctcagcgggggaagacttaatcaagccaacagttctggacgtgagtcaaaggtgcccggcgctcgaagcgctcagaacctcccaggcggggggcccgcgagccatagcaacccaagatctctcagtagtggccatctccaaggcaagccctggaagtag

SEQ ID NO: 91897 - DNA, 906 bp, Artificial Sequence
  derived and/or modified sequence
atgagcctccgtcggcacatcggaaacccggagtacctgatgaaacggatcccgcagaatccccgataccagcatataaaaagtcggctcgataccggtaatagcatgacaaaatatactgagaagctggaggagataaaaaaaaattatcgctataaaaaagatgagctgtttaaacgcctcaaggtcacaacttttgcccagcttatcatccaagtggcgtctctttccgatcaaaccctcgaggtgactgccgaggaaattcagagactggaggacaatgattcagccgcatctgatccggacgctgagaccactgcgaggactaatgggaaaggaaaccccggtgagcaaagcccaagcccagaacaatttatcaacaatgccggtgccggtgactctagtcgctctactctccagagtgttatctccggtgtgggtgaattggacctggacaaaggacccgtgaagaaggccgaaccacacacgaaagacaaaccttaccccgattgtcctttcctattgcttgacgtccgggatagagactcataccagcagtgccacatcgtgggcgcatattcctaccctattgccactctgtcccgtaccatgaatccatactctaacgatatcctggaatacaaaaatgcccacggtaagattatcatactgtacgacgatgacgaacgcttagccagccaggcagctaccaccatgtgtgagcgcggtttcgagaacctcttcatgctctccgggggtaggctgaatcaggccaacagtagcggcagggagtcaaaggtgcccggagccagatctgctcagaacctgccaggaggcggacccgcatcgcattcgaacccgaggagtctctcatcagggcacctacagggaaaaccatggaaatag

SEQ ID NO: 91898 - DNA, 1087 bp, Artificial Sequence
  derived and/or modified sequence
aaccccgaacgtggtcggttggagaaaatatgtccctccggaggcacattgggaaccctgagtatctgatgaaaaggataccacagaacccaagataccagcatatcaaatcaagactggacactggtaacagtatgactaaatatactgagaagctcgaagagattaagaaaaattatagatacaaaaaagatgagcttttcaagagactaaaagttacaacttttgcccagctgatcatccaagttgcttccctctctgatcaaacactggaagtgacagctgaggagattcaaaggctggaagacaatgattctgcagcttcagaccctgatgctgaaaccactgccaggaccaatgggaaaggaaatccaggtgagcagtcgccgagccctgagcagttcataaacaacgcaggagcaggggactccagccgctcaactcttcagagtgtcatcagtggtgttggggaactggatctagacaaagggccagtgaagaaagcagagccccataccaaagacaaaccttatcctgactgccccttcctgctgctagatgtgcgtgatagagattcttaccagcagtgccacattgttggagcttacagttacccaattgcaactctgtctagaacaatgaacccttattcaaatgatattcttgaatataaaaatgcccatggcaagatcatcattctgtatgacgatgatgaaaggctggccagtcaggcggccaccaccatgtgcgagcgtggatttgaaaacctcttcatgctttccggaggccgactgaaccaagctaactcctccggaagagagtccaaggtgcctggtgcccgaagcgctcagaatctgccaggtggcggccccgccagccactcaaacccccgctccctcagcagtggtcacctgcaaggcaaaccctggaagtaaagactttgtctcacttaggcaaataaatgttcttcctcttttcagaacccctgagcatttcccaagttgggtcatttccagaaacttctgcagaggaaagaccatgacatatgtatgggataggcctcttccctgtccctgtctccagttcc

SEQ ID NO: 91899 - DNA, 906 bp, Artificial Sequence
  derived and/or modified sequence
atgagcctgagaagacacatcggcaaccccgagtacctgatgaagagaatcccccagaaccccagataccagcacatcaagagcagactggacaccggcaacagcatgaccaagtacaccgagaagctggaggagatcaagaagaactacagatacaagaaggacgagctgttcaagagactgaaggtgaccaccttcgcccagctgatcatccaggtggccagcctgagcgaccagaccctggaggtgaccgccgaggagatccagagactggaggacaacgacagcgccgccagcgaccccgacgccgagaccaccgccagaaccaacggcaagggcaaccccggcgagcagagccccagccccgagcagttcatcaacaacgccggcgccggcgacagcagcagaagcaccctgcagagcgtgatcagcggcgtgggcgagctggacctggacaagggccccgtgaagaaggccgagccccacaccaaggacaagccctaccccgactgccccttcctgctgctggacgtgagagacagagacagctaccagcagtgccacatcgtgggcgcctacagctaccccatcgccaccctgagcagaaccatgaacccctacagcaacgacatcctggagtacaagaacgcccacggcaagatcatcatcctgtacgacgacgacgagagactggccagccaggccgccaccaccatgtgcgagagaggcttcgagaacctgttcatgctgagcggcggcagactgaaccaggccaacagcagcggcagagagagcaaggtgcccggcgccagaagcgcccagaacctgcccggcggcggccccgccagccacagcaaccccagaagcctgagcagcggccacctgcagggcaagccctggaagtag

SEQ ID NO: 91900 - protein, 285 aa, Artificial Sequence
  derived and/or modified sequence
MSLRRHIGNPEYLMKRIPQNPRYQHIKSRLDTDYRYKKDELFKRLKVTTFAQLIIQVASLSDQTLEVTAEEIQRLEDNDSAASDPDAETTARTNGKGNPGEQSPSPEQFINNAGAGDSSRSTLQSVISGVGELDLDKGPVKKAEPHTKDKPYPDCPFLLLDVRDRDSYQQCHIVGAYSYPIATLSRTMNPYSNDILEYKNAHGKIIILYDDDERLASQAATTMCERGFENLFMLSGGRLNQANSSGRESKVPGARSAQNLPGGGPASHSNPRSLSSGHLQGKPWK

SEQ ID NO: 91901 - DNA, 858 bp, Artificial Sequence
  derived and/or modified sequence
atgtctctgcgccgccatatcggcaacccggagtatctaatgaagcgcatcccgcaaaacccccgctaccaacacatcaaaagccgtctagacaccgactaccgatacaagaaagatgaactcttcaaacgacttaaggtgaccacttttgctcagctcatcatacaggttgcatccctttccgatcagactctggaggtaacggccgaggagatccagagactggaagacaacgattctgctgcctctgaccccgatgccgagaccaccgcgagaacaaacggaaaaggcaacccgggagagcagagcccatccccagagcagtttatcaacaacgccggggccggcgattcctctcggtccaccttgcagtccgttatctcaggcgtgggagagctggatcttgacaagggcccagtgaagaaagctgagccccatactaaagacaagccatatccggattgccctttcctgctgctagacgttagggacagggacagctaccagcagtgtcacattgttggcgcttattcttaccccattgcaaccctgtctcgaactatgaacccatactcaaacgacattctggaatacaagaatgcccatgggaaaattattatcctctacgatgacgacgagaggctcgcttcccaagccgccactacgatgtgtgaaaggggtttcgagaatctgtttatgctgtcaggcgggcggctgaaccaggccaattcttcaggcagggagtccaaggttccaggcgctcgcagcgcacagaacctgccaggtggaggccctgcgtctcacagcaacccgagatccctgagcagtggtcacctacaggggaagccttggaagtag

SEQ ID NO: 91902 - DNA, 858 bp, Artificial Sequence
  derived and/or modified sequence
atgagcctgcggcggcacatcggcaaccctgagtacctgatgaagaggatcccccagaacccccgctaccagcacatcaagagccggctggacacagactaccgctacaagaaggatgagctgttcaagaggctgaaggtgaccacctttgcccagctgatcatccaggtggccagcctgagtgaccagaccctggaggtgacagctgaggagatccagaggctggaggacaatgacagcgctgccagtgaccctgatgctgagaccacagcccggaccaacgggaagggcaaccctggagagcagagccccagccctgagcagttcatcaacaatgctggggccggggacagcagccgcagcaccctgcagagcgtcatcagcggcgtgggggagctggacctggacaagggccctgtgaagaaggccgagccccacaccaaggacaagccctacccagactgccccttcctgctgctggatgtgcgggaccgggacagctaccagcagtgccacatcgtgggcgcctacagctaccccatcgccaccctgagcaggaccatgaacccctacagcaatgacatcctggagtacaagaatgcccacggcaagatcatcatcctgtatgatgatgatgagcggctggccagccaggccgccaccaccatgtgtgagcggggctttgaaaatctcttcatgctgagcggcggccgcctgaaccaggccaacagcagcggccgggagagcaaggtgcctggggcccggagcgcccagaacctgcccggcggcggccctgccagccacagcaaccccaggagcctgagcagcggccacctgcagggcaagccctggaagtag

SEQ ID NO: 91903 - DNA, 858 bp, Artificial Sequence
  derived and/or modified sequence
atgagcctgcggcggcacatcggcaaccccgagtacctgatgaagagaatccctcagaaccctaggtaccagcatattaagagcagactggacactgattaccgctacaagaaagatgaactgttcaagaggctcaaggtgacaacatttgcccagctaattatccaggtggcgagtctgtcagatcagaccctagaggtcaccgctgaagagatccagcgattagaagataacgattctgccgcatccgatccagacgccgagacaaccgctcgcacaaatggcaagggtaatcctggcgaacagtctccctcacctgagcagtttattaacaatgcaggagctggagattcctcacgttcgacattacagtctgtgatcagcggcgtgggagaactggatctcgacaaaggacctgtaaagaaagcagagccacatactaaggacaagccataccctgactgcccattcctcctcctggacgtcagagatagagacagctaccaacagtgtcacattgttggggcatattcctatcctatcgctaccctgtcgcgtaccatgaacccctattccaacgacatcttagaatacaaaaatgcccatggaaaaattatcatcctgtatgatgatgatgaacgcctggcgtcacaggccgctacaacaatgtgtgagcgcggattcgaaaaccttttcatgctaagtggcggtaggctgaaccaggcaaacagttccgggagggaaagcaaggtgcccggggcccgatctgcccagaacctgcctggcggcgggcccgcatcacattctaacccccgtagtctgagctcaggccacttgcagggaaagccctggaaatag

SEQ ID NO: 91904 - DNA, 858 bp, Artificial Sequence
  derived and/or modified sequence
atgagcctaagacgacacatcgggaacccagagtaccttatgaagagaatacctcaaaaccccagatatcagcacattaagtcccgcctggacactgattaccgatacaagaaggatgaattgttcaagagacttaaggttacgacctttgcgcagttaatcattcaggtggcctctctgagcgaccaaaccttagaggtcacagccgaggagattcagcgcctggaagacaatgacagtgcggcaagcgaccccgatgctgagacaaccgcgcgaacaaacgggaaagggaaccccggagagcagtccccgtctcctgagcagttcatcaacaacgcaggcgctggcgattcatcccgaagcacactgcagtctgtgatttcaggggtgggtgagctggacctcgacaagggccctgtgaaaaaggctgaaccacacaccaaggacaagccataccctgattgcccattcctgctccttgacgtgcgggacagagactcctaccaacaatgtcacattgttggagcctactcttatccaattgctacccttagccgcacaatgaacccgtacagcaatgacattcttgaatacaaaaacgctcatggaaaaatcattatcctctacgatgacgatgaacggcttgccagccaggctgctaccaccatgtgcgagagagggtttgaaaacctgtttatgcttagcggtggcaggctcaaccaagccaactcttcaggcagggaatccaaggtacctggagctcgttctgcacagaaccttcctggcggtggacctgccagccactcaaacccaaggtctctgtcttctggacacctgcaaggtaagccatggaagtag

SEQ ID NO: 91905 - DNA, 1278 bp, Artificial Sequence
  derived and/or modified sequence
agctagggttagaggcaacccgtgaggctagaaccccgaacgtggtcggttggagaaaatatgtccctccggaggcacattgggaaccctgagtatctgatgaaaaggataccacagaacccaagataccagcatatcaaatcaagactggacactgattatagatacaaaaaagatgagcttttcaagagactaaaagttacaacttttgcccagctgatcatccaagttgcttccctctctgatcaaacactggaagtgacagctgaggagattcaaaggctggaagacaatgattctgcagcttcagaccctgatgctgaaaccactgccaggaccaatgggaaaggaaatccaggtgagcagtcgccgagccctgagcagttcataaacaacgcaggagcaggggactccagccgctcaactcttcagagtgtcatcagtggtgttggggaactggatctagacaaagggccagtgaagaaagcagagccccataccaaagacaaaccttatcctgactgccccttcctgctgctagatgtgcgtgatagagattcttaccagcagtgccacattgttggagcttacagttacccaattgcaactctgtctagaacaatgaacccttattcaaatgatattcttgaatataaaaatgcccatggcaagatcatcattctgtatgacgatgatgaaaggctggccagtcaggcggccaccaccatgtgcgagcgtggatttgaaaacctcttcatgctttccggaggccgactgaaccaagctaactcctccggaagagagtccaaggtgcctggtgcccgaagcgctcagaatctgccaggtggcggccccgccagccactcaaacccccgctccctcagcagtggtcacctgcaaggcaaaccctggaagtaaagactttgtctcacttaggcaaataaatgttcttcctcttttcagaacccctgagcatttcccaagttgggtcatttccagaaacttctgcagaggaaagaccatgacatatgtatgggataggcctcttccctgtccctgtctccagttcctctcccctcaggaggccacctcaggaaggattttgacaggtgaccataaaaaccagaggtgtgacaggctctagtctcctccctgttgtttacagcatatttaagtcttgtgaaactgtataggaaaaaagtatctacgtttttagtttttttgttttgtttttttttaataaggtccagcttgttgggtctctctgtgttgttttgt

SEQ ID NO: 91906 - DNA, 858 bp, Artificial Sequence
  derived and/or modified sequence
atgagcctgagaagacacatcggcaaccccgagtacctgatgaagagaatcccccagaaccccagataccagcacatcaagagcagactggacaccgactacagatacaagaaggacgagctgttcaagagactgaaggtgaccaccttcgcccagctgatcatccaggtggccagcctgagcgaccagaccctggaggtgaccgccgaggagatccagagactggaggacaacgacagcgccgccagcgaccccgacgccgagaccaccgccagaaccaacggcaagggcaaccccggcgagcagagccccagccccgagcagttcatcaacaacgccggcgccggcgacagcagcagaagcaccctgcagagcgtgatcagcggcgtgggcgagctggacctggacaagggccccgtgaagaaggccgagccccacaccaaggacaagccctaccccgactgccccttcctgctgctggacgtgagagacagagacagctaccagcagtgccacatcgtgggcgcctacagctaccccatcgccaccctgagcagaaccatgaacccctacagcaacgacatcctggagtacaagaacgcccacggcaagatcatcatcctgtacgacgacgacgagagactggccagccaggccgccaccaccatgtgcgagagaggcttcgagaacctgttcatgctgagcggcggcagactgaaccaggccaacagcagcggcagagagagcaaggtgcccggcgccagaagcgcccagaacctgcccggcggcggccccgccagccacagcaaccccagaagcctgagcagcggccacctgcagggcaagccctggaagtag

SEQ ID NO: 91907 - protein, 54 aa, Artificial Sequence
  derived and/or modified sequence
MSLRRHIGNPEYLMKRIPQNPRYQHIKSRLDTGACVYLTSSPALPDCAMNGLCF

SEQ ID NO: 91908 - DNA, 165 bp, Artificial Sequence
  derived and/or modified sequence
atgagcctgagaagacacatcggcaaccccgagtacctgatgaagagaatcccccagaaccccagataccagcacatcaagagcagactggacaccggcgcctgcgtgtacctgaccagcagccccgccctgcccgactgcgccatgaacggcctgtgcttctag

SEQ ID NO: 91909 - DNA, 165 bp, Artificial Sequence
  derived and/or modified sequence
atgagcctcaggcgacacataggcaatccagagtacctcatgaagagaataccccagaacccaaggtaccagcacatcaaatccagactcgataccggagcttgcgtgtacctgactagttctcctgcgctgccagactgtgccatgaacggcctctgcttctag

SEQ ID NO: 91910 - DNA, 165 bp, Artificial Sequence
  derived and/or modified sequence
atgagcctgcggcggcacatcggcaaccctgagtacctgatgaagaggatcccccagaacccccgctaccagcacatcaagagccggctggacaccggggcctgtgtgtacctgaccagcagccctgccctgcctgactgtgccatgaatggcctgtgcttctag

SEQ ID NO: 91911 - DNA, 165 bp, Artificial Sequence
  derived and/or modified sequence
atgagcctgcggcggcacatcggcaaccccgagtacctgatgaagcgaatcccccaaaatccccgctaccagcacatcaaatccagactcgacacaggcgcttgtgtttacctgacttctagtccagctttacctgactgtgcaatgaatggactctgtttctag

SEQ ID NO: 91912 - DNA, 165 bp, Artificial Sequence
  derived and/or modified sequence
atgagccttaggcggcacatcggcaaccctgagtacctgatgaagcgaatccctcaaaacccaaggtatcagcacattaaatctcgtctggacaccggagcctgtgtctaccttacttcttcccctgcgctccctgattgcgctatgaacggcctgtgtttttag

SEQ ID NO: 91913 - DNA, 165 bp, Artificial Sequence
  derived and/or modified sequence
atgagtctgaggagacatattggcaaccccgagtacttaatgaagagaattcctcagaaccccaggtatcagcacatcaagagccgccttgatacaggcgcctgcgtctatcttacaagcagcccagctttgcccgactgcgcgatgaatggtctctgcttttag

SEQ ID NO: 91914 - DNA, 165 bp, Artificial Sequence
  derived and/or modified sequence
atgagcctgcggcggcacatcggcaaccccgagtacctgatgaagagaataccgcaaaatccgcgataccaacacattaagtcccgcctggacacaggggcctgtgtgtatctgactagctcacccgccctgcccgactgcgcgatgaatggactgtgcttttag

SEQ ID NO: 91915 - DNA, 165 bp, Artificial Sequence
  derived and/or modified sequence
atgagtctccggcgacatattggcaaccccgagtatctcatgaagcggatacctcagaaccctaggtaccaacacatcaaaagcaggttggacactggggcttgtgtgtaccttacatcttctcctgctttgcccgattgtgcaatgaatggcttgtgcttctag

SEQ ID NO: 91916 - protein, 95 aa, Artificial Sequence
  derived and/or modified sequence
MDPSVTLWQFLLQLLREQGNGHIISWTSRDGGEFKLVDAEEVARLWGLRKNKTNMNYDKLSRALRYYYDKNIIRKVSGQKFVYKFVSYPESHCAP

SEQ ID NO: 91917 - DNA, 288 bp, Artificial Sequence
  derived and/or modified sequence
atggaccccagcgtgaccctgtggcagttcctgctgcagctgctgagagagcagggcaacggccacatcatcagctggaccagcagagacggcggcgagttcaagctggtggacgccgaggaggtggccagactgtggggcctgagaaagaacaagaccaacatgaactacgacaagctgagcagagccctgagatactactacgacaagaacatcatcagaaaggtgagcggccagaagttcgtgtacaagttcgtgagctaccccgagagccactgcgccccctag

SEQ ID NO: 91918 - DNA, 504 bp, Artificial Sequence
  derived and/or modified sequence
ctcgggcccacgtgagctgtagggaaacgcaggggcggcttctaggtgctgccgccgccaccgccaccaccacctccaccgccgcctcggaacccaggcctggggggcggtggggccgcgtatggagcccccgccccccggagctgccaacattgccaacgccaccgccacgctacacacaggtacccctgggatggcgtgagcactcccccagcgatggacccatctgtgacgctgtggcagtttctgctgcagctgctgagagagcaaggcaatggccacatcatctcctggacttcacgggatggtggtgaattcaagctggtggatgcagaggaggtggcccggctgtgggggctacgcaagaacaagaccaacatgaattacgacaagctcagccgggccttgcggtactactatgacaagaacatcatccgcaaggtgagcggccagaagttcgtctacaagtttgtgtcctaccctgagtcccattgcgccccgtag

SEQ ID NO: 91919 - DNA, 288 bp, Artificial Sequence
  derived and/or modified sequence
atggacccatcggttacgctgtggcaatttctcctccagctgctgagagaacagggcaacgggcatatcatctcctggaccagtcgagacgggggcgaattcaagctagtagatgcagaggaggtggctaggctctgggggctgaggaagaacaagaccaacatgaattacgataaactctccagagcacttagatactactatgacaaaaatatcattcgcaaagtgagtgggcagaagttcgtctataagttcgtctcttatccagaatcccactgcgctccatag

SEQ ID NO: 91920 - DNA, 288 bp, Artificial Sequence
  derived and/or modified sequence
atggaccccagcgtgaccctgtggcagttcctgctgcagctgctgcgggagcagggcaatggccacatcatctcctggaccagcagagatggaggagagttcaagctggtggatgctgaggaggtggcccggctgtggggcctgaggaagaacaagaccaacatgaactatgacaagctgagccgggccctgcgctactactatgacaagaacatcatcaggaaggtgtctggccagaagtttgtgtacaagtttgtgtcctacccagagagccactgtgccccctag

SEQ ID NO: 91921 - DNA, 288 bp, Artificial Sequence
  derived and/or modified sequence
atggaccccagcgtgaccctgtggcagttcctgctgcagctgctgagagaacagggaaatggccacatcatcagttggacttcccgcgatgggggggagttcaagttggtcgacgcagaggaagtggctcgcctgtggggattacgcaagaacaagacaaatatgaattacgacaagctgtctcgcgctctgaggtattattacgacaagaacataattcgtaaggtctcagggcagaaatttgtgtacaaatttgtaagttatccggagtcccattgcgcaccatag

SEQ ID NO: 91922 - DNA, 288 bp, Artificial Sequence
  derived and/or modified sequence
atggaccctagtgtcacactgtggcaatttcttctccagctcctacgtgagcagggtaatggccacatcatatcctggacatccagagatggtggcgaattcaagctggtcgacgcagaagaggttgctaggctgtggggtctgcgcaaaaataaaaccaatatgaactacgataaattgagtagggccctgcggtattactatgacaagaacatcattcgaaaagtgtctgggcagaaatttgtatataagttcgtcagctaccctgagagtcactgtgcaccgtag

SEQ ID NO: 91923 - protein, 507 aa, Artificial Sequence
  derived and/or modified sequence
MEDSEALGFEHMGLDPRLLQAVTDLGWSRPTLIQEKAIPLALEGKDLLARARTGSGKTAAYAIPMLQLLLHRKATGPVVEQAVRGLVLVPTKELARQAQSMIQQLATYCARDVRVANVSAAEDSVSQRAVLMEKPDVVVGTPSRILSHLQQDSLKLRDSLELLVVDEADLLFSFGFEEELKSLLCHLPRIYQAFLMSATFNEDVQALKELILHNPVTLKLQESQLPGPDQLQQFQVVCETEEDKFLLLYALLKLSLIRGKSLLFVNTLERSYRLRLFLEQFSIPTCVLNGELPLRSRASDPEAGVARGIDFHHVSAVLNFDLPPTPEAYIHRAGRTARANNPGIVLTFVLPTEQFHLGKIEELLSGENRGPILLPYQFRMEEIEGFRYRCRDAMRSVTKQAIREARLKEIKEELLHSEKLKTYFEDNPRDLQLLRHDLPLHPAVVKPHLGHVPDYLVPPALRGLVRPHKKRKKLSSSCRKAKRAKSQNPLRSFKHKGKKFRPTAKPS

SEQ ID NO: 91924 - DNA, 1524 bp, Artificial Sequence
  derived and/or modified sequence
atggaagattccgaggcccttggattcgaacatatggggctcgacccccgactcctacaggcggtgaccgacttaggatggtccagacctacattgatccaggaaaaagccatccccctggcactagaggggaaggatttgttagccagagcccggacaggctctggcaaaacagcagcatatgcaattcccatgttgcagctactgttgcacaggaaagctactggcccagtggtggagcaggcagtgagaggcctggtcctggtgcctactaaggaactggcacgccaggcccagagcatgatacagcagctggcaacatactgtgcacgcgacgtgcgtgtggccaacgtttccgctgcagaagatagcgtttcacagagggctgttttaatggaaaaacccgacgtagttgtgggaacgccctcccgcatcttatcacatttgcagcaagatagtttgaaactgcgggacagcctggagctgctcgtggtggacgaagctgacttattgttttcattcgggtttgaagaagagctgaaaagtcttctgtgccatttgcctcggatttaccaggcctttctcatgtccgccactttcaacgaagacgtacaggccctgaaagagctgatcttgcacaatcccgtgacacttaagcttcaggagtctcagctgccaggacccgatcagttgcagcaattccaggttgtatgtgagactgaagaggacaaatttctcctactgtacgctttactcaaactatctctcatcaggggaaaatccctgctgttcgttaataccctcgaaaggtcctatcggcttcggctcttccttgaacagttctccatccccacgtgtgtgctgaatggagagctgccactcaggtcccgcgcgtcagacccggaggccggtgtcgcgagagggattgatttccatcacgtgtccgctgtccttaattttgatctcccccccacacccgaagcctatatacaccgcgctggccgtaccgccagagccaataatcccggtattgtgcttacgtttgtactccccaccgagcaattccacctcgggaaaatcgaggagctgctgtcaggggagaatcgcggacccattcttctgccgtatcagtttcgaatggaggaaatcgaggggttcagatatagatgtcgcgacgccatgcgtagcgtgactaaacaagccatccgggaagcccgcttgaaagaaataaaagaggaacttctgcatagcgaaaagctcaagacatactttgaggacaacccgcgcgacctgcaactcctccgtcatgatcttccactccacccagctgtggtgaagcctcacttaggacatgttcctgattacttggtcccgccggctctgcgcggcctcgtgagaccacataagaaaagaaagaagttatctagctcgtgtagaaaggcgaagcgggctaaatcccagaatccgctaaggtccttcaagcacaagggtaagaagttccggcccactgcaaagccctcctag

SEQ ID NO: 91925 - DNA, 1524 bp, Artificial Sequence
  derived and/or modified sequence
atggaggacagcgaggccctgggctttgagcacatgggcctggacccccggctgctgcaggccgtgacagacctgggctggagccggcccaccctcatccaggagaaggccatccccctggccctggagggcaaggacctgctggcccgggccaggactggaagtggcaagacagctgcctatgccatccccatgctgcagctgctgctgcacaggaaggccactggacctgtggtggagcaggccgtgcggggcctggtgctggtgcccaccaaggagctggcccggcaggcccagagcatgatccagcagctggccacctactgtgccagagatgtgcgggtggccaacgtgtctgctgctgaggacagcgtgtcccagagagctgtgctgatggagaagccagatgtggtggtgggcacccccagccgcatcctgagccacctgcagcaggacagcctgaagctgcgggacagcctggagctgctggtggtggatgaggccgacctgctcttctcctttggatttgaggaggagctgaagagcctgctgtgccacctgccccgcatctaccaggccttcctgatgtctgccaccttcaatgaagatgtgcaggccctgaaggagctgatcctgcacaaccctgtgaccctgaagctgcaggagagccagctgcccggccctgaccagctgcagcagttccaggtggtgtgtgaaacagaggaggacaagttcctgctgctgtatgccctgctgaagctgagcctcatccggggcaagagcctgctgtttgtgaacaccctggagaggagctaccgcctgcggctcttcctggagcagttcagcatccccacctgtgtgctgaatggagagctgcccctgcggagccgggccagtgaccctgaggccggcgtggcccggggcatcgacttccaccacgtgtctgctgtgctgaactttgacctgccccccaccccagaggcctacatccacagagctggccgcacagcccgggccaacaaccctggcatcgtgctgacctttgtgctgcccacagagcagttccacctgggcaagattgaggagctgctgtctggagaaaatagaggccccatcctgctgccctaccagttcaggatggaggagattgagggcttccgctaccgctgcagagatgccatgaggtctgtgaccaagcaggccatccgggaggcccggctgaaggagatcaaggaggagctgctgcacagcgagaagctgaagacctactttgaggacaacccccgggacctgcagctgctgcggcatgacctgcccctgcaccctgctgtggtgaagccccacctgggccacgtgcctgactacctggtgcccccagccctgcggggcctggtgcggccccacaagaagaggaagaagctgagcagcagctgcaggaaggccaagagggccaagagccagaaccccctgcggagcttcaagcacaagggcaagaagttccggcccacagccaagcccagctag

SEQ ID NO: 91926 - DNA, 1524 bp, Artificial Sequence
  derived and/or modified sequence
atggaggacagcgaggccctgggcttcgagcacatgggcctggacccacggctgctccaggcggtgacagatttgggatggagccggccaacactgatccaggaaaaggctattcctttggcactggaaggcaaagatcttttagccagagcccgaacaggctcagggaagaccgctgcttatgccatcccaatgttgcaactactcctgcacagaaaggcaacaggtcctgtcgtggaacaggctgttcgaggactggtccttgttcctaccaaggagttagcgcgacaggcacagagcatgatccaacaactagccacttattgcgcccgggacgtcagagtggcgaatgtttctgctgccgaagacagtgtaagtcaacgagctgtgttaatggaaaagccggatgtcgtggtgggtacacccagtcgtatcctatctcatctgcaacaggactctcttaagttgagggatagcctagagcttcttgtggtcgatgaggcagatcttttgttttcattcggtttcgaagaagagttgaagagcctgttatgtcacttgccacgaatctatcaggcttttctcatgagcgcaacattcaacgaggacgtgcaggctcttaaggagttgatactgcataatccggtcacactcaaactccaggagtctcagcttcctggcccagatcagctgcagcagtttcaggtagtctgcgagaccgaagaagacaagttcctcctcctgtatgcactgctgaagctatccctgatacggggcaagtctctgctcttcgtgaatacccttgagaggagctatcggctgaggctttttctggagcagttctccatcccaacgtgcgtcctcaatggcgagctgcccttaagatcacgggcgagtgatccggaggccggagtcgcccgcgggatagatttccatcatgtctcagcagtgctgaacttcgacctgccccctacacccgaggcctatattcaccgcgccggacgcaccgctcgagcaaacaatcccggtatcgtgctgacgttcgtgcttccaaccgagcagttccacctgggaaaaatcgaagagctgctcagcggcgagaatcggggtcccattctacttccctaccagttccgtatggaagaaatcgagggattccggtatagatgtcgggacgccatgcgcagcgtgacaaagcaagccatcagggaagctcgattgaaagaaattaaggaggagcttctgcactccgaaaagctcaagacatactttgaggacaaccctagggatcttcagctgctgcggcatgatctacccctacaccccgcagtggtgaagccacatttaggacacgttccagattaccttgtccctcccgcgctgcgggggttagtgagacctcacaaaaaacgcaaaaaactgagcagcagctgcaggaaagccaaaagagccaaatcgcagaaccctctgagatccttcaaacataagggcaaaaaatttcggccgactgccaaaccaagctag

SEQ ID NO: 91927 - DNA, 1524 bp, Artificial Sequence
  derived and/or modified sequence
atggaagactcagaggcgctcggcttcgagcacatgggcctggatcctaggttactgcaggccgtgacagacctcggttggagccgccctactctcatccaagagaaggccatccctctcgcgctggagggaaaggacttgcttgcacgggcacgaactggctcaggaaagaccgcagcctacgcaatccctatgttacagttgttacttcatcgaaaagcgaccggacctgtagtagagcaagcagtaagagggctcgtactcgtacctacgaaagaactggcaagacaggctcagtcaatgatccagcaacttgctacttactgcgcaagagacgtacgcgtggcaaacgtgagcgccgctgaggactctgtctctcagcgtgctgtactaatggagaagcccgacgttgtggtgggaacgcctagtagaatcttgtctcaccttcagcaggatagcctgaaattgagggatagtctggagctcttagttgtcgacgaggcggacctgctttttagcttcggcttcgaggaggaactgaagagcctcctttgccacctgccaaggatttaccaggcttttttaatgagcgcgactttcaacgaggatgtgcaggccctaaaagagttaattctgcataacccggttaccctgaaacttcaggagtcccagctaccagggcctgaccaactgcagcagttccaagttgtgtgtgaaaccgaagaggataaatttttactcctgtacgcactccttaaattaagcctgatacggggtaaaagccttctcttcgtgaacacactggagcggtcttaccgcctgcgcttgtttctagaacagttttcaatccctacctgtgttctcaatggagaactgcccctgcgctccagagcttccgaccccgaggctggcgtggcacggggaattgacttccatcacgtctccgccgtactgaactttgacttgcctcccactcctgaagcctacattcatcgcgctggtcgcacagccagagctaataatcctgggattgtgcttacgttcgtgcttccaacagaacagtttcacctcggcaaaattgaggagctcctgtctggggagaatcgtggccctattctgctaccttatcagtttcgcatggaagaaattgaggggttccgctatagatgcagagacgctatgaggtctgtgaccaagcaggccatccgtgaggctcgtctgaaggagattaaagaggaactgcttcattccgaaaaactgaaaacatacttcgaggacaacccgagagacttacagctgctgaggcacgatcttccattacatcctgctgtggtgaagcctcacttgggacacgttcctgattacttggttccccctgcactgcggggtctcgttagaccccataaaaaaagaaaaaagctgagtagttcctgtcgtaaagccaagcgtgcgaagtcacaaaatcctttgaggagtttcaaacacaaggggaagaaattcagaccgaccgctaaaccttcctag

SEQ ID NO: 91928 - DNA, 1554 bp, Artificial Sequence
  derived and/or modified sequence
cgcgtgcgtgctgcgctactgagcagcgccatggaggactctgaagcactgggcttcgaacacatgggcctcgatccccggctccttcaggctgtcaccgatctgggctggtcgcgacctacgctgatccaggagaaggccatcccactggccctagaagggaaggacctcctggctcgggcccgcacgggctccgggaagacggccgcttatgctattccgatgctgcagctgttgctccataggaaggcgacaggtccggtggtagaacaggcagtgagaggccttgttcttgttcctaccaaggagctggcacggcaagcacagtccatgattcagcagctggctacctactgtgctcgggatgtccgagtggccaatgtctcagctgctgaagactcagtctctcagagagctgtgctgatggagaagccagatgtggtagtagggaccccatctcgcatattaagccacttgcagcaagacagcctgaaacttcgtgactccctggagcttttggtggtggacgaagctgaccttcttttttcctttggctttgaagaagagctcaagagtctcctctgtcacttgccccggatttaccaggcttttctcatgtcagctacttttaacgaggacgtacaagcactcaaggagctgatattacataacccggttacccttaagttacaggagtcccagctgcctgggccagaccagttacagcagtttcaggtggtctgtgagactgaggaagacaaattcctcctgctgtatgccctgctcaagctgtcattgattcggggcaagtctctgctctttgtcaacactctagaacggagttaccggctacgcctgttcttggaacagttcagcatccccacctgtgtgctcaatggagagcttccactgcgctccagggcctctgatccggaagcaggtgtggcccggggcatagacttccaccatgtgtctgctgtgctcaactttgatcttcccccaacccctgaggcctacatccatcgagctggcaggacagcacgcgctaacaacccaggcatagtcttaacctttgtgcttcccacggagcagttccacttaggcaagattgaggagcttctcagtggagagaacaggggccccattctgctcccctaccagttccggatggaggagatcgagggcttccgctatcgctgcagggatgccatgcgctcagtgactaagcaggccattcgggaggcaagattgaaggagatcaaggaagagcttctgcattctgagaagcttaagacatactttgaagacaaccctagggacctccagctgctgcggcatgacctacctttgcaccccgcagtggtgaagccccacctgggccatgttcctgactacctggttcctcctgctctccgtggcctggtgcgccctcacaagaagcggaagaagctgtcttcctcttgtaggaaggccaagagagcaaagtcccagaacccactgcgcagcttcaagcacaaaggaaagaaattcagacccacagccaagccctcctga

SEQ ID NO: 91929 - DNA, 1524 bp, Artificial Sequence
  derived and/or modified sequence
atggaggacagcgaggccctgggcttcgagcacatgggcctggaccccagactgctgcaggccgtgaccgacctgggctggagcagacccaccctgatccaggagaaggccatccccctggccctggagggcaaggacctgctggccagagccagaaccggcagcggcaagaccgccgcctacgccatccccatgctgcagctgctgctgcacagaaaggccaccggccccgtggtggagcaggccgtgagaggcctggtgctggtgcccaccaaggagctggccagacaggcccagagcatgatccagcagctggccacctactgcgccagagacgtgagagtggccaacgtgagcgccgccgaggacagcgtgagccagagagccgtgctgatggagaagcccgacgtggtggtgggcacccccagcagaatcctgagccacctgcagcaggacagcctgaagctgagagacagcctggagctgctggtggtggacgaggccgacctgctgttcagcttcggcttcgaggaggagctgaagagcctgctgtgccacctgcccagaatctaccaggccttcctgatgagcgccaccttcaacgaggacgtgcaggccctgaaggagctgatcctgcacaaccccgtgaccctgaagctgcaggagagccagctgcccggccccgaccagctgcagcagttccaggtggtgtgcgagaccgaggaggacaagttcctgctgctgtacgccctgctgaagctgagcctgatcagaggcaagagcctgctgttcgtgaacaccctggagagaagctacagactgagactgttcctggagcagttcagcatccccacctgcgtgctgaacggcgagctgcccctgagaagcagagccagcgaccccgaggccggcgtggccagaggcatcgacttccaccacgtgagcgccgtgctgaacttcgacctgccccccacccccgaggcctacatccacagagccggcagaaccgccagagccaacaaccccggcatcgtgctgaccttcgtgctgcccaccgagcagttccacctgggcaagatcgaggagctgctgagcggcgagaacagaggccccatcctgctgccctaccagttcagaatggaggagatcgagggcttcagatacagatgcagagacgccatgagaagcgtgaccaagcaggccatcagagaggccagactgaaggagatcaaggaggagctgctgcacagcgagaagctgaagacctacttcgaggacaaccccagagacctgcagctgctgagacacgacctgcccctgcaccccgccgtggtgaagccccacctgggccacgtgcccgactacctggtgccccccgccctgagaggcctggtgagaccccacaagaagagaaagaagctgagcagcagctgcagaaaggccaagagagccaagagccagaaccccctgagaagcttcaagcacaagggcaagaagttcagacccaccgccaagcccagctag

SEQ ID NO: 91930 - protein, 999 aa, Artificial Sequence
  derived and/or modified sequence
MVCSPVTVRIAPPDRRFSRSAIPEQIISSTLSSPSSNAPDPCAKETVLSALKEKEKKRTVEEEDQIFLDGQENKRRRHDSSGSGHSAFEPLVANGVPASFVPKPGSLKRGLNSQSSDDHLNKRSRSSSMSSLTGAYASGIPSSSRNAITSSYSSTRGISQLWKRNGPSSSPFSSPASSRSQTPERPAKKIREEELCHHSSSSTPLAADRESQGEKAADTTPRKKQNSNSQSTPGSSGQRKRKVQLLPSRRGEQLTLPPPPQLGYSITAEDLDLEKKASLQWFNQALEDKSDAASNSVTETPPITQPSFTFTLPAAAPASPPTSLLAPSTNPLLESLKKMQTPPSLPPCPESAGAATTEALSPPKTPSLLPPLGLSQSGPPGLLPSPSFDSKPPTTLLGLIPAPSMVPATDTKAPPTLQAETATKPQATSAPSPAPKQSFLFGTQNTSPSSPAAPAASSAPPMFKPIFTAPPKSEKEGPTPPGPSVTATAPSSSSLPTTTSTTAPTFQPVFSSMGPPASVPLPAPFFKQTTTPATAPTTTAPLFTGLASATSAVAPITSASPSTDSASKPAFGFGINSVSSSSVSTTTSTATAASQPFLFGAPQASAASFTPAMGSIFQFGKPPALPTTTTVTTFSQSLHTAVPTATSSSAADFSGFGSTLATSAPATSSQPTLTFSNTSTPTFNIPFGSSAKSPLPSYPGANPQPAFGAAEGQPPGAAKPALAPSFGSSFTFGNSAAPAAAPTPAPPSMIKVVPAYVPTPIHPIFGGATHSAFGLKATASAFGAPASSQPAFGGSTAVFFGAATSSGFGATTQTASSGSSSSVFGSTTPSPFTFGGSAAPAGSGSFGINVATPGSSTTTGAFSFGAGQSGSTATSTPFAGGLGQNALGTTGQSTPFAFNVSSTTESKPVFGGTATPTFGLNTPAPGVGTSGSSLSFGASSAPAQGFVGVAPFGNTFAHQQEHSPRKGPNNLSKRKLLPAVRAQGLPRRGQASSFPTRKE

SEQ ID NO: 91931 - DNA, 3000 bp, Artificial Sequence
  derived and/or modified sequence
atggtgtgcagccccgtgaccgtgagaatcgccccccccgacagaagattcagcagaagcgccatccccgagcagatcatcagcagcaccctgagcagccccagcagcaacgcccccgacccctgcgccaaggagaccgtgctgagcgccctgaaggagaaggagaagaagagaaccgtggaggaggaggaccagatcttcctggacggccaggagaacaagagaagaagacacgacagcagcggcagcggccacagcgccttcgagcccctggtggccaacggcgtgcccgccagcttcgtgcccaagcccggcagcctgaagagaggcctgaacagccagagcagcgacgaccacctgaacaagagaagcagaagcagcagcatgagcagcctgaccggcgcctacgccagcggcatccccagcagcagcagaaacgccatcaccagcagctacagcagcaccagaggcatcagccagctgtggaagagaaacggccccagcagcagccccttcagcagccccgccagcagcagaagccagacccccgagagacccgccaagaagatcagagaggaggagctgtgccaccacagcagcagcagcacccccctggccgccgacagagagagccagggcgagaaggccgccgacaccacccccagaaagaagcagaacagcaacagccagagcacccccggcagcagcggccagagaaagagaaaggtgcagctgctgcccagcagaagaggcgagcagctgaccctgcccccccccccccagctgggctacagcatcaccgccgaggacctggacctggagaagaaggccagcctgcagtggttcaaccaggccctggaggacaagagcgacgccgccagcaacagcgtgaccgagaccccccccatcacccagcccagcttcaccttcaccctgcccgccgccgcccccgccagcccccccaccagcctgctggcccccagcaccaaccccctgctggagagcctgaagaagatgcagaccccccccagcctgcccccctgccccgagagcgccggcgccgccaccaccgaggccctgagcccccccaagacccccagcctgctgccccccctgggcctgagccagagcggcccccccggcctgctgcccagccccagcttcgacagcaagccccccaccaccctgctgggcctgatccccgcccccagcatggtgcccgccaccgacaccaaggccccccccaccctgcaggccgagaccgccaccaagccccaggccaccagcgcccccagccccgcccccaagcagagcttcctgttcggcacccagaacaccagccccagcagccccgccgcccccgccgccagcagcgccccccccatgttcaagcccatcttcaccgccccccccaagagcgagaaggagggccccaccccccccggccccagcgtgaccgccaccgcccccagcagcagcagcctgcccaccaccaccagcaccaccgcccccaccttccagcccgtgttcagcagcatgggcccccccgccagcgtgcccctgcccgcccccttcttcaagcagaccaccacccccgccaccgcccccaccaccaccgcccccctgttcaccggcctggccagcgccaccagcgccgtggcccccatcaccagcgccagccccagcaccgacagcgccagcaagcccgccttcggcttcggcatcaacagcgtgagcagcagcagcgtgagcaccaccaccagcaccgccaccgccgccagccagcccttcctgttcggcgccccccaggccagcgccgccagcttcacccccgccatgggcagcatcttccagttcggcaagccccccgccctgcccaccaccaccaccgtgaccaccttcagccagagcctgcacaccgccgtgcccaccgccaccagcagcagcgccgccgacttcagcggcttcggcagcaccctggccaccagcgcccccgccaccagcagccagcccaccctgaccttcagcaacaccagcacccccaccttcaacatccccttcggcagcagcgccaagagccccctgcccagctaccccggcgccaacccccagcccgccttcggcgccgccgagggccagccccccggcgccgccaagcccgccctggcccccagcttcggcagcagcttcaccttcggcaacagcgccgcccccgccgccgcccccacccccgccccccccagcatgatcaaggtggtgcccgcctacgtgcccacccccatccaccccatcttcggcggcgccacccacagcgccttcggcctgaaggccaccgccagcgccttcggcgcccccgccagcagccagcccgccttcggcggcagcaccgccgtgttcttcggcgccgccaccagcagcggcttcggcgccaccacccagaccgccagcagcggcagcagcagcagcgtgttcggcagcaccacccccagccccttcaccttcggcggcagcgccgcccccgccggcagcggcagcttcggcatcaacgtggccacccccggcagcagcaccaccaccggcgccttcagcttcggcgccggccagagcggcagcaccgccaccagcacccccttcgccggcggcctgggccagaacgccctgggcaccaccggccagagcacccccttcgccttcaacgtgagcagcaccaccgagagcaagcccgtgttcggcggcaccgccacccccaccttcggcctgaacacccccgcccccggcgtgggcaccagcggcagcagcctgagcttcggcgccagcagcgcccccgcccagggcttcgtgggcgtggcccccttcggcaacaccttcgcccaccagcaggagcacagccccagaaagggccccaacaacctgagcaagagaaagctgctgcccgccgtgagagcccagggcctgcccagaagaggccaggccagcagcttccccaccagaaaggagtag

SEQ ID NO: 91932 - DNA, 3000 bp, Artificial Sequence
  derived and/or modified sequence
atggtatgttcacctgtgaccgtgaggattgcccctcctgatcgtcgattttcgagatctgctatccccgagcagataataagcagtaccctctctagtcccagctctaacgcccccgatccctgcgccaaggagaccgtcctaagcgctctgaaagaaaaagagaagaagcgcaccgtagaagaagaagatcagatattcttggacggccaggagaataaaagaagacggcacgactcatccggatctggacactctgcttttgagcctctggtggccaacggcgtgcccgcctcatttgtgccaaaacccggatccttgaagcgaggactgaattctcagtcttccgatgatcatcttaacaagcgtagccgctcttctagtatgtcctccctgaccggcgcatacgcaagtggaatcccctcctcaagtcggaatgccattacctcaagttacagtagtacccggggcataagtcagctttggaagcgaaatggcccaagtagctcacctttttctagccctgccagcagcagatcccagacccccgagcgcccagccaaaaaaattcgtgaggaagagctgtgccatcactcctcgtccagcactcccctggctgccgatcgtgaatctcagggcgaaaaggcggcagataccacccccagaaagaagcagaactctaactcgcagtcaacccctgggagcagcggccagcgcaagagaaaagtccagctgctgccttcccggcgtggcgaacagttgacactgcctccaccgcctcagctgggttactccattactgcagaagatctggatctggagaaaaaagcgtccttgcaatggtttaatcaggccctggaagataaatctgatgcggcttccaactctgtcacggagacaccccccataacgcagccgtctttcacgttcacactccccgccgcggctccagcttctcctccaacttccctattggctccctcaaccaaccctttgctagagtcactgaagaagatgcagacacctccaagtctgcctccatgtcctgagtcggctggagccgccacgacagaggcactctccccccccaagacaccgtctcttctgcctcctctgggcttaagccagtccggaccccccggccttctcccctccccttcatttgacagcaaaccgcctactaccctgctgggactgatccccgcacctagcatggttcctgcaaccgatacgaaggcgcctccaaccttacaggcagaaacggccacaaagccacaggcgacttccgccccatcgccagcacccaagcaaagctttcttttcggaacacaaaacacaagcccgtcttccccagctgctccagctgcgagttccgcacccccaatgtttaagccaatttttaccgcgccacctaaatcggagaaagaggggcccaccccgccggggccttctgtcactgccacggcaccgtccagcagttcgctacctaccactacaagcactactgctccaacatttcagcctgtgttttccagcatgggaccccctgcctcagtgcccctgcccgcgccatttttcaaacagacaactacgccggcgaccgcacccacaacaacggcaccattattcaccggccttgctagtgccactagcgctgttgctcccatcacttcggcctcgccatccacggactcagcatcaaagccagcttttggctttggaattaatagcgtgagctccagctctgtgagtactacaacctctactgccactgctgcaagccagccctttctgttcggcgcgccacaggcgagcgccgctagtttcacaccggctatgggcagcattttccagttcggaaagccccccgccttgcctacaaccaccaccgtgactacatttagccaatcactccacaccgcggtgcctacagcaacctcatctagcgcggccgatttttcagggtttggaagcaccctcgcgaccagcgcacccgctacaagctcccagccaaccttgacgttctctaacaccagtacacctacatttaacattccctttgggtccagtgctaagagccctctcccatcctaccccggggcgaatccccagccggcatttggcgccgcagaaggacaacctcctggtgccgctaaaccagccctggcgcccagctttggaagcagttttacatttggtaactcagccgctcccgcagcagcacccacccccgcacccccttccatgatcaaggtggtacctgcctacgtacccacacccatccaccccatttttggaggtgctacccacagtgcgtttgggttgaaggcgactgcttccgcctttggcgctccagcaagctcccagcccgcctttgggggcagcaccgctgtgtttttcggagctgccacttccagcggcttcggtgccaccacccagacagcatccagcgggtcatcctcctccgtctttggaagtacaacaccctcacccttcacgttcggcgggagtgccgcgccagccggaagcggcagctttgggattaacgtggccactcctggcagctctaccactacaggcgcgttcagtttcggcgctggccagtctggatcaacagccacctccactcctttcgccggcggacttgggcaaaacgccttgggaactacaggacagtcaacaccctttgcttttaacgtgagctctactaccgagagcaagcccgtgttcggaggaaccgctactcccacattcggcctcaacactcccgcacccggcgttggcacgtccgggtctagtttgagtttcggcgctagctctgctccagcacaggggtttgtcggtgttgcaccatttggtaatacgttcgcccaccagcaagagcatagccctcgcaagggtcctaacaacttgtcaaagcgcaaactcctcccagcagtgagggcacaagggcttcccaggagagggcaagcctccagtttcccaacgaggaaagagtag

SEQ ID NO: 91933 - DNA, 3000 bp, Artificial Sequence
  derived and/or modified sequence
atggtttgcagccccgtcactgtgcggatcgcgcccccagaccgtagattctcccgcagcgcgatccccgagcagattatcagctcaaccctaagcagccctagcagcaacgccccggacccctgcgccaaggagactgtcctgtccgctcttaaggaaaaagaaaagaagagaactgttgaggaggaagatcagattttccttgatggccaggagaacaaacgtcgcagacatgatagctccggctccgggcactccgcgttcgagcctctggtagccaacggagttcccgcgagttttgtgcccaaacccggctcactgaaacgcggcttgaacagccagtcatctgatgaccacctcaacaaacgcagtagaagctcatcaatgtcatccttaaccggtgcttatgccagcgggataccttcctcttctagaaatgccatcacttcatcctattctagcactagagggattagtcagctctggaagaggaatgggccctcctctagcccattttccagccctgcttctagcagaagtcaaactcccgagcggccggccaagaaaataagggaagaagaattatgccatcactccagctcgagtacgccactcgcggcagatagggaatcacagggcgaaaaggcggcagatactacgcctaggaaaaaacagaacagcaattcacaaagtactcccggctcaagtgggcagaggaaaaggaaagtccagctgctcccttcacggaggggggagcagctgaccctaccccctccgccacagcttgggtattccatcaccgcagaagatttggacctggagaagaaagcatcactgcagtggtttaatcaggccttggaggacaaatcagacgccgcgagtaactcagtgacagaaaccccaccgattacccaaccctctttcacattcacgctgccagcggcggcgccagcatcacccccgacttcgctgctcgccccttccacaaacccactgctggaatcccttaaaaagatgcagacaccccccagtctgcccccatgccctgaaagcgctggagcagcgactactgaggcactcagtcccccaaagacacctagtttgctccctcccctcgggcttagccagtctgggcccccaggtttgttgccaagtccctcatttgattctaagccccctacaaccttgctcggattaattcccgccccttcaatggtgcctgccacagacaccaaggcaccgcctacactacaggccgaaacagctacaaagccacaagccacctccgcaccaagccccgcacccaaacagtcctttctgtttggcacacaaaacacgtctccgtcttcaccggcggcccccgctgcatcttccgcacctccaatgtttaaaccaattttcactgctccaccaaaatcagagaaggagggacccacaccccccggaccaagcgtcaccgccaccgctccttctagtagctctctgcccacaactacttccaccacagcacctaccttccagccagtgttcagcagtatgggaccgccagcgtcagtgcccctccccgcgccattcttcaaacagaccaccactccagctactgctcctaccaccaccgctcctctctttacggggctggcatccgcaacatcggcggtagcccctataacctcagcaagcccttccaccgattctgcctctaaacctgcatttggcttcgggattaactccgtctcgtcgtcaagcgtttccacaaccaccagtacggccaccgctgcatctcagccattcctcttcggcgcaccacaagcatctgccgcctcgtttacgcccgcaatgggaagtatctttcagttcgggaagccccccgccttacctacaacaacaacggtcaccaccttctctcagtcgttgcacacggccgtgcccacagccacgtcttcaagtgccgccgatttctccgggtttggcagtaccttggctacatccgccccggcaacatctagtcagcctacactcactttttcaaatacgtccacaccaacctttaatatcccctttgggtccagcgcaaagtctccactaccctcttatccgggagccaacccccagcccgcctttggcgcagcagaggggcagccacccggcgcagccaaaccagctttggctccctcattcgggagctcgttcactttcgggaacagtgctgctcctgcggcggctcccactccagcccctccatccatgatcaaggtggtcccggcttatgttccaactccaattcacccgatttttggaggagccacgcactctgcgttcggcctgaaggcaaccgcttctgcgttcggagcacccgcatcttcccagcccgctttcggcgggtcaacggccgtgttcttcggcgccgcaacttcttctgggttcggtgccactacacagaccgccagctcaggtagctcttcatccgtcttcggaagtaccaccccgagtcccttcacatttgggggcagtgccgccccggctgggagtggctcattcgggatcaacgtggctacacccggcagctctacaactacgggcgccttctctttcggcgcagggcaaagtggatcaacagctacatcaactccttttgcaggcggcctgggacagaacgctcttgggactacaggacagtcaactccttttgccttcaacgtttcttccacaactgagtccaaaccagtctttgggggcacagctactccaactttcggcctgaataccccggcgccgggagttggaacatccggatccagcctctcatttggggcttccagcgcacctgctcagggcttcgttggagtggcccccttcggcaacacttttgcccatcagcaggaacatagtccaagaaagggacccaataatctgtccaaacggaagttgctgccggccgtgagagctcagggtcttcctaggagagggcaggcctcatcgttcccaacacggaaggagtag

SEQ ID NO: 91934 - DNA, 3000 bp, Artificial Sequence
  derived and/or modified sequence
atggtgtgcagccctgtgacagtgcgcatcgcccccccagaccggcgcttcagccgcagcgccatccctgagcagatcatcagcagcaccctgagcagccccagcagcaatgccccagacccctgtgccaaggagaccgtgctgagcgccctgaaggagaaggagaagaagaggacagtggaggaggaggaccagatcttcctggatggccaggagaacaagagaagaagacatgacagcagcggcagcggccacagcgcctttgagcccctggtggccaacggggtgcctgccagctttgtgcccaagccaggcagcctgaagaggggcctgaacagccagagcagtgatgaccacctgaacaagaggagccgcagcagctccatgagcagcctgactggagcctatgccagcggcatccccagcagcagcagaaatgccatcaccagcagctacagcagcacccggggcatcagccagctgtggaagagaaatggccccagcagcagccccttcagcagccctgccagcagccgcagccagaccccagagaggcctgccaagaagatccgggaggaggagctgtgccaccacagcagcagcagcacccccctggccgctgaccgggagagccagggcgagaaggctgctgacaccacccccaggaagaagcagaacagcaacagccagagcaccccaggcagcagcggccagaggaagaggaaggtgcagctgctgcccagcagaagaggagagcagctgaccctgcccccaccaccccagctgggctacagcatcacagctgaggacctggacctggagaagaaggccagcctgcagtggttcaaccaggccctggaggacaagagtgatgctgccagcaacagcgtgacagagaccccacccatcacccagcccagcttcaccttcaccctgcctgctgctgccccagccagcccccccaccagcctgctggcccccagcaccaaccccctgctggagagcctgaagaagatgcagaccccacccagcctgcccccctgcccagagagcgctggggccgccaccacagaggccctgagcccccccaagacccccagcctgctgccccccctgggcctgagccagagcggccccccaggcctgctgcccagccccagctttgacagcaagccacccaccaccctgctgggcctcatcccagcccccagcatggtgcctgccacagacaccaaggccccacccaccctgcaggccgagacagccaccaagccccaggccaccagcgcccccagccctgcccccaagcagagcttcctgtttggcacccagaacaccagccccagcagccctgctgccccagctgccagcagcgccccacccatgttcaagcccatcttcaccgccccacccaagtctgagaaggagggccccaccccacctggccccagcgtgacagccacagcccccagcagcagcagcctgcccaccaccaccagcaccacagcccccaccttccagcccgtcttcagctccatgggccccccagcctctgtgcccctgcctgcccccttcttcaagcagaccaccaccccagccacagcccccaccaccacagcccccctcttcaccggcctggccagcgccaccagcgctgtggcccccatcaccagcgccagccccagcacagattctgccagcaagccagcctttggatttggcatcaacagcgtgagcagcagctctgtgtccaccaccaccagcacagccacagctgccagccagcccttcctgtttggagccccccaggccagcgctgccagcttcaccccagccatgggcagcatcttccagtttgggaagcccccagccctgcccaccaccaccaccgtgaccaccttcagccagagcctgcacacagctgtgcccacagccaccagcagcagcgctgctgacttcagcggcttcggcagcaccctggccaccagcgccccagccaccagcagccagcccaccctgaccttcagcaacaccagcacccccaccttcaacatccccttcggcagcagcgccaagagccccctgcccagctacccaggggccaacccccagcctgcctttggagctgctgagggccagcccccaggagctgccaagccagccctggcccccagctttggcagcagcttcaccttcggcaacagcgctgccccagctgctgcccccaccccagccccacccagcatgatcaaggtggtgcctgcctacgtgcccacccccatccaccccatctttggaggagccacccacagcgccttcggcctgaaggccacagccagcgccttcggggccccagccagcagccagcctgccttcggcggcagcacagctgtgttcttcggggccgccaccagcagcggctttggagccaccacccagacagccagcagcggcagcagcagctctgtgtttggcagcaccacccccagccccttcaccttcggcggcagcgctgccccagctggcagcggcagctttggcatcaacgtggccaccccaggcagcagcaccaccactggagccttctcctttggagctggccagagcggcagcacagccaccagcaccccatttgctgggggcctgggccagaatgccctgggcaccaccggccagagcaccccatttgccttcaacgtgagcagcaccacagagagcaagcctgtgtttggaggaacagccacccccaccttcggcctgaacaccccagcccctggggtgggcaccagcggcagcagcctgagctttggagccagcagcgccccagcccagggctttgtgggcgtggcccccttcggcaacacctttgcccaccagcaggagcacagccccaggaagggccccaacaacctgagcaagaggaagctgctgcctgctgtgcgggcccagggcctgccccggcggggccaggccagcagcttccccaccaggaaggagtag

SEQ ID NO: 91935 - DNA, 3000 bp, Artificial Sequence
  derived and/or modified sequence
atggtgtgcagccccgtgaccgtgcggatcgccccccccgaccggcgctttagccggtccgccatcccagagcagatcatctcatccaccctgagctctccctcctcaaacgctcccgatccttgtgcaaaagaaactgtgttatccgctctaaaggagaaagagaagaagcgcacggtcgaagaagaggatcaaatcttcctcgacggacaggagaacaagcggagacgccacgattcctccggctccgggcattcagcttttgagcccttggttgcaaacggggtaccagccagttttgtgcccaaacctggcagcctgaagagaggactcaactctcagtcttctgatgatcacctaaacaagcggtctcgctcctcctccatgtctagcctgaccggcgcttatgccagtggaatcccctcatcatccaggaacgcgattacgagtagttactcaagcacccgcggcatcagtcagctttggaaacgcaacggcccatcgagttcacctttttccagccctgcgtcttctcgttcccaaactccggaaaggcccgcgaaaaagatccgagaggaggagctgtgtcatcacagtagcagtagtactccactggccgcagaccgggaaagccagggcgagaaagccgccgatacgactccccgcaaaaaacagaacagcaactcccagtctacccccggctcctctggacaacgaaagcggaaagttcagctgctgcctagtcgtaggggcgagcagctgaccctgcctcctccaccacaactcggatactcgatcacggccgaggatctcgatctggagaaaaaggccagcctacagtggttcaatcaggccctcgaggacaagagtgacgccgccagcaatagcgttacagaaacccctccgatcacccaaccgtcattcaccttcacgcttccagccgccgcccccgcatctccccccacttcgctattagcaccctcaaccaaccctctcttggaatcccttaaaaaaatgcaaacccctccgagcctgccaccttgtcctgaatctgctggagcagctaccacggaagccctgtctccccctaagaccccatcccttctgcctcctctcggcctatcccagtccggacccccagggctgctgccgagtcccagctttgattccaaaccaccgaccaccctgctcggtcttatccctgcacccagcatggtgccagccacagataccaaagctccccctactctgcaagccgaaactgctacaaagcctcaggccacgtccgctcctagcccggcccctaaacagtcctttctctttgggacccaaaatacttcccctagttctcctgccgcaccagccgcttcatcagctccgccgatgtttaaaccaatttttaccgcccccccaaagtctgagaaagaaggccccactcctcccggacccagcgttacggctacagccccatcctccagctccctacccacgaccacctctacgacggctccaacctttcaacccgtttttagcagcatgggaccccccgcatccgtgccactgccggcacccttcttcaagcaaacgaccacacccgcgactgcacctacaaccacagcacccctgtttactgggctcgctagtgctacgagcgctgttgcacccattacaagtgcctctccatcaaccgacagcgcttcaaagcccgcgttcggatttggcatcaattctgtgtcgagttcctccgtgagcaccaccacatctaccgccactgctgcttcgcagcccttccttttcggcgcccctcaggcatccgcggcgagtttcacaccagccatgggcagcattttccagtttgggaagccacccgctctgcctaccactaccactgtgaccactttttcacagtccctacacacagcagtccccaccgccacatcttcaagcgctgccgattttagcgggttcggcagtaccctggcgaccagtgccccagccactagctcccaacctacgctcacatttagtaacacaagtacccctacctttaacatcccatttggctccagcgctaaatccccattgccgtcatatcctggcgccaatccgcagccagcttttggcgccgcagaaggtcagccgcccggagccgccaagcccgctctggccccttcttttggcagtagctttacatttggaaacagcgccgcaccagcagctgcccctacgcctgcacccccgtccatgatcaaggtcgtgcccgcctatgtccctactccaatccaccctatatttgggggcgcaacccacagtgcctttggcctgaaggccaccgcttctgctttcggcgcgcccgccagctcccagcctgcctttggcggatccacagccgtattttttggggccgcaacatcatcgggattcggtgctacgactcaaacagcctcatccgggtcctctagctctgtgttcggctctaccaccccatccccgtttacatttggagggtccgcagctcctgccggaagcggctcgttcggcataaacgtggctacgcccgggagcagtacgaccactggtgccttctcgttcggcgcgggccagtcgggctccaccgctacaagcactcctttcgccggtggccttggtcagaatgctttgggtactacaggacaaagcacaccctttgccttcaacgtgagttccactaccgaatctaagcccgtattcgggggcaccgctactcccacctttggtctgaacacacctgcccctggggtcggaacctccggttcttcactctcctttggggcttccagtgcgcctgcccaaggatttgtgggcgtagctccgttcgggaacactttcgcccaccaacaggagcattcgccaaggaaaggtcccaacaacctgtccaagcggaaactgctccctgctgtgcgggctcagggattaccgaggagaggccaggcgagttcgtttcccacccggaaagagtag

SEQ ID NO: 91936 - DNA, 3000 bp, Artificial Sequence
  derived and/or modified sequence
atggtgtgcagccccgtgaccgtgcggatcgccccccccgaccggaggttttctcgctccgcaattccggagcagataattagcagcactctgagtagtcctagcagtaacgccccggacccctgtgctaaagagaccgttttatctgctctgaaagaaaaagaaaagaagagaaccgtggaagaagaggaccaaattttcctggacggccaggaaaataagaggcgacgccatgacagttccgggtctggtcattcggcgttcgaaccgctggtggctaatggcgtgccagccagctttgtgccaaagcctggaagcttaaagcgcgggctgaattcgcagtcctcagatgaccatcttaacaagcggagtcgatccagctccatgagcagtctgactggggcatacgcaagtggaatcccttcgtcatcacggaacgcgattaccagtagctattcctccacaagagggatctctcaactatggaagcgcaacgggccgtcctctagcccgttttccagcccagccagcagccgttcccaaacacccgagcggcctgctaagaaaatacgcgaagaagagctgtgtcatcacagcagctcatccacgccgcttgccgcagaccgcgagtcgcagggggaaaaggcggccgacacaacaccacgtaaaaaacagaacagcaattctcaaagtacccccggttcctctggccagcgtaagaggaaagttcagctccttcctagtagaaggggagagcagctgacgctaccccctccaccacagctgggctatagtattacagcagaggatctggaccttgagaaaaaggctagtttgcagtggtttaaccaggctttggaggacaagagtgacgctgcgtcgaactccgtaactgagacccctccaataacccagccgagcttcacgttcaccctgccggcggctgccccagcctctcccccgacatctctgctcgctcctagcacaaatcctctgttggaaagtctgaagaaaatgcagacgccgccttccctgcctccttgtccagagtcggccggcgctgccaccaccgaggcactgagcccccccaaaactccatccctgttgcctcctctcggactgagtcaatccggaccaccaggcttactaccatcgccatccttcgactccaaaccgcccactactctacttgggttaatccccgccccgtcaatggtacctgcaactgataccaaagcaccccctacattacaagcagaaacggccacaaagccacaggctacctctgcacctagtccagcacctaaacaatcctttctgttcggcactcagaacacgtcgccaagctctcccgccgcaccggccgcttcaagcgcgcctccgatgttcaagccaatttttacagccccccctaagtctgaaaaagaggggcctaccccccctggaccatccgtcacggcgacagcacctagtagctcatcgctacccactaccacctctacaacggcccccacttttcaacccgtcttttccagcatgggaccccctgcaagtgtgcctttaccggctccgtttttcaaacagactacaactccggcaactgcccctacaacaactgcccctctgtttaccggtttagccagcgcaacaagcgccgtagccccaattacaagtgccagcccctcgactgacagcgcaagtaagccagcctttgggttcgggatcaattccgtttcctcgtcaagcgtgagcaccaccaccagcaccgctacggccgcatcccagccatttctgtttggcgccccccaggcctcagctgcaagtttcacaccagccatgggttctattttccagtttggcaagcccccagctcttccaaccaccactaccgtgactaccttcagccaatcactgcacaccgccgtacccaccgcaacgtccagtagcgcagccgacttctccggctttggttcaacccttgccacttcggcccccgccacgagcagccagcccactctgaccttctcaaatacatccaccccaacttttaacattcccttcggttcgtccgcaaaaagtcctcttcctagttaccccggcgccaacccccagccagccttcggagccgccgagggacaacctcccggggctgccaaaccggccctagccccatcgtttggatcttcgtttacttttggaaactccgcagcccctgccgcggctccgacacccgctcccccctctatgataaaagttgtccctgcctatgtgcctacccctatccacccgatatttggcggagccactcactcagcctttggactgaaagccaccgcaagcgcctttggtgcccctgcctcctcgcagcctgcgtttggcggaagtactgctgtgtttttcggcgcagctacatcatccggctttggtgcaacaacacagactgcttcttcaggatcttcgtccagtgtgttcggaagtaccactccttctcctttcaccttcggaggaagcgctgcccccgcgggttccggttcatttggcatcaacgtggctacccctggcagctccaccacaactggtgctttttcttttggcgccggtcaaagtggatctaccgctacctccactccttttgctggaggtctcggccagaatgcactggggacaaccggccaaagtaccccctttgctttcaatgtgtccagtacgactgagtcaaaacccgtctttggtgggacggcgaccccaaccttcggactaaacactcctgcgccgggcgtgggcaccagcggatctagcctttcttttggcgcctccagtgctcctgcccaaggctttgttggagtcgctccctttggcaatacgttcgctcaccagcaggagcacagtcctcgaaaaggccctaataatttgtcaaagcgaaagctcctgcctgctgtccgcgctcagggactgccgcgacgaggtcaagcaagctcattccccacacgcaaggaatag

SEQ ID NO: 91937 - DNA, 3000 bp, Artificial Sequence
  derived and/or modified sequence
atggtctgtagtcctgtgacagtgaggattgcccctcccgatcgcagattcagtcgatccgccattcccgagcaaattatctcatccaccctatctagcccaagctccaatgcccctgacccatgtgctaaggagaccgtcctcagtgcactcaaggagaaagagaagaaaaggaccgtggaagaggaagatcagatttttcttgacggtcaggagaacaagagacggaggcatgactcttcaggttcagggcactccgcttttgaacccctggtcgctaatggcgtgcccgcatctttcgtgccaaagcctggcagccttaagaggggattgaattcccaatcttccgatgaccacctcaacaaacgcagtaggagctcctcaatgtcatctctgaccggagcctatgcgtctggaattccgtcttccagccgaaacgccattaccagcagctactcgagcactcggggtatcagtcagttatggaagcgaaatggtcccagttcaagccctttcagcagcccggcatccagtagatcccagacccctgaacggccagcaaaaaagatacgagaggaggagctatgtcaccatagtagttcttcaacccctctggccgcagacagggagtcccagggcgagaaggccgcagatacaactcccaggaaaaagcagaactccaactcccagtctacccccggaagctctgggcaacgcaaaaggaaggtgcaactgctgccttcccgcaggggcgagcagttaactctgccaccgcctccccagttggggtatagcataaccgctgaagacctcgaccttgagaagaaagcctcgctgcagtggttcaaccaagccctggaagataagtccgacgccgctagcaattcagtgactgagacaccaccaattacacagccaagtttcacttttactctgcctgctgccgctccagcttccccccctaccagtttgctcgcaccgagcacaaatcctctgctcgaatctttaaagaaaatgcagacccctcccagcctgcccccatgtccagaaagcgctggtgccgcaacaacagaagccttgtcgccacctaagacaccgtcgcttctgcctccacttggtttgagccagtccgggccacccggactgctgcccagtcctagcttcgattcgaagccaccgaccacgctgctgggactgattccggctccatctatggttcctgccactgataccaaagcacctcccacactgcaggccgagacggctaccaagccacaggccacatcagctccttcaccagcccctaaacagagcttcctgttcggcacccagaacacttccccttcaagtccagccgcaccagccgcatcaagtgcccctcctatgtttaagcctatcttcacagccccacctaaatcagagaaagaaggaccaacgccacccggaccatccgtgaccgccacggccccatcttcatccagccttcccactacaacaagcacgaccgcccctacctttcaacccgtatttagttccatgggacccccagcttctgtacctctgccagctcctttctttaagcagacaacaactcccgcaacagcccctacgacgactgcacccctctttactggattagcctcagccactagtgccgtcgcacctattacctctgctagtccctccaccgactcagcctccaaaccggcttttggttttggcatcaatagcgtgagttcatctagtgtttctacaacgacaagtacagctacagctgcttcacaaccctttctgtttggcgctcctcaggcgagcgccgcaagctttacgcccgcaatgggctcgatctttcagtttggaaaacccccagccctgcccacaaccaccacagtaactaccttcagccagagcctccatactgccgttcccaccgccacttcctcaagcgctgccgacttctccgggtttggaagcacactggctacgagtgcaccagccacatcatcccagcccacacttacatttagtaatactagtaccccgacctttaacatccccttcgggtcctccgccaaatcacctctgccctcctacccaggggcaaacccccagcctgccttcggcgcagcggagggacaacctccgggagcagcgaagccggctcttgccccttcatttgggtcatctttcacttttggaaattctgcagccccagccgctgcccctactcctgctccgccaagcatgatcaaggtggtgccagcgtacgtgcccacccccatacaccccattttcggtggcgcaacacattctgctttcgggcttaaggccacagcgagtgcattcggcgcaccagcaagctcacagcctgctttcggcggaagcacggccgtgttttttggcgcagccacatcctccggctttggcgctaccacacagacggcaagcagcggatcatctagcagcgtgtttggcagcacaactcccagtcctttcacatttggaggcagcgctgctcctgctggatctggatcttttggaatcaacgtcgcaaccccgggaagctctaccactacgggggctttctccttcggagcaggacagtctggctcaactgccacatctacgccgttcgccggagggttaggtcagaacgcgttgggcaccaccggccagtctacacccttcgcgttcaacgtgtcgagtactaccgagtcaaaacctgtgtttggcggtacggccactcccacttttggtctgaacacgccagctcccggtgtcggcacaagtgggagttcccttagttttggggcttcgagtgcacctgcacaaggcttcgttggagttgcaccatttggaaacacgtttgcccaccagcaggaacacagcccgagaaaagggccaaataacctgtctaagcgcaaattactgcctgctgtcagggcgcaaggtcttcctcgccgaggacaggctagcagctttcccacacgcaaggaatag

SEQ ID NO: 91938 - DNA, 3000 bp, Artificial Sequence
  derived and/or modified sequence
atggtgtgttctccagttaccgtgagaatcgcgccacccgaccgtagattttcccgttcagccataccagagcagatcatctcaagtaccctttccagcccaagctctaatgctcctgatccctgtgccaaagagaccgttctgtctgccctcaaggaaaaagagaagaagaggactgtagaggaggaagatcagatatttctcgacggtcaggaaaacaaaagacggagacatgactccagcggttccggccactccgccttcgagcccctggtcgccaacggtgttcctgcctcttttgtgcctaaaccaggctcgctgaaacgcggactgaattcccaaagcagcgacgatcacttaaataagcgaagtagatcatcttccatgagctctctgaccggagcttacgccagcggtataccaagttcaagcaggaacgctattacttcttcatactcgtcaactcggggaatttcccagctatggaagagaaacgggccttcctcttcccccttctcgtcccccgcaagcagccgtagtcagacccccgagagacccgctaaaaagattcgggaagaagagctttgtcatcacagttccagctctactccacttgccgcagacagggaaagccagggagagaaggctgcagacactactccccgtaaaaagcagaattccaactcccagtctacacctggaagctccggccagagaaagcggaaggttcagcttttacccagtaggcgcggagagcagctcacccttccccctccccctcaacttggttatagcatcaccgccgaagacctcgacctggagaagaaggcgtcattacaatggtttaaccaggccctagaggacaaaagtgatgctgcctcgaattccgtcacagaaacgccccctatcacacagccttctttcacgttcacactgccggcagctgccccagcatccccccctacatcactcctggccccttcgacgaatccacttctcgagagtctgaaaaaaatgcaaaccccaccatcgttgccaccttgccctgaaagcgctggtgcagcaaccacagaagccctctcccctccgaaaactccttcactcctcccgccactggggctgagtcagagcggacccccaggcctgctgccgtcccccagtttcgatagcaagccacccaccacactgctggggctcatccctgctccctctatggtgcccgcaactgacacaaaggcccctcccacccttcaggccgagacagccactaaaccgcaggccacatccgcaccttcacccgctcccaagcaatcattcctgttcgggactcagaatactagtccgagctcacctgccgcacccgcagccagctccgcaccacctatgtttaagcccattttcactgcccctcccaagagcgagaaggaaggcccaacgcccccaggccctagcgtgacagccacagcccctagttctagctctctccctactaccacgtcgacaacagcccctacatttcagcccgtcttcagcagcatgggcccaccagcttcagtgccgctccccgcacccttctttaagcagaccaccacccccgcaaccgcccctaccaccactgctcccctctttactggtctcgcctccgctactagtgccgttgcacctatcacgtcagcctcaccgtcaactgactctgcgtccaaacctgccttcggattcggcatcaacagcgtgagctcctcatcagtttctacaacaacttctaccgccaccgctgctagccagcctttcctgtttggagctccacaggcctccgcagctagtttcactcctgcaatggggagtatttttcagtttgggaagccacccgcactgccgacgactaccacggtaactacgttctctcaatcacttcacacggccgttcctacggctacgtcttcatctgcagcagatttcagtgggtttggctcaacgctagcgacaagcgcccctgccacatcttctcaacctaccctgactttttctaacaccagcacccctacgttcaacatccctttcggcagctcagcgaagtccccactgccaagctaccccggagctaatccacaaccagccttcggtgccgctgaaggtcaacccccaggagccgcaaagcccgctctcgcccctagctttggttcgtcattcacgtttggcaatagtgcagcgcctgcagccgcacctacacctgcgccaccctcaatgataaaggtagtgcctgcatacgtacccacccctatacaccccatctttggcggtgccactcattcggcttttggtctgaaggcaactgccagtgctttcggggctcccgcatcctcccagcctgctttcggagggagtacagctgttttcttcggcgcagcaacctcgtctggattcggcgcaacaacacagacagcctcatctggatcttctagcagtgtttttggttcaacaacacctagccccttcactttcggaggaagcgcagctcccgcagggagcggcagcttcggcattaatgtggcaacccccggtagctcaacaacaaccggagcgttctccttcggcgctggccaatctgggtcgactgcaactagtacccctttcgccggaggcctgggacagaacgcactcggtactacaggtcagtcgaccccctttgcattcaatgtgtcctccaccacagagtccaagccagtgtttggcggaactgcaactcctaccttcggattgaacacccccgctcctggggtgggcacttcaggctctagcctgagcttcggagcaagctctgcgccagcgcagggattcgtgggcgttgctccattcggaaacacgttcgctcatcagcaagaacattcgcctagaaaaggccctaacaatctaagtaagaggaagctcctgcccgctgtgagggcccaggggctgcccaggagagggcaagcatcaagcttccccactcgaaaggagtag

SEQ ID NO: 91939 - DNA, 3000 bp, Artificial Sequence
  derived and/or modified sequence
atggtatgcagccccgttaccgtgagaatcgccccacccgaccgccgatttagcagatctgctatcccagaacagataattagttccacactaagtagcccaagttctaatgcgcctgatccctgcgcaaaagaaacagtgctgagcgccctcaaggaaaaagaaaagaaaaggacagtcgaggaagaggaccaaatcttcctcgatgggcaggagaacaaacgaaggagacatgactcctccggatctggtcatagcgcttttgaacccctcgtggccaacggggttcctgcctctttcgtgcctaagcccggctctttgaagcgcggcctcaactcccagagcagcgacgaccacctgaacaagcggagccggagttcctcaatgtcttccctgacaggagcctacgccagcggcatccccagttcctctcgcaacgctattaccagcagttactctagcacgaggggcatttcacagttatggaagagaaatgggccatcctcttctcctttctcctcgcctgcctcttcaagaagtcaaacaccggaacggccagcaaaaaaaattcgagaagaagagctttgccatcacagctcgtcgtctactcctctggcggccgacagggaatcacagggagagaaagccgcagacaccactccacgcaagaaacagaacagtaatagccagagcaccccgggctcaagcgggcagaggaaaaggaaggtgcagctgctgcccagccggagaggcgaacagctgaccctgccacccccacctcagctgggttatagcattactgcagaagatctcgatcttgaaaaaaaggctagcctgcaatggttcaaccaggcgctggaggataagtccgacgccgcctcgaatagcgtgacagagacgccaccaatcacccagccaagttttacatttaccctccctgcagccgcaccggcctctccgcccaccagtttgctcgctccatccacaaaccctttactggagagcttaaagaagatgcagacgccccctagcctgcccccatgcccggaaagcgcaggcgccgccacaaccgaagctctttctccaccgaaaaccccttcactcctgccccccctgggtctatcacagtccgggcctcctggcctgctcccttctcccagtttcgattctaagccacccacgaccctcttaggcctcatacctgcccctagcatggtgcctgccaccgataccaaggccccacctactctgcaggcagaaaccgcaaccaaacctcaggcaacaagtgctcctagcccagcaccaaagcaaagctttctgttcgggacgcagaacacctcccccagttctcctgctgcccctgctgccagtagcgcccccccaatgttcaagcccatatttacagccccacctaagtccgaaaaggagggccccactccacccggacccagcgtgactgctaccgccccttctagttctagccttccaacaacaacatctaccaccgctccaacgttccaaccggtgtttagctcaatgggacctcctgcctcagtaccactgcccgcaccattcttcaagcaaaccaccactcctgctacggcccctacaaccactgccccgctgttcaccggtttggcctccgccacctctgccgtggcgccgattacctctgcctctcctagcacagattctgccagcaaacctgcctttgggtttggcataaattccgtgtccagttcatcagtttctaccacgacttcaactgccaccgctgcctctcagccctttctgttcggggcgccccaggctagcgcagccagctttacacccgctatgggttcaattttccagttcggtaagccccctgctttgcccaccaccacaacagtgacaacgttcagtcagagcctgcataccgccgtgcccacagccacctctagctcagcggccgacttctctggctttggatccactctagctaccagcgctcccgctactagctcccaacccacacttacattctcgaatacatccaccccaacctttaacattcctttcggatcgagtgcaaagtcaccacttccctcatacccgggggctaaccctcagcccgcctttggggcagcagagggccaacctccaggcgccgccaagcccgccctggccccatctttcggcagttccttcaccttcggaaactcggcggccccagccgcagcccccacacctgcgcccccaagcatgattaaggtcgtccccgcatacgtgcctactcctatccatcctatttttggtggcgccacccactcagcatttgggctgaaagcaaccgcctctgccttcggggcccccgcttcttcccagcccgcgttcggtggatctaccgcggtcttcttcggggccgccacctcttccgggtttggagctactacccagacagcgagctccggctcatccagttcggtatttggaagtaccacccccagccccttcaccttcggcggcagcgcggctccagcgggaagcggctccttcggcatcaatgtggctacgccgggaagctcaacaacaaccggtgccttttccttcggagccggacagagcggttcaacagctacctcaaccccctttgcaggagggctcgggcagaatgcacttgggacgactgggcagtctacaccattcgcgtttaatgtgtcaagcaccactgagtcgaaacctgtctttggcggaactgctacaccaacatttggactgaatactcctgcccctggagtcggaactagcggttcaagtctgtctttcggggccagctccgcacccgcccagggctttgttggagtagcccctttcggcaacacatttgctcaccagcaggagcactctccaaggaagggtccaaataacctgtctaaacgtaagttgctgcccgcagtgcgcgctcaaggcctccctcgaagagggcaggcctcctcatttccaacccgcaaagaatag

SEQ ID NO: 91940 - DNA, 3000 bp, Artificial Sequence
  derived and/or modified sequence
atggtgtgcagccccgtgaccgtgcggatcgccccccccgaccggcgatttagtagaagcgccatccccgagcagataattagttccactctgagcagtccttctagtaatgccccggatccctgtgcaaaggaaaccgtgctgagtgctcttaaagagaaggaaaagaagagaacagtcgaggaggaggaccagattttcctagatggccaagagaacaagcggcgaagacacgattcctcaggcagtggtcactcagccttcgagccactggtggctaatggcgtgcccgcctcttttgttccaaagcctgggtccctaaagcgagggctcaactcccagtcttccgatgatcatttgaataagaggagcagatcttcttctatgagcagcttgacaggggcttacgcatctggaattccaagtagctcccgcaatgccatcacttcaagctatagttccaccagaggcatctcacaactgtggaagaggaacgggccgagcagctcgccattcagcagtcccgcatcaagcagatctcagacccctgagcgtccagccaaaaagatcagagaggaggagctgtgtcatcatagctcaagttctactcccttagctgccgacagggaatcacagggagaaaaagcagcagacactactcctcggaaaaaacagaatagcaactcgcaaagcacaccaggctccagcgggcagaggaaaaggaaagttcagctgctgccatcacgtagaggagagcagttaactctccctcctccgccacagctcggctactccatcactgcggaagatttggatttggaaaagaaggcctctctccagtggtttaaccaggccttggaggacaagagtgacgccgcctcaaattctgtcactgagacaccaccaatcacacaaccaagctttacgttcacgctgcctgccgccgcccccgcatctcccccgactagcctcttggctccgtcaactaaccccctccttgagtcactcaagaaaatgcagacacctccctctctaccaccatgccccgagtccgccggcgctgcgaccacggaagccttgtcacctcccaagacccccagcttgctacccccgctgggtttgagccagtcagggccccccggattactgccttcaccctctttcgattccaagccccctaccactctgttgggcctaatcccggccccttctatggtgcccgcgacagacaccaaggccccgcccacgctgcaggctgagactgccactaagccacaagccacgtctgccccctctcccgcccccaagcaaagttttctgttcggaactcagaacacttctccgtcatcgcctgctgcaccagccgccagctcagcaccgcccatgtttaagccaattttcacagccccacccaagtccgaaaaggagggaccaacacctcctggaccatcagtaactgctaccgccccatcatccagcagcctgcccactactacgtccactaccgcccccacctttcagcctgtgttttcttcgatgggacccccggcctccgttccgctacccgctccatttttcaagcaaacaaccaccccagctactgctcccaccacaactgctcctttgttcaccggattagcttcggcaacttctgcggtggctcccattacgtctgccagccctagtacagactcagcgtcaaagcctgcattcggctttggtattaactccgtcagttccagctcggtgtctactacaactagcacagcaacagccgcatcacagccttttctctttggcgctccccaggcatctgcagcttccttcacccctgccatggggagtatctttcaatttggtaagcccccagccctgcccacaactacaaccgtaaccactttttcacagagtctccacaccgctgttcctacagccacatcctcctctgctgctgattttagtggattcggatctacgctagctacgagcgcccccgctacaagctcccagcccaccctgaccttttctaatacgagcacgcctactttcaatattccgttcgggtcaagtgctaagtcgccgctgccaagctatcctggcgcgaatccacaacccgcgtttggagccgcagaggggcagcctccaggcgcggcaaaacccgcactggcccccagtttcggatctagtttcacattcggcaatagtgcggcacccgctgccgctccaacaccagccccgccctctatgatcaaagtagttccagcctatgtacccacgccgatccatcccattttcggcggcgccacccactccgctttcggcctcaaggctacggcgtccgcattcggggccccagctagttcacagcctgcattcggcggcagcaccgccgtcttctttggcgcagctacgagctctggctttggagccaccacgcagacagcttcttccggttcttcttcatccgtttttggtagtactacaccttcacccttcacatttggtgggtctgcagcccccgccggaagcgggtcttttggcattaacgtggctactcctggtagctctacaactacaggcgcgttttctttcggagctgggcagtctggcagcaccgccaccagtacaccattcgcaggtggcttggggcagaatgctcttgggacaactggacagtctactccattcgctttcaacgtgtcgagcactactgaaagcaaaccggtcttcggtggtaccgcaaccccaacttttggacttaacactcctgctcccggcgtcggtaccagtggttccagcctttctttcggggcatcttccgccccagcacagggttttgtgggcgttgctcccttcggcaatacctttgcacatcaacaggaacatagccctcgtaaggggcctaacaatctgtccaagcgcaaactactacctgctgtgagagctcagggcctcccaagacggggccaggccagctcttttcccaccaggaaagagtag

SEQ ID NO: 91941 - DNA, 3000 bp, Artificial Sequence
  derived and/or modified sequence
atggtgtgttcgccagtgaccgttcgtatagccccaccagataggcgattcagcaggtctgccattccagagcaaatcatatccagcaccctgtcatcccccagttcaaacgcccctgatccctgtgctaaggaaaccgtactctcagcccttaaggaaaaagagaagaaaagaactgttgaggaggaggaccagatatttctcgatgggcaagagaacaagcgaaggagacacgactcctccggctccgggcatagtgccttcgaaccactggtggccaatggagtccctgcgagtttcgtccctaagcctggttctctgaaacggggactgaactcacagtctagcgatgaccacctcaataagcgttcaaggagttcctcaatgtcaagccttaccggcgcatatgccagcggaattccctccagttcaaggaacgccattacctctagctactcttctactagaggtatctctcagctctggaaaaggaatgggccttcttcatcacctttcagcagtcctgcttcttctcggtcccagactcccgagcgtccagctaaaaagatccgagaggaggagttgtgccatcattctagctcatcaacacctctggcagccgacagggagagccaaggagagaaagcagctgacacgacccctaggaagaagcagaattctaactcacagtccacccctgggtcaagcgggcaaaggaaacgtaaggtccaattgctgccttctcgccgaggagaacaactgaccctacctccaccgcctcagctgggctattcaatcacagccgaggacctcgatctggaaaaaaaggcatcattacagtggttcaaccaggccttagaagacaagagcgatgcggcttctaatagcgtcaccgagacgcctcccatcactcaacctagcttcactttcacattacccgcagctgccccagcaagccctcccaccagtcttttagccccttctacaaatccgcttttggagtctctgaaaaagatgcagacaccgccaagtttacccccatgtccggaatccgccggtgctgccacgacagaggcactctcacctcctaaaaccccttccctcttaccaccgctagggctgtcccaatcaggaccccctggactgctcccttccccatccttcgactcaaaacctcccactacacttctgggtcttatcccagccccttccatggtgcccgctaccgacaccaaggccccacctacacttcaggctgaaacggctaccaaaccccaggccacaagcgctccatctccagctccgaagcagtctttcctttttggtactcagaatacctccccctcttctcccgcagctcctgctgcctccagtgcacctccgatgttcaagcccatattcactgcccctccaaagagtgagaaggaaggaccaactccaccgggtccctctgtgaccgcaactgcaccaagctcttcctccctccccaccactacatcaaccactgctccaacctttcagccggtgtttagctccatgggaccacccgcaagcgtgccccttcctgctcctttttttaaacagactaccaccccagccactgcccctacaacgacagcacccctctttacaggtctggcctcggccaccagcgctgtagccccaatcactagtgcaagcccctctacagactcggctagcaagcccgcatttggttttggcataaatagtgtatcaagttcctcagtgagcacaactacgagtactgccaccgccgctagtcagcccttcctcttcggagcgcctcaggcgtccgcagctagttttacccccgctatgggctcgattttccagtttgggaagcctccagcactgcctaccactacaacggtgactaccttcagtcagtctttacacactgccgtgcccaccgccacttcctctagtgccgcagacttctccggctttgggtccactctggctacgtcagcgccagcaacatcctctcagccaactctgaccttctctaacacatcaacccctacttttaacatcccatttggcagctctgctaagtcacccttgccaagctaccccggtgctaatcctcagccggcatttggtgcggctgagggacagcctcctggcgctgccaaacccgctctggcaccttctttcggtagttcgtttacttttggaaacagcgccgctccagccgcagcccctactcctgctccaccgtccatgatcaaggtggttcccgcttacgtaccaactcccattcatccaatcttcggaggtgcaacacactccgctttcggactgaaggctacagctagtgcgttcggcgcacccgcttccagccagcccgcatttggaggctcgaccgctgtcttctttggagccgctacgagcagcggcttcggagctacaacgcagaccgcctcctccggcagctcttcctccgtttttggatctaccaccccctctcccttcaccttcgggggatctgctgctcccgctggaagcggctctttcggcatcaatgtggcaacccctggaagcagcacgacaacaggtgcattcagttttggggcaggccagtccgggagcaccgctactagtacacctttcgccggagggcttggtcagaatgccctaggcaccaccggacagagcacaccctttgcattcaatgtgtcgtctaccacggagagcaagccagtgtttggagggacggctacccccaccttcggtcttaacaccccggcaccgggtgtagggaccagtggatcctccctaagctttggagcctcctctgcaccagctcagggcttcgtgggtgtggctccatttggaaatacctttgcccaccagcaagagcattcacctagaaaaggccctaataatctgtccaaaagaaaactccttccagccgtgagggcgcagggtctgccacgtcgcggacaggcgagtagcttccccacacgaaaagaatag

SEQ ID NO: 91942 - DNA, 1668 bp, Artificial Sequence
  derived and/or modified sequence
atgggaaaagcctttaaggtaatgaacgagctccggtctaaacaacttctctgtgatgtcatgattgtcgcagaggacgtggaaatcgaggcccaccgggtggttttagctgcctgtagcccttacttctgtgccatgtttactggcgacatgtccgaaagcaaggcaaagaagatcgagatcaaggacgtggacgggcagacactctctaaactgattgactacatttatacggccgaaatcgaggtgactgaggagaacgttcaggtgttgttgccggctgcttctctgttgcagctaatggatgtccgtcagaattgctgcgattttctccagagccagctccacccaacaaactgtctcggcatccgggcttttgccgatgtgcacacttgcaccgatttgttgcagcaagctaatgcctatgcagagcagcacttccccgaagtaatgctcggtgaagagttcctcagcctgtcactcgatcaagtttgtagtctgatttcgagtgataaactcactgtgtccagcgaggagaaagtattcgaggccgtaatcagctggataaactacgagaaagagacacggctggagcatatggctaaattgatggagcatgtacgcctcccacttttaccccgcgattaccttgttcaaactgtggaggaggaagctctgatcaaaaataacaatacctgcaaggattttctcatcgaggcgatgaaatatcacttgttacctttggaccagcgattgctcatcaaaaatcccaggaccaaaccacgcacacccgtttccctcccaaaagttatgattgtcgtaggaggacaggccccgaaggccatccggtctgtcgagtgttacgattttgaggaggacagatgggaccaaatcgctgaactgccctctcgaagatgcagagccggcgttgtgttcatggcgggacatgtgtacgctgtaggaggcttcaatggcagcttgcgggtaagaacagtcgatgtctatgacggagtgaaggaccagtggacatccattgcctccatgcaggaaagaaggtcaaccctgggagcggctgtgctcaacgatctcttatatgccgtgggtggattcgatgggagtaccggtctggccagtgtggaagcatatagctataaaaccaatgaatggttctttgtcgctccaatgaacacccgcagatccagtgtgggcgtcggcgtggttgagggtaaactgtatgcagtgggcggctatgatggggcctcccgtcagtgtctgagcacagtcgaacaatacaatcctgctaccaatgagtggatctacgtggcagacatgtccactaggagaagtggcgctggcgtcggtgtgctgtcaggccagctctacgccaccggcggtcacgacggccccttagttaggaagtccgtagaggtatacgacccaggaaccaatacgtggaagcaggtcgctgacatgaatatgtgcagacgcaacgccggggtatgcgccgtgaacggcctgctgtacgtggttggcggagacgatggctcttgcaatttggcctctgtcgaatattacaatcccgttacagataagtggaccctcctgccaaccaacatgagcacaggtcgctcctacgcgggcgttgccgtgatccacaagtccctgtag

SEQ ID NO: 91943 - DNA, 6566 bp, Artificial Sequence
  derived and/or modified sequence
agatttatatatttttaaggcccattggctttgcctaaaccttggtaaacagatactaaaaatctccagtaacattgcaaaattttgttctaattatcaggttcagcttcaaaacgtgtaaaatgcattgtgtactgagagtaagaggctgactctcgttagatccatttctatcagtgtgtttaaagccaaaaggaaagtaaaatacacatggctttcttctgacttgagttgtgtgattatggtcttttactcaagcttaaatgtttttatttttttgtcttccgagttcatgttgcccaaatgtcctgaggtggttccaaataccaatcccacacttcttgaccattgtcctgtggacaataacttggaataaatgtgaaactgaagtctgagtgcccatcagagagtgtcccaatccaaccagtctataagaagatctggggtgacatgtctgagagtaaagccaaaaagatagaaatcaaggacgtggatgggcagacgctgagtaagctgattgactacatctatactgctgaaatcgaggtgactgaagagaatgtccaggtgctgctcccggcagccagcttgctgcagctcatggatgttcggcagaactgctgtgacttcctgcagtctcagttgcatcccaccaattgcctgggcatccgtgcatttgcagatgtacacacctgcactgaccttctgcagcaggccaatgcctacgcagagcagcactttccagaggtgatgctaggagaagaatttcttagcctgagtctggaccaggtgtgcagcttgatatccagcgacaagctgaccgtttcttcagaagagaaggtgtttgaagctgtgatctcatggatcaattatgagaaagaaacccgtttagagcacatggcaaagctgatggaacatgtccgacttcctctcttacctagggactacctagtccaaacggttgaagaagaagctttgataaagaataacaacacctgtaaagacttcctcattgaggccatgaaataccatctcctccctctggatcagagactattgattaagaacccaaggaccaagcccaggactccagtcagccttcccaaggtcatgattgtggttggcggccaggcacccaaggcaatccgcagtgtggagtgctatgatttcgaggaggaccggtgggatcagattgctgagcttccttccagaagatgcagagcaggtgtggtgttcatggctggccacgtgtatgccgtgggagggtttaatggctcactgcgggtgcggacagtggatgtgtatgacggcgtgaaggaccagtggacgtccattgccagcatgcaggagcgccggagcacactgggcgcagcggtgctcaatgacttgctctacgcagtgggaggctttgatggcagtactggcctagcatcggtggaagcctacagctacaagaccaacgagtggttctttgtggccccgatgaacacgcggcggagcagtgtgggtgtgggcgttgtggaggggaagctatatgctgttgggggttatgatggagcttcccgccagtgtctgagcactgtggagcagtacaacccagcgaccaatgaatggatatacgtggcggacatgagcacccgccgcagtggcgcaggggttggagtgcttagcggacagctgtacgccacaggtgggcatgatgggcctttggtgaggaagagcgttgaggtttacgatcctggaacaaatacctggaagcaagtggcagacatgaacatgtgccggcgcaacgcaggggtctgtgcagtaaatgggctcctgtatgtggttggaggggatgatggatcctgcaacttggcttcggtggagtactacaatcctgtcactgacaaatggacgctgcttccaacgaacatgagcacggggcggagctatgcaggtgttgccgtgattcacaagtccttgtgacccaaactcctactgccaggaggtggaggaaggagcaggtgctgcctgtgactctgaacagcaggaccttggtgactggattcaacttgcttgggagggtctgtgctgctgtgagaaccgctctcctctgacttggcagactggtgttgttcatcgcagtgtggacaccattacccacccccgttcccctgaggtgctctggcctatgccctgagcaaggggggtcttgacatccccaggcagcacctttgggctttgttttggtgtttctacagggacaatacagaccctggagtgtgtgtgtgtgtgtgtgtgtgtgtagaccatggtgtttctctatgtttctctaagttggggggtgagcgtgtgtgacagtctactggatttctttactactgatcctttcgctgtgttaaaaatcaagtcacagagacctctcttctggatttgtcccatggggaccctgagactactaaagctgctttcttctgaaggtccagttggacagtctgggaatgtccagaaataaccagtgagaggggcagttctctggccacacccacttatgtactttaactactgtgactttgtctgcagaagagctggaaaattctcgaagctgcaccgtgtcctctgtgtgctagaataagggacaaatgggttccctgtgcttctcagctcactgtttttccttgagttctcctacaggaagcagatgagaactgcccagtcttcaggtttaggccattggtctttgatgtcatagattccaggcctgggaggtgttatgtctcttcagctgggaaaactagctcttcagagaagcctcgggtaacactgaaaaacaaaacaaaacaaaacaaaaacaggaaaaaaacaaaaaaccaaagtggtaaggattcagttcctgcctataatggtctcagagagggtcctacttttaggttttcccaggacaggacagtccccatttatacttattatcccagtttaattattcacagcaccccattttactcagaagtgttctggtctggaggataaataagaggtcaccctcctccagacccaaagatagatttgtgcctgtgttggatggggtcgtgtgtgattcagatggacattggatggcttcaaaggaatataccactagagctggcccttggcactttgtgacagtggtcaagtctgtctaatgtccttgtcttctttttcttgtgctttccccctattccagggtgtgcaccctctccccaacccccaagaaccccactactgctttccctgtgaggtaggagatatcagtgggccttggatttgaggcttcctaagatgtgcttgcattttaaaaagggagcttggtgagagctttgctaattcacaggtaaaaattattaacaatagaacttcaagcatcttgaggagcgggcatttgagggggcatggagtaatttgtatttaaaaaaccttaaagttgtgctgttcctaaactagcaaattgctcatgctgaaatttctggcataagcaggggaagtcttgtgtctggagaatagtctcataccttgcagtctgggacaccctccctactttgagaatccacctacaggaagccaaggaactttataaatcctgatgttggacttctgatacgactgggctacttccaagcaggtgctgcaggagattggcatcccccagcccctgcagttagaaaccccgaagtcttcccagccagtgagccactttgtgtatttactgtatatttattgtgccctaaatgtgcaactctcctaaagacaaaacttctctttctgatgttaagcacatgttacttcaacaagatgcttggagaacaacaaggtacccagaatttttagaagccttcagaagaggctaaaatatccagctttgggggacctggaagaaatgtctccaaaggaagcaaggcatgttttagttgagtgctctggtctcactatgaagtggggatgactgtggcttcataactctacctggctgtgggttggaagctgatggaatgagaaatgtcctttctccttctctgaggaaattttgagacttgtttcggtgtgtctgtgtgatggggatgaggctggggttgggatctgatgtatgccattcacagaagctctcaatttcagatgataggtgaattccctgcccctcccccaccactgagaagctagactttcatgcgggagaggctacttttatgtgtcgtcttccggggaagggtccctccactgaaagctagccagtcatgttttctgtttttggatttttgcaattggtttcacctcatgtctccctccctacaaagcactgcctctactgggcgtgctgccaaggccatgtgcactccatcctcatgtatcctttttcacggggaccagaacactggtacgtcatcaccaaagccaatctgctctagctgcccacagatgccaccaaaacctgctatctcttcatcaccaggtacgattctctttccacagtggacacagcaggctattttctagtttgtgctggtcacgtggtagatgaagcctcttactgccccacttagggtggccacggctgcttgtgaatgcagctttgccagtggcatatctgtcatctgattgcggtggtgaaatggaattgaggcccaaggttagaagcagccgagacgccacttggatactgatttgaacaatgtagaagtcagattctgaattccaaagttatttctcataagtacccaatggcatctctccatctacaaagttgcagtattatgcaaataaaactgacctcattttctgctatgcaataagaatacttaattctagttcccgacaagccagttgcaatatcccctaagatgctttttgagctgtcttactttgatatctgttgtgtaatgtttgtatatttctgagccagatcctttcaaagattgcctttttataaaattgaagctatagcttttaggctaaaattttaacgtagatatttttataagatatttttttcaagagtttgaatcgctttttattgtccatgataatgaaatgttgtgttctttgcatcattcactctcaaacgtagttcatgcctgtagctctcttccttttgtttctcacccttcagaaacatatttttcagtagctccaggtagatgagccttttttttttttttaaaaataccatattcaagggagtctgctgaattttaaaacgcagtcactggtgtttcttgaattgctagggactgatgttatgttcgactcagcacttgcccgtctgtattgattgtgtctttttttttttttttggagtctgctttctgtgggggtgaggccgggctgtctcgtggtggctcccactgacgggcactgagcctggtaccctgtggcatggagaagcctcagggaaaggcctgcccccccagcacatactcccatagtgtcctaggtccagccgaccattccttattctcttctatctccttgttgatctgaagcttccaatagcttgaggcctttgctgctggatgatgccctttttgggagcatcttgtctctaacctttaaaagaggggtcaatcctcatgatccctgtgtgttaagcatatgctttgcaggtgctcacactacacttacaacttgcttcttgagctatgtctctactccaggctctgttttgtgtatttatctgccatttgcatcatggtttttaaaatttattattattattattattgttgggacaggtgccatttaaattgcctccatgctccccatttgcacctagctggatcaagttgggaggctgagcaaactcatattccagttagttggagtttttaaaggctctgtttgcctggagaagcaaggaggttagaatgtaatttttttaagcgtttgcactatttagagtcctaagcccctcatgttcagctgtgctgtgtttctactgaccaagcaggagagccagcagcacttccagcatttgggaatggaagagatttcttctgtagtggataattacagcctcatagcccctgtgcagccttcgtcatgggactcagtgactcatggatatagcatcagccatggcaggaatgcacaggactgtggcatttgcagcatcaaatcaccctagtgccatgtttggttatgagattgtaaattattcgctcccccatcctcccctcccctcattttcagtggcaatagaggacccttgttgtacttcttgtttaatttgcatattatgtgtaaaatgctttcgttgaaagaaaactgaagacactgaatgtgtatgtctgtgtgggtgctctgtccctgtggttgtcatagccagtcagacttgatcactgacaccccgtacaacatattgcataggtaagatcctcgatctggtgttctctgcgtggctgttagggactgtatatcttgtaaaagaacacttgtcacatgcttgatcagttacagcaatagctgaagaaacatttcctcaaatgtattattttaacaggaatcatgttctaatttcccatcctttaattttaataaaagctgaactgtgtgaa

SEQ ID NO: 91944 - DNA, 1668 bp, Artificial Sequence
  derived and/or modified sequence
atgggcaaggccttcaaggtgatgaatgagctgcggagcaagcagctgctgtgtgatgtgatgattgtggctgaagatgtggagattgaggcccaccgggtggtgctggccgcctgcagcccctacttctgtgccatgttcaccggggacatgtctgagagcaaggccaagaagattgagatcaaggatgtggatggccagaccctgagcaagctgattgactacatctacacagctgagattgaggtgacagaggagaatgtgcaggtgctgctgcctgctgccagcctgctgcagctgatggatgtgcggcagaactgctgtgacttcctgcagagccagctgcaccccaccaactgcctgggcatccgggcctttgctgatgtgcacacctgcacagacctgctgcagcaggccaatgcctatgcagagcagcacttccctgaggtgatgctgggggaggagttcctgagcctgagcctggaccaggtgtgcagcctcatcagcagtgacaagctgactgtgtcctctgaggagaaggtgtttgaggccgtcatctcctggatcaactatgagaaggagacccggctggagcacatggccaagctgatggagcacgtgcggctgcccctgctgccccgggactacctggtgcagacagtggaggaggaggccctgatcaagaacaacaacacctgcaaggacttcctgattgaggccatgaagtaccacctgctgcccctggaccagaggctgctgatcaagaaccccaggaccaagcccaggacccctgtgtccctgcccaaggtgatgattgtggtgggcggccaggcccccaaggccatccgctctgtggagtgctatgactttgaggaggaccgctgggaccagattgctgagctgcccagccgccgctgccgggccggcgtggtgttcatggccggccacgtgtatgctgtgggcggcttcaacggcagcctgcgggtgaggacagtggatgtgtatgatggagtgaaggaccagtggaccagcatcgcctccatgcaggagaggaggagcaccctgggcgctgctgtgctgaatgacctgctgtatgctgtgggcggctttgatggcagcacaggcctggcctctgtggaggcctacagctacaagaccaatgagtggttctttgtggcccccatgaacacccggcgcagctctgtgggcgtgggcgtggtggagggcaagctgtatgctgtgggcggctatgatggagccagccggcagtgcctgagcacagtggagcagtacaacccagccaccaatgagtggatctacgtggccgacatgagcaccaggagaagtggagctggggtgggcgtgctgagcggccagctgtatgccactggaggccatgatggccccctggtgaggaagtctgtggaggtgtatgaccccggcaccaacacctggaagcaggtggccgacatgaacatgtgcagaagaaatgctggggtgtgtgctgtgaatggcctgctgtatgtggtgggcggagatgatggcagctgcaacctggcctctgtggagtactacaaccctgtgacagacaagtggaccctgctgcccaccaacatgagcacaggccgctcctatgctggggtggccgtcatccacaagagcctgtag

SEQ ID NO: 91945 - DNA, 1668 bp, Artificial Sequence
  derived and/or modified sequence
atgggcaaggccttcaaggtgatgaacgagctgcggagcaagcagctgctgtgtgatgtaatgatcgtggcagaagatgtagagatagaggcccacagagtcgtgctggcagcttgctctccctatttctgcgctatgtttactggggacatgagcgagtccaaagctaagaagatagagattaaagacgtagatggtcaaacgttgagtaagctgatcgactacatttacaccgccgaaatcgaagtgacggaggagaatgtacaggtgctattgcctgctgcctcacttctgcagcttatggacgtccggcagaactgctgtgacttcctacaatcccagcttcatcctacaaattgcctcggcattagagcttttgccgacgtgcacacctgtactgacctactgcagcaggcaaatgcgtatgccgaacagcatttccccgaggtcatgttgggggaagagtttttgagtctgtctttggaccaggtgtgttccctgattagctctgataaactgactgtcagcagtgaggagaaagtcttcgaggcagtgattagttggatcaactacgagaaagagactcggctcgaacatatggccaagctgatggaacacgtgcggttaccactcctgccacgcgattaccttgtgcagaccgtcgaggaagaggctttgattaagaataacaacacctgtaaagacttcctcatcgaagccatgaaataccacctcctgcctcttgatcaacgccttcttatcaagaatccccgtaccaagcctcgaacccccgtctccctcccaaaagtgatgatagtggtcggagggcaagcaccaaaggccattcgcagcgtagaatgctacgactttgaagaggaccgttgggaccagatcgccgaattaccgagtcggcgctgtagagctggtgtcgtcttcatggcgggacacgtatacgccgtgggaggcttcaatggatccctcagagtgagaacagtggatgtgtacgacggggtgaaagatcagtggacttctatcgcctctatgcaagagcgccgctctacccttggggcagctgtcctgaacgacctgctgtatgccgtcggtggctttgatggcagtacaggactggcgtctgtcgaggcatactcctataagaccaacgagtggttttttgtagcgcccatgaacacaagacgcagttctgtgggggtgggtgttgtggagggaaagctatacgcagttggcggctacgatggcgccagtagacaatgtctgtccaccgtagaacagtataacccggccacaaacgaatggatttacgtggcagatatgagtacaagaagaagtggcgcgggagtaggagtcctcagcggtcaactctatgctaccggagggcacgacggcccccttgtccgtaagtcagtcgaggtctacgaccctggcaccaatacctggaagcaggtcgcagacatgaacatgtgcagaagaaatgcaggtgtgtgcgcggtgaacgggctcctttacgtggtggggggcgatgatggaagctgcaatcttgcatccgttgaatactataaccctgtcacggataagtggacattactgcccactaacatgtctactggacggtcatacgctggggttgcagtcatccacaagagcctgtag

SEQ ID NO: 91946 - DNA, 1668 bp, Artificial Sequence
  derived and/or modified sequence
atggggaaggcattcaaggtcatgaatgaactgagatccaagcagctactatgcgatgttatgattgttgccgaggatgtggaaatcgaagcacacagagtggtccttgctgcatgttccccgtacttttgcgctatgttcaccggggacatgagcgagtccaaggccaaaaaaatcgaaatcaaagacgtggacggccagactctgagcaaactaatcgactatatctatacagctgagatagaggtgacggaggagaatgtccaggtcctcctgcccgctgcgagcctcctacaattgatggacgtccggcagaattgctgtgattttctgcagtcccagcttcaccctacaaattgcctggggatccgagctttcgcggatgtgcatacctgtacggacctgttgcagcaggcaaatgcctacgccgaacagcacttcccggaggttatgcttggagaggagttcttgagcctgtccttggaccaggtctgtagcctgattagttctgataagctgaccgtaagctcagaggagaaggtgttcgaagcagtgatcagttggatcaactatgagaaggagaccaggttggagcatatggccaaactgatggagcatgttagattgcctttgttgccgagagattacctggtccaaactgtcgaggaggaggccctgatcaaaaacaacaatacttgtaaagacttcctgatcgaagccatgaaatatcatttactgcctttggaccagagactgctcatcaagaaccccagaacaaaacccagaactccagtcagtctgcctaaggtcatgattgtcgtcgggggacaggccccaaaggccatacgcagtgtcgaatgttacgattttgaggaagataggtgggatcaaattgcagagcttccgagtcgacgctgtcgcgctggtgtggtctttatggctggccacgtgtacgccgtgggcggatttaatgggtccctacgtgtgagaacagtggatgtgtatgacggagtgaaagaccagtggaccagtatagcttccatgcaggagaggcgatccactctgggcgcagccgtcctgaatgacctgttatacgcggtgggaggctttgacgggagtactgggcttgcatcggttgaggcctattcctataagacgaacgaatggtttttcgtcgcacctatgaatacgcggcgatccagtgttggagtcggcgtcgtagagggcaaactatatgcagtgggcggttatgacggcgctagtcgtcaatgtctcagtaccgtcgaacagtataaccctgctaccaatgaatggatttatgtcgcggacatgagtacaagaaggagtggcgctggtgttggagttttgagtgggcagctgtatgctacagggggacatgatggtcccctggttcggaagtctgtagaggtgtacgaccctggaactaatacctggaaacaggtggccgatatgaatatgtgcaggcggaatgccggtgtgtgcgcagtgaatggcctgctgtatgtggtcggaggcgacgacgggagctgtaatctggcaagcgttgaatactataaccccgtgaccgacaaatggactctgctccctaccaacatgtcgacgggccgtagctacgcaggcgtggccgtcatccataaatctttgtag

SEQ ID NO: 91947 - DNA, 1668 bp, Artificial Sequence
  derived and/or modified sequence
atgggcaaggccttcaaggtgatgaacgagctgagaagcaagcagctgctgtgcgacgtgatgatcgtggccgaggacgtggagatcgaggcccacagagtggtgctggccgcctgcagcccctacttctgcgccatgttcaccggcgacatgagcgagagcaaggccaagaagatcgagatcaaggacgtggacggccagaccctgagcaagctgatcgactacatctacaccgccgagatcgaggtgaccgaggagaacgtgcaggtgctgctgcccgccgccagcctgctgcagctgatggacgtgagacagaactgctgcgacttcctgcagagccagctgcaccccaccaactgcctgggcatcagagccttcgccgacgtgcacacctgcaccgacctgctgcagcaggccaacgcctacgccgagcagcacttccccgaggtgatgctgggcgaggagttcctgagcctgagcctggaccaggtgtgcagcctgatcagcagcgacaagctgaccgtgagcagcgaggagaaggtgttcgaggccgtgatcagctggatcaactacgagaaggagaccagactggagcacatggccaagctgatggagcacgtgagactgcccctgctgcccagagactacctggtgcagaccgtggaggaggaggccctgatcaagaacaacaacacctgcaaggacttcctgatcgaggccatgaagtaccacctgctgcccctggaccagagactgctgatcaagaaccccagaaccaagcccagaacccccgtgagcctgcccaaggtgatgatcgtggtgggcggccaggcccccaaggccatcagaagcgtggagtgctacgacttcgaggaggacagatgggaccagatcgccgagctgcccagcagaagatgcagagccggcgtggtgttcatggccggccacgtgtacgccgtgggcggcttcaacggcagcctgagagtgagaaccgtggacgtgtacgacggcgtgaaggaccagtggaccagcatcgccagcatgcaggagagaagaagcaccctgggcgccgccgtgctgaacgacctgctgtacgccgtgggcggcttcgacggcagcaccggcctggccagcgtggaggcctacagctacaagaccaacgagtggttcttcgtggcccccatgaacaccagaagaagcagcgtgggcgtgggcgtggtggagggcaagctgtacgccgtgggcggctacgacggcgccagcagacagtgcctgagcaccgtggagcagtacaaccccgccaccaacgagtggatctacgtggccgacatgagcaccagaagaagcggcgccggcgtgggcgtgctgagcggccagctgtacgccaccggcggccacgacggccccctggtgagaaagagcgtggaggtgtacgaccccggcaccaacacctggaagcaggtggccgacatgaacatgtgcagaagaaacgccggcgtgtgcgccgtgaacggcctgctgtacgtggtgggcggcgacgacggcagctgcaacctggccagcgtggagtactacaaccccgtgaccgacaagtggaccctgctgcccaccaacatgagcaccggcagaagctacgccggcgtggccgtgatccacaagagcctgtag

SEQ ID NO: 91948 - DNA, 1518 bp, Artificial Sequence
  derived and/or modified sequence
atgtccgaatctaaagccaagaaaatcgaaattaaagacgtggatgggcagactctgagcaagctcatcgactatatctatactgccgagattgaagttaccgaagaaaatgtgcaggttttgctgccagcagcatctctccttcagttgatggatgtgcgacagaactgttgcgatttcctgcagtcacaactgcaccctaccaattgcctcggaataagggcatttgccgacgtgcatacatgcacagacctcctgcagcaagcgaacgcatacgctgagcagcatttccccgaggttatgctcggagaagagttcctgtcccttagcctcgaccaggtgtgctctctgattagcagtgataaattaaccgtgtcttcagaggagaaagtctttgaggcggttatctcatggataaattacgagaaagaaaccagactggagcatatggccaagctgatggagcacgtgaggcttcctctgttgccccgcgactaccttgttcagaccgtcgaggaagaggctctcattaagaacaacaatacttgtaaagacttcctgatcgaagcaatgaaataccacctgctgcctcttgatcagcgactcctcatcaagaatccaagaactaagcctagaacaccagtatccttgccgaaagttatgatcgtggtgggtggacaggccccaaaagctattcgttcagttgagtgttatgatttcgaggaagaccggtgggatcagatagccgaattaccctcccgccgatgccgcgccggggtggtgtttatggctggtcacgtgtatgcagtgggtggatttaatgggagcctgagggttcgcaccgtggatgtctatgacggcgtcaaggaccaatggaccagcattgcatccatgcaggagcgtcggagtaccctgggggccgccgtattaaacgatcttttatacgctgtgggtggcttcgacgggagcaccgggcttgcatctgtcgaagcttactcatataagaccaacgaatggttcttcgtggcgcctatgaacactcgtcggagtagcgtcggtgttggagtcgtggagggcaaactctacgctgtgggcgggtatgacggcgccagcaggcaatgcctcagcactgtagagcaatacaaccctgcaacaaacgagtggatctacgtagctgacatgtcaactcggcgttctggcgctggagtgggggtactgagcggccagctgtatgcaactggaggtcatgacgggccgctggtgagaaagtccgtcgaagtctacgatccgggcacaaacacctggaaacaagttgctgacatgaacatgtgccgaagaaatgccggggtttgtgcagtcaatggcctcttatacgtcgttgggggtgatgatggttcatgtaacctggcctctgtggagtattacaatcccgtgacagacaagtggactctgctacccactaacatgtcgaccggcaggtcatatgccggggtagccgttattcacaagtcactgtag

SEQ ID NO: 91949 - DNA, 603 bp, Artificial Sequence
  derived and/or modified sequence
atgtcccggtgctgtagtagacagccggcttgttgttctagttggatgttcggacgcactgctgtcacctcctgcagtctgagttgtataccacctattgcgtgggcctcggttcatctacaaatgtacacccctgcactcacattttgctcacggccaatgccaactcagcatttccctgaagtcatgctcggagaggagttcctgtccctgagtctagaccaggtatgtagtttgatcagtagcgataagttgacggtgagtagcgaagagaaagtttttgaagcagtcatttcctggattaattatgagaaagaaacaagacttgagcatatggccaagctcatggagcacgtgcgtctacctttgctccccagggactatttagtacagactgtggaggaagaagctctgatcaaaaataacaatacctgtaaggacttcctcatcgaagctatgaaataccacctcttgcccttagatcagcgcctcctaatcaaaaacccaaggacaaagcccagaaccccagtgagcctgccaaaagggcttgagtgtctggctgacagctgtactccgcaggtgggaatgatgggattatggtag

SEQ ID NO: 91950 - DNA, 1518 bp, Artificial Sequence
  derived and/or modified sequence
atgtctgagagcaaggccaagaagattgagatcaaggatgtggatggccagaccctgagcaagctgattgactacatctacacagctgagattgaggtgacagaggagaatgtgcaggtgctgctgcctgctgccagcctgctgcagctgatggatgtgcggcagaactgctgtgacttcctgcagagccagctgcaccccaccaactgcctgggcatccgggcctttgctgatgtgcacacctgcacagacctgctgcagcaggccaatgcctatgcagagcagcacttccctgaggtgatgctgggggaggagttcctgagcctgagcctggaccaggtgtgcagcctcatcagcagtgacaagctgactgtgtcctctgaggagaaggtgtttgaggccgtcatctcctggatcaactatgagaaggagacccggctggagcacatggccaagctgatggagcacgtgcggctgcccctgctgccccgggactacctggtgcagacagtggaggaggaggccctgatcaagaacaacaacacctgcaaggacttcctgattgaggccatgaagtaccacctgctgcccctggaccagaggctgctgatcaagaaccccaggaccaagcccaggacccctgtgtccctgcccaaggtgatgattgtggtgggcggccaggcccccaaggccatccgctctgtggagtgctatgactttgaggaggaccgctgggaccagattgctgagctgcccagccgccgctgccgggccggcgtggtgttcatggccggccacgtgtatgctgtgggcggcttcaacggcagcctgcgggtgaggacagtggatgtgtatgatggagtgaaggaccagtggaccagcatcgcctccatgcaggagaggaggagcaccctgggcgctgctgtgctgaatgacctgctgtatgctgtgggcggctttgatggcagcacaggcctggcctctgtggaggcctacagctacaagaccaatgagtggttctttgtggcccccatgaacacccggcgcagctctgtgggcgtgggcgtggtggagggcaagctgtatgctgtgggcggctatgatggagccagccggcagtgcctgagcacagtggagcagtacaacccagccaccaatgagtggatctacgtggccgacatgagcaccaggagaagtggagctggggtgggcgtgctgagcggccagctgtatgccactggaggccatgatggccccctggtgaggaagtctgtggaggtgtatgaccccggcaccaacacctggaagcaggtggccgacatgaacatgtgcagaagaaatgctggggtgtgtgctgtgaatggcctgctgtatgtggtgggcggagatgatggcagctgcaacctggcctctgtggagtactacaaccctgtgacagacaagtggaccctgctgcccaccaacatgagcacaggccgctcctatgctggggtggccgtcatccacaagagcctgtag

SEQ ID NO: 91951 - DNA, 603 bp, Artificial Sequence
  derived and/or modified sequence
atgagccgctgctgcagccggcagcctgcctgctgcagctcctggatgtttggaagaacagctgtgaccagctgcagcctgagctgcatcccccccatcgcctgggcctctgtgcacctgcagatgtacaccccagccctgaccttctgcagccggcccatgcccacccagcacttccctgaggtgatgctgggggaggagttcctgagcctgagcctggaccaggtgtgcagcctcatcagcagtgacaagctgactgtgtcctctgaggagaaggtgtttgaggccgtcatctcctggatcaactatgagaaggagacccggctggagcacatggccaagctgatggagcacgtgcggctgcccctgctgccccgggactacctggtgcagacagtggaggaggaggccctgatcaagaacaacaacacctgcaaggacttcctgattgaggccatgaagtaccacctgctgcccctggaccagaggctgctgatcaagaaccccaggaccaagcccaggacccctgtgtccctgcccaagggcctggagtgcctggccgacagctgcaccccccaggtgggcatgatgggcctgtggtag

SEQ ID NO: 91952 - DNA, 1518 bp, Artificial Sequence
  derived and/or modified sequence
atgagcgagagcaaggccaagaagatcgagatcaaggacgtggacgggcagacactcagcaagttgattgactacatctacaccgccgagattgaagtgaccgaggaaaatgtgcaggtgttgctgcctgcagccagtcttctacagctgatggatgtcagacagaattgctgcgatttcctgcagtcccaactgcaccctacaaactgtctcggaattcgagccttcgctgatgtgcacacatgcacagatctgctacagcaggccaatgcttacgctgaacaacacttccctgaagtaatgctgggcgaggaatttcttagcctgagtttggaccaggtgtgcagtttgatttcaagtgacaagctgaccgtttcctccgaggaaaaggttttcgaagcggtgatctcctggataaattacgaaaaggaaactcgcctggaacacatggccaaattgatggaacatgtgcggttgccactgctcccccgtgattacctggttcagacggtcgaggaggaagccctgattaaaaataacaacacttgcaaagatttcctcatagaggccatgaagtatcacctgctgcccctggaccaaaggctactgatcaagaatcctcgcaccaagccaagaacaccggtatcacttcccaaggtgatgatcgtggttggcggacaggctccgaaggcgattcgaagtgttgagtgctacgattttgaagaagatcggtgggatcaaattgccgaacttcccagtagaaggtgtagggcaggcgttgtgttcatggctggccatgtgtacgccgtgggtggttttaatggaagtttacgcgtgcggacagtcgacgtctacgacggcgtgaaggatcagtggacttccatcgccagtatgcaggaacggagaagtaccctcggagcagccgtgctgaatgatctcctgtatgccgtaggcggcttcgacgggtctaccggtctcgcgagtgtcgaagcctatagctataagaccaacgaatggttttttgtggctccaatgaatacccgccgtagctccgtgggggtaggagttgtcgaaggaaaactatacgcggtgggcggctatgatggtgccagccgtcaatgtctgtccactgtggaacagtacaacccagccaccaatgagtggatttacgtagctgatatgtctacacggcggtcaggggctggagtcggagtgctatctggtcagctttacgccacaggcggccacgacggccccctggttcgcaagagcgtcgaagtctacgatcctggaacaaacacttggaagcaggtggccgatatgaatatgtgcaggcgcaatgctggcgtttgtgcagtaaacggattgctgtacgtggttggtggggatgacgggtcatgcaacctggcctccgtagagtactataatccagttacagataagtggacgttgctgccaactaatatgtctaccgggcgctcctacgccggtgtggcagtgatccacaaatccctgtag

SEQ ID NO: 91953 - DNA, 603 bp, Artificial Sequence
  derived and/or modified sequence
atgagccggtgctgcagccggcagcccgcctgctgcagcagctggatgttcggcaggaccgctgtgacttcctgttccctcagctgcatcccacccattgcgtgggcgagcgtccatttacagatgtataccccagccctaacattttgcagccgcccaatgcccacacagcactttcccgaggtcatgttgggcgaagaatttctgtctttgtctctggaccaggtatgtagccttattagcagtgacaaactgactgtgtccagcgaggaaaaggtgtttgaagcagtgatctcctggattaactatgaaaaggagacgcgactggagcacatggccaagctgatggaacatgtgaggctacccttgctgcccagagattacttggtgcagacagttgaagaagaggccttgatcaaaaacaataatacatgcaaagattttctgattgaagcaatgaagtaccatctactcccactggatcaacgactgttgattaagaatccccggactaagcccaggacaccagtgtcactgcccaaaggactcgagtgtctggcggattcttgtaccccacaagtggggatgatgggcctctggtag

SEQ ID NO: 91954 - DNA, 1518 bp, Artificial Sequence
  derived and/or modified sequence
atgtccgagtctaaggcaaaaaaaatcgagattaaagatgtggacggccagacattgagcaagctgatagactacatttataccgccgagatcgaggtgaccgaggagaatgtacaggtcctcttgccagccgcaagtctactacaactgatggacgtacggcaaaactgctgcgattttctccagtcacaacttcatccaaccaactgcctgggcatccgagcctttgccgatgtacatacatgcactgaccttctgcagcaggctaacgcttatgccgaacagcattttcccgaagtcatgttgggagaggaattcctgagcctgtccctcgaccaggtatgttcgctgatctccagtgacaaacttactgtatcttcagaggagaaggtattcgaagctgtaatatcctggatcaactatgagaaggagaccagactcgaacacatggccaagttgatggaacatgtacgactgcccttactcccaagggactatctggtacagactgttgaagaagaggctttaatcaagaacaacaacacttgcaaagactttctgatcgaggctatgaaatatcacctcttgcccctggatcaacgcctgctcatcaagaacccccgaactaaaccaagaactccagtcagtctgcctaaagtgatgattgtggtcggaggccaggctcctaaggctattcggtcggtggaatgttacgatttcgaagaggatagatgggaccagattgcagaactgcccagtaggaggtgtcgggctggtgtggtgtttatggccggtcacgtgtacgcagtgggtggattcaacggatccctgagagtgcgtacagtggacgtgtatgacggggtgaaagatcagtggacgagcattgctagcatgcaggaacgcagatccacactcggagctgcagtgctcaacgacctgctttacgccgtggggggtttcgatggaagcaccggcttagcaagtgtcgaggcttatagctataagaccaacgaatggttttttgtcgcaccaatgaacacgcgcaggagttctgtcggcgtgggcgtggtggagggtaaactctatgcagtggggggatacgacggcgcatcaaggcagtgtttaagtacagtcgagcagtacaaccctgctaccaatgagtggatctatgtggccgatatgtcaacaagacggtctggggctggagttggggttttgtccggccagctttatgcaacaggaggtcacgacgggccactggtgaggaagtccgtggaagtctatgatccaggaactaacacctggaagcaggtggctgacatgaatatgtgtagacgtaacgctggggtgtgcgctgttaacggcttgctttacgtggtcggcggagacgacggctcctgcaacctcgcatctgtggagtattataacccagtaacggataagtggactcttctccccactaatatgagtacagggaggtcctacgccggagtcgcagtaattcacaaatctctgtag

SEQ ID NO: 91955 - DNA, 603 bp, Artificial Sequence
  derived and/or modified sequence
atgtcaaggtgttgcagtcgccaacctgcctgttgtagctcttggatgttcggcagaactgcggttactagctgttctctgtcctgcatccctccaattgcatgggccagtgtgcacttgcagatgtacactccagccctgaccttctgcagccgtccaatgccaacacagcattttcccgaggtgatgttgggggaagagtttctgtcactttctctcgatcaggtgtgttctctcatcagctccgacaaactgaccgtcagctccgaagagaaagtttttgaggccgtgatatcctggatcaactatgaaaaagaaacccggctcgaacacatggccaaactgatggaacatgtgagactgccattgcttccaagagactacctcgtccagactgtcgaggaggaggccctgattaaaaataataatacttgtaaggattttctaattgaggcaatgaagtatcacctgctgcctctggatcagcggcttcttatcaagaacccccgaacgaagcccagaacccctgtcagcctcccgaagggcttggagtgtctggcggacagttgcactccacaggtgggaatgatggggctttggtag

SEQ ID NO: 91956 - DNA, 1518 bp, Artificial Sequence
  derived and/or modified sequence
atgagcgagagcaaggccaagaagatcgagatcaaggacgtggacggccagaccctgagcaagctgatcgactacatctacaccgccgagatcgaggtgaccgaggagaacgtgcaggtgctgctgcccgccgccagcctgctgcagctgatggacgtgagacagaactgctgcgacttcctgcagagccagctgcaccccaccaactgcctgggcatcagagccttcgccgacgtgcacacctgcaccgacctgctgcagcaggccaacgcctacgccgagcagcacttccccgaggtgatgctgggcgaggagttcctgagcctgagcctggaccaggtgtgcagcctgatcagcagcgacaagctgaccgtgagcagcgaggagaaggtgttcgaggccgtgatcagctggatcaactacgagaaggagaccagactggagcacatggccaagctgatggagcacgtgagactgcccctgctgcccagagactacctggtgcagaccgtggaggaggaggccctgatcaagaacaacaacacctgcaaggacttcctgatcgaggccatgaagtaccacctgctgcccctggaccagagactgctgatcaagaaccccagaaccaagcccagaacccccgtgagcctgcccaaggtgatgatcgtggtgggcggccaggcccccaaggccatcagaagcgtggagtgctacgacttcgaggaggacagatgggaccagatcgccgagctgcccagcagaagatgcagagccggcgtggtgttcatggccggccacgtgtacgccgtgggcggcttcaacggcagcctgagagtgagaaccgtggacgtgtacgacggcgtgaaggaccagtggaccagcatcgccagcatgcaggagagaagaagcaccctgggcgccgccgtgctgaacgacctgctgtacgccgtgggcggcttcgacggcagcaccggcctggccagcgtggaggcctacagctacaagaccaacgagtggttcttcgtggcccccatgaacaccagaagaagcagcgtgggcgtgggcgtggtggagggcaagctgtacgccgtgggcggctacgacggcgccagcagacagtgcctgagcaccgtggagcagtacaaccccgccaccaacgagtggatctacgtggccgacatgagcaccagaagaagcggcgccggcgtgggcgtgctgagcggccagctgtacgccaccggcggccacgacggccccctggtgagaaagagcgtggaggtgtacgaccccggcaccaacacctggaagcaggtggccgacatgaacatgtgcagaagaaacgccggcgtgtgcgccgtgaacggcctgctgtacgtggtgggcggcgacgacggcagctgcaacctggccagcgtggagtactacaaccccgtgaccgacaagtggaccctgctgcccaccaacatgagcaccggcagaagctacgccggcgtggccgtgatccacaagagcctgtag

SEQ ID NO: 91957 - DNA, 603 bp, Artificial Sequence
  derived and/or modified sequence
atgagcagatgctgcagcagacagcccgcctgctgcagcagctggatgttcggcagaaccgccgtgaccagctgcagcctgagctgcatcccccccatcgcctgggccagcgtgcacctgcagatgtacacccccgccctgaccttctgcagcagacccatgcccacccagcacttccccgaggtgatgctgggcgaggagttcctgagcctgagcctggaccaggtgtgcagcctgatcagcagcgacaagctgaccgtgagcagcgaggagaaggtgttcgaggccgtgatcagctggatcaactacgagaaggagaccagactggagcacatggccaagctgatggagcacgtgagactgcccctgctgcccagagactacctggtgcagaccgtggaggaggaggccctgatcaagaacaacaacacctgcaaggacttcctgatcgaggccatgaagtaccacctgctgcccctggaccagagactgctgatcaagaaccccagaaccaagcccagaacccccgtgagcctgcccaagggcctggagtgcctggccgacagctgcaccccccaggtgggcatgatgggcctgtggtag

SEQ ID NO: 91958 - protein, 702 aa, Artificial Sequence
  derived and/or modified sequence
MSNLSKGTGSRKDTKMRIRAFPVREDVLNSLNNNFLQTLNQAWNDHQTAMVMIRDILMYMDRVYVQQNNVENVYNLGLIIFRDQVVRYGCIRDHLRQTLLDMIARERKGEVVDRGAIRNACQMLMILGLEGRSVYEEDFEAPFLEMSAEFFQMESQKFLAENSASVYIKKVEARINEEIERVMHCLDKSTEEPIVKVVERELISKHMKTIVEMENSGLVHMLKNGKTEDLGCMYKLFSRVPNGLKTMCECMSSYLREQGKALVSEEGEGKNPVDYIQGLLDLKSRFDRFLLESFNNDRLFKQTIAGDFEYFLNLNSRSPEYLSLFIDDKLKKGVKGLTEQEVETILDKAMVLFRFMQEKDVFERYYKQHLARRLLTNKSVSDDSEKNMISKLKTECGCQFTSKLEGMFRDMSISNTTMDEFRQHLQATGVSLGGVDLTVRVLTTGYWPTQSATPKCNIPPAPRHAFEIFRRFYLAKHSGRQLTLQHHMGSADLNATFYGPVKKEDGSEVGVGGAQVTGSNTRKHILQVSTFQMTILMLFNNREKYTFEEIQQETDIPERELVRALQSLACGKPTQRVLTKEPKSKEIENGHIFTVNDQFTSKLHRVKIQTVAAKQGESDPERKETRQKVDDDRKHEIEAAIVRIMKSRKKMQHNVLVAEVTQQLKARFLPSPVVIKKRIEGLIEREYLARTPEDRKVYTYVA

SEQ ID NO: 91959 - DNA, 2109 bp, Artificial Sequence
  derived and/or modified sequence
atgagcaacctgagcaagggcaccggcagcagaaaggacaccaagatgagaatcagagccttccccgtgagagaggacgtgctgaacagcctgaacaacaacttcctgcagaccctgaaccaggcctggaacgaccaccagaccgccatggtgatgatcagagacatcctgatgtacatggacagagtgtacgtgcagcagaacaacgtggagaacgtgtacaacctgggcctgatcatcttcagagaccaggtggtgagatacggctgcatcagagaccacctgagacagaccctgctggacatgatcgccagagagagaaagggcgaggtggtggacagaggcgccatcagaaacgcctgccagatgctgatgatcctgggcctggagggcagaagcgtgtacgaggaggacttcgaggcccccttcctggagatgagcgccgagttcttccagatggagagccagaagttcctggccgagaacagcgccagcgtgtacatcaagaaggtggaggccagaatcaacgaggagatcgagagagtgatgcactgcctggacaagagcaccgaggagcccatcgtgaaggtggtggagagagagctgatcagcaagcacatgaagaccatcgtggagatggagaacagcggcctggtgcacatgctgaagaacggcaagaccgaggacctgggctgcatgtacaagctgttcagcagagtgcccaacggcctgaagaccatgtgcgagtgcatgagcagctacctgagagagcagggcaaggccctggtgagcgaggagggcgagggcaagaaccccgtggactacatccagggcctgctggacctgaagagcagattcgacagattcctgctggagagcttcaacaacgacagactgttcaagcagaccatcgccggcgacttcgagtacttcctgaacctgaacagcagaagccccgagtacctgagcctgttcatcgacgacaagctgaagaagggcgtgaagggcctgaccgagcaggaggtggagaccatcctggacaaggccatggtgctgttcagattcatgcaggagaaggacgtgttcgagagatactacaagcagcacctggccagaagactgctgaccaacaagagcgtgagcgacgacagcgagaagaacatgatcagcaagctgaagaccgagtgcggctgccagttcaccagcaagctggagggcatgttcagagacatgagcatcagcaacaccaccatggacgagttcagacagcacctgcaggccaccggcgtgagcctgggcggcgtggacctgaccgtgagagtgctgaccaccggctactggcccacccagagcgccacccccaagtgcaacatcccccccgcccccagacacgccttcgagatcttcagaagattctacctggccaagcacagcggcagacagctgaccctgcagcaccacatgggcagcgccgacctgaacgccaccttctacggccccgtgaagaaggaggacggcagcgaggtgggcgtgggcggcgcccaggtgaccggcagcaacaccagaaagcacatcctgcaggtgagcaccttccagatgaccatcctgatgctgttcaacaacagagagaagtacaccttcgaggagatccagcaggagaccgacatccccgagagagagctggtgagagccctgcagagcctggcctgcggcaagcccacccagagagtgctgaccaaggagcccaagagcaaggagatcgagaacggccacatcttcaccgtgaacgaccagttcaccagcaagctgcacagagtgaagatccagaccgtggccgccaagcagggcgagagcgaccccgagagaaaggagaccagacagaaggtggacgacgacagaaagcacgagatcgaggccgccatcgtgagaatcatgaagagcagaaagaagatgcagcacaacgtgctggtggccgaggtgacccagcagctgaaggccagattcctgcccagccccgtggtgatcaagaagagaatcgagggcctgatcgagagagagtacctggccagaacccccgaggacagaaaggtgtacacctacgtggcctag

SEQ ID NO: 91960 - DNA, 6586 bp, Artificial Sequence
  derived and/or modified sequence
gctcaggcggaggaggagaaggaggaggaggaggacgacgttcggcctgcgcagtgagatgtttgtccgtcgccgccgccgccgccatcgcggaggagcgcgataaagggagccgagccggacgtgagggggaccccgcggagccgccgcgccagcgcagccccccagccgcatcggagtcgccagagtccgagccgccgccgccgccgccgccgcccccgccgccgccgcggctgcccaggggccggccagctccccagccctgcccgggggtcgcgccgccgccgcccccagcgtcgcccctagcctgcctgcccgccttaaatgtgacaccggcgtcgcggagcgcgacctgaagccgccgccggggaggggacgagcaccatgtcgaatctgagcaaaggcacgggcagccggaaggacaccaagatgcggatccgggcctttccggtgcgagaagatgtactaaattcattgaataacaactttcttcaaacgctaaatcaagcttggaatgatcatcaaacagctatggtgatgattagagacatactaatgtacatggaccgtgtgtatgtacaacaaaataatgtggagaacgtctacaatttgggattaattatttttcgagatcaagttgtacgttatgggtgtattagggatcatctacggcaaactctattggatatgattgcaagagagcggaaaggagaagtcgtagacagaggcgcaataagaaatgcttgccagatgttaatgattttaggtctcgaaggaagatcagtctatgaagaagattttgaggctccttttttggaaatgtctgcagaattttttcagatggaaagccagaaatttttagcagaaaatagtgcttcagtatatataaagaaagtagaagctagaattaatgaagaaatagaacgagtgatgcactgccttgacaaatcaacggaagaaccaattgtaaaggtggttgaaagggaactcatttccaagcacatgaagactatagtagaaatggagaattctgggctagtacatatgttgaaaaatggaaagacagaagaccttggttgcatgtacaagttatttagtcgtgtgccaaatggtttgaaaacaatgtgtgagtgtatgagttcctatttgagggagcaaggtaaagctcttgtttctgaagaaggagaaggaaagaatcctgttgactatatccagggcttattggatctgaagagtaggttcgatcgcttcctcctggaatcattcaacaatgaccgtctctttaaacaaactattgcgggtgactttgagtattttctcaacctcaactccaggtctcctgaatacctctcattatttattgatgataagctgaaaaagggagtcaaagggctaacagaacaagaagtagaaacaatattggataaagcaatggtcctttttaggtttatgcaagaaaaagatgtatttgaacgttattataaacaacacttggcaaggagacttctcacaaataaaagtgtttctgatgactctgaaaaaaacatgatatctaagttaaagactgaatgtggatgtcagttcacgtcaaaactggaaggaatgtttagggatatgagcatctcaaacacaacgatggatgaattcaggcaacatctacaggcaactggtgtatctttaggtggtgttgatcttacagtccgggtgctcacgacaggatattggcccactcagtcagccacaccaaagtgcaacatcccaccagcaccaagacatgcttttgagatattcagaaggttctacttagccaaacacagtggtcgacagctcacactccagcatcatatgggttctgcagatctcaatgccacattttatggaccagttaaaaaggaagatggatctgaagttggtgttggaggtgcacaagtaactggctctaatacacggaagcacatattgcaagtttccactttccagatgaccatattaatgctctttaataatagagaaaaatacacatttgaggaaattcagcaagagacagatatccctgaaagagagcttgttagagccctacagtccctcgcctgtggtaaaccaacacagcgggttcttacaaaagaacccaaatcaaaggaaatagaaaatggtcatatatttacagttaatgatcaattcacatccaaactacacagagtcaagattcaaacagttgctgccaaacaaggtgaatccgacccagagaggaaagaaacaaggcagaaagtagacgacgacagaaaacatgagatagaagctgctatagtgcggataatgaaatctagaaagaagatgcagcacaatgttctagtagcggaggtaactcagcagttgaaggcgcgattcttaccaagtccagttgttattaagaaacgtattgaaggacttattgagagagaatatttggcacgaacacctgaggatcgcaaagtatacacatatgtagcataaaatgcgttcagaaatttgatttattcttggactgtactcttcgcatggactgggaagttcttttaaatcattaaatattaagacgaccatctcttctattaaattacagtacatgttctagaccattgagatcaagcctttactccctttgagagtttccaacatcagttgattgagcttcaggctttacaacgtttatccctgtagagatcatctttacagttcctcgggaaaatgtgaatgtgctgcgttttgttttctttactgtatgaaaacaggaaaataaaagagaaatttagaaaatacagctcattacaataaaattgttggatttcatttccccaggtcttcagtgttgatgtaaatgtgttttgtagtgttgcttagcactttgcgcattgtgtaagttgggtaacaaaaatggcaaaagaaatgcagatttcccagttatcttgctctgaagacatttctttagctagtcttatttaattttaaaggtttgataaatatacaaagacccaagcatacaatttgagcatgctgtattctaccacttgcacttactcatcttctagccttatgaccaggaacctttgttttgggctcaagtacacatcctgatttggtttctccctgttgtaatttgagatttcccaaattaagtcttataatgattaggttttgttctgagttatttctagagaaagaaagtattttagtatgtgtaaattgtacaataatttttttgctgttgtactcactgctaatagtggattgtatagggtggtgtttttatttcatttattgtagacaaaaataatgaatttagtatacacatacccactaattcaagtatgtcagagcacaaagttggcagctggttatatttaattcagcccctctgaaaagcacatacagtctatactttgtttataaataccctaggtcctccctgcccctaaatatatattttggtgaagctgtggtgcactattaattttctgtttcaaaatgcaatctaaagatgcaataaatatgatgaccttgatagttttaatgaaatcttcaattcttgcagctgtgttttggaaagtgattaagcaatatttctcaaacctgatgattcttggatatttagctattgtcctccaaagagtcatcgtttcacgttttcaaacatgtgctttgtgctgaagattcttgtcagatatcctgtgcttccagagtatttttatcttcaattttatttaattttgtttcattttgttttcataagacaatgtttcagatatgtaatggggcaaaccactatagatttctgttggatagaaaaatgaaatgttactaataagtttaaattgacccttcgttgactatcagtactgttgatacatttattagaatgtatgtctcagaagatggtttctgtttaaatttatggtcaagttacaacaactgaattctaatatggattaaaaactccacataaatatttttccccatgcgtcttgggttataattttccttttagacttgcaaatatgcttttattgcaattttgtctccatctgtactgtagaattacaagccttgtgctctttatctctacattttccacttctacatgatgcaattaagatgccaatgaaaagtattgtgaacattattctcaggacacttttaccatacttgagtagtactaagtcaggtgtaacatggaaagctaagggtttcaccttctgattttgacataattggaaattttctataatggtaagatgtttataggaaagtaatggtagttcatgtttgagaatttttttattgctttcatttcccagttaaatgatatttaacacctgggaaaacaggacagctcagattgtcgagttagtaaacatgagcgatgtaaaaactttatttgaaatctcctaagtgagacattaaacattttagtgctagtttaagccattaaaagtaaagtttaagtttacgtcattgtctcaagtgtggctgtaaaaatcagatctagagtttagagacatacttgttaactttggagcacaggtttgatatttatgcttctaaatacattaaaacatttctgaattgcagttgaatggttggagattgctggcgatgtgatgctgcactgaaaaaactggtcacacaaaatgtttatatgtttgactgcataagtattattttaggtcataaaggttataacaaaatacatttaacattgctttctttttagcaagaggtcacagatgctattttttctcagtttttaatgctttaatttgaaagaaaaatgcatcctaaccattccatcctgttggtgcagagaaattttggtgatttattagaagacttttaaggagggtggatacatagtttttcaactgcaaaaatcatgtcatctcttcagtaactgttaaagtgtaattctctgccttcattatcaagtccaggacagtgtttattttgaatcgttaacattatttaaagactgaaaattcattgcaattagggaacgcacagcctcacaaaaagtggttgtgattgcaaggattctttatgtcagtgaacttaaaaagggaatgggggaagagatgcatgcctttctaaaggtatgctagagtcacctgtgtagcattgtaattatgtactatcaaacccccaagatgctgatgataggccttctctgtaagaatccttctcatagtgaagcactgttgatgttttgttcaccggatatgttgggtagcagaaaaggcctagaaccagttttaagattatgcctacatctctagaagactagtacactggcatcatcttaggtttctaaatattatttaattccttaatttggaaagcagttttaatgtttacagtttaagatactcattttcagtaactagtgttaaagatttttatctttgcctgtctactgtaacttaagactttcatagaataattttttatagagtatatggtatattgtgtcaatcttggaaggaaagctgttgcatatcaattgtaggtcatgtattttactatatgttgcatagtattttgcattctgtaaatacgaatgttaaaacatttcaggtcagcaaaattagaagtcatttctagtcctcaaagcagaaataattagaaatgttaacatttaagtgcttatcatatgccagatactattctgaatattttatgtatattcattcatttagttgtcatattggctttatgtgacataactgtcattataccagtgttgtccaaggttgctagcaggaaatggcagagccaggagttggacctaggtttaatcctatccatattccatgttacaaattgacatgattttccatattaaaaaattttcatttattttgtacctcattcacatgaatagtaatgtgacaaactaaagttaatacatgaagcattgcaatatggaattttgcacatttttgttagctttacattatttgctgataccaacttttggtaggaaggaaaacagggaaggtgattgctgctattctggaatgtgtccattgaaaagaaaataggcgctttgtctcctacaatcttagagaaagttttacatacttaagtgggtaccacagataggcatgtaccttaaattcaaatctacagttttacaaaatgttttcctttgtgtgcctttcctatgtcaaattagccagaaggaagaagagacgttaagaatggcagataaatttaacaggtaatgatacagagattggccattacgccagctctcaggagaaaaacaactaggatgtcttgaaacccgtgcatttaattttagaaatggcaaatttgtaagcgtgtcatttaagtaatttgatgctcagttttagggtctaagttgacctcgagtgagccatgcaaaaatagctttaaaattatacatgagcagctcaaagtaaacgtgtattttttagtaacaatgaaattgtcaaatttcaagattttaataacaggacagttcaactaataaactttattgcatacaagatttattgcaatgtgggaaaattaaaattctcagtctcag

SEQ ID NO: 91961 - DNA, 2109 bp, Artificial Sequence
  derived and/or modified sequence
atgtcaaacctgtcaaaggggaccgggagccgcaaagatactaagatgcggataagggcgtttccagtccgagaggatgtactgaattcattgaataacaatttccttcaaacacttaaccaggcatggaacgaccatcaaactgcgatggtaatgattagagacattctgatgtacatggatcgtgtgtatgtccaacaaaacaacgtggaaaacgtttataacctcggacttatcatatttcgagaccaggtggttcggtatggctgtatacgtgaccatctccgacagactctcctggacatgattgctcgggagaggaagggagaggtggtggatcgcggcgcaattaggaatgcttgccaaatgttgatgatcctgggccttgagggtaggagcgtctacgaagaagacttcgaggctccatttctcgagatgtcagccgaattcttccagatggagagtcagaagtttcttgccgagaacagtgcttccgtgtacattaaaaaggtggaggctcggataaacgaggagattgagcgcgttatgcattgccttgataagtctactgaggaacccattgtgaaggtcgttgagcgagaactgatctctaaacacatgaagactatcgttgagatggaaaattccgggctggtgcacatgcttaagaatggcaagaccgaagatctcgggtgcatgtacaagctcttcagcagggtgcctaatggactaaagacaatgtgtgagtgcatgtcttcctacctgagagagcaggggaaggccctggtctccgaagagggtgaaggcaaaaatcctgtcgattacattcagggcctactcgatctaaagtcccggttcgaccgcttcttgttggagtctttcaacaatgacagactgtttaaacagaccatagctggggactttgagtacttccttaacctgaactcaagatctccagaatatctcagccttttcatagacgataagttgaagaaaggagtcaagggactgactgaacaagaagtcgaaacaattctggataaggccatggtgctctttagatttatgcaggagaaggacgtctttgaacgctattataaacaacaccttgctagaagactgttgaccaacaaatctgtcagtgatgacagtgaaaagaatatgattagtaagctgaaaacagagtgtgggtgtcagtttacttccaagctggaaggcatgtttcgggacatgagcataagtaatactaccatggatgaatttcggcagcatttgcaggccacaggcgtcagcttaggcggcgtcgatcttactgtgcgtgtgctgaccaccggatactggcctacacaatctgcaacccccaagtgcaatatccctcctgcaccgaggcatgccttcgagatctttagacgcttctatctagccaagcatagcggtaggcaactgactcttcagcatcatatgggttccgctgaccttaatgcaacattttatggaccagtgaaaaaagaggacggttcagaagtgggggtcgggggcgcacaggtgaccggcagcaacactcgaaaacacatcttgcaagtgtctactttccagatgaccattctgatgctcttcaataatcgggagaaatatacattcgaagagattcaacaggagaccgacattcctgagcgagagctggtgcgtgcccttcagtccctagcttgtggaaaacccactcagcgggttctgactaaggagcctaaaagcaaagaaattgaaaatgggcacatcttcactgtgaatgaccagtttacctctaagttgcacagggtaaaaatccagactgtggccgccaaacaaggcgaatccgacccagaacggaaggagaccagacagaaagtcgatgacgacagaaaacacgaaatagaggctgcaattgtgcgcatcatgaagagcagaaagaaaatgcaacacaatgtgttagtggcagaggtgacccagcagctgaaagctcggttcctcccaagcccagtggtgattaaaaaaagaatagaaggcctcatcgagagggagtacctggcacgaacgccggaggatcggaaggtgtatacatatgtcgcttag

SEQ ID NO: 91962 - DNA, 2109 bp, Artificial Sequence
  derived and/or modified sequence
atgagcaacctgagcaagggcaccggcagcaggaaggacaccaagatgaggatccgggccttccctgtgagagaagatgtgctgaacagcctgaacaacaacttcctgcagaccctgaaccaggcctggaatgaccaccagacagccatggtgatgatccgggacatcctgatgtacatggacagagtgtatgtgcagcagaacaacgtggagaatgtgtacaacctgggcctcatcatcttccgggaccaggtggtgcgctatggctgcatccgggaccacctgcggcagaccctgctggacatgattgcccgggagaggaagggggaggtggtggacagaggagccatcagaaatgcctgccagatgctgatgatcctgggcctggagggccgctctgtgtatgaagaagattttgaggcccccttcctggagatgtctgctgagttcttccagatggagagccagaagttcctggctgaaaattctgcctctgtgtacatcaagaaggtggaggcccgcatcaatgaggagattgagcgggtgatgcactgcctggacaagagcacagaggagcccatcgtgaaggtggtggagcgggagctgatcagcaagcacatgaagaccatcgtggagatggagaacagcggcctggtgcacatgctgaagaatggcaagacagaggacctgggctgcatgtacaagctgttcagccgggtgcccaacggcctgaagaccatgtgtgagtgcatgagcagctacctgcgggagcagggcaaggccctggtgtctgaggagggggagggcaagaaccctgtggactacatccagggcctgctggacctgaagagcagatttgaccgcttcctgctggagagcttcaacaatgacaggctcttcaagcagaccatcgccggggactttgagtacttcctgaacctgaacagccgcagccctgagtacctgagcctcttcattgatgacaagctgaagaagggcgtgaagggcctgacagagcaggaggtggagaccatcctggacaaggccatggtgctcttccgcttcatgcaggagaaggatgtgtttgagcgctactacaagcagcacctggcccggcggctgctgaccaacaagtctgtgtctgatgacagcgagaagaacatgatcagcaagctgaagacagaatgtggctgccagttcaccagcaagctggagggcatgttccgggacatgagcatcagcaacaccaccatggatgagttccggcagcacctgcaggccaccggggtgtccctgggcggcgtggacctgactgtgcgggtgctgaccaccggctactggcccacccagagcgccacccccaagtgcaacatccccccagcccccaggcatgcctttgagatcttccgccgcttctacctggccaagcacagcggccggcagctgaccctgcagcaccacatgggcagcgctgacctgaatgccaccttctacggccctgtgaagaaggaggatggcagcgaggtgggcgtgggcggggcccaggtgacaggcagcaacaccaggaagcacatcctgcaggtgtccaccttccagatgaccatcctgatgctgttcaacaaccgggagaagtacacctttgaggagatccagcaggagacagacatccctgagcgggagctggtgcgggccctgcagagcctggcctgtgggaagcccacccagagggtgctgaccaaggagcccaagagcaaggagattgaaaatggccacatcttcaccgtgaatgaccagttcaccagcaagctgcaccgggtgaagatccagacagtggccgccaagcagggcgagagtgaccctgagaggaaggagacccggcagaaggtggatgatgacaggaagcatgaaattgaagctgccatcgtgcgcatcatgaagagcaggaagaagatgcagcacaacgtgctggtggccgaggtgacccagcagctgaaggcccgcttcctgcccagccctgtggtgatcaagaagagaattgagggcctgattgagcgggagtacctggcccggaccccagaggacaggaaggtgtacacctacgtggcctag

SEQ ID NO: 91963 - DNA, 2109 bp, Artificial Sequence
  derived and/or modified sequence
atgagcaacctgagcaagggcaccggcagccggaaggacaccaagatgcgcatccgagcgtttccggttcgagaagacgtcctcaattcactaaataacaattttctccaaacactgaaccaggcctggaatgaccaccagacagctatggtgatgatccgggacatcctgatgtacatggaccgcgtgtacgtgcagcagaacaatgttgaaaacgtttataacttgggcctgatcatttttcgagatcaggttgtacggtacggttgcatcagagaccacctgagacagaccttgcttgatatgatagccagggagcggaagggagaagtggtggatagaggcgctatccgtaatgcttgccagatgttaatgattcttggactcgagggtcgctctgtatatgaggaggatttcgaggccccttttctcgagatgagtgcggagttctttcagatggagtctcaaaaattcctggccgaaaatagtgctagcgtgtacataaaaaaggttgaggcacggatcaacgaagaaatcgagagagtgatgcattgtcttgataaaagcaccgaagaacccatagtgaaggtcgtggaaagggagttgatctccaaacacatgaagaccatagtggagatggagaacagcggcctcgtgcacatgctcaagaacgggaagacagaggatctaggttgcatgtataagctgtttagtcgggtgcctaacggtttgaaaacgatgtgcgagtgtatgagctcatatttgcgagaacagggcaaagctctagtgagcgaggagggggaggggaaaaaccctgtagattatattcaggggctgctggacctgaaatctcgctttgacagatttctgctagagagtttcaataacgatcggctgtttaaacaaactatagccggcgacttcgagtactttctcaacctgaattcgcggagcccagaatacctgagcctcttcatcgacgacaagctcaagaagggagtcaaaggcctcacggaacaggaggtagagacaattctggacaaagccatggtgctgttccgcttcatgcaggagaaggatgtatttgaaaggtactacaagcagcatctggctcggcggctcctgactaataagtctgtgagcgatgacagcgaaaagaacatgatctctaaacttaagactgaatgtggctgccagtttacgtctaagctggagggcatgttccgggatatgagtatctcgaacacgactatggatgaattccggcagcaccttcaggccacaggcgtgagcttaggcggagttgatctcaccgtgagagtcttgaccacaggctactggccaacacagagcgccactccaaaatgtaatattccccccgctcccaggcacgcattcgagatatttagacggttctatctcgcaaagcacagcgggaggcagctaacactgcaacatcacatgggttccgcagacctcaatgccactttctatggcccggtgaaaaaggaagatggtagcgaggtaggcgttggaggtgcccaggtcactggctccaatactcgcaagcatatcctgcaggtcagcacattccagatgactatccttatgctgtttaataaccgcgagaagtacacgttcgaagagatacagcaggaaacagatatacctgagcgcgagctggttcgcgccctgcagagcctcgcatgtggaaagcctacacagagagtcttgactaaagagcccaaaagcaaggaaattgaaaacggacacatttttaccgtgaacgaccaattcacaagcaaactgcaccgcgtgaagatccagactgtggctgccaaacagggtgaaagcgaccctgagaggaaggagactcgacagaaagtggacgatgatcgtaaacacgaaattgaggcagctatcgtgcggatcatgaagagccggaagaagatgcagcacaacgtattggtagctgaggtcactcaacagttaaaggccaggttcctgccatcaccagtcgtcattaagaagcgcattgaaggactcatagagcgcgagtatctggctcgtacgcctgaggaccgtaaagtctacacctatgttgcctag

SEQ ID NO: 91964 - DNA, 2109 bp, Artificial Sequence
  derived and/or modified sequence
atgagtaatttgagtaaggggactggcagcaggaaagacactaagatgagaattagggcgttccccgttagggaggacgttctgaattcactgaacaacaactttctgcagacgctaaaccaagcgtggaacgaccatcagactgccatggtaatgatcagagacattcttatgtacatggatagagtgtatgttcagcagaacaacgtggagaatgtgtataaccttggcctcatcatttttcgagaccaggtggtccggtacggctgcatccgagatcacctccggcagaccctacttgacatgatcgctcgcgaaagaaagggtgaggtggttgacaggggggcaattcggaacgcctgccagatgctgatgatcctcggccttgaaggtagatccgtttatgaggaggactttgaagcgccttttctggagatgtccgcagagttttttcagatggagtcacagaagttcttggccgagaatagcgcctctgtgtacatcaaaaaagtggaggccaggatcaatgaggaaatcgaacgcgtgatgcactgtctggacaagtctacagaggagcccatcgtcaaagttgttgagcgggaactgatctctaagcatatgaaaacaatagtggagatggaaaactctggcctggtgcatatgctgaagaacgggaagacggaagacctgggttgcatgtacaagctcttttctcgggtccccaatggcctgaagacaatgtgcgagtgcatgagctcatatcttcgcgaacaggggaaggccctcgtatccgaggagggcgaaggtaaaaaccccgttgattatatccaagggttgctggacctaaaaagccgctttgacaggtttctgctggaaagcttcaacaatgaccgcttgtttaaacagactattgcaggcgacttcgagtattttcttaacttgaactcgcgttcccccgaatacttatcactcttcatcgatgataaactgaaaaaaggcgtcaagggactgactgaacaggaggtggagacaatcctggataaagcgatggtactattccgcttcatgcaggagaaggatgtttttgagagatactataaacagcacttggctaggcgccttttgacaaataaatctgttagcgatgacagtgagaagaatatgatttccaagctgaagacagaatgcggctgccagtttacaagtaaattggaagggatgtttagggatatgagcatatcaaacactaccatggacgagttccgccagcatcttcaagccactggcgtgtccctgggtggcgtggacctgactgtgagagtgctgacaactggctactggcccacacaatcagctaccccaaaatgtaacattccaccggctcctagacatgcgtttgagatttttcgacggttttatctcgcaaaacactctgggaggcagctgacccttcaacatcacatgggctccgctgacttgaacgctaccttttacgggcctgttaagaaagaggatgggagcgaagtgggtgttggcggtgcccaagtaaccgggagcaacacaagaaagcacattctgcaagtctccacttttcagatgacaatattgatgctttttaacaatcgcgagaagtacacttttgaagaaatacagcaggagacagatatccccgaacgagagctagtcagggccttgcagtcactggcgtgcgggaagcctacacaacgcgtactgacaaaagagccaaaatctaaggagatcgagaatggacatatcttcacagttaacgatcagtttacctccaagttgcaccgtgtgaagatccagaccgtcgctgctaagcagggcgaatcggaccccgagcgtaaggaaacaagacaaaaagtggacgacgaccgcaagcacgaaatcgaagcagcaatcgtgaggatcatgaagtcccgtaaaaaaatgcaacacaacgtgctcgtggccgaggtgacacagcagctgaaggcgaggtttctgccctctcccgttgtcatcaagaaaaggatcgaggggctgatagagcgtgaatatttggccagaacaccagaggatagaaaggtgtatacatacgtggcctag

SEQ ID NO: 91965 - DNA, 2235 bp, Artificial Sequence
  derived and/or modified sequence
atggacgagaagtacgtgaacagcatctgggacctgctgaagaacgccatccaggagatccagagaaagaacaacagcggcctgagcttcgaggagctgtacagaaacgcctacaccatggtgctgcacaagcacggcgagaagctgtacaccggcctgagagaggtggtgaccgagcacctgatcaacaaggtgagagaggacgtgctgaacagcctgaacaacaacttcctgcagaccctgaaccaggcctggaacgaccaccagaccgccatggtgatgatcagagacatcctgatgtacatggacagagtgtacgtgcagcagaacaacgtggagaacgtgtacaacctgggcctgatcatcttcagagaccaggtggtgagatacggctgcatcagagaccacctgagacagaccctgctggacatgatcgccagagagagaaagggcgaggtggtggacagaggcgccatcagaaacgcctgccagatgctgatgatcctgggcctggagggcagaagcgtgtacgaggaggacttcgaggcccccttcctggagatgagcgccgagttcttccagatggagagccagaagttcctggccgagaacagcgccagcgtgtacatcaagaaggtggaggccagaatcaacgaggagatcgagagagtgatgcactgcctggacaagagcaccgaggagcccatcgtgaaggtggtggagagagagctgatcagcaagcacatgaagaccatcgtggagatggagaacagcggcctggtgcacatgctgaagaacggcaagaccgaggacctgggctgcatgtacaagctgttcagcagagtgcccaacggcctgaagaccatgtgcgagtgcatgagcagctacctgagagagcagggcaaggccctggtgagcgaggagggcgagggcaagaaccccgtggactacatccagggcctgctggacctgaagagcagattcgacagattcctgctggagagcttcaacaacgacagactgttcaagcagaccatcgccggcgacttcgagtacttcctgaacctgaacagcagaagccccgagtacctgagcctgttcatcgacgacaagctgaagaagggcgtgaagggcctgaccgagcaggaggtggagaccatcctggacaaggccatggtgctgttcagattcatgcaggagaaggacgtgttcgagagatactacaagcagcacctggccagaagactgctgaccaacaagagcgtgagcgacgacagcgagaagaacatgatcagcaagctgaagaccgagtgcggctgccagttcaccagcaagctggagggcatgttcagagacatgagcatcagcaacaccaccatggacgagttcagacagcacctgcaggccaccggcgtgagcctgggcggcgtggacctgaccgtgagagtgctgaccaccggctactggcccacccagagcgccacccccaagtgcaacatcccccccgcccccagacacgccttcgagatcttcagaagattctacctggccaagcacagcggcagacagctgaccctgcagcaccacatgggcagcgccgacctgaacgccaccttctacggccccgtgaagaaggaggacggcagcgaggtgggcgtgggcggcgcccaggtgaccggcagcaacaccagaaagcacatcctgcaggtgagcaccttccagatgaccatcctgatgctgttcaacaacagagagaagtacaccttcgaggagatccagcaggagaccgacatccccgagagagagctggtgagagccctgcagagcctggcctgcggcaagcccacccagagagtgctgaccaaggagcccaagagcaaggagatcgagaacggccacatcttcaccgtgaacgaccagttcaccagcaagctgcacagagtgaagatccagaccgtggccgccaagcagggcgagagcgaccccgagagaaaggagaccagacagaaggtggacgacgacagaaagcacgagatcgaggccgccatcgtgagaatcatgaagagcagaaagaagatgcagcacaacgtgctggtggccgaggtgacccagcagctgaaggccagattcctgcccagccccgtggtgatcaagaagagaatcgagggcctgatcgagagagagtacctggccagaacccccgaggacagaaaggtgtacacctacgtggcctag

SEQ ID NO: 91966 - DNA, 2701 bp, Artificial Sequence
  derived and/or modified sequence
gtagaaaattattcacagaggactaaagacttcttgtcctttgtatgtagtagatgttaagaattcacttcttttcatttagttttaatttgtctcatgatgtagttctctcagtaatcacagaaccttcaagatgtatgaccatggatgaaaaatatgtaaacagcatttgggaccttctgaaaaatgcaattcaagaaatccagcgtaagaataacagtggtcttagttttgaggagctctatagaaatgcatatacaatggttttgcataaacatggagaaaagctctacactggactaagagaagttgttaccgaacatctcataaataaggtgcgagaagatgtactaaattcattgaataacaactttcttcaaacgctaaatcaagcttggaatgatcatcaaacagctatggtgatgattagagacatactaatgtacatggaccgtgtgtatgtacaacaaaataatgtggagaacgtctacaatttgggattaattatttttcgagatcaagttgtacgttatgggtgtattagggatcatctacggcaaactctattggatatgattgcaagagagcggaaaggagaagtcgtagacagaggcgcaataagaaatgcttgccagatgttaatgattttaggtctcgaaggaagatcagtctatgaagaagattttgaggctccttttttggaaatgtctgcagaattttttcagatggaaagccagaaatttttagcagaaaatagtgcttcagtatatataaagaaagtagaagctagaattaatgaagaaatagaacgagtgatgcactgccttgacaaatcaacggaagaaccaattgtaaaggtggttgaaagggaactcatttccaagcacatgaagactatagtagaaatggagaattctgggctagtacatatgttgaaaaatggaaagacagaagaccttggttgcatgtacaagttatttagtcgtgtgccaaatggtttgaaaacaatgtgtgagtgtatgagttcctatttgagggagcaaggtaaagctcttgtttctgaagaaggagaaggaaagaatcctgttgactatatccagggcttattggatctgaagagtaggttcgatcgcttcctcctggaatcattcaacaatgaccgtctctttaaacaaactattgcgggtgactttgagtattttctcaacctcaactccaggtctcctgaatacctctcattatttattgatgataagctgaaaaagggagtcaaagggctaacagaacaagaagtagaaacaatattggataaagcaatggtcctttttaggtttatgcaagaaaaagatgtatttgaacgttattataaacaacacttggcaaggagacttctcacaaataaaagtgtttctgatgactctgaaaaaaacatgatatctaagttaaagactgaatgtggatgtcagttcacgtcaaaactggaaggaatgtttagggatatgagcatctcaaacacaacgatggatgaattcaggcaacatctacaggcaactggtgtatctttaggtggtgttgatcttacagtccgggtgctcacgacaggatattggcccactcagtcagccacaccaaagtgcaacatcccaccagcaccaagacatgcttttgagatattcagaaggttctacttagccaaacacagtggtcgacagctcacactccagcatcatatgggttctgcagatctcaatgccacattttatggaccagttaaaaaggaagatggatctgaagttggtgttggaggtgcacaagtaactggctctaatacacggaagcacatattgcaagtttccactttccagatgaccatattaatgctctttaataatagagaaaaatacacatttgaggaaattcagcaagagacagatatccctgaaagagagcttgttagagccctacagtccctcgcctgtggtaaaccaacacagcgggttcttacaaaagaacccaaatcaaaggaaatagaaaatggtcatatatttacagttaatgatcaattcacatccaaactacacagagtcaagattcaaacagttgctgccaaacaaggtgaatccgacccagagaggaaagaaacaaggcagaaagtagacgacgacagaaaacatgagatagaagctgctatagtgcggataatgaaatctagaaagaagatgcagcacaatgttctagtagcggaggtaactcagcagttgaaggcgcgattcttaccaagtccagttgttattaagaaacgtattgaaggacttattgagagagaatatttggcacgaacacctgaggatcgcaaagtatacacatatgtagcataaaatgcgttcagaaatttgatttattcttggactgtactcttcgcatggactgggaagttcttttaaatcattaaatattaagacgaccatctcttctattaaattacagtacatgttctagaccattgagatcaagcctttactccctttgagagtttccaacatcagttgattgagcttcaggctttacaacgtttatccctgtagagatcatctttacagttcctcgggaaaatgtgaatgtgctgcgttttgttttctttactgtatgaaaacaggaaaataaaagagaaatttagaaaatacagctcattacaataaaa

SEQ ID NO: 91967 - DNA, 2235 bp, Artificial Sequence
  derived and/or modified sequence
atggacgaaaagtatgtgaactctatctgggatttattgaagaatgcgattcaagagattcaaagaaagaataacagcggcttgagcttcgaagaactgtatagaaatgcctacacgatggtcttgcacaagcatggggagaaactttatacgggcctgcgagaagttgtaaccgagcacctgatcaacaaggtgcgtgaggacgtcctcaattccctaaacaataactttctgcagacgctaaaccaggcatggaacgaccaccagacggccatggtcatgattcgcgacatcctcatgtacatggatcgcgtgtatgtacagcagaacaacgttgaaaatgtctataacctcggattgatcatcttccgggatcaggtcgtaagatacggctgtatcagggatcacctgcgccagactctgctggatatgattgcccgagagcgaaaaggggaggtagtggaccggggcgctatcagaaatgcatgtcagatgcttatgattctgggattggaaggtcgctccgtttatgaggaggactttgaggcccctttcctcgagatgtccgcggaattcttccagatggaatcccaaaaatttctggcagagaacagcgccagcgtgtatattaagaaagttgaggctcgcattaacgaagagatcgagcgggtgatgcattgcttagacaaaagcacagaggagccgatcgttaaagtcgtcgagcgcgaactcatctctaaacacatgaagacaattgtggaaatggaaaattccgggctggttcacatgcttaagaacggcaaaactgaggacctgggttgcatgtacaaattgttcagtcgagtcccaaacggtctcaagactatgtgcgagtgcatgtcaagttacctgcgagagcaggggaaggccctggtgtccgaggagggggagggcaagaatccagtggactatatccaggggctgcttgacctgaagtctcggtttgaccggtttctcttggagtcctttaacaacgataggttgttcaaacagacaatcgccggcgacttcgaatacttcctcaatctgaatagcaggtcacctgagtatcttagcctgtttatcgatgacaaactgaagaagggagtgaagggcctgacggagcaagaagtcgagacgattctcgacaaggctatggtgctgtttcggtttatgcaagaaaaggatgtattcgaacggtactataagcagcacctggcccgccgactgctgaccaataagtctgtctctgacgattccgagaagaatatgataagcaagctgaagacggagtgcggatgtcaatttacttctaagcttgagggtatgtttcgtgatatgtctatttctaacacaacaatggacgaattccggcagcatctgcaagccaccggcgtctccctcggcggggttgatctgaccgtcagggtgctcacaacaggctactggccaacacagagtgccacgccaaagtgcaacattcctcctgccccccgtcatgcttttgagatctttcggcggttctatttagccaaacattcaggacgccagcttacgctgcagcaccatatgggtagtgcggacctgaatgcaactttctatgggccagtaaaaaaagaagacggatcagaagtgggcgtcggtggtgcacaggtgaccggcagcaacaccagaaagcatatcctgcaagtgtcaacatttcaaatgacaattctgatgttatttaataacagagagaaatataccttcgaggagattcaacaggagaccgacattcctgaacgggaactcgtgagggctctacaatcactggcttgtggtaagccaactcaacgtgtcttgaccaaagaacctaaaagcaaggagatcgagaacggacatatctttactgttaatgatcagtttacctctaagctccatcgggtcaagattcaaactgtggcagcaaagcaaggggagagcgacccggagagaaaggaaactaggcagaaggttgatgacgatcgcaagcatgaaatagaagccgctatcgtacggattatgaaaagcaggaaaaagatgcaacataatgtgctggtggcggaagttacacagcagttaaaggcacgattcctgcccagtcccgtggtgattaagaagcgcatcgagggtttaatcgagcgggagtatctggcccgaacacccgaagatcgcaaggtgtacacttacgtggcctag

SEQ ID NO: 91968 - DNA, 2235 bp, Artificial Sequence
  derived and/or modified sequence
atggacgagaagtacgtcaactccatctgggatctgctgaagaacgctattcaggagattcagaggaaaaacaattccggcctgtcgttcgaggaactatacaggaatgcctacacgatggtcctgcacaagcacggggagaagctgtataccggcctcagagaagtagtgactgaacacctgatcaacaaggtgagagaggatgtgctaaattctcttaataataacttcctgcaaaccctgaatcaggcttggaacgaccatcagaccgctatggtgatgattcgagatatcctgatgtacatggatcgagtgtacgtgcagcagaataacgtggagaatgtgtacaaccttggactcataatttttagagaccaggtggtcaggtacggttgtattagggatcacctgaggcagaccctgcttgatatgatagcgagggagaggaagggggaagtcgtagacagaggagccatccggaacgcctgccagatgctgatgatcctgggattggaagggagatccgtgtacgaggaggacttcgaagcaccctttctggagatgtctgccgaattctttcaaatggagtctcagaagtttctcgccgagaattccgcaagcgtatatatcaaaaaggtggaagcccggatcaacgaggagatcgagagagtcatgcattgtctcgacaagtctacggaagaacctattgtgaaagtagtggaacgcgaattgatcagcaagcacatgaaaactattgtcgaaatggagaacagtggtctcgtgcacatgctgaaaaacgggaagactgaggacttgggctgtatgtataagcttttttctagagttccgaacggactgaagactatgtgcgagtgtatgtcaagttatttgcgggaacaaggaaaggccctagtatcggaggaaggtgagggcaaaaatcccgtggattatattcaaggcctcctcgaccttaagtccaggtttgaccgattccttctggaaagcttcaacaacgacagacttttcaaacaaacaatcgccggagactttgaatactttttgaacctgaattctagatcacccgagtatctcagcctgttcatcgatgacaaactgaagaagggtgtgaagggcctgacagaacaagaggttgagacaatcttagataaggctatggtcctatttcggtttatgcaggaaaaggatgtctttgaaaggtactacaagcagcatctcgcacggcggcttctcactaataaaagcgtttccgatgacagcgaaaagaacatgatttccaagcttaagactgagtgtgggtgccaattcacctctaagttggaggggatgttcagagacatgtccattagcaatacaacgatggacgaattccgccagcatctgcaggcaacaggtgtcagcctgggaggcgtcgacttgactgtccgcgtcctgaccacaggatattggccaacccagtccgcaacacccaaatgtaatattccccccgccccccggcatgcctttgagatcttcaggcgcttctacctggccaaacatagcggccgccagttgaccttgcagcaccatatgggatcagctgacttaaatgctaccttctatgggccagtgaagaaggaagacggaagcgaggtgggggtgggtggagcacaggtcaccgggagcaacacccgcaagcacatccttcaagtgagtaccttccagatgaccatcttaatgttgttcaataatcgagagaagtacacctttgaggagatccaacaggagaccgacatacctgagagagagctggtgcgcgctctgcagagcctggcctgtggcaagcccactcagcgcgtgctcaccaaggagccaaaatctaaggaaattgaaaatggccatatcttcaccgtgaatgaccaatttacatccaaattacacagagtcaaaattcaaacagtggcggcaaaacagggcgaatccgatcccgaaagaaaagagacgaggcagaaggtggacgatgaccgaaagcacgagatagaagcagcaatcgttcgcattatgaaaagtagaaaaaagatgcagcataacgtgttagtagccgaagttacccaacagttaaaagcccggttcctgccctccccagtggttatcaaaaagagaatagagggtctgatcgaacgggagtacctggctcggacgccggaggaccggaaagtctacacgtacgtcgcatag

SEQ ID NO: 91969 - DNA, 2235 bp, Artificial Sequence
  derived and/or modified sequence
atggatgagaagtatgtgaacagcatctgggacctgctgaagaatgccatccaggagatccagaggaagaacaacagcggcctgagctttgaggagctgtacagaaatgcctacaccatggtgctgcacaagcatggagagaagctgtacacaggcctgcgggaggtggtgacagagcacctgatcaacaaggtgagagaagatgtgctgaacagcctgaacaacaacttcctgcagaccctgaaccaggcctggaatgaccaccagacagccatggtgatgatccgggacatcctgatgtacatggacagagtgtatgtgcagcagaacaacgtggagaatgtgtacaacctgggcctcatcatcttccgggaccaggtggtgcgctatggctgcatccgggaccacctgcggcagaccctgctggacatgattgcccgggagaggaagggggaggtggtggacagaggagccatcagaaatgcctgccagatgctgatgatcctgggcctggagggccgctctgtgtatgaagaagattttgaggcccccttcctggagatgtctgctgagttcttccagatggagagccagaagttcctggctgaaaattctgcctctgtgtacatcaagaaggtggaggcccgcatcaatgaggagattgagcgggtgatgcactgcctggacaagagcacagaggagcccatcgtgaaggtggtggagcgggagctgatcagcaagcacatgaagaccatcgtggagatggagaacagcggcctggtgcacatgctgaagaatggcaagacagaggacctgggctgcatgtacaagctgttcagccgggtgcccaacggcctgaagaccatgtgtgagtgcatgagcagctacctgcgggagcagggcaaggccctggtgtctgaggagggggagggcaagaaccctgtggactacatccagggcctgctggacctgaagagcagatttgaccgcttcctgctggagagcttcaacaatgacaggctcttcaagcagaccatcgccggggactttgagtacttcctgaacctgaacagccgcagccctgagtacctgagcctcttcattgatgacaagctgaagaagggcgtgaagggcctgacagagcaggaggtggagaccatcctggacaaggccatggtgctcttccgcttcatgcaggagaaggatgtgtttgagcgctactacaagcagcacctggcccggcggctgctgaccaacaagtctgtgtctgatgacagcgagaagaacatgatcagcaagctgaagacagaatgtggctgccagttcaccagcaagctggagggcatgttccgggacatgagcatcagcaacaccaccatggatgagttccggcagcacctgcaggccaccggggtgtccctgggcggcgtggacctgactgtgcgggtgctgaccaccggctactggcccacccagagcgccacccccaagtgcaacatccccccagcccccaggcatgcctttgagatcttccgccgcttctacctggccaagcacagcggccggcagctgaccctgcagcaccacatgggcagcgctgacctgaatgccaccttctacggccctgtgaagaaggaggatggcagcgaggtgggcgtgggcggggcccaggtgacaggcagcaacaccaggaagcacatcctgcaggtgtccaccttccagatgaccatcctgatgctgttcaacaaccgggagaagtacacctttgaggagatccagcaggagacagacatccctgagcgggagctggtgcgggccctgcagagcctggcctgtgggaagcccacccagagggtgctgaccaaggagcccaagagcaaggagattgaaaatggccacatcttcaccgtgaatgaccagttcaccagcaagctgcaccgggtgaagatccagacagtggccgccaagcagggcgagagtgaccctgagaggaaggagacccggcagaaggtggatgatgacaggaagcatgaaattgaagctgccatcgtgcgcatcatgaagagcaggaagaagatgcagcacaacgtgctggtggccgaggtgacccagcagctgaaggcccgcttcctgcccagccctgtggtgatcaagaagagaattgagggcctgattgagcgggagtacctggcccggaccccagaggacaggaaggtgtacacctacgtggcctag

SEQ ID NO: 91970 - DNA, 2235 bp, Artificial Sequence
  derived and/or modified sequence
atggacgagaagtacgtgaacagcatctgggacctgctgaagaacgccattcaagagattcagcggaagaacaattctggtctctcattcgaagaactgtaccgaaacgcctatacaatggtgctgcataaacatggagaaaaactttacacgggtcttcgagaagttgtgaccgaacacctgataaacaaagtgcgggaagatgtgctgaacagcctgaataataacttcctgcagactctgaatcaggcctggaacgaccaccagacagccatggtgatgattcgcgatatcctgatgtacatggatagggtgtacgtgcaacaaaataacgtagagaacgtgtataacctgggattgatcatctttcgcgatcaggtggtgcggtacggctgcattagagaccatctacggcaaaccttgttagatatgatcgcacgggagagaaagggggaagttgtcgaccggggcgccattcgtaatgcctgtcaaatgctgatgatcctgggcctcgagggacgcagtgtgtatgaggaggacttcgaggccccattcctagagatgtctgctgagtttttccaaatggaatcccagaaattcctggccgagaattctgcgtctgtgtatatcaagaaagtggaggctaggatcaacgaggaaatagaacgggtcatgcactgtctggacaagtctaccgaagagccaatcgttaaagtagttgagagggagctcatatcaaagcacatgaagactattgtggaaatggagaatagcggtctggtccatatgttaaaaaacgggaagaccgaagacctgggctgcatgtacaaactcttctctcgcgtgcccaacggcctgaaaacaatgtgtgagtgcatgtcttcttacctgcgagagcagggtaaagccctggtgtccgaggaaggcgaggggaagaaccccgtggactatatccagggattgctagatcttaaaagccggtttgatcgctttctgcttgagtcctttaataatgatcggttattcaagcagactatcgccggtgatttcgagtacttcctcaatctgaactcccgcagccctgagtacttgtccctcttcatcgacgacaaattgaaaaaaggagtgaaggggctgacagaacaggaagttgaaactattctcgataaagccatggtgttgtttcggttcatgcaagagaaagatgtgttcgagaggtactataaacagcatttagctaggaggctgttgaccaacaaatccgtaagtgacgattcagagaaaaacatgatctccaagctgaagaccgagtgcggatgccaattcacgtccaagctcgagggcatgttccgcgatatgtctatttcaaacacaaccatggatgagtttagacagcacctccaggctaccggggtgtcattggggggcgtcgatctgaccgtgcgggtcctaacaaccgggtactggcccacgcagtcagccacacctaaatgcaatatcccccccgctccccggcatgccttcgagattttcagaaggttctacctcgcgaagcatagtggccggcaactgactttgcagcaccatatgggatctgcagacctcaatgctacattttatgggcccgtgaagaaggaagatggctctgaggttggagtcggcggggctcaggtaacaggtagcaacactagaaagcacatcctgcaagtttcaacattccagatgactatcctcatgctctttaataacagagagaaatatacttttgaagagattcaacaggagaccgacattccggagcgtgagttggtgcgtgccttacagagcttggcttgcgggaagcctactcagagggtactcacaaaggaacctaagagcaaggagatcgagaacgggcacattttcaccgtgaatgatcagtttacatcaaaactacacagggttaagatccagacagtggcagccaagcagggggagagcgaccctgaaaggaaagaaacccggcagaaggtcgatgacgaccgaaaacacgagattgaggcagccattgtcagaatcatgaagagcaggaaaaagatgcagcataacgtgctggtggcagaggttacccagcagcttaaggctcggtttttgccaagccctgtcgttattaagaaaagaatcgagggccttattgaacgagaatatctcgcgcggacacccgaagacaggaaagtatatacctacgtagcatag

SEQ ID NO: 91971 - DNA, 2235 bp, Artificial Sequence
  derived and/or modified sequence
atggacgagaagtacgtgaacagcatctgggacctgctgaagaacgccatccaggaaatccagaggaagaacaactccgggttgagttttgaggagttatataggaatgcttacaccatggttctccataaacacggcgaaaagctgtacacaggtctcagggaagtggtgactgagcacctgatcaataaggttagggaggacgttttgaactctttgaataacaatttcctgcagacactgaaccaggcttggaatgaccatcagacggccatggtaatgatccgcgatatactgatgtatatggatcgcgtgtatgtgcagcagaacaatgtcgagaatgtgtataatttgggcctaatcatctttcgggaccaggtagtgagatatggatgcattcgagatcacttgaggcaaacactcttggacatgattgccagagaacgtaaaggcgaagtggtggatcgaggcgccattaggaatgcttgccaaatgctaatgatcttggggctggaaggtagatcggtctacgaggaagattttgaagcgccctttctggagatgtctgcagagtttttccagatggaatctcaaaagttcctggctgagaattctgcttccgtgtacataaaaaaggttgaggcacggatcaatgaagagattgaaagggtgatgcattgcctggataaaagcactgaggagccaatagtgaaagttgtcgagagggaactgatttccaaacacatgaagaccatagtggagatggagaattctggcctggtccacatgctgaagaacggcaagacggaggacttagggtgtatgtataagctcttctctcgtgttcccaacgggttgaagaccatgtgtgaatgtatgtcatcttatctcagagagcagggaaaagccctagtgagtgaagaaggagaggggaaaaatccagttgactacatacaagggttactggacctcaagtcacgatttgatagatttcttctagaatcattcaataacgataggctctttaagcagactattgctggtgatttcgagtactttctgaatttgaactcaagatcccctgagtatctaagcctctttatcgacgataaacttaaaaaaggagtgaaggggctgaccgagcaagaggttgagacaatcctcgacaaagccatggttctctttcgatttatgcaggagaaagatgtcttcgagagatattacaaacagcaccttgccaggagactgctgactaacaaaagtgtaagtgacgattccgagaagaatatgatatcaaagctgaagacagagtgcggttgccagtttacaagtaaacttgaggggatgtttcgggacatgtcaatcagcaataccaccatggacgagttccgccagcacctgcaggctaccggtgtcagcctcggcggggtagaccttaccgtgagagtgctgaccacgggctattggcccacgcagtccgcaacacctaagtgcaacataccacccgccccacggcatgccttcgaaatcttccgtagattttatttggccaaacacagcggacgccaattaaccctccagcaccacatggggtctgcggacctgaacgctacattctatggccccgtgaaaaaagaagacggctctgaggtcggggtgggtggagcccaggtgacgggatccaacactcgcaaacatatccttcaggtgtctacattccagatgacgattctgatgctatttaacaatcgggaaaagtacaccttcgaagaaatccagcaggagacggatatccccgaaagagagctggtgagagcgctccagtctttagcgtgcggaaagccgacacaacgggtgctgacgaaggagcctaagtccaaagaaatcgagaacggccacattttcacagtcaacgaccaatttacttcaaagctccatagagtgaagattcaaacagtcgcagccaaacaaggagagtctgatccagagagaaaagaaacccgccagaaggtggacgacgatagaaaacacgagatcgaggccgcaattgtgcggatcatgaagtccaggaagaaaatgcagcacaacgtcttggtcgccgaggtgacgcaacagctgaaggctagatttctgccttccccagtcgtgatcaaaaagaggatcgaggggctgatagaacgggagtatctcgccagaacgccagaggatagaaaagtgtatacttacgtggcctag

SEQ ID NO: 91972 - DNA, 2235 bp, Artificial Sequence
  derived and/or modified sequence
atggatgaaaaatatgtcaattccatctgggatttgctcaaaaatgccattcaggagatacagagaaaaaataattccggcctgtcattcgaggaactctatcggaacgcctataccatggtgctgcacaagcatggcgagaaactatacacaggcttgagggaagtggttacagagcacctgatcaacaaggtacgggaggatgtcctcaacagtttgaacaacaatttcctgcaaaccctgaatcaggcttggaacgatcaccagactgctatggtgatgatcagagatattctgatgtatatggacagagtttatgtccaacaaaacaatgttgaaaacgtctataatcttgggctgattatattccgagatcaggtcgttcggtatgggtgtatacgcgatcatctgcggcagactttgttagatatgattgcaagagaacgcaagggtgaggtcgtggatcgaggcgcaattcgcaacgcttgccagatgctaatgatcttgggtctggagggacggtctgtgtacgaggaggacttcgaagccccttttttagagatgtcagcagaattttttcagatggaatctcaaaagttcctcgctgagaactctgcgtccgtatatattaagaaggtggaagccaggataaacgaagaaatcgagagagtcatgcattgcctggacaaatctacagaggagccaatagtgaaggtggttgaacgtgagctgatttcgaagcacatgaaaaccatcgtggagatggagaatagcggacttgtgcacatgcttaagaacggaaagaccgaggacttgggctgcatgtataagttgttctcaagggtgccgaacgggttgaaaactatgtgtgagtgtatgtcctcgtacctccgcgagcagggaaaggcccttgtcagcgaggagggagaggggaagaaccccgtcgactacatccaagggctcttagacctgaagagccgcttcgataggttcctactcgagagttttaacaacgatcgactgttcaagcaaactatcgccggtgactttgaatactttttgaacctcaactcaagatccccagaatatcttagtttgttcattgacgacaagttgaagaagggtgtgaagggcctgaccgaacaggaagtcgagaccattctggacaaagccatggtgttgtttagattcatgcaggaaaaggacgtgtttgagaggtattacaagcagcacctggcccgaagactactaacaaataagtcagtgtctgatgactccgaaaagaatatgatcagtaagctgaagaccgaatgcgggtgccagttcacctctaagttggagggtatgttcagggatatgagtattagtaacacaaccatggacgagttccgccagcatttacaggccaccggcgtgtctctaggaggcgtcgacctcaccgttagggtcctgacaacaggctattggccgacccagtccgctacacctaaatgcaacatcccacccgcacccaggcatgccttcgagattttccgccgattttacctggccaagcatagtggcaggcaactgacactgcagcaccacatgggttccgccgaccttaacgctactttctacggtccggtgaagaaagaagatggatcggaagtaggtgtcgggggagcccaggtaaccggatctaacacccgcaagcatattctgcaggttagcacttttcagatgactatcctcatgttgtttaataatcgggagaagtacacgtttgaagagatccagcaagaaactgatattcctgaaagagagctggtgcgtgcactacagtccctcgcctgtgggaagccaactcagcgcgtgttaaccaaagagcctaagtccaaggagatcgagaatggacacatctttactgttaatgaccagttcacaagcaaactgcaccgcgtcaaaattcaaacagtggccgcaaaacagggcgagagcgaccctgagagaaaggagacaaggcagaaagtagacgatgatcggaagcacgaaatcgaggccgcaatagtgcggatcatgaaatcgcggaagaagatgcagcacaacgtgctcgttgcggaagtgacacagcagctcaaggctagattcctgcctagcccagtggtgattaagaagcgaattgaggggctcatagagcgagagtacttggcgagaacaccagaagaccgcaaagtgtatacctatgtcgcttag

SEQ ID NO: 91973 - DNA, 2235 bp, Artificial Sequence
  derived and/or modified sequence
atggacgaaaagtatgttaacagcatctgggatcttctcaaaaacgccattcaagaaattcagagaaagaacaactcaggactctcctttgaggagctctaccgaaatgcgtacacaatggttcttcataaacatggtgaaaaactgtacactggactgagggaagtggtcactgagcacctgattaacaaggtgcgagaagatgtcctgaattctctgaataataacttcttacagacactgaaccaagcttggaacgaccatcagacagcaatggtcatgattcgtgacatcctgatgtacatggatcgcgtttacgtgcaacagaacaatgtggagaatgtctacaaccttggccttatcatattccgtgaccaagtcgttaggtacggctgcatccgagatcatctgcggcaaacactgctggacatgatcgctagagaaagaaaaggggaagttgtcgaccgcggagccatccgtaacgcgtgccagatgctcatgatcctaggcctagaggggagatctgtgtatgaagaagatttcgaggccccattcttggaaatgtcggccgagtttttccaaatggaaagtcagaagttcctggccgagaactcagcaagcgtttatataaagaaggtagaggcaagaattaatgaggaaatagagcgggtgatgcactgcttggacaagagcacagaagaacctatagtgaaggttgtggagcgcgaactgatcagtaaacacatgaaaaccattgtggagatggagaatagcggcctggtccacatgctcaagaacggcaagaccgaggacctgggctgtatgtataaactcttttctcgggtaccaaacggcctcaaaactatgtgtgagtgcatgtccagctatctcagagagcaaggcaaagctctggtgtcagaagagggcgaggggaagaaccccgtggattatatacagggattacttgacctcaagagtagattcgataggttcctcctggagagctttaacaatgacaggctttttaagcagacgatcgcgggagacttcgagtactttctcaacctgaatagtaggagccctgagtacctaagtctctttatcgatgacaagctgaaaaaaggtgttaaaggacttactgagcaggaggtcgagaccattctcgacaaagccatggtcctctttaggttcatgcaagagaaggatgtcttcgaacgatattataagcaacacctggcccgacggctgctgaccaacaaatcggtttctgacgacagtgagaagaacatgatctcaaagctcaaaactgagtgtggctgccagtttacgtccaagcttgagggaatgttcagagacatgtccatttctaatacgactatggacgagttcagacaacacctccaggctaccggagtgagcctgggcggtgtcgacctgactgtacgggttctgactaccggatactggcccacccagtccgcgactccaaaatgtaatataccccctgccccaagacacgcctttgagatttttagaaggttttaccttgccaagcactccggcaggcagctaactctgcagcaccacatgggttctgccgatctgaacgccaccttctatgggccagtcaagaaggaagacggctccgaggtgggggttgggggagcccaggttaccggatcaaatacccgcaaacacatactccaggtgagcacgttccaaatgaccattttaatgctctttaacaatcgcgaaaaatatacatttgaggaaatacaacaggagacagacatccctgagcgggaactggttcgcgcactccagtccctggcatgcggtaagccgacccagagagtgttaaccaaagagccaaagtctaaggaaatagagaacggccacatctttactgtgaatgatcagtttaccagcaagctgcacagagtgaagattcaaaccgtggctgcgaagcaaggagaatctgacccggagcggaaggagacccggcaaaaggtggatgacgacagaaaacacgaaatcgaagccgctattgtacgaattatgaaatctaggaaaaaaatgcaacataacgtattggtggcagaggtgacccagcagctaaaggcacgcttccttcccagccccgtggtaataaaaaaacgcattgagggcctcatagaaagagagtacctcgcaagaactccggaagatcgaaaagtgtacacgtacgtagcttag

SEQ ID NO: 91974 - DNA, 981 bp, Artificial Sequence
  derived and/or modified sequence
atgcagactccaaatttccgcatcactgtcgtacaggaggtagatactgtggagatctgtggagctttgaaggtgcggggagcccaacgacagctgtggggggaggaaaaggctccaaaggaggtgtggcttagcagcgccaggctgcaggtcctgcaggcccttactatcgagcagtggttcccttttcctaccatgtctcatgcttataggaggtcctgccgaagcaaagccagagccattcaagctgactattcctcctctgatagagggccaccttgtagttgcccaatcttggcaccgtgtggaacaccacaccccttggcacctgggggacagggggacaaggaaatgccgcggttaatgggagataaaacatcattgacaccgaggcagaccaatggtcaaaattacgggtcttggactgccgtagacggtctgtacaatggcatggtgcgatgggaggaccagttggagcgacgcgtcgtgttcagaaagtgccctcgggggggcagcatgggccaagggctgcgaaaaggagtacagcaagggggcaagcctcgtggagggagtagactccttaaagggcataccttgtacctgtccagcgccgtgggcgtcacggctgacgagatgtcaatgcgcggcctccatatggggcccattggtggtgggctcttcacgtacgacttacactcatttaagaacgtggtagctgtaggggcagggttttgtgacgggctgggatttggagataacaccaaagccgccgtgattagattaggtctcatggaaatgattgcattcgctaaactcttttgctcgggcccagtcagttcagcaaccttcctggagtcctgtggcgttgctgatctaatcacgacctgctatggcggacggaatcgaaaggtggctgaggcttttgctcggactgggaaggttggccccggaaggagagaaaacaggggagccgccttatag

SEQ ID NO: 91975 - DNA, 981 bp, Artificial Sequence
  derived and/or modified sequence
atgcagacaccaaacttccgtatcacagtggtgcaagaggtggacacagtagagatctgtggagccttaaaggtgagaggggcacagaggcagctatggggtgaggagaaggccccaaaggaggtctggctgagctctgcaaggctgcaggtactccaggctctcactattgagcagtggttcccctttcctaccatgtcccatgcatataggaggagctgcagaagcaaggccagggccattcaggctgattattcatcatcagaccgtggacccccttgctcctgtcccattttagccccgtgtgggactccccaccctctggctccaggaggtcagggggacaaggagatgcccaggctaatgggagacaaaacatccttgacacccagacagactaatggccagaactatggatcctggacagctgttgacgggctgtacaatggaatggtcagatgggaagatcaactagagagaagagtggttttcagaaaatgtcctcgaggagggagtatggggcagggcttaagaaagggggtgcagcaaggggggaaaccaagaggcggaagtaggcttctaaaaggccacacactatacctctcttctgcagtgggtgtcacggctgatgaaatgagtatgagggggctccacatggggcctataggagggggtcttttcacctatgacctccactccttcaagaatgtagtggccgtgggggctggcttctgtgatggcctgggctttggcgacaacaccaaggcggcagtgatccggctgggactcatggagatgatagccttcgccaagctcttctgcagtggccctgtgtcctctgccaccttcttggagagctgtggtgttgctgacctgatcactacctgctatggagggcggaaccggaaagtggctgaggcctttgcgcgtacaggaaaggtgggccccgggagaagggagaacagaggggcggctctgtag

SEQ ID NO: 91976 - DNA, 981 bp, Artificial Sequence
  derived and/or modified sequence
atgcagacccccaacttccgcatcaccgtggtgcaggaggtggacacagtggagatctgtggggccctgaaggtgcggggggcccagaggcagctgtggggcgaggagaaggcccccaaggaggtgtggctgagcagcgcccggctgcaggtgctgcaggccctgaccatcgagcagtggttccccttccccaccatgagccacgcctacagaagaagctgccgcagcaaggcccgggccatccaggccgactacagcagcagtgaccggggccccccctgcagctgccccatcctggccccctgtggcaccccccaccccctggcccctgggggccagggcgacaaggagatgccccggctgatgggagacaagaccagcctgaccccccggcagaccaacggccagaactacggctcctggacagctgtggatggcctgtacaacggcatggtgcgctgggaggaccagctggagcggcgggtggtgttcaggaagtgcccccggggcggctccatgggccagggcctgaggaaaggagtgcagcagggcggcaagccccggggcggcagccggctgctgaagggccacaccctgtacctgagcagcgctgtgggcgtgacagcagatgagatgtccatgaggggcctgcacatgggccccatcggcggcggcctcttcacctatgacctgcacagcttcaagaatgtggtggccgtgggcgccggcttctgtgatggcctgggctttggagacaacaccaaggctgctgtgatccggctgggcctgatggagatgattgcctttgccaagctgttctgcagcggccctgtgagcagcgccaccttcctggagagctgtggggtggccgacctgatcaccacctgctatggaggcaggaacaggaaggtggccgaggcctttgccaggacaggcaaggtgggccctggccggcgggagaacagaggagctgccctgtag

SEQ ID NO: 91977 - DNA, 981 bp, Artificial Sequence
  derived and/or modified sequence
atgcagacccccaacttccggatcaccgtggtgcaggaggtggacaccgttgaaatctgtggggccctgaaagtccgcggcgctcaacgacaactctggggagaggagaaggctcctaaggaggtctggctctccagcgcaagactccaggtcctgcaggcgctcaccatcgagcagtggtttcctttcccaactatgagccacgcttatagacgatcctgccgctctaaggctcgcgcgattcaagctgactacagttcctctgacagggggccaccctgtagctgcccaattctcgccccctgcggcacccctcacccactggcgcccggaggtcaaggcgacaaggagatgcctagattgatgggtgacaaaacatcgctgacccctaggcagacaaatgggcagaactatggatcctggactgccgtggacggcctgtacaacggtatggtgcggtgggaagaccaattggaaaggagagttgttttcagaaaatgtccaaggggcgggagtatggggcagggcctgcggaagggagttcagcagggaggaaagcctcgaggaggtagcaggctgctgaagggccacaccctctacctcagcagtgccgtaggtgtgaccgctgacgaaatgagtatgcgagggctgcatatgggcccaatcggagggggattatttacttatgatctgcactctttcaaaaacgtagtagctgtgggagccggcttttgtgacgggctgggattcggtgacaatactaaagctgccgtgatacgcctggggcttatggagatgatcgcatttgccaagcttttctgctccggtccagtgagtagcgctacctttttggagtcctgcggggtggccgatctgataacgacctgctatggtggccgcaatcgcaaggtggcagaggccttcgcccgcactggtaaggtgggcccagggagacgggaaaatcgaggtgctgcactatag

SEQ ID NO: 91978 - DNA, 981 bp, Artificial Sequence
  derived and/or modified sequence
atgcagactcctaacttccggatcaccgttgtgcaggaggtggatacagtggagatttgtggggcactcaaggtgcgcggtgcgcagcggcaactgtggggcgaagagaaggccccaaaagaggtctggctgtcctcagcccgactgcaggtgctgcaggcgctgactatcgaacagtggtttccattccctacaatgtctcatgcctatagaagatcttgtcgttctaaggcaagggctatccaggccgactactcatcctccgatcgtggccctccatgcagctgtcctatcctggccccatgcgggacaccccaccccctggctcctggtggacagggggacaaagagatgcctcggttaatgggcgataagaccagcctgacaccacgccagaccaatgggcagaattacggttcttggaccgctgtggatgggttatataatggtatggttagatgggaggatcagcttgaacgccgagtagtgttccgcaaatgcccgaggggcggaagcatgggccaaggcctcaggaagggagttcagcagggtgggaaacctagaggcggatctcgcctgttgaagggccacaccctgtatctttccagcgccgtcggcgttactgcagacgagatgtccatgagggggctgcatatgggccctataggaggcggactgtttacatatgacctacacagcttcaagaacgtcgtggcggtcggagccggtttttgcgacggactgggctttggcgataacacaaaggctgcagtcatccggcttgggctgatggagatgatcgcgttcgctaagctgttctgctccggccctgtgagttcagccacattccttgagtcttgtggcgttgcagatctcatcacaacctgctatggaggaaggaacagaaaggtcgctgaggcattcgccaggaccggaaaggtgggccctgggagaagagagaaccgaggggcagctttatag

SEQ ID NO: 91979 - DNA, 981 bp, Artificial Sequence
  derived and/or modified sequence
atgcagacccccaacttcagaatcaccgtggtgcaggaggtggacaccgtggagatctgcggcgccctgaaggtgagaggcgcccagagacagctgtggggcgaggagaaggcccccaaggaggtgtggctgagcagcgccagactgcaggtgctgcaggccctgaccatcgagcagtggttccccttccccaccatgagccacgcctacagaagaagctgcagaagcaaggccagagccatccaggccgactacagcagcagcgacagaggccccccctgcagctgccccatcctggccccctgcggcaccccccaccccctggcccccggcggccagggcgacaaggagatgcccagactgatgggcgacaagaccagcctgacccccagacagaccaacggccagaactacggcagctggaccgccgtggacggcctgtacaacggcatggtgagatgggaggaccagctggagagaagagtggtgttcagaaagtgccccagaggcggcagcatgggccagggcctgagaaagggcgtgcagcagggcggcaagcccagaggcggcagcagactgctgaagggccacaccctgtacctgagcagcgccgtgggcgtgaccgccgacgagatgagcatgagaggcctgcacatgggccccatcggcggcggcctgttcacctacgacctgcacagcttcaagaacgtggtggccgtgggcgccggcttctgcgacggcctgggcttcggcgacaacaccaaggccgccgtgatcagactgggcctgatggagatgatcgccttcgccaagctgttctgcagcggccccgtgagcagcgccaccttcctggagagctgcggcgtggccgacctgatcaccacctgctacggcggcagaaacagaaaggtggccgaggccttcgccagaaccggcaaggtgggccccggcagaagagagaacagaggcgccgccctgtag

SEQ ID NO: 91980 - protein, 155 aa, Artificial Sequence
  derived and/or modified sequence
MAEGEITTFTALTEKFNLPPGNYKKPKLLYCSNGGHFLRILPDGTVDGTRDRSDQHIQLQLSAESVGEVYIKSTETGQYLAMDTDGLLYGSQTPNEECLFLERLEENHYNTYISKKHAEKNWFVGLKKNGSCKRGPRTHYGQKAILFLPLPVSSD

SEQ ID NO: 91981 - protein, 58 aa, Artificial Sequence
  derived and/or modified sequence
MAEGEITTFTALTEKFNLPPGNYKKPKLLYCSNGGHFLRILPDGTVDGTRDRSDQHIQ

SEQ ID NO: 91982 - protein, 41 aa, Artificial Sequence
  derived and/or modified sequence
MAEGEITTFTALTEKFNLPPGNYKKPKLLYCSNGGHFLRIL

SEQ ID NO: 91983 - DNA, 3669 bp, Artificial Sequence
  derived and/or modified sequence
gaaaaaatactgttggcagcagcacaatgtttgggctaagacctggtcttgaaagcgccacaagcagcagctgctgagccatggctgaaggggaaatcaccaccttcacagccctgaccgagaagtttaatctgcctccagggaattacaagaagcccaaactcctctactgtagcaacgggggccacttcctgaggatccttccggatggcacagtggatgggacaagggacaggagcgaccagcacattcagctgcagctcagtgcggaaagcgtgggggaggtgtatataaagagtaccgagactggccagtacttggccatggacaccgacgggcttttatacggctcacagacaccaaatgaggaatgtttgttcctggaaaggctggaggagaaccattacaacacctatatatccaagaagcatgcagagaagaattggtttgttggcctcaagaagaatgggagctgcaaacgcggtcctcggactcactatggccagaaagcaatcttgtttctccccctgccagtctcttctgattaaagagatctgttctgggtgttgaccactccagagaagtttcgaggggtcctcacctggttgacccaaaaatgttcccttgaccattggctgcgctaacccccagcccacagagcctgaatttgtaagcaacttgcttctaaatgcccagttcacttctttgcagagccttttacccctgcacagtttagaacagagggaccaaattgcttctaggagtcaactggctggccagtctgggtctgggtttggatctccaattgcctcttgcaggctgagtccctccatgcaaaagtggggctaaatgaagtgtgttaaggggtcggctaagtgggacattagtaactgcacactatttccctctactgagtaaaccctatctgtgattcccccaaacatctggcatggctcccttttgtccttcctgtgccctgcaaatattagcaaagaagcttcatgccaggttaggaaggcagcattccatgaccagaaacagggacaaagaaatccccccttcagaacagaggcatttaaaatggaaaagagagattggattttggtgggtaacttagaaggatggcatctccatgtagaataaatgaagaaagggaggcccagccgcaggaaggcagaataaatccttgggagtcattaccacgccttgaccttcccaaggttactcagcagcagagagccctgggtgacttcaggtggagagcactagaagtggtttcctgataacaagcaaggatatcagagctgggaaattcatgtggatctggggactgagtgtgggagtgcagagaaagaaagggaaactggctgaggggataccataaaaagaggatgatttcagaaggagaaggaaaaagaaagtaatgccacacattgtgcttggcccctggtaagcagaggctttggggtcctagcccagtgcttctccaacactgaagtgcttgcagatcatctggggacctggtttgaatggagattctgattcagtgggttgggggcagagtttctgcagttccatcaggtcccccccaggtgcaggtgctgacaatactgctgccttacccgccatacattaaggagcagggtcctggtcctaaagagttattcaaatgaaggtggttcgacgccccgaacctcacctgacctcaactaacccttaaaaatgcacacctcatgagtctacctgagcattcaggcagcactgacaatagttatgcctgtactaaggagcatgattttaagaggctttggcccaatgcctataaaatgcccatttcgaagatatacaaaaacatacttcaaaaatgttaaacccttaccaacagcttttcccaggagaccatttgtattaccattacttgtataaatacacttcctgcttaaacttgacccaggtggctagcaaattagaaacaccattcatctctaacatatgatactgatgccatgtaaaggcctttaataagtcattgaaatttactgtgagactgtatgttttaattgcatttaaaaatatatagcttgaaagcagttaaactgattagtattcaggcactgagaatgatagtaataggatacaatgtataagctactcacttatctgatacttatttacctataaaatgagatttttgttttccactgtgctattacaaattttcttttgaaagtaggaactcttaagcaatggtaattgtgaataaaaattgatgagagtgttagctcctgtttcatatgaaattgaagtaattgttaactaaaaacaattccttagtaactgaactgtcatatttagaatggaaggaaaatgacagtttgtgaaagttcaaagcaatagtgcaattgaagaattgacctaagtaagctgacattatggttaataatagtattttagatttgtgcagcaaaataatttcataacttttttgtttttgttacttggataagatcaatctgttttattttagtaaatctttgcaggcaagttagagaaaatgcagtgtggcttaacgtctctttagtatgaagatttggccagaaaaagatacccagagaggaaatctaagataattataatggtccatactttttattgtatgaatcaaactcaagcataacattggccaaggaaaattaaataccattgctaacttgtgaaatggaagtctgtgatttcggagatgcaaagcattgtagtaaaaacaccaatgtgacctcgaccatctcagcccagatatcattcatatatctgttcaatgactattaaggtgcctactgtgtgctaggcactgtactggatactggggaccttgtctgtctggtttgctgctgtatcttctcccagggcattatatttatgatgaaagatgctgtggattcaattctttcagtcaagaataaacacagactttgtaggttcctgctgaataaagcaaatcccagaaacccagattttggaagaatcagcaaccccagcataaaataaacccctatcaaaatgtcagaggacatggcaaggtaaacttagcattttcaactttagaaccgggtcagcttcagggggactgctttcaaatcagccaaagagcctgtcagatcttcttagaaggaagaggttggtagttccctgctctgttttgaacatgctctagtttattaacctggggacattcccattgctgtcttaagtaagtctcatagccagctcctgtcacgtgactctcatatggattcattttcgggccagctctgaacaaagcatcatgaacatatgtgcttttggtcgtttgcaatgtgatggtggtggaggtaggtattggtttccttggaaggcatgataagaaagattcacaatggccaacagtgtgtatgaacaaaaaactgattggagcatcagctagtactgaaggtccttgctttgtgtcagaggcaaaggaacccaaggcgccaagtcctcagccttgagtgtactgctgacaactaaactcacaggctgcaaagcagacctctgatgaagatgcctgttatttcacatcactgtctttttgtgtatcatagtctgcaccttacaaatattaataaatgttccaataataggtgaaaaaaaaaa

SEQ ID NO: 91984 - DNA, 3875 bp, Artificial Sequence
  derived and/or modified sequence
acatgagagggggagaaataaatatacagtgcttgtccttagcctttctgtgggcataccagtgtcagctgcacttgtaggggcccaagtgcctcatgacccactcggcagccttcctctccaggatccccaaggctaggaggccaacctactaacagcagcctgcctgcagctgtcctggtagaacagtgtggacattgcagaagctgtcactgccccagaaagaaagcaccccagagccaaggcaaagagtcttgaaagcgccacaagcagcagctgctgagccatggctgaaggggaaatcaccaccttcacagccctgaccgagaagtttaatctgcctccagggaattacaagaagcccaaactcctctactgtagcaacgggggccacttcctgaggatccttccggatggcacagtggatgggacaagggacaggagcgaccagcacattcagctgcagctcagtgcggaaagcgtgggggaggtgtatataaagagtaccgagactggccagtacttggccatggacaccgacgggcttttatacggctcacagacaccaaatgaggaatgtttgttcctggaaaggctggaggagaaccattacaacacctatatatccaagaagcatgcagagaagaattggtttgttggcctcaagaagaatgggagctgcaaacgcggtcctcggactcactatggccagaaagcaatcttgtttctccccctgccagtctcttctgattaaagagatctgttctgggtgttgaccactccagagaagtttcgaggggtcctcacctggttgacccaaaaatgttcccttgaccattggctgcgctaacccccagcccacagagcctgaatttgtaagcaacttgcttctaaatgcccagttcacttctttgcagagccttttacccctgcacagtttagaacagagggaccaaattgcttctaggagtcaactggctggccagtctgggtctgggtttggatctccaattgcctcttgcaggctgagtccctccatgcaaaagtggggctaaatgaagtgtgttaaggggtcggctaagtgggacattagtaactgcacactatttccctctactgagtaaaccctatctgtgattcccccaaacatctggcatggctcccttttgtccttcctgtgccctgcaaatattagcaaagaagcttcatgccaggttaggaaggcagcattccatgaccagaaacagggacaaagaaatccccccttcagaacagaggcatttaaaatggaaaagagagattggattttggtgggtaacttagaaggatggcatctccatgtagaataaatgaagaaagggaggcccagccgcaggaaggcagaataaatccttgggagtcattaccacgccttgaccttcccaaggttactcagcagcagagagccctgggtgacttcaggtggagagcactagaagtggtttcctgataacaagcaaggatatcagagctgggaaattcatgtggatctggggactgagtgtgggagtgcagagaaagaaagggaaactggctgaggggataccataaaaagaggatgatttcagaaggagaaggaaaaagaaagtaatgccacacattgtgcttggcccctggtaagcagaggctttggggtcctagcccagtgcttctccaacactgaagtgcttgcagatcatctggggacctggtttgaatggagattctgattcagtgggttgggggcagagtttctgcagttccatcaggtcccccccaggtgcaggtgctgacaatactgctgccttacccgccatacattaaggagcagggtcctggtcctaaagagttattcaaatgaaggtggttcgacgccccgaacctcacctgacctcaactaacccttaaaaatgcacacctcatgagtctacctgagcattcaggcagcactgacaatagttatgcctgtactaaggagcatgattttaagaggctttggcccaatgcctataaaatgcccatttcgaagatatacaaaaacatacttcaaaaatgttaaacccttaccaacagcttttcccaggagaccatttgtattaccattacttgtataaatacacttcctgcttaaacttgacccaggtggctagcaaattagaaacaccattcatctctaacatatgatactgatgccatgtaaaggcctttaataagtcattgaaatttactgtgagactgtatgttttaattgcatttaaaaatatatagcttgaaagcagttaaactgattagtattcaggcactgagaatgatagtaataggatacaatgtataagctactcacttatctgatacttatttacctataaaatgagatttttgttttccactgtgctattacaaattttcttttgaaagtaggaactcttaagcaatggtaattgtgaataaaaattgatgagagtgttagctcctgtttcatatgaaattgaagtaattgttaactaaaaacaattccttagtaactgaactgtcatatttagaatggaaggaaaatgacagtttgtgaaagttcaaagcaatagtgcaattgaagaattgacctaagtaagctgacattatggttaataatagtattttagatttgtgcagcaaaataatttcataacttttttgtttttgttacttggataagatcaatctgttttattttagtaaatctttgcaggcaagttagagaaaatgcagtgtggcttaacgtctctttagtatgaagatttggccagaaaaagatacccagagaggaaatctaagataattataatggtccatactttttattgtatgaatcaaactcaagcataacattggccaaggaaaattaaataccattgctaacttgtgaaatggaagtctgtgatttcggagatgcaaagcattgtagtaaaaacaccaatgtgacctcgaccatctcagcccagatatcattcatatatctgttcaatgactattaaggtgcctactgtgtgctaggcactgtactggatactggggaccttgtctgtctggtttgctgctgtatcttctcccagggcattatatttatgatgaaagatgctgtggattcaattctttcagtcaagaataaacacagactttgtaggttcctgctgaataaagcaaatcccagaaacccagattttggaagaatcagcaaccccagcataaaataaacccctatcaaaatgtcagaggacatggcaaggtaaacttagcattttcaactttagaaccgggtcagcttcagggggactgctttcaaatcagccaaagagcctgtcagatcttcttagaaggaagaggttggtagttccctgctctgttttgaacatgctctagtttattaacctggggacattcccattgctgtcttaagtaagtctcatagccagctcctgtcacgtgactctcatatggattcattttcgggccagctctgaacaaagcatcatgaacatatgtgcttttggtcgtttgcaatgtgatggtggtggaggtaggtattggtttccttggaaggcatgataagaaagattcacaatggccaacagtgtgtatgaacaaaaaactgattggagcatcagctagtactgaaggtccttgctttgtgtcagaggcaaaggaacccaaggcgccaagtcctcagccttgagtgtactgctgacaactaaactcacaggctgcaaagcagacctctgatgaagatgcctgttatttcacatcactgtctttttgtgtatcatagtctgcaccttacaaatattaataaatgttccaataataggtgaaaaaaaaaa

SEQ ID NO: 91985 - DNA, 3781 bp, Artificial Sequence
  derived and/or modified sequence
acatgagagggggagaaataaatatacagtgcttgtccttagcctttctgtgggcataccagtgtcagctgcacttgtaggggcccaagtgcctcatgacccactcggcagccttcctctccaggatccccaaggctaggaggccaacctactaacagtcttgaaagcgccacaagcagcagctgctgagccatggctgaaggggaaatcaccaccttcacagccctgaccgagaagtttaatctgcctccagggaattacaagaagcccaaactcctctactgtagcaacgggggccacttcctgaggatccttccggatggcacagtggatgggacaagggacaggagcgaccagcacattcagctgcagctcagtgcggaaagcgtgggggaggtgtatataaagagtaccgagactggccagtacttggccatggacaccgacgggcttttatacggctcacagacaccaaatgaggaatgtttgttcctggaaaggctggaggagaaccattacaacacctatatatccaagaagcatgcagagaagaattggtttgttggcctcaagaagaatgggagctgcaaacgcggtcctcggactcactatggccagaaagcaatcttgtttctccccctgccagtctcttctgattaaagagatctgttctgggtgttgaccactccagagaagtttcgaggggtcctcacctggttgacccaaaaatgttcccttgaccattggctgcgctaacccccagcccacagagcctgaatttgtaagcaacttgcttctaaatgcccagttcacttctttgcagagccttttacccctgcacagtttagaacagagggaccaaattgcttctaggagtcaactggctggccagtctgggtctgggtttggatctccaattgcctcttgcaggctgagtccctccatgcaaaagtggggctaaatgaagtgtgttaaggggtcggctaagtgggacattagtaactgcacactatttccctctactgagtaaaccctatctgtgattcccccaaacatctggcatggctcccttttgtccttcctgtgccctgcaaatattagcaaagaagcttcatgccaggttaggaaggcagcattccatgaccagaaacagggacaaagaaatccccccttcagaacagaggcatttaaaatggaaaagagagattggattttggtgggtaacttagaaggatggcatctccatgtagaataaatgaagaaagggaggcccagccgcaggaaggcagaataaatccttgggagtcattaccacgccttgaccttcccaaggttactcagcagcagagagccctgggtgacttcaggtggagagcactagaagtggtttcctgataacaagcaaggatatcagagctgggaaattcatgtggatctggggactgagtgtgggagtgcagagaaagaaagggaaactggctgaggggataccataaaaagaggatgatttcagaaggagaaggaaaaagaaagtaatgccacacattgtgcttggcccctggtaagcagaggctttggggtcctagcccagtgcttctccaacactgaagtgcttgcagatcatctggggacctggtttgaatggagattctgattcagtgggttgggggcagagtttctgcagttccatcaggtcccccccaggtgcaggtgctgacaatactgctgccttacccgccatacattaaggagcagggtcctggtcctaaagagttattcaaatgaaggtggttcgacgccccgaacctcacctgacctcaactaacccttaaaaatgcacacctcatgagtctacctgagcattcaggcagcactgacaatagttatgcctgtactaaggagcatgattttaagaggctttggcccaatgcctataaaatgcccatttcgaagatatacaaaaacatacttcaaaaatgttaaacccttaccaacagcttttcccaggagaccatttgtattaccattacttgtataaatacacttcctgcttaaacttgacccaggtggctagcaaattagaaacaccattcatctctaacatatgatactgatgccatgtaaaggcctttaataagtcattgaaatttactgtgagactgtatgttttaattgcatttaaaaatatatagcttgaaagcagttaaactgattagtattcaggcactgagaatgatagtaataggatacaatgtataagctactcacttatctgatacttatttacctataaaatgagatttttgttttccactgtgctattacaaattttcttttgaaagtaggaactcttaagcaatggtaattgtgaataaaaattgatgagagtgttagctcctgtttcatatgaaattgaagtaattgttaactaaaaacaattccttagtaactgaactgtcatatttagaatggaaggaaaatgacagtttgtgaaagttcaaagcaatagtgcaattgaagaattgacctaagtaagctgacattatggttaataatagtattttagatttgtgcagcaaaataatttcataacttttttgtttttgttacttggataagatcaatctgttttattttagtaaatctttgcaggcaagttagagaaaatgcagtgtggcttaacgtctctttagtatgaagatttggccagaaaaagatacccagagaggaaatctaagataattataatggtccatactttttattgtatgaatcaaactcaagcataacattggccaaggaaaattaaataccattgctaacttgtgaaatggaagtctgtgatttcggagatgcaaagcattgtagtaaaaacaccaatgtgacctcgaccatctcagcccagatatcattcatatatctgttcaatgactattaaggtgcctactgtgtgctaggcactgtactggatactggggaccttgtctgtctggtttgctgctgtatcttctcccagggcattatatttatgatgaaagatgctgtggattcaattctttcagtcaagaataaacacagactttgtaggttcctgctgaataaagcaaatcccagaaacccagattttggaagaatcagcaaccccagcataaaataaacccctatcaaaatgtcagaggacatggcaaggtaaacttagcattttcaactttagaaccgggtcagcttcagggggactgctttcaaatcagccaaagagcctgtcagatcttcttagaaggaagaggttggtagttccctgctctgttttgaacatgctctagtttattaacctggggacattcccattgctgtcttaagtaagtctcatagccagctcctgtcacgtgactctcatatggattcattttcgggccagctctgaacaaagcatcatgaacatatgtgcttttggtcgtttgcaatgtgatggtggtggaggtaggtattggtttccttggaaggcatgataagaaagattcacaatggccaacagtgtgtatgaacaaaaaactgattggagcatcagctagtactgaaggtccttgctttgtgtcagaggcaaaggaacccaaggcgccaagtcctcagccttgagtgtactgctgacaactaaactcacaggctgcaaagcagacctctgatgaagatgcctgttatttcacatcactgtctttttgtgtatcatagtctgcaccttacaaatattaataaatgttccaataataggtgaaaaaaaaaa

SEQ ID NO: 91986 - DNA, 4050 bp, Artificial Sequence
  derived and/or modified sequence
attcggctcacacatttgccccaagacaaaccacgttaaaataacacccagggtagctgctgccaccgtcttctgtctctacctccctcctggctggccaatggctctgtgttcctgggcctgctgctggctgtccagagtaggggttgcttagagctgtgtgcatccctgcgggtggtgtgggagtgggcggttgtctaaaggcaggtcccctctactgataaacaaggaccggagatagacctagaggctgacattcttggctcccccagcctacaccccccccacctcgatttcccacagagccctagggacgggtagccagctctgtggcatggtatctggaggcaggccagcaacctgatgtgcatgccacggcccgtccctctccccactcagagctgcagtagcctggaggttcagagagccgggctactctgagaagaagacaccaagtggattctgcttcccctgggacagcactgagcgagtgtggagagaggtacagccctcggcctacaagctctttagtcttgaaagcgccacaagcagcagctgctgagccatggctgaaggggaaatcaccaccttcacagccctgaccgagaagtttaatctgcctccagggaattacaagaagcccaaactcctctactgtagcaacgggggccacttcctgaggatccttccggatggcacagtggatgggacaagggacaggagcgaccagcacacagacaccaaatgaggaatgtttgttcctggaaaggctggaggagaaccattacaacacctatatatccaagaagcatgcagagaagaattggtttgttggcctcaagaagaatgggagctgcaaacgcggtcctcggactcactatggccagaaagcaatcttgtttctccccctgccagtctcttctgattaaagagatctgttctgggtgttgaccactccagagaagtttcgaggggtcctcacctggttgacccaaaaatgttcccttgaccattggctgcgctaacccccagcccacagagcctgaatttgtaagcaacttgcttctaaatgcccagttcacttctttgcagagccttttacccctgcacagtttagaacagagggaccaaattgcttctaggagtcaactggctggccagtctgggtctgggtttggatctccaattgcctcttgcaggctgagtccctccatgcaaaagtggggctaaatgaagtgtgttaaggggtcggctaagtgggacattagtaactgcacactatttccctctactgagtaaaccctatctgtgattcccccaaacatctggcatggctcccttttgtccttcctgtgccctgcaaatattagcaaagaagcttcatgccaggttaggaaggcagcattccatgaccagaaacagggacaaagaaatccccccttcagaacagaggcatttaaaatggaaaagagagattggattttggtgggtaacttagaaggatggcatctccatgtagaataaatgaagaaagggaggcccagccgcaggaaggcagaataaatccttgggagtcattaccacgccttgaccttcccaaggttactcagcagcagagagccctgggtgacttcaggtggagagcactagaagtggtttcctgataacaagcaaggatatcagagctgggaaattcatgtggatctggggactgagtgtgggagtgcagagaaagaaagggaaactggctgaggggataccataaaaagaggatgatttcagaaggagaaggaaaaagaaagtaatgccacacattgtgcttggcccctggtaagcagaggctttggggtcctagcccagtgcttctccaacactgaagtgcttgcagatcatctggggacctggtttgaatggagattctgattcagtgggttgggggcagagtttctgcagttccatcaggtcccccccaggtgcaggtgctgacaatactgctgccttacccgccatacattaaggagcagggtcctggtcctaaagagttattcaaatgaaggtggttcgacgccccgaacctcacctgacctcaactaacccttaaaaatgcacacctcatgagtctacctgagcattcaggcagcactgacaatagttatgcctgtactaaggagcatgattttaagaggctttggcccaatgcctataaaatgcccatttcgaagatatacaaaaacatacttcaaaaatgttaaacccttaccaacagcttttcccaggagaccatttgtattaccattacttgtataaatacacttcctgcttaaacttgacccaggtggctagcaaattagaaacaccattcatctctaacatatgatactgatgccatgtaaaggcctttaataagtcattgaaatttactgtgagactgtatgttttaattgcatttaaaaatatatagcttgaaagcagttaaactgattagtattcaggcactgagaatgatagtaataggatacaatgtataagctactcacttatctgatacttatttacctataaaatgagatttttgttttccactgtgctattacaaattttcttttgaaagtaggaactcttaagcaatggtaattgtgaataaaaattgatgagagtgttagctcctgtttcatatgaaattgaagtaattgttaactaaaaacaattccttagtaactgaactgtcatatttagaatggaaggaaaatgacagtttgtgaaagttcaaagcaatagtgcaattgaagaattgacctaagtaagctgacattatggttaataatagtattttagatttgtgcagcaaaataatttcataacttttttgtttttgttacttggataagatcaatctgttttattttagtaaatctttgcaggcaagttagagaaaatgcagtgtggcttaacgtctctttagtatgaagatttggccagaaaaagatacccagagaggaaatctaagataattataatggtccatactttttattgtatgaatcaaactcaagcataacattggccaaggaaaattaaataccattgctaacttgtgaaatggaagtctgtgatttcggagatgcaaagcattgtagtaaaaacaccaatgtgacctcgaccatctcagcccagatatcattcatatatctgttcaatgactattaaggtgcctactgtgtgctaggcactgtactggatactggggaccttgtctgtctggtttgctgctgtatcttctcccagggcattatatttatgatgaaagatgctgtggattcaattctttcagtcaagaataaacacagactttgtaggttcctgctgaataaagcaaatcccagaaacccagattttggaagaatcagcaaccccagcataaaataaacccctatcaaaatgtcagaggacatggcaaggtaaacttagcattttcaactttagaaccgggtcagcttcagggggactgctttcaaatcagccaaagagcctgtcagatcttcttagaaggaagaggttggtagttccctgctctgttttgaacatgctctagtttattaacctggggacattcccattgctgtcttaagtaagtctcatagccagctcctgtcacgtgactctcatatggattcattttcgggccagctctgaacaaagcatcatgaacatatgtgcttttggtcgtttgcaatgtgatggtggtggaggtaggtattggtttccttggaaggcatgataagaaagattcacaatggccaacagtgtgtatgaacaaaaaactgattggagcatcagctagtactgaaggtccttgctttgtgtcagaggcaaaggaacccaaggcgccaagtcctcagccttgagtgtactgctgacaactaaactcacaggctgcaaagcagacctctgatgaagatgcctgttatttcacatcactgtctttttgtgtatcatagtctgcaccttacaaatattaataaatgttccaataataggtgaaaaaaaaaa

SEQ ID NO: 91987 - DNA, 3516 bp, Artificial Sequence
  derived and/or modified sequence
tcttgaaagcgccacaagcagcagctgctgagccatggctgaaggggaaatcaccaccttcacagccctgaccgagaagtttaatctgcctccagggaattacaagaagcccaaactcctctactgtagcaacgggggccacttcctgaggatccttccggatggcacagtggatgggacaagggacaggagcgaccagcacaacaccaaatgaggaatgtttgttcctggaaaggctggaggagaaccattacaacacctatatatccaagaagcatgcagagaagaattggtttgttggcctcaagaagaatgggagctgcaaacgcggtcctcggactcactatggccagaaagcaatcttgtttctccccctgccagtctcttctgattaaagagatctgttctgggtgttgaccactccagagaagtttcgaggggtcctcacctggttgacccaaaaatgttcccttgaccattggctgcgctaacccccagcccacagagcctgaatttgtaagcaacttgcttctaaatgcccagttcacttctttgcagagccttttacccctgcacagtttagaacagagggaccaaattgcttctaggagtcaactggctggccagtctgggtctgggtttggatctccaattgcctcttgcaggctgagtccctccatgcaaaagtggggctaaatgaagtgtgttaaggggtcggctaagtgggacattagtaactgcacactatttccctctactgagtaaaccctatctgtgattcccccaaacatctggcatggctcccttttgtccttcctgtgccctgcaaatattagcaaagaagcttcatgccaggttaggaaggcagcattccatgaccagaaacagggacaaagaaatccccccttcagaacagaggcatttaaaatggaaaagagagattggattttggtgggtaacttagaaggatggcatctccatgtagaataaatgaagaaagggaggcccagccgcaggaaggcagaataaatccttgggagtcattaccacgccttgaccttcccaaggttactcagcagcagagagccctgggtgacttcaggtggagagcactagaagtggtttcctgataacaagcaaggatatcagagctgggaaattcatgtggatctggggactgagtgtgggagtgcagagaaagaaagggaaactggctgaggggataccataaaaagaggatgatttcagaaggagaaggaaaaagaaagtaatgccacacattgtgcttggcccctggtaagcagaggctttggggtcctagcccagtgcttctccaacactgaagtgcttgcagatcatctggggacctggtttgaatggagattctgattcagtgggttgggggcagagtttctgcagttccatcaggtcccccccaggtgcaggtgctgacaatactgctgccttacccgccatacattaaggagcagggtcctggtcctaaagagttattcaaatgaaggtggttcgacgccccgaacctcacctgacctcaactaacccttaaaaatgcacacctcatgagtctacctgagcattcaggcagcactgacaatagttatgcctgtactaaggagcatgattttaagaggctttggcccaatgcctataaaatgcccatttcgaagatatacaaaaacatacttcaaaaatgttaaacccttaccaacagcttttcccaggagaccatttgtattaccattacttgtataaatacacttcctgcttaaacttgacccaggtggctagcaaattagaaacaccattcatctctaacatatgatactgatgccatgtaaaggcctttaataagtcattgaaatttactgtgagactgtatgttttaattgcatttaaaaatatatagcttgaaagcagttaaactgattagtattcaggcactgagaatgatagtaataggatacaatgtataagctactcacttatctgatacttatttacctataaaatgagatttttgttttccactgtgctattacaaattttcttttgaaagtaggaactcttaagcaatggtaattgtgaataaaaattgatgagagtgttagctcctgtttcatatgaaattgaagtaattgttaactaaaaacaattccttagtaactgaactgtcatatttagaatggaaggaaaatgacagtttgtgaaagttcaaagcaatagtgcaattgaagaattgacctaagtaagctgacattatggttaataatagtattttagatttgtgcagcaaaataatttcataacttttttgtttttgttacttggataagatcaatctgttttattttagtaaatctttgcaggcaagttagagaaaatgcagtgtggcttaacgtctctttagtatgaagatttggccagaaaaagatacccagagaggaaatctaagataattataatggtccatactttttattgtatgaatcaaactcaagcataacattggccaaggaaaattaaataccattgctaacttgtgaaatggaagtctgtgatttcggagatgcaaagcattgtagtaaaaacaccaatgtgacctcgaccatctcagcccagatatcattcatatatctgttcaatgactattaaggtgcctactgtgtgctaggcactgtactggatactggggaccttgtctgtctggtttgctgctgtatcttctcccagggcattatatttatgatgaaagatgctgtggattcaattctttcagtcaagaataaacacagactttgtaggttcctgctgaataaagcaaatcccagaaacccagattttggaagaatcagcaaccccagcataaaataaacccctatcaaaatgtcagaggacatggcaaggtaaacttagcattttcaactttagaaccgggtcagcttcagggggactgctttcaaatcagccaaagagcctgtcagatcttcttagaaggaagaggttggtagttccctgctctgttttgaacatgctctagtttattaacctggggacattcccattgctgtcttaagtaagtctcatagccagctcctgtcacgtgactctcatatggattcattttcgggccagctctgaacaaagcatcatgaacatatgtgcttttggtcgtttgcaatgtgatggtggtggaggtaggtattggtttccttggaaggcatgataagaaagattcacaatggccaacagtgtgtatgaacaaaaaactgattggagcatcagctagtactgaaggtccttgctttgtgtcagaggcaaaggaacccaaggcgccaagtcctcagccttgagtgtactgctgacaactaaactcacaggctgcaaagcagacctctgatgaagatgcctgttatttcacatcactgtctttttgtgtatcatagtctgcaccttacaaatattaataaatgttccaataataggtgaaaaaaaaaa

SEQ ID NO: 91988 - DNA, 3755 bp, Artificial Sequence
  derived and/or modified sequence
agctgcagtagcctggaggttcagagagccgggctactctgagaagaagacaccaagtggattctgcttcccctgggacagcactgagcgagtgtggagagaggtacagccctcggcctacaagctctttagtcttgaaagcgccacaagcagcagctgctgagccatggctgaaggggaaatcaccaccttcacagccctgaccgagaagtttaatctgcctccagggaattacaagaagcccaaactcctctactgtagcaacgggggccacttcctgaggatccttccggatggcacagtggatgggacaagggacaggagcgaccagcacattcagctgcagctcagtgcggaaagcgtgggggaggtgtatataaagagtaccgagactggccagtacttggccatggacaccgacgggcttttatacggctcacagacaccaaatgaggaatgtttgttcctggaaaggctggaggagaaccattacaacacctatatatccaagaagcatgcagagaagaattggtttgttggcctcaagaagaatgggagctgcaaacgcggtcctcggactcactatggccagaaagcaatcttgtttctccccctgccagtctcttctgattaaagagatctgttctgggtgttgaccactccagagaagtttcgaggggtcctcacctggttgacccaaaaatgttcccttgaccattggctgcgctaacccccagcccacagagcctgaatttgtaagcaacttgcttctaaatgcccagttcacttctttgcagagccttttacccctgcacagtttagaacagagggaccaaattgcttctaggagtcaactggctggccagtctgggtctgggtttggatctccaattgcctcttgcaggctgagtccctccatgcaaaagtggggctaaatgaagtgtgttaaggggtcggctaagtgggacattagtaactgcacactatttccctctactgagtaaaccctatctgtgattcccccaaacatctggcatggctcccttttgtccttcctgtgccctgcaaatattagcaaagaagcttcatgccaggttaggaaggcagcattccatgaccagaaacagggacaaagaaatccccccttcagaacagaggcatttaaaatggaaaagagagattggattttggtgggtaacttagaaggatggcatctccatgtagaataaatgaagaaagggaggcccagccgcaggaaggcagaataaatccttgggagtcattaccacgccttgaccttcccaaggttactcagcagcagagagccctgggtgacttcaggtggagagcactagaagtggtttcctgataacaagcaaggatatcagagctgggaaattcatgtggatctggggactgagtgtgggagtgcagagaaagaaagggaaactggctgaggggataccataaaaagaggatgatttcagaaggagaaggaaaaagaaagtaatgccacacattgtgcttggcccctggtaagcagaggctttggggtcctagcccagtgcttctccaacactgaagtgcttgcagatcatctggggacctggtttgaatggagattctgattcagtgggttgggggcagagtttctgcagttccatcaggtcccccccaggtgcaggtgctgacaatactgctgccttacccgccatacattaaggagcagggtcctggtcctaaagagttattcaaatgaaggtggttcgacgccccgaacctcacctgacctcaactaacccttaaaaatgcacacctcatgagtctacctgagcattcaggcagcactgacaatagttatgcctgtactaaggagcatgattttaagaggctttggcccaatgcctataaaatgcccatttcgaagatatacaaaaacatacttcaaaaatgttaaacccttaccaacagcttttcccaggagaccatttgtattaccattacttgtataaatacacttcctgcttaaacttgacccaggtggctagcaaattagaaacaccattcatctctaacatatgatactgatgccatgtaaaggcctttaataagtcattgaaatttactgtgagactgtatgttttaattgcatttaaaaatatatagcttgaaagcagttaaactgattagtattcaggcactgagaatgatagtaataggatacaatgtataagctactcacttatctgatacttatttacctataaaatgagatttttgttttccactgtgctattacaaattttcttttgaaagtaggaactcttaagcaatggtaattgtgaataaaaattgatgagagtgttagctcctgtttcatatgaaattgaagtaattgttaactaaaaacaattccttagtaactgaactgtcatatttagaatggaaggaaaatgacagtttgtgaaagttcaaagcaatagtgcaattgaagaattgacctaagtaagctgacattatggttaataatagtattttagatttgtgcagcaaaataatttcataacttttttgtttttgttacttggataagatcaatctgttttattttagtaaatctttgcaggcaagttagagaaaatgcagtgtggcttaacgtctctttagtatgaagatttggccagaaaaagatacccagagaggaaatctaagataattataatggtccatactttttattgtatgaatcaaactcaagcataacattggccaaggaaaattaaataccattgctaacttgtgaaatggaagtctgtgatttcggagatgcaaagcattgtagtaaaaacaccaatgtgacctcgaccatctcagcccagatatcattcatatatctgttcaatgactattaaggtgcctactgtgtgctaggcactgtactggatactggggaccttgtctgtctggtttgctgctgtatcttctcccagggcattatatttatgatgaaagatgctgtggattcaattctttcagtcaagaataaacacagactttgtaggttcctgctgaataaagcaaatcccagaaacccagattttggaagaatcagcaaccccagcataaaataaacccctatcaaaatgtcagaggacatggcaaggtaaacttagcattttcaactttagaaccgggtcagcttcagggggactgctttcaaatcagccaaagagcctgtcagatcttcttagaaggaagaggttggtagttccctgctctgttttgaacatgctctagtttattaacctggggacattcccattgctgtcttaagtaagtctcatagccagctcctgtcacgtgactctcatatggattcattttcgggccagctctgaacaaagcatcatgaacatatgtgcttttggtcgtttgcaatgtgatggtggtggaggtaggtattggtttccttggaaggcatgataagaaagattcacaatggccaacagtgtgtatgaacaaaaaactgattggagcatcagctagtactgaaggtccttgctttgtgtcagaggcaaaggaacccaaggcgccaagtcctcagccttgagtgtactgctgacaactaaactcacaggctgcaaagcagacctctgatgaagatgcctgttatttcacatcactgtctttttgtgtatcatagtctgcaccttacaaatattaataaatgttccaataataggtgaaaaaaaaaa

SEQ ID NO: 91989 - DNA, 468 bp, Artificial Sequence
  derived and/or modified sequence
atggccgagggcgagatcaccaccttcaccgccctgaccgagaagttcaacctgccccccggcaactacaagaagcccaagctgctgtactgcagcaacggcggccacttcctgagaatcctgcccgacggcaccgtggacggcaccagagacagaagcgaccagcacatccagctgcagctgagcgccgagagcgtgggcgaggtgtacatcaagagcaccgagaccggccagtacctggccatggacaccgacggcctgctgtacggcagccagacccccaacgaggagtgcctgttcctggagagactggaggagaaccactacaacacctacatcagcaagaagcacgccgagaagaactggttcgtgggcctgaagaagaacggcagctgcaagagaggccccagaacccactacggccagaaggccatcctgttcctgcccctgcccgtgagcagcgactag

SEQ ID NO: 91990 - DNA, 468 bp, Artificial Sequence
  derived and/or modified sequence
atggccgagggcgaaatcaccaccttcacagcgttgacagaaaagttcaatctgccccctgggaattacaaaaagcctaagctcctgtattgctccaacggaggacacttcttgcgcattctaccagacgggaccgttgatggaacgcgcgacagaagtgaccagcatatccagcttcagctatccgctgagagcgtgggcgaagtgtatatcaagtccactgaaactgggcagtacttagccatggacactgacggcttgttgtacggaagccagactcccaatgaggagtgtttgttcctagagcgcctggaggagaaccactataatacgtacataagcaagaagcatgcagaaaaaaattggttcgtcggtcttaagaagaatgggtcttgcaagaggggcccgcggacacactatggacagaaagcaatcctgttcctccccctccctgtctcctcggactag

SEQ ID NO: 91991 - DNA, 468 bp, Artificial Sequence
  derived and/or modified sequence
atggcggagggcgagataactacattcacagcactgacagaaaaattcaatctgcctccaggcaactacaaaaaaccaaaactgctttactgctctaatggtggccacttcctacgtatcctgcccgacggcacagttgatgggacccgcgatcgctccgatcaacatattcaactgcagctgagtgccgaatcagtgggtgaggtctatattaaaagtacggaaacgggccagtatctggccatggacaccgatggcttgctttatggcagtcagactcccaatgaagaatgcttattccttgagaggctcgaggaaaaccattataatacctacatttcaaagaaacatgcggaaaaaaattggttcgttgggctcaagaaaaacggctcatgcaagcgcggtcctcgcacacattacggacaaaaagcgattctctttctacctttgccggtgtcatccgactag

SEQ ID NO: 91992 - DNA, 468 bp, Artificial Sequence
  derived and/or modified sequence
atggccgaaggggaaattactacatttaccgcactgaccgagaagttcaatttgccccccgggaattataaaaagccaaaactgttatattgttccaacggtggccattttttgagaattttgcccgatgggacagtcgatgggactagggaccgatccgatcagcacatccagctgcaattaagcgccgagagcgtcggtgaggtatatatcaagtcaaccgagacaggtcagtacctcgcaatggacacagacggactactgtacggaagtcagacccccaatgaagagtgtcttttcctcgaacggctcgaagaaaaccattataatacctatataagcaagaagcacgctgagaagaactggtttgtcggcctgaagaagaatggttcatgtaaacgagggccgagaactcactatggacaaaaggccattctgtttttgccacttcccgtatcgtcagattag

SEQ ID NO: 91993 - DNA, 468 bp, Artificial Sequence
  derived and/or modified sequence
atggctgagggggagatcacaacctttacggccctcacagaaaaatttaacctccctccagggaactacaaaaaacctaagctgctgtattgtagcaatggcggccactttctgcggatcctgcctgacgggacagtcgacggcacgagagataggtcagaccaacacattcagctgcagctttccgcagagtctgtgggcgaagtgtacattaaaagcacggagaccggacagtacctggcaatggacacagacggattgctgtacggatctcagactcccaatgaagaatgcctttttttggaacgtctcgaagagaatcattataatacatacatctccaaaaagcacgccgaaaaaaattggttcgtcggactgaagaaaaatggatcttgcaaaaggggaccacgtacgcactatggccagaaggccatcctgttccttcccctgcccgtttcaagcgattag

SEQ ID NO: 91994 - DNA, 468 bp, Artificial Sequence
  derived and/or modified sequence
atggccgagggcgagatcaccacctttaccgctcttaccgagaagtttaacctgcctccaggaaattacaagaaaccgaagctactttactgtagtaatggaggccacttcctgaggatactcccggacggtaccgtcgacggcacccgcgaccgttctgaccagcacattcagcttcagttgagcgctgagagtgtgggagaagtgtacatcaaatctaccgagacgggtcagtacctcgcgatggatacagacggactgctgtacggcagccagacacccaatgaggagtgcttgtttttggaaagactcgaggaaaaccactataacacttacatctctaagaaacatgccgaaaaaaactggtttgtcggtctcaaaaagaatgggagctgcaagcgaggccccaggactcattacgggcagaaagctattttatttctgcccctgccggtgtcaagcgattag

SEQ ID NO: 91995 - DNA, 1469 bp, Artificial Sequence
  derived and/or modified sequence
ggctctgtgttcctgggcctgctgctggctgtccagagtaggggttgcttagagctgtgtgcatccctgcgggtggtgtgggagtgggcggttgtctaaaggcaggtcccctctactgataaacaaggaccggagatagacctagaggctgacattcttggctcccccagcctacaccccccccacctcgatttcccacagagccctagggacgggtagccagctctgtggcatggtatctggaggcaggccagcaacctgatgtgcatgccacggcccgtccctctccccactcagagctgcagtagcctggaggttcagagagccgggctactctgagaagaagacaccaagtggattctgcttcccctgggacagcactgagcgagtgtggagagaggtacagccctcggcctacaagctctttagtcttgaaagcgccacaagcagcagctgctgagccatggctgaaggggaaatcaccaccttcacagccctgaccgagaagtttaatctgcctccagggaattacaagaagcccaaactcctctactgtagcaacgggggccacttcctgaggatccttccggatggcacagtggatgggacaagggacaggagcgaccagcacattcagctgcagctcagtgcggaaagcgtgggggaggtgtatataaagagtaccgagactggccagtacttggccatggacaccgacgggcttttatacggctcacagacaccaaatgaggaatgtttgttcctggaaaggctggaggagaaccattacaacacctatatatccaagaagcatgcagagaagaattggtttgttggcctcaagaagaatgggagctgcaaacgcggtcctcggactcactatggccagaaagcaatcttgtttctccccctgccagtctcttctgattaaagagatctgttctgggtgttgaccactccagagaagtttcgaggggtcctcacctggttgacccaaaaatgttcccttgaccattggctgcgctaacccccagcccacagagcctgaatttgtaagcaacttgcttctaaatgcccagttcacttctttgcagagccttttacccctgcacagtttagaacagagggaccaaattgcttctaggagtcaactggctggccagtctgggtctgggtttggatctccaattgcctcttgcaggctgagtccctccatgcaaaagtggggctaaatgaagtgtgttaaggggtcggctaagtgggacattagtaactgcacactatttccctctactgagtaaaccctatctgtgattcccccaaacatctggcatggctcccttttgtccttcctgtgccctgcaaatattagcaaagaagcttcatgccaggttaggaaggcagcattccatgaccagaaacagggacaaagaaatccccccttcagaacagaggcatttaaaatggaa

SEQ ID NO: 91996 - DNA, 3660 bp, Artificial Sequence
  derived and/or modified sequence
gaaaaaatactgttggcagcagcacaatgtttgggctaagacctggtcttgaaagcgccacaagcagcagctgctgagccatggctgaaggggaaatcaccaccttcacagccctgaccgagaagtttaatctgcctccagggaattacaagaagcccaaactcctctactgtagcaacgggggccacttcctgaggatccttccggatggcacagtggatgggacaagggacaggagcgaccagcacattcagctgcagctcagtgcggaaagcgtgggggaggtgtatataaagagtaccgagactggccagtacttggccatggacaccgacgggcttttatacggctcacagacaccaaatgaggaatgtttgttcctggaaaggctggaggagaaccattacaacacctatatatccaagaagcatgcagagaagaattggtttgttggcctcaagaagaatgggagctgcaaacgcggtcctcggactcactatggccagaaagcaatcttgtttctccccctgccagtctcttctgattaaagagatctgttctgggtgttgaccactccagagaagtttcgaggggtcctcacctggttgacccaaaaatgttcccttgaccattggctgcgctaacccccagcccacagagcctgaatttgtaagcaacttgcttctaaatgcccagttcacttctttgcagagccttttacccctgcacagtttagaacagagggaccaaattgcttctaggagtcaactggctggccagtctgggtctgggtttggatctccaattgcctcttgcaggctgagtccctccatgcaaaagtggggctaaatgaagtgtgttaaggggtcggctaagtgggacattagtaactgcacactatttccctctactgagtaaaccctatctgtgattcccccaaacatctggcatggctcccttttgtccttcctgtgccctgcaaatattagcaaagaagcttcatgccaggttaggaaggcagcattccatgaccagaaacagggacaaagaaatccccccttcagaacagaggcatttaaaatggaaaagagagattggattttggtgggtaacttagaaggatggcatctccatgtagaataaatgaagaaagggaggcccagccgcaggaaggcagaataaatccttgggagtcattaccacgccttgaccttcccaaggttactcagcagcagagagccctgggtgacttcaggtggagagcactagaagtggtttcctgataacaagcaaggatatcagagctgggaaattcatgtggatctggggactgagtgtgggagtgcagagaaagaaagggaaactggctgaggggataccataaaaagaggatgatttcagaaggagaaggaaaaagaaagtaatgccacacattgtgcttggcccctggtaagcagaggctttggggtcctagcccagtgcttctccaacactgaagtgcttgcagatcatctggggacctggtttgaatggagattctgattcagtgggttgggggcagagtttctgcagttccatcaggtcccccccaggtgcaggtgctgacaatactgctgccttacccgccatacattaaggagcagggtcctggtcctaaagagttattcaaatgaaggtggttcgacgccccgaacctcacctgacctcaactaacccttaaaaatgcacacctcatgagtctacctgagcattcaggcagcactgacaatagttatgcctgtactaaggagcatgattttaagaggctttggcccaatgcctataaaatgcccatttcgaagatatacaaaaacatacttcaaaaatgttaaacccttaccaacagcttttcccaggagaccatttgtattaccattacttgtataaatacacttcctgcttaaacttgacccaggtggctagcaaattagaaacaccattcatctctaacatatgatactgatgccatgtaaaggcctttaataagtcattgaaatttactgtgagactgtatgttttaattgcatttaaaaatatatagcttgaaagcagttaaactgattagtattcaggcactgagaatgatagtaataggatacaatgtataagctactcacttatctgatacttatttacctataaaatgagatttttgttttccactgtgctattacaaattttcttttgaaagtaggaactcttaagcaatggtaattgtgaataaaaattgatgagagtgttagctcctgtttcatatgaaattgaagtaattgttaactaaaaacaattccttagtaactgaactgtcatatttagaatggaaggaaaatgacagtttgtgaaagttcaaagcaatagtgcaattgaagaattgacctaagtaagctgacattatggttaataatagtattttagatttgtgcagcaaaataatttcataacttttttgtttttgttacttggataagatcaatctgttttattttagtaaatctttgcaggcaagttagagaaaatgcagtgtggcttaacgtctctttagtatgaagatttggccagaaaaagatacccagagaggaaatctaagataattataatggtccatactttttattgtatgaatcaaactcaagcataacattggccaaggaaaattaaataccattgctaacttgtgaaatggaagtctgtgatttcggagatgcaaagcattgtagtaaaaacaccaatgtgacctcgaccatctcagcccagatatcattcatatatctgttcaatgactattaaggtgcctactgtgtgctaggcactgtactggatactggggaccttgtctgtctggtttgctgctgtatcttctcccagggcattatatttatgatgaaagatgctgtggattcaattctttcagtcaagaataaacacagactttgtaggttcctgctgaataaagcaaatcccagaaacccagattttggaagaatcagcaaccccagcataaaataaacccctatcaaaatgtcagaggacatggcaaggtaaacttagcattttcaactttagaaccgggtcagcttcagggggactgctttcaaatcagccaaagagcctgtcagatcttcttagaaggaagaggttggtagttccctgctctgttttgaacatgctctagtttattaacctggggacattcccattgctgtcttaagtaagtctcatagccagctcctgtcacgtgactctcatatggattcattttcgggccagctctgaacaaagcatcatgaacatatgtgcttttggtcgtttgcaatgtgatggtggtggaggtaggtattggtttccttggaaggcatgataagaaagattcacaatggccaacagtgtgtatgaacaaaaaactgattggagcatcagctagtactgaaggtccttgctttgtgtcagaggcaaaggaacccaaggcgccaagtcctcagccttgagtgtactgctgacaactaaactcacaggctgcaaagcagacctctgatgaagatgcctgttatttcacatcactgtctttttgtgtatcatagtctgcaccttacaaatattaataaatgttccaataataggtga

SEQ ID NO: 91997 - DNA, 2582 bp, Artificial Sequence
  derived and/or modified sequence
gactgcaaaaatatgaatgcaccatgccgccacattatctccattcctccagtgcccgcctgacactggccctgaatcagggctggagggggcaggcatttctcatttactaaagtgctggatgcagcccttgaggttcggcagaagcagaaagctgcgtcttgaaagcgccacaagcagcagctgctgagccatggctgaaggggaaatcaccaccttcacagccctgaccgagaagtttaatctgcctccagggaattacaagaagcccaaactcctctactgtagcaacgggggccacttcctgaggatccttccggatggcacagtggatgggacaagggacaggagcgaccagcacattcagctgcagctcagtgcggaaagcgtgggggaggtgtatataaagagtaccgagactggccagtacttggccatggacaccgacgggcttttatacggctcacagacaccaaatgaggaatgtttgttcctggaaaggctggaggagaaccattacaacacctatatatccaagaagcatgcagagaagaattggtttgttggcctcaagaagaatgggagctgcaaacgcggtcctcggactcactatggccagaaagcaatcttgtttctccccctgccagtctcttctgattaaagagatctgttctgggtgttgaccactccagagaagtttcgaggggtcctcacctggttgacccaaaaatgttcccttgaccattggctgcgctaacccccagcccacagagcctgaatttgtaagcaacttgcttctaaatgcccagttcacttctttgcagagccttttacccctgcacagtttagaacagagggaccaaattgcttctaggagtcaactggctggccagtctgggtctgggtttggatctccaattgcctcttgcaggctgagtccctccatgcaaaagtggggctaaatgaagtgtgttaaggggtcggctaagtgggacattagtaactgcacactatttccctctactgagtaaaccctatctgtgattcccccaaacatctggcatggctcccttttgtccttcctgtgccctgcaaatattagcaaagaagcttcatgccaggttaggaaggcagcattccatgaccagaaacagggacaaagaaatccccccttcagaacagaggcatttaaaatggaaaagagagattggattttggtgggtaacttagaaggatggcatctccatgtagaataaatgaagaaagggaggcccagccgcaggaaggcagaataaatccttgggagtcattaccacgccttgaccttcccaaggttactcagcagcagagagccctgggtgacttcaggtggagagcactagaagtggtttcctgataacaagcaaggatatcagagctgggaaattcatgtggatctggggactgagtgtgggagtgcagagaaagaaagggaaactggctgaggggataccataaaaagaggatgatttcagaaggagaaggaaaaagaaagtaatgccacacattgtgcttggcccctggtaagcagaggctttggggtcctagcccagtgcttctccaacactgaagtgcttgcagatcatctggggacctggtttgaatggagattctgattcagtgggttgggggcagagtttctgcagttccatcaggtcccccccaggtgcaggtgctgacaatactgctgccttacccgccatacattaaggagcagggtcctggtcctaaagagttattcaaatgaaggtggttcgacgccccgaacctcacctgacctcaactaacccttaaaaatgcacacctcatgagtctacctgagcattcaggcagcactgacaatagttatgcctgtactaaggagcatgattttaagaggctttggcccaatgcctataaaatgcccatttcgaagatatacaaaaacatacttcaaaaatgttaaacccttaccaacagcttttcccaggagaccatttgtattaccattacttgtataaatacacttcctgcttaaacttgacccaggtggctagcaaattagaaacaccattcatctctaacatatgatactgatgccatgtaaaggcctttaataagtcattgaaatttactgtgagactgtatgttttaattgcatttaaaaatatatagcttgaaagcagttaaactgattagtattcaggcactgagaatgatagtaataggatacaatgtataagctactcacttatctgatacttatttacctataaaatgagatttttgttttccactgtgctattacaaattttcttttgaaagtaggaactcttaagcaatggtaattgtgaataaaaattgatgagagtgttagctcctgtttcatatgaaattgaagtaattgttaactaaaaacaattccttagtaactgaactgtcatatttagaatggaaggaaaatgacagtttgtgaaagttcaaagcaatagtgcaattgaagaattgacctaagtaagctgacattatggttaataatagtattttagatttgtgcagcaaaa

SEQ ID NO: 91998 - DNA, 683 bp, Artificial Sequence
  derived and/or modified sequence
tacagtgcttgtccttagcctttctgtgggcataccagtgtcagctgcacttgtaggggcccaagtgcctcatgacccactcggcagccttcctctccaggatccccaaggctaggaggccaacctactaacagtcttgaaagcgccacaagcagcagctgctgagccatggctgaaggggaaatcaccaccttcacagccctgaccgagaagtttaatctgcctccagggaattacaagaagcccaaactcctctactgtagcaacgggggccacttcctgaggatccttccggatggcacagtggatgggacaagggacaggagcgaccagcacattcagctgcagctcagtgcggaaagcgtgggggaggtgtatataaagagtaccgagactggccagtacttggccatggacaccgacgggcttttatacggctcacagacaccaaatgaggaatgtttgttcctggaaaggctggaggagaaccattacaacacctatatatccaagaagcatgcagagaagaattggtttgttggcctcaagaagaatgggagctgcaaacgcggtcctcggactcactatggccagaaagcaatcttgtttctccccctgccagtctcttctgattaaagagatctgttctgggtgttgaccactccagagaagtttcgaggggt

SEQ ID NO: 91999 - DNA, 777 bp, Artificial Sequence
  derived and/or modified sequence
tacagtgcttgtccttagcctttctgtgggcataccagtgtcagctgcacttgtaggggcccaagtgcctcatgacccactcggcagccttcctctccaggatccccaaggctaggaggccaacctactaacagcagcctgcctgcagctgtcctggtagaacagtgtggacattgcagaagctgtcactgccccagaaagaaagcaccccagagccaaggcaaagagtcttgaaagcgccacaagcagcagctgctgagccatggctgaaggggaaatcaccaccttcacagccctgaccgagaagtttaatctgcctccagggaattacaagaagcccaaactcctctactgtagcaacgggggccacttcctgaggatccttccggatggcacagtggatgggacaagggacaggagcgaccagcacattcagctgcagctcagtgcggaaagcgtgggggaggtgtatataaagagtaccgagactggccagtacttggccatggacaccgacgggcttttatacggctcacagacaccaaatgaggaatgtttgttcctggaaaggctggaggagaaccattacaacacctatatatccaagaagcatgcagagaagaattggtttgttggcctcaagaagaatgggagctgcaaacgcggtcctcggactcactatggccagaaagcaatcttgtttctccccctgccagtctcttctgattaaagagatctgttctgggtgttgaccactccagagaagtttcgaggggt

SEQ ID NO: 92000 - DNA, 695 bp, Artificial Sequence
  derived and/or modified sequence
tctgagaagaagacaccaagtggattctgcttcccctgggacagcactgagcgagtgtggagagaggtacagccctcggcctacaagctctttagtcttgaaagcgccacaagcagcagctgctgagccatggctgaaggggaaatcaccaccttcacagccctgaccgagaagtttaatctgcctccagggaattacaagaagcccaaactcctctactgtagcaacgggggccacttcctgaggatccttccggatggcacagtggatgggacaagggacaggagcgaccagcacacagacaccaaatgaggaatgtttgttcctggaaaggctggaggagaaccattacaacacctatatatccaagaagcatgcagagaagaattggtttgttggcctcaagaagaatgggagctgcaaacgcggtcctcggactcactatggccagaaagcaatcttgtttctccccctgccagtctcttctgattaaagagatctgttctgggtgttgaccactccagagaagtttcgaggggtcctcacctggttgacccaaaaatgttcccttgaccattggctgcgctaacccccagcccacagagcctgaatttgtaagcaacttgcttctaaatgcccagttcacttctttgcagagccttttacccctgcacagtttagaacagagggaccaa

SEQ ID NO: 92001 - DNA, 468 bp, Artificial Sequence
  derived and/or modified sequence
atggccgagggggagatcaccaccttcaccgccctgacagagaagttcaacctgcccccaggcaactacaagaagcccaagctgctgtactgcagcaatggaggccacttcctgcgcatcctgcctgatggcaccgtggatggcacccgggacagaagtgaccagcacatccagctgcagctgtctgctgagagcgtgggggaggtgtacatcaagagcacagagaccggccagtacctggccatggacacagatggcctgctgtatggcagccagaccccaaatgaagaatgtctcttcctggagcggctggaggagaaccactacaacacctacatcagcaagaagcacgccgagaagaactggtttgtgggcctgaagaagaatggcagctgcaagaggggccccaggacccactacggccagaaggccatcctcttcctgcccctgcctgtgtccagtgactag

SEQ ID NO: 92002 - DNA, 468 bp, Artificial Sequence
  derived and/or modified sequence
atggccgagggcgagatcaccaccttcaccgccctgaccgagaagttcaacctcccccctggtaactacaagaaacccaaattactatactgctccaatggcggtcatttcttgcggatcttgcctgatggaacggtggacggcacgagagaccgaagtgatcagcatatacaactgcagctttccgccgagtcagttggggaggtgtacatcaaatcgacggaaacagggcaatatttggccatggataccgatggtctgctatacggttcccagacaccaaacgaggaatgcctgttcttggaaagactcgaggagaatcactacaatacatacatctccaaaaagcatgccgaaaagaactggtttgtgggtctcaaaaagaacgggagttgcaaaagaggtcctcggacacactacggtcagaaagccatcctgtttctccctctgcccgtatcctctgactag

SEQ ID NO: 92003 - DNA, 468 bp, Artificial Sequence
  derived and/or modified sequence
atggccgagggcgagatcaccaccttcaccgccctgaccgagaagtttaatcttcctccaggcaactacaaaaaacctaaacttctgtattgcagtaatggagggcacttccttagaatcctgcctgatggaacagtggatgggactcgcgatcgttccgaccaacatattcaactccagctcagcgcagaatctgtaggtgaagtgtacatcaagtcaacagagacgggccagtatctggccatggacactgatggtctgctgtacggcagccagaccccaaacgaggagtgcctgttcttagagcgcttagaagaaaaccactacaacacctatatctctaaaaagcatgccgaaaagaactggttcgtcggcctgaaaaagaatgggtcttgcaaacgggggccccgaactcactacggccagaaggccatcctttttctgcctctcccggtctcctctgattag

SEQ ID NO: 92004 - DNA, 468 bp, Artificial Sequence
  derived and/or modified sequence
atggccgagggcgagatcaccaccttcaccgccctgaccgagaagttcaatcttcccccgggcaactacaaaaagcctaagctgctgtactgctccaatggagggcactttctgcgaattcttcctgatggtaccgttgatggcactcgtgatcggagtgaccagcatatccaactccagttgagcgccgaatcagtgggcgaggtgtacatcaagtctactgagacgggccaatacctggccatggataccgatgggctgctgtacgggtcccagactccgaacgaagagtgtctgttcctggagaggctggaagagaaccattataacacttacataagtaaaaaacatgctgagaaaaattggttcgtgggtctgaagaagaatgggtcttgcaagcgagggcccaggacgcattacgggcaaaaggccatcctgttcttacccctgccagtgtcatccgactag

SEQ ID NO: 92005 - DNA, 468 bp, Artificial Sequence
  derived and/or modified sequence
atggccgagggcgagatcaccaccttcaccgccctgaccgagaagtttaatctgccccccggtaattataagaaaccaaaattgctctattgctcgaacggaggtcacttcttgagaatcttacccgacggcaccgttgatgggacaagggacaggagcgaccaacacatccagctgcagctcagcgcagaatctgtcggcgaggtgtacataaagtctaccgagaccggtcaatatttagcaatggacacagacgggttgttatatgggtctcagactcctaatgaagagtgcctgttcctcgagcgactggaagaaaaccattataacacttacataagcaagaagcacgccgaaaagaattggttcgtagggctgaaaaaaaacggtagctgcaagcgcgggccacggacccactacggacaaaaggccatattattcctgcccctccccgtgtccagcgactag

SEQ ID NO: 92006 - DNA, 468 bp, Artificial Sequence
  derived and/or modified sequence
atggccgagggcgagatcaccaccttcaccgccctgaccgagaagttcaacttgccacccgggaactacaagaaacctaagcttctctattgttccaacggcggacatttcctgcgtattcttccggatggtacagtggatggaacccgcgatcggtccgaccaacacatccaactgcagctaagcgcagaatctgtgggcgaagtttatataaagagtacggaaactggccaatacctcgctatggataccgacggtttgctatacggctcacagacccccaacgaggaatgtctcttcctcgaacggcttgaagaaaaccactacaatacctatatttctaagaagcacgctgaaaagaattggttcgtgggactcaaaaaaaatggctcatgcaaaagggggcctcggacccattacggtcagaaggccatcttgtttctgccactgcccgtttcatccgattag

SEQ ID NO: 92007 - DNA, 468 bp, Artificial Sequence
  derived and/or modified sequence
atggccgaaggcgaaataaccacatttacagcgctcactgaaaagttcaacctgccacctggcaattataagaaaccgaaactcctgtattgttccaacggcggacattttctgcgcatccttcccgacgggacagttgatggcaccagggataggagtgatcagcatattcagttgcagctcagcgcagaaagcgtcggagaggtttacatcaagtcgacggagacgggccagtacctggcaatggacacagatggattactctatggctcgcagactcctaatgaagagtgcttattcctcgaaaggctagaagagaatcattacaacacttacatatctaaaaaacatgccgagaagaattggtttgtaggtctgaagaaaaacggatcctgtaaaagaggaccccgaacccactacgggcagaaggcaatcctgtttctgccactcccggtctcctctgactag

SEQ ID NO: 92008 - DNA, 468 bp, Artificial Sequence
  derived and/or modified sequence
atggccgagggagagattacaacttttacagctttaacagagaaattcaacctcccgcctgggaactataagaaacccaaactcctttactgcagcaatggaggccattttctaaggattctgccggatggaaccgtagacggaacccgcgataggagcgaccagcatatccagcttcagttgtctgctgagagcgttggtgaggtctacattaaaagtacagagactggacagtatttagccatggataccgacggtctgttgtatggtagccaaacgccaaacgaggagtgtctcttcctggaacgtctagaggaaaaccactacaatacctatatctcaaaaaagcacgcagaaaagaattggttcgtcggacttaaaaaaaatggctcatgcaaaagaggacccaggacccattacgggcagaaagccatattgtttttgccactccctgtttcttccgattag

SEQ ID NO: 92009 - DNA, 468 bp, Artificial Sequence
  derived and/or modified sequence
atggcagagggcgaaattaccacgttcaccgctctgaccgagaagttcaatctgcccccaggcaattataaaaagcctaaactgctgtactgctccaacggagggcacttcctgcggattctgccagacggaacagtcgacggcacacgcgaccgaagcgatcagcacatccagctgcagctgtctgccgaatcggtaggagaggtgtacattaagagcacagagactggtcaatatctggccatggacaccgacgggctgctctacggctctcagactcccaatgaggagtgcctatttttagagagactcgaggagaatcattataacacctacatttccaagaagcacgctgagaaaaattggttcgtgggtcttaaaaagaatggctcctgcaaaagaggacctcgaacacactatggacagaaggccattctgtttttaccactccccgtgtcatccgattag

SEQ ID NO: 92010 - DNA, 468 bp, Artificial Sequence
  derived and/or modified sequence
atggccgagggagagatcaccacattcacagctctcactgagaaatttaacctgccacctggaaactacaaaaagccaaagttgctgtactgtagtaacgggggtcattttcttaggatcctccccgatgggacggtggacggcacaagggatcgctctgaccagcacatacagctccagctctcagctgagtctgtaggggaggtgtatataaagtccaccgaaaccggccagtacctggccatggacacggacggcttactttacggctctcagacaccaaacgaggagtgtctgttcctagagcggctagaggagaatcattataacacatatattagtaaaaagcacgccgagaaaaactggtttgttggactcaaaaagaatggcagctgcaagcggggacccagaactcattatgggcaaaaagctatactcttcttacctctgccggtttcctccgattag

SEQ ID NO: 92011 - DNA, 468 bp, Artificial Sequence
  derived and/or modified sequence
atggccgaaggggagattactacatttactgcactgacagagaagttcaatctaccgccagggaattacaaaaaaccgaagctgctgtattgttccaacggcggacattttttaagaattttacccgatgggactgttgatggcaccagagacagaagcgaccagcacatacagcttcagctgtcagcagagtccgtgggggaggtctatatcaagagcacagagaccggacagtatctcgctatggacacagacggtctgctgtacggctctcagacacccaacgaggagtgtcttttcctggagaggttggaagaaaaccactataacacctacatctcaaagaagcatgctgagaagaactggtttgtgggtctgaaaaaaaatgggtcgtgtaaaaggggacccagaacacactatgggcaaaaggccatcctctttctgcctctgcctgtgtcctctgattag

SEQ ID NO: 92012 - DNA, 4162 bp, Artificial Sequence
  derived and/or modified sequence
agaagtccattcggctcacacatttgccccaagacaaaccacgttaaaataacacccagggtagctgctgccaccgtcttctgtctctacctccctcctggctggccaatggctctgtgttcctgggcctgctgctggctgtccagagtaggggttgcttagagctgtgtgcatccctgcgggtggtgtgggagtgggcggttgtctaaaggcaggtcccctctactgataaacaaggaccggagatagacctagaggctgacattcttggctcccccagcctacaccccccccacctcgatttcccacagagccctagggacgggtagccagctctgtggcatggtatctggaggcaggccagcaacctgatgtgcatgccacggcccgtccctctccccactcagagctgcagtagcctggaggttcagagagccgggctactctgagaagaagacaccaagtggattctgcttcccctgggacagcactgagcgagtgtggagagaggtacagccctcggcctacaagctctttagtcttgaaagcgccacaagcagcagctgctgagccatggctgaaggggaaatcaccaccttcacagccctgaccgagaagtttaatctgcctccagggaattacaagaagcccaaactcctctactgtagcaacgggggccacttcctgaggatccttccggatggcacagtggatgggacaagggacaggagcgaccagcacattcagctgcagctcagtgcggaaagcgtgggggaggtgtatataaagagtaccgagactggccagtacttggccatggacaccgacgggcttttatacggctcacagacaccaaatgaggaatgtttgttcctggaaaggctggaggagaaccattacaacacctatatatccaagaagcatgcagagaagaattggtttgttggcctcaagaagaatgggagctgcaaacgcggtcctcggactcactatggccagaaagcaatcttgtttctccccctgccagtctcttctgattaaagagatctgttctgggtgttgaccactccagagaagtttcgaggggtcctcacctggttgacccaaaaatgttcccttgaccattggctgcgctaacccccagcccacagagcctgaatttgtaagcaacttgcttctaaatgcccagttcacttctttgcagagccttttacccctgcacagtttagaacagagggaccaaattgcttctaggagtcaactggctggccagtctgggtctgggtttggatctccaattgcctcttgcaggctgagtccctccatgcaaaagtggggctaaatgaagtgtgttaaggggtcggctaagtgggacattagtaactgcacactatttccctctactgagtaaaccctatctgtgattcccccaaacatctggcatggctcccttttgtccttcctgtgccctgcaaatattagcaaagaagcttcatgccaggttaggaaggcagcattccatgaccagaaacagggacaaagaaatccccccttcagaacagaggcatttaaaatggaaaagagagattggattttggtgggtaacttagaaggatggcatctccatgtagaataaatgaagaaagggaggcccagccgcaggaaggcagaataaatccttgggagtcattaccacgccttgaccttcccaaggttactcagcagcagagagccctgggtgacttcaggtggagagcactagaagtggtttcctgataacaagcaaggatatcagagctgggaaattcatgtggatctggggactgagtgtgggagtgcagagaaagaaagggaaactggctgaggggataccataaaaagaggatgatttcagaaggagaaggaaaaagaaagtaatgccacacattgtgcttggcccctggtaagcagaggctttggggtcctagcccagtgcttctccaacactgaagtgcttgcagatcatctggggacctggtttgaatggagattctgattcagtgggttgggggcagagtttctgcagttccatcaggtcccccccaggtgcaggtgctgacaatactgctgccttacccgccatacattaaggagcagggtcctggtcctaaagagttattcaaatgaaggtggttcgacgccccgaacctcacctgacctcaactaacccttaaaaatgcacacctcatgagtctacctgagcattcaggcagcactgacaatagttatgcctgtactaaggagcatgattttaagaggctttggcccaatgcctataaaatgcccatttcgaagatatacaaaaacatacttcaaaaatgttaaacccttaccaacagcttttcccaggagaccatttgtattaccattacttgtataaatacacttcctgcttaaacttgacccaggtggctagcaaattagaaacaccattcatctctaacatatgatactgatgccatgtaaaggcctttaataagtcattgaaatttactgtgagactgtatgttttaattgcatttaaaaatatatagcttgaaagcagttaaactgattagtattcaggcactgagaatgatagtaataggatacaatgtataagctactcacttatctgatacttatttacctataaaatgagatttttgttttccactgtgctattacaaattttcttttgaaagtaggaactcttaagcaatggtaattgtgaataaaaattgatgagagtgttagctcctgtttcatatgaaattgaagtaattgttaactaaaaacaattccttagtaactgaactgtcatatttagaatggaaggaaaatgacagtttgtgaaagttcaaagcaatagtgcaattgaagaattgacctaagtaagctgacattatggttaataatagtattttagatttgtgcagcaaaataatttcataacttttttgtttttgttacttggataagatcaatctgttttattttagtaaatctttgcaggcaagttagagaaaatgcagtgtggcttaacgtctctttagtatgaagatttggccagaaaaagatacccagagaggaaatctaagataattataatggtccatactttttattgtatgaatcaaactcaagcataacattggccaaggaaaattaaataccattgctaacttgtgaaatggaagtctgtgatttcggagatgcaaagcattgtagtaaaaacaccaatgtgacctcgaccatctcagcccagatatcattcatatatctgttcaatgactattaaggtgcctactgtgtgctaggcactgtactggatactggggaccttgtctgtctggtttgctgctgtatcttctcccagggcattatatttatgatgaaagatgctgtggattcaattctttcagtcaagaataaacacagactttgtaggttcctgctgaataaagcaaatcccagaaacccagattttggaagaatcagcaaccccagcataaaataaacccctatcaaaatgtcagaggacatggcaaggtaaacttagcattttcaactttagaaccgggtcagcttcagggggactgctttcaaatcagccaaagagcctgtcagatcttcttagaaggaagaggttggtagttccctgctctgttttgaacatgctctagtttattaacctggggacattcccattgctgtcttaagtaagtctcatagccagctcctgtcacgtgactctcatatggattcattttcgggccagctctgaacaaagcatcatgaacatatgtgcttttggtcgtttgcaatgtgatggtggtggaggtaggtattggtttccttggaaggcatgataagaaagattcacaatggccaacagtgtgtatgaacaaaaaactgattggagcatcagctagtactgaaggtccttgctttgtgtcagaggcaaaggaacccaaggcgccaagtcctcagccttgagtgtactgctgacaactaaactcacaggctgcaaagcagacctctgatgaagatgcctgttatttcacatcactgtctttttgtgtatcatagtctgcaccttacaaatattaataaatgttccaataataggtgaaaaaaaaaa

SEQ ID NO: 92013 - DNA, 4058 bp, Artificial Sequence
  derived and/or modified sequence
agaagtccattcggctcacacatttgccccaagacaaaccacgttaaaataacacccagggtagctgctgccaccgtcttctgtctctacctccctcctggctggccaatggctctgtgttcctgggcctgctgctggctgtccagagtaggggttgcttagagctgtgtgcatccctgcgggtggtgtgggagtgggcggttgtctaaaggcaggtcccctctactgataaacaaggaccggagatagacctagaggctgacattcttggctcccccagcctacaccccccccacctcgatttcccacagagccctagggacgggtagccagctctgtggcatggtatctggaggcaggccagcaacctgatgtgcatgccacggcccgtccctctccccactcagagctgcagtagcctggaggttcagagagccgggctactctgagaagaagacaccaagtggattctgcttcccctgggacagcactgagcgagtgtggagagaggtacagccctcggcctacaagctctttagtcttgaaagcgccacaagcagcagctgctgagccatggctgaaggggaaatcaccaccttcacagccctgaccgagaagtttaatctgcctccagggaattacaagaagcccaaactcctctactgtagcaacgggggccacttcctgaggatccttccggatggcacagtggatgggacaagggacaggagcgaccagcacacagacaccaaatgaggaatgtttgttcctggaaaggctggaggagaaccattacaacacctatatatccaagaagcatgcagagaagaattggtttgttggcctcaagaagaatgggagctgcaaacgcggtcctcggactcactatggccagaaagcaatcttgtttctccccctgccagtctcttctgattaaagagatctgttctgggtgttgaccactccagagaagtttcgaggggtcctcacctggttgacccaaaaatgttcccttgaccattggctgcgctaacccccagcccacagagcctgaatttgtaagcaacttgcttctaaatgcccagttcacttctttgcagagccttttacccctgcacagtttagaacagagggaccaaattgcttctaggagtcaactggctggccagtctgggtctgggtttggatctccaattgcctcttgcaggctgagtccctccatgcaaaagtggggctaaatgaagtgtgttaaggggtcggctaagtgggacattagtaactgcacactatttccctctactgagtaaaccctatctgtgattcccccaaacatctggcatggctcccttttgtccttcctgtgccctgcaaatattagcaaagaagcttcatgccaggttaggaaggcagcattccatgaccagaaacagggacaaagaaatccccccttcagaacagaggcatttaaaatggaaaagagagattggattttggtgggtaacttagaaggatggcatctccatgtagaataaatgaagaaagggaggcccagccgcaggaaggcagaataaatccttgggagtcattaccacgccttgaccttcccaaggttactcagcagcagagagccctgggtgacttcaggtggagagcactagaagtggtttcctgataacaagcaaggatatcagagctgggaaattcatgtggatctggggactgagtgtgggagtgcagagaaagaaagggaaactggctgaggggataccataaaaagaggatgatttcagaaggagaaggaaaaagaaagtaatgccacacattgtgcttggcccctggtaagcagaggctttggggtcctagcccagtgcttctccaacactgaagtgcttgcagatcatctggggacctggtttgaatggagattctgattcagtgggttgggggcagagtttctgcagttccatcaggtcccccccaggtgcaggtgctgacaatactgctgccttacccgccatacattaaggagcagggtcctggtcctaaagagttattcaaatgaaggtggttcgacgccccgaacctcacctgacctcaactaacccttaaaaatgcacacctcatgagtctacctgagcattcaggcagcactgacaatagttatgcctgtactaaggagcatgattttaagaggctttggcccaatgcctataaaatgcccatttcgaagatatacaaaaacatacttcaaaaatgttaaacccttaccaacagcttttcccaggagaccatttgtattaccattacttgtataaatacacttcctgcttaaacttgacccaggtggctagcaaattagaaacaccattcatctctaacatatgatactgatgccatgtaaaggcctttaataagtcattgaaatttactgtgagactgtatgttttaattgcatttaaaaatatatagcttgaaagcagttaaactgattagtattcaggcactgagaatgatagtaataggatacaatgtataagctactcacttatctgatacttatttacctataaaatgagatttttgttttccactgtgctattacaaattttcttttgaaagtaggaactcttaagcaatggtaattgtgaataaaaattgatgagagtgttagctcctgtttcatatgaaattgaagtaattgttaactaaaaacaattccttagtaactgaactgtcatatttagaatggaaggaaaatgacagtttgtgaaagttcaaagcaatagtgcaattgaagaattgacctaagtaagctgacattatggttaataatagtattttagatttgtgcagcaaaataatttcataacttttttgtttttgttacttggataagatcaatctgttttattttagtaaatctttgcaggcaagttagagaaaatgcagtgtggcttaacgtctctttagtatgaagatttggccagaaaaagatacccagagaggaaatctaagataattataatggtccatactttttattgtatgaatcaaactcaagcataacattggccaaggaaaattaaataccattgctaacttgtgaaatggaagtctgtgatttcggagatgcaaagcattgtagtaaaaacaccaatgtgacctcgaccatctcagcccagatatcattcatatatctgttcaatgactattaaggtgcctactgtgtgctaggcactgtactggatactggggaccttgtctgtctggtttgctgctgtatcttctcccagggcattatatttatgatgaaagatgctgtggattcaattctttcagtcaagaataaacacagactttgtaggttcctgctgaataaagcaaatcccagaaacccagattttggaagaatcagcaaccccagcataaaataaacccctatcaaaatgtcagaggacatggcaaggtaaacttagcattttcaactttagaaccgggtcagcttcagggggactgctttcaaatcagccaaagagcctgtcagatcttcttagaaggaagaggttggtagttccctgctctgttttgaacatgctctagtttattaacctggggacattcccattgctgtcttaagtaagtctcatagccagctcctgtcacgtgactctcatatggattcattttcgggccagctctgaacaaagcatcatgaacatatgtgcttttggtcgtttgcaatgtgatggtggtggaggtaggtattggtttccttggaaggcatgataagaaagattcacaatggccaacagtgtgtatgaacaaaaaactgattggagcatcagctagtactgaaggtccttgctttgtgtcagaggcaaaggaacccaaggcgccaagtcctcagccttgagtgtactgctgacaactaaactcacaggctgcaaagcagacctctgatgaagatgcctgttatttcacatcactgtctttttgtgtatcatagtctgcaccttacaaatattaataaatgttccaataataggtgaaaaaaaaaa

SEQ ID NO: 92014 - DNA, 3682 bp, Artificial Sequence
  derived and/or modified sequence
aaaaagagagagagaaaaaatactgttggcagcagcacaatgtttgggctaagacctggtcttgaaagcgccacaagcagcagctgctgagccatggctgaaggggaaatcaccaccttcacagccctgaccgagaagtttaatctgcctccagggaattacaagaagcccaaactcctctactgtagcaacgggggccacttcctgaggatccttccggatggcacagtggatgggacaagggacaggagcgaccagcacattcagctgcagctcagtgcggaaagcgtgggggaggtgtatataaagagtaccgagactggccagtacttggccatggacaccgacgggcttttatacggctcacagacaccaaatgaggaatgtttgttcctggaaaggctggaggagaaccattacaacacctatatatccaagaagcatgcagagaagaattggtttgttggcctcaagaagaatgggagctgcaaacgcggtcctcggactcactatggccagaaagcaatcttgtttctccccctgccagtctcttctgattaaagagatctgttctgggtgttgaccactccagagaagtttcgaggggtcctcacctggttgacccaaaaatgttcccttgaccattggctgcgctaacccccagcccacagagcctgaatttgtaagcaacttgcttctaaatgcccagttcacttctttgcagagccttttacccctgcacagtttagaacagagggaccaaattgcttctaggagtcaactggctggccagtctgggtctgggtttggatctccaattgcctcttgcaggctgagtccctccatgcaaaagtggggctaaatgaagtgtgttaaggggtcggctaagtgggacattagtaactgcacactatttccctctactgagtaaaccctatctgtgattcccccaaacatctggcatggctcccttttgtccttcctgtgccctgcaaatattagcaaagaagcttcatgccaggttaggaaggcagcattccatgaccagaaacagggacaaagaaatccccccttcagaacagaggcatttaaaatggaaaagagagattggattttggtgggtaacttagaaggatggcatctccatgtagaataaatgaagaaagggaggcccagccgcaggaaggcagaataaatccttgggagtcattaccacgccttgaccttcccaaggttactcagcagcagagagccctgggtgacttcaggtggagagcactagaagtggtttcctgataacaagcaaggatatcagagctgggaaattcatgtggatctggggactgagtgtgggagtgcagagaaagaaagggaaactggctgaggggataccataaaaagaggatgatttcagaaggagaaggaaaaagaaagtaatgccacacattgtgcttggcccctggtaagcagaggctttggggtcctagcccagtgcttctccaacactgaagtgcttgcagatcatctggggacctggtttgaatggagattctgattcagtgggttgggggcagagtttctgcagttccatcaggtcccccccaggtgcaggtgctgacaatactgctgccttacccgccatacattaaggagcagggtcctggtcctaaagagttattcaaatgaaggtggttcgacgccccgaacctcacctgacctcaactaacccttaaaaatgcacacctcatgagtctacctgagcattcaggcagcactgacaatagttatgcctgtactaaggagcatgattttaagaggctttggcccaatgcctataaaatgcccatttcgaagatatacaaaaacatacttcaaaaatgttaaacccttaccaacagcttttcccaggagaccatttgtattaccattacttgtataaatacacttcctgcttaaacttgacccaggtggctagcaaattagaaacaccattcatctctaacatatgatactgatgccatgtaaaggcctttaataagtcattgaaatttactgtgagactgtatgttttaattgcatttaaaaatatatagcttgaaagcagttaaactgattagtattcaggcactgagaatgatagtaataggatacaatgtataagctactcacttatctgatacttatttacctataaaatgagatttttgttttccactgtgctattacaaattttcttttgaaagtaggaactcttaagcaatggtaattgtgaataaaaattgatgagagtgttagctcctgtttcatatgaaattgaagtaattgttaactaaaaacaattccttagtaactgaactgtcatatttagaatggaaggaaaatgacagtttgtgaaagttcaaagcaatagtgcaattgaagaattgacctaagtaagctgacattatggttaataatagtattttagatttgtgcagcaaaataatttcataacttttttgtttttgttacttggataagatcaatctgttttattttagtaaatctttgcaggcaagttagagaaaatgcagtgtggcttaacgtctctttagtatgaagatttggccagaaaaagatacccagagaggaaatctaagataattataatggtccatactttttattgtatgaatcaaactcaagcataacattggccaaggaaaattaaataccattgctaacttgtgaaatggaagtctgtgatttcggagatgcaaagcattgtagtaaaaacaccaatgtgacctcgaccatctcagcccagatatcattcatatatctgttcaatgactattaaggtgcctactgtgtgctaggcactgtactggatactggggaccttgtctgtctggtttgctgctgtatcttctcccagggcattatatttatgatgaaagatgctgtggattcaattctttcagtcaagaataaacacagactttgtaggttcctgctgaataaagcaaatcccagaaacccagattttggaagaatcagcaaccccagcataaaataaacccctatcaaaatgtcagaggacatggcaaggtaaacttagcattttcaactttagaaccgggtcagcttcagggggactgctttcaaatcagccaaagagcctgtcagatcttcttagaaggaagaggttggtagttccctgctctgttttgaacatgctctagtttattaacctggggacattcccattgctgtcttaagtaagtctcatagccagctcctgtcacgtgactctcatatggattcattttcgggccagctctgaacaaagcatcatgaacatatgtgcttttggtcgtttgcaatgtgatggtggtggaggtaggtattggtttccttggaaggcatgataagaaagattcacaatggccaacagtgtgtatgaacaaaaaactgattggagcatcagctagtactgaaggtccttgctttgtgtcagaggcaaaggaacccaaggcgccaagtcctcagccttgagtgtactgctgacaactaaactcacaggctgcaaagcagacctctgatgaagatgcctgttatttcacatcactgtctttttgtgtatcatagtctgcaccttacaaatattaataaatgttccaataataggtgaaaaaaaaaa

SEQ ID NO: 92015 - DNA, 4072 bp, Artificial Sequence
  derived and/or modified sequence
acatgagagggggagaaataaatatacagtgcttgtccttagcctttctgtgggcataccagtgtcagctgcacttgtaggggcccaagtgcctcatgacccactcggcagccttcctctccaggatccccaaggctaggaggccaacctactaacaggtgggtgggtatggtgtgtggtttcactcagttcttctcatggggtttctctgagctccattcataccagaaagggagcaggagagagaggacaagtggatccaacagccttcgctccaggggaatcagggcatcgcctccttttctgggaggacactcccttctgatggtgaatgggaactcccttcctcctgcagcagcctgcctgcagctgtcctggtagaacagtgtggacattgcagaagctgtcactgccccagaaagaaagcaccccagagccaaggcaaagagtcttgaaagcgccacaagcagcagctgctgagccatggctgaaggggaaatcaccaccttcacagccctgaccgagaagtttaatctgcctccagggaattacaagaagcccaaactcctctactgtagcaacgggggccacttcctgaggatccttccggatggcacagtggatgggacaagggacaggagcgaccagcacattcagctgcagctcagtgcggaaagcgtgggggaggtgtatataaagagtaccgagactggccagtacttggccatggacaccgacgggcttttatacggctcacagacaccaaatgaggaatgtttgttcctggaaaggctggaggagaaccattacaacacctatatatccaagaagcatgcagagaagaattggtttgttggcctcaagaagaatgggagctgcaaacgcggtcctcggactcactatggccagaaagcaatcttgtttctccccctgccagtctcttctgattaaagagatctgttctgggtgttgaccactccagagaagtttcgaggggtcctcacctggttgacccaaaaatgttcccttgaccattggctgcgctaacccccagcccacagagcctgaatttgtaagcaacttgcttctaaatgcccagttcacttctttgcagagccttttacccctgcacagtttagaacagagggaccaaattgcttctaggagtcaactggctggccagtctgggtctgggtttggatctccaattgcctcttgcaggctgagtccctccatgcaaaagtggggctaaatgaagtgtgttaaggggtcggctaagtgggacattagtaactgcacactatttccctctactgagtaaaccctatctgtgattcccccaaacatctggcatggctcccttttgtccttcctgtgccctgcaaatattagcaaagaagcttcatgccaggttaggaaggcagcattccatgaccagaaacagggacaaagaaatccccccttcagaacagaggcatttaaaatggaaaagagagattggattttggtgggtaacttagaaggatggcatctccatgtagaataaatgaagaaagggaggcccagccgcaggaaggcagaataaatccttgggagtcattaccacgccttgaccttcccaaggttactcagcagcagagagccctgggtgacttcaggtggagagcactagaagtggtttcctgataacaagcaaggatatcagagctgggaaattcatgtggatctggggactgagtgtgggagtgcagagaaagaaagggaaactggctgaggggataccataaaaagaggatgatttcagaaggagaaggaaaaagaaagtaatgccacacattgtgcttggcccctggtaagcagaggctttggggtcctagcccagtgcttctccaacactgaagtgcttgcagatcatctggggacctggtttgaatggagattctgattcagtgggttgggggcagagtttctgcagttccatcaggtcccccccaggtgcaggtgctgacaatactgctgccttacccgccatacattaaggagcagggtcctggtcctaaagagttattcaaatgaaggtggttcgacgccccgaacctcacctgacctcaactaacccttaaaaatgcacacctcatgagtctacctgagcattcaggcagcactgacaatagttatgcctgtactaaggagcatgattttaagaggctttggcccaatgcctataaaatgcccatttcgaagatatacaaaaacatacttcaaaaatgttaaacccttaccaacagcttttcccaggagaccatttgtattaccattacttgtataaatacacttcctgcttaaacttgacccaggtggctagcaaattagaaacaccattcatctctaacatatgatactgatgccatgtaaaggcctttaataagtcattgaaatttactgtgagactgtatgttttaattgcatttaaaaatatatagcttgaaagcagttaaactgattagtattcaggcactgagaatgatagtaataggatacaatgtataagctactcacttatctgatacttatttacctataaaatgagatttttgttttccactgtgctattacaaattttcttttgaaagtaggaactcttaagcaatggtaattgtgaataaaaattgatgagagtgttagctcctgtttcatatgaaattgaagtaattgttaactaaaaacaattccttagtaactgaactgtcatatttagaatggaaggaaaatgacagtttgtgaaagttcaaagcaatagtgcaattgaagaattgacctaagtaagctgacattatggttaataatagtattttagatttgtgcagcaaaataatttcataacttttttgtttttgttacttggataagatcaatctgttttattttagtaaatctttgcaggcaagttagagaaaatgcagtgtggcttaacgtctctttagtatgaagatttggccagaaaaagatacccagagaggaaatctaagataattataatggtccatactttttattgtatgaatcaaactcaagcataacattggccaaggaaaattaaataccattgctaacttgtgaaatggaagtctgtgatttcggagatgcaaagcattgtagtaaaaacaccaatgtgacctcgaccatctcagcccagatatcattcatatatctgttcaatgactattaaggtgcctactgtgtgctaggcactgtactggatactggggaccttgtctgtctggtttgctgctgtatcttctcccagggcattatatttatgatgaaagatgctgtggattcaattctttcagtcaagaataaacacagactttgtaggttcctgctgaataaagcaaatcccagaaacccagattttggaagaatcagcaaccccagcataaaataaacccctatcaaaatgtcagaggacatggcaaggtaaacttagcattttcaactttagaaccgggtcagcttcagggggactgctttcaaatcagccaaagagcctgtcagatcttcttagaaggaagaggttggtagttccctgctctgttttgaacatgctctagtttattaacctggggacattcccattgctgtcttaagtaagtctcatagccagctcctgtcacgtgactctcatatggattcattttcgggccagctctgaacaaagcatcatgaacatatgtgcttttggtcgtttgcaatgtgatggtggtggaggtaggtattggtttccttggaaggcatgataagaaagattcacaatggccaacagtgtgtatgaacaaaaaactgattggagcatcagctagtactgaaggtccttgctttgtgtcagaggcaaaggaacccaaggcgccaagtcctcagccttgagtgtactgctgacaactaaactcacaggctgcaaagcagacctctgatgaagatgcctgttatttcacatcactgtctttttgtgtatcatagtctgcaccttacaaatattaataaatgttccaataataggtgaaaaaaaaaa

SEQ ID NO: 92016 - DNA, 3815 bp, Artificial Sequence
  derived and/or modified sequence
agaagtccattcggctcacacatttgccccaagacaaaccacgttaaaataacacccaggagctgcagtagcctggaggttcagagagccgggctactctgagaagaagacaccaagtggattctgcttcccctgggacagcactgagcgagtgtggagagaggtacagccctcggcctacaagctctttagtcttgaaagcgccacaagcagcagctgctgagccatggctgaaggggaaatcaccaccttcacagccctgaccgagaagtttaatctgcctccagggaattacaagaagcccaaactcctctactgtagcaacgggggccacttcctgaggatccttccggatggcacagtggatgggacaagggacaggagcgaccagcacattcagctgcagctcagtgcggaaagcgtgggggaggtgtatataaagagtaccgagactggccagtacttggccatggacaccgacgggcttttatacggctcacagacaccaaatgaggaatgtttgttcctggaaaggctggaggagaaccattacaacacctatatatccaagaagcatgcagagaagaattggtttgttggcctcaagaagaatgggagctgcaaacgcggtcctcggactcactatggccagaaagcaatcttgtttctccccctgccagtctcttctgattaaagagatctgttctgggtgttgaccactccagagaagtttcgaggggtcctcacctggttgacccaaaaatgttcccttgaccattggctgcgctaacccccagcccacagagcctgaatttgtaagcaacttgcttctaaatgcccagttcacttctttgcagagccttttacccctgcacagtttagaacagagggaccaaattgcttctaggagtcaactggctggccagtctgggtctgggtttggatctccaattgcctcttgcaggctgagtccctccatgcaaaagtggggctaaatgaagtgtgttaaggggtcggctaagtgggacattagtaactgcacactatttccctctactgagtaaaccctatctgtgattcccccaaacatctggcatggctcccttttgtccttcctgtgccctgcaaatattagcaaagaagcttcatgccaggttaggaaggcagcattccatgaccagaaacagggacaaagaaatccccccttcagaacagaggcatttaaaatggaaaagagagattggattttggtgggtaacttagaaggatggcatctccatgtagaataaatgaagaaagggaggcccagccgcaggaaggcagaataaatccttgggagtcattaccacgccttgaccttcccaaggttactcagcagcagagagccctgggtgacttcaggtggagagcactagaagtggtttcctgataacaagcaaggatatcagagctgggaaattcatgtggatctggggactgagtgtgggagtgcagagaaagaaagggaaactggctgaggggataccataaaaagaggatgatttcagaaggagaaggaaaaagaaagtaatgccacacattgtgcttggcccctggtaagcagaggctttggggtcctagcccagtgcttctccaacactgaagtgcttgcagatcatctggggacctggtttgaatggagattctgattcagtgggttgggggcagagtttctgcagttccatcaggtcccccccaggtgcaggtgctgacaatactgctgccttacccgccatacattaaggagcagggtcctggtcctaaagagttattcaaatgaaggtggttcgacgccccgaacctcacctgacctcaactaacccttaaaaatgcacacctcatgagtctacctgagcattcaggcagcactgacaatagttatgcctgtactaaggagcatgattttaagaggctttggcccaatgcctataaaatgcccatttcgaagatatacaaaaacatacttcaaaaatgttaaacccttaccaacagcttttcccaggagaccatttgtattaccattacttgtataaatacacttcctgcttaaacttgacccaggtggctagcaaattagaaacaccattcatctctaacatatgatactgatgccatgtaaaggcctttaataagtcattgaaatttactgtgagactgtatgttttaattgcatttaaaaatatatagcttgaaagcagttaaactgattagtattcaggcactgagaatgatagtaataggatacaatgtataagctactcacttatctgatacttatttacctataaaatgagatttttgttttccactgtgctattacaaattttcttttgaaagtaggaactcttaagcaatggtaattgtgaataaaaattgatgagagtgttagctcctgtttcatatgaaattgaagtaattgttaactaaaaacaattccttagtaactgaactgtcatatttagaatggaaggaaaatgacagtttgtgaaagttcaaagcaatagtgcaattgaagaattgacctaagtaagctgacattatggttaataatagtattttagatttgtgcagcaaaataatttcataacttttttgtttttgttacttggataagatcaatctgttttattttagtaaatctttgcaggcaagttagagaaaatgcagtgtggcttaacgtctctttagtatgaagatttggccagaaaaagatacccagagaggaaatctaagataattataatggtccatactttttattgtatgaatcaaactcaagcataacattggccaaggaaaattaaataccattgctaacttgtgaaatggaagtctgtgatttcggagatgcaaagcattgtagtaaaaacaccaatgtgacctcgaccatctcagcccagatatcattcatatatctgttcaatgactattaaggtgcctactgtgtgctaggcactgtactggatactggggaccttgtctgtctggtttgctgctgtatcttctcccagggcattatatttatgatgaaagatgctgtggattcaattctttcagtcaagaataaacacagactttgtaggttcctgctgaataaagcaaatcccagaaacccagattttggaagaatcagcaaccccagcataaaataaacccctatcaaaatgtcagaggacatggcaaggtaaacttagcattttcaactttagaaccgggtcagcttcagggggactgctttcaaatcagccaaagagcctgtcagatcttcttagaaggaagaggttggtagttccctgctctgttttgaacatgctctagtttattaacctggggacattcccattgctgtcttaagtaagtctcatagccagctcctgtcacgtgactctcatatggattcattttcgggccagctctgaacaaagcatcatgaacatatgtgcttttggtcgtttgcaatgtgatggtggtggaggtaggtattggtttccttggaaggcatgataagaaagattcacaatggccaacagtgtgtatgaacaaaaaactgattggagcatcagctagtactgaaggtccttgctttgtgtcagaggcaaaggaacccaaggcgccaagtcctcagccttgagtgtactgctgacaactaaactcacaggctgcaaagcagacctctgatgaagatgcctgttatttcacatcactgtctttttgtgtatcatagtctgcaccttacaaatattaataaatgttccaataataggtgaaaaaaaaaa

SEQ ID NO: 92017 - DNA, 3813 bp, Artificial Sequence
  derived and/or modified sequence
agacatgtaaaaatagtacttctagtttagagactgcaaaaatatgaatgcaccatgccgccacattatctccattcctccagtgcccgcctgacactggccctgaatcagggctggagggggcaggcatttctcatttactaaagtgctggatgcagcccttgaggttcggcagaagcagaaagctgcgtcttgaaagcgccacaagcagcagctgctgagccatggctgaaggggaaatcaccaccttcacagccctgaccgagaagtttaatctgcctccagggaattacaagaagcccaaactcctctactgtagcaacgggggccacttcctgaggatccttccggatggcacagtggatgggacaagggacaggagcgaccagcacattcagctgcagctcagtgcggaaagcgtgggggaggtgtatataaagagtaccgagactggccagtacttggccatggacaccgacgggcttttatacggctcacagacaccaaatgaggaatgtttgttcctggaaaggctggaggagaaccattacaacacctatatatccaagaagcatgcagagaagaattggtttgttggcctcaagaagaatgggagctgcaaacgcggtcctcggactcactatggccagaaagcaatcttgtttctccccctgccagtctcttctgattaaagagatctgttctgggtgttgaccactccagagaagtttcgaggggtcctcacctggttgacccaaaaatgttcccttgaccattggctgcgctaacccccagcccacagagcctgaatttgtaagcaacttgcttctaaatgcccagttcacttctttgcagagccttttacccctgcacagtttagaacagagggaccaaattgcttctaggagtcaactggctggccagtctgggtctgggtttggatctccaattgcctcttgcaggctgagtccctccatgcaaaagtggggctaaatgaagtgtgttaaggggtcggctaagtgggacattagtaactgcacactatttccctctactgagtaaaccctatctgtgattcccccaaacatctggcatggctcccttttgtccttcctgtgccctgcaaatattagcaaagaagcttcatgccaggttaggaaggcagcattccatgaccagaaacagggacaaagaaatccccccttcagaacagaggcatttaaaatggaaaagagagattggattttggtgggtaacttagaaggatggcatctccatgtagaataaatgaagaaagggaggcccagccgcaggaaggcagaataaatccttgggagtcattaccacgccttgaccttcccaaggttactcagcagcagagagccctgggtgacttcaggtggagagcactagaagtggtttcctgataacaagcaaggatatcagagctgggaaattcatgtggatctggggactgagtgtgggagtgcagagaaagaaagggaaactggctgaggggataccataaaaagaggatgatttcagaaggagaaggaaaaagaaagtaatgccacacattgtgcttggcccctggtaagcagaggctttggggtcctagcccagtgcttctccaacactgaagtgcttgcagatcatctggggacctggtttgaatggagattctgattcagtgggttgggggcagagtttctgcagttccatcaggtcccccccaggtgcaggtgctgacaatactgctgccttacccgccatacattaaggagcagggtcctggtcctaaagagttattcaaatgaaggtggttcgacgccccgaacctcacctgacctcaactaacccttaaaaatgcacacctcatgagtctacctgagcattcaggcagcactgacaatagttatgcctgtactaaggagcatgattttaagaggctttggcccaatgcctataaaatgcccatttcgaagatatacaaaaacatacttcaaaaatgttaaacccttaccaacagcttttcccaggagaccatttgtattaccattacttgtataaatacacttcctgcttaaacttgacccaggtggctagcaaattagaaacaccattcatctctaacatatgatactgatgccatgtaaaggcctttaataagtcattgaaatttactgtgagactgtatgttttaattgcatttaaaaatatatagcttgaaagcagttaaactgattagtattcaggcactgagaatgatagtaataggatacaatgtataagctactcacttatctgatacttatttacctataaaatgagatttttgttttccactgtgctattacaaattttcttttgaaagtaggaactcttaagcaatggtaattgtgaataaaaattgatgagagtgttagctcctgtttcatatgaaattgaagtaattgttaactaaaaacaattccttagtaactgaactgtcatatttagaatggaaggaaaatgacagtttgtgaaagttcaaagcaatagtgcaattgaagaattgacctaagtaagctgacattatggttaataatagtattttagatttgtgcagcaaaataatttcataacttttttgtttttgttacttggataagatcaatctgttttattttagtaaatctttgcaggcaagttagagaaaatgcagtgtggcttaacgtctctttagtatgaagatttggccagaaaaagatacccagagaggaaatctaagataattataatggtccatactttttattgtatgaatcaaactcaagcataacattggccaaggaaaattaaataccattgctaacttgtgaaatggaagtctgtgatttcggagatgcaaagcattgtagtaaaaacaccaatgtgacctcgaccatctcagcccagatatcattcatatatctgttcaatgactattaaggtgcctactgtgtgctaggcactgtactggatactggggaccttgtctgtctggtttgctgctgtatcttctcccagggcattatatttatgatgaaagatgctgtggattcaattctttcagtcaagaataaacacagactttgtaggttcctgctgaataaagcaaatcccagaaacccagattttggaagaatcagcaaccccagcataaaataaacccctatcaaaatgtcagaggacatggcaaggtaaacttagcattttcaactttagaaccgggtcagcttcagggggactgctttcaaatcagccaaagagcctgtcagatcttcttagaaggaagaggttggtagttccctgctctgttttgaacatgctctagtttattaacctggggacattcccattgctgtcttaagtaagtctcatagccagctcctgtcacgtgactctcatatggattcattttcgggccagctctgaacaaagcatcatgaacatatgtgcttttggtcgtttgcaatgtgatggtggtggaggtaggtattggtttccttggaaggcatgataagaaagattcacaatggccaacagtgtgtatgaacaaaaaactgattggagcatcagctagtactgaaggtccttgctttgtgtcagaggcaaaggaacccaaggcgccaagtcctcagccttgagtgtactgctgacaactaaactcacaggctgcaaagcagacctctgatgaagatgcctgttatttcacatcactgtctttttgtgtatcatagtctgcaccttacaaatattaataaatgttccaataataggtgaaaaaaaaaa

SEQ ID NO: 92018 - DNA, 3828 bp, Artificial Sequence
  derived and/or modified sequence
agacatgtaaaaatagtacttctagtttagagactgcaaaaatatgaatgcaccatgccgccacattatctccattcctccagtgcccgcctgacactggccctgaatcagggctggagggggcaggcatttctcatttactaaagtgctggatgcagcccttgaggttcggcagaagcagaaagctgcggtgagtctggctgtgtcttgaaagcgccacaagcagcagctgctgagccatggctgaaggggaaatcaccaccttcacagccctgaccgagaagtttaatctgcctccagggaattacaagaagcccaaactcctctactgtagcaacgggggccacttcctgaggatccttccggatggcacagtggatgggacaagggacaggagcgaccagcacattcagctgcagctcagtgcggaaagcgtgggggaggtgtatataaagagtaccgagactggccagtacttggccatggacaccgacgggcttttatacggctcacagacaccaaatgaggaatgtttgttcctggaaaggctggaggagaaccattacaacacctatatatccaagaagcatgcagagaagaattggtttgttggcctcaagaagaatgggagctgcaaacgcggtcctcggactcactatggccagaaagcaatcttgtttctccccctgccagtctcttctgattaaagagatctgttctgggtgttgaccactccagagaagtttcgaggggtcctcacctggttgacccaaaaatgttcccttgaccattggctgcgctaacccccagcccacagagcctgaatttgtaagcaacttgcttctaaatgcccagttcacttctttgcagagccttttacccctgcacagtttagaacagagggaccaaattgcttctaggagtcaactggctggccagtctgggtctgggtttggatctccaattgcctcttgcaggctgagtccctccatgcaaaagtggggctaaatgaagtgtgttaaggggtcggctaagtgggacattagtaactgcacactatttccctctactgagtaaaccctatctgtgattcccccaaacatctggcatggctcccttttgtccttcctgtgccctgcaaatattagcaaagaagcttcatgccaggttaggaaggcagcattccatgaccagaaacagggacaaagaaatccccccttcagaacagaggcatttaaaatggaaaagagagattggattttggtgggtaacttagaaggatggcatctccatgtagaataaatgaagaaagggaggcccagccgcaggaaggcagaataaatccttgggagtcattaccacgccttgaccttcccaaggttactcagcagcagagagccctgggtgacttcaggtggagagcactagaagtggtttcctgataacaagcaaggatatcagagctgggaaattcatgtggatctggggactgagtgtgggagtgcagagaaagaaagggaaactggctgaggggataccataaaaagaggatgatttcagaaggagaaggaaaaagaaagtaatgccacacattgtgcttggcccctggtaagcagaggctttggggtcctagcccagtgcttctccaacactgaagtgcttgcagatcatctggggacctggtttgaatggagattctgattcagtgggttgggggcagagtttctgcagttccatcaggtcccccccaggtgcaggtgctgacaatactgctgccttacccgccatacattaaggagcagggtcctggtcctaaagagttattcaaatgaaggtggttcgacgccccgaacctcacctgacctcaactaacccttaaaaatgcacacctcatgagtctacctgagcattcaggcagcactgacaatagttatgcctgtactaaggagcatgattttaagaggctttggcccaatgcctataaaatgcccatttcgaagatatacaaaaacatacttcaaaaatgttaaacccttaccaacagcttttcccaggagaccatttgtattaccattacttgtataaatacacttcctgcttaaacttgacccaggtggctagcaaattagaaacaccattcatctctaacatatgatactgatgccatgtaaaggcctttaataagtcattgaaatttactgtgagactgtatgttttaattgcatttaaaaatatatagcttgaaagcagttaaactgattagtattcaggcactgagaatgatagtaataggatacaatgtataagctactcacttatctgatacttatttacctataaaatgagatttttgttttccactgtgctattacaaattttcttttgaaagtaggaactcttaagcaatggtaattgtgaataaaaattgatgagagtgttagctcctgtttcatatgaaattgaagtaattgttaactaaaaacaattccttagtaactgaactgtcatatttagaatggaaggaaaatgacagtttgtgaaagttcaaagcaatagtgcaattgaagaattgacctaagtaagctgacattatggttaataatagtattttagatttgtgcagcaaaataatttcataacttttttgtttttgttacttggataagatcaatctgttttattttagtaaatctttgcaggcaagttagagaaaatgcagtgtggcttaacgtctctttagtatgaagatttggccagaaaaagatacccagagaggaaatctaagataattataatggtccatactttttattgtatgaatcaaactcaagcataacattggccaaggaaaattaaataccattgctaacttgtgaaatggaagtctgtgatttcggagatgcaaagcattgtagtaaaaacaccaatgtgacctcgaccatctcagcccagatatcattcatatatctgttcaatgactattaaggtgcctactgtgtgctaggcactgtactggatactggggaccttgtctgtctggtttgctgctgtatcttctcccagggcattatatttatgatgaaagatgctgtggattcaattctttcagtcaagaataaacacagactttgtaggttcctgctgaataaagcaaatcccagaaacccagattttggaagaatcagcaaccccagcataaaataaacccctatcaaaatgtcagaggacatggcaaggtaaacttagcattttcaactttagaaccgggtcagcttcagggggactgctttcaaatcagccaaagagcctgtcagatcttcttagaaggaagaggttggtagttccctgctctgttttgaacatgctctagtttattaacctggggacattcccattgctgtcttaagtaagtctcatagccagctcctgtcacgtgactctcatatggattcattttcgggccagctctgaacaaagcatcatgaacatatgtgcttttggtcgtttgcaatgtgatggtggtggaggtaggtattggtttccttggaaggcatgataagaaagattcacaatggccaacagtgtgtatgaacaaaaaactgattggagcatcagctagtactgaaggtccttgctttgtgtcagaggcaaaggaacccaaggcgccaagtcctcagccttgagtgtactgctgacaactaaactcacaggctgcaaagcagacctctgatgaagatgcctgttatttcacatcactgtctttttgtgtatcatagtctgcaccttacaaatattaataaatgttccaataataggtgaaaaaaaaaa

SEQ ID NO: 92019 - DNA, 3812 bp, Artificial Sequence
  derived and/or modified sequence
tcaaaatgacctaagatattctgagtcagagaaaacaaaaggaacagcttaaagagagcaccaactcagtgaggcaaccaggcagtggggccggctggccagactcttgggggattccttagtgagtgagttcactgctcaaagaagggctttgccacttctgcagggaagccagccacgggccagcagtcttgaaagcgccacaagcagcagctgctgagccatggctgaaggggaaatcaccaccttcacagccctgaccgagaagtttaatctgcctccagggaattacaagaagcccaaactcctctactgtagcaacgggggccacttcctgaggatccttccggatggcacagtggatgggacaagggacaggagcgaccagcacattcagctgcagctcagtgcggaaagcgtgggggaggtgtatataaagagtaccgagactggccagtacttggccatggacaccgacgggcttttatacggctcacagacaccaaatgaggaatgtttgttcctggaaaggctggaggagaaccattacaacacctatatatccaagaagcatgcagagaagaattggtttgttggcctcaagaagaatgggagctgcaaacgcggtcctcggactcactatggccagaaagcaatcttgtttctccccctgccagtctcttctgattaaagagatctgttctgggtgttgaccactccagagaagtttcgaggggtcctcacctggttgacccaaaaatgttcccttgaccattggctgcgctaacccccagcccacagagcctgaatttgtaagcaacttgcttctaaatgcccagttcacttctttgcagagccttttacccctgcacagtttagaacagagggaccaaattgcttctaggagtcaactggctggccagtctgggtctgggtttggatctccaattgcctcttgcaggctgagtccctccatgcaaaagtggggctaaatgaagtgtgttaaggggtcggctaagtgggacattagtaactgcacactatttccctctactgagtaaaccctatctgtgattcccccaaacatctggcatggctcccttttgtccttcctgtgccctgcaaatattagcaaagaagcttcatgccaggttaggaaggcagcattccatgaccagaaacagggacaaagaaatccccccttcagaacagaggcatttaaaatggaaaagagagattggattttggtgggtaacttagaaggatggcatctccatgtagaataaatgaagaaagggaggcccagccgcaggaaggcagaataaatccttgggagtcattaccacgccttgaccttcccaaggttactcagcagcagagagccctgggtgacttcaggtggagagcactagaagtggtttcctgataacaagcaaggatatcagagctgggaaattcatgtggatctggggactgagtgtgggagtgcagagaaagaaagggaaactggctgaggggataccataaaaagaggatgatttcagaaggagaaggaaaaagaaagtaatgccacacattgtgcttggcccctggtaagcagaggctttggggtcctagcccagtgcttctccaacactgaagtgcttgcagatcatctggggacctggtttgaatggagattctgattcagtgggttgggggcagagtttctgcagttccatcaggtcccccccaggtgcaggtgctgacaatactgctgccttacccgccatacattaaggagcagggtcctggtcctaaagagttattcaaatgaaggtggttcgacgccccgaacctcacctgacctcaactaacccttaaaaatgcacacctcatgagtctacctgagcattcaggcagcactgacaatagttatgcctgtactaaggagcatgattttaagaggctttggcccaatgcctataaaatgcccatttcgaagatatacaaaaacatacttcaaaaatgttaaacccttaccaacagcttttcccaggagaccatttgtattaccattacttgtataaatacacttcctgcttaaacttgacccaggtggctagcaaattagaaacaccattcatctctaacatatgatactgatgccatgtaaaggcctttaataagtcattgaaatttactgtgagactgtatgttttaattgcatttaaaaatatatagcttgaaagcagttaaactgattagtattcaggcactgagaatgatagtaataggatacaatgtataagctactcacttatctgatacttatttacctataaaatgagatttttgttttccactgtgctattacaaattttcttttgaaagtaggaactcttaagcaatggtaattgtgaataaaaattgatgagagtgttagctcctgtttcatatgaaattgaagtaattgttaactaaaaacaattccttagtaactgaactgtcatatttagaatggaaggaaaatgacagtttgtgaaagttcaaagcaatagtgcaattgaagaattgacctaagtaagctgacattatggttaataatagtattttagatttgtgcagcaaaataatttcataacttttttgtttttgttacttggataagatcaatctgttttattttagtaaatctttgcaggcaagttagagaaaatgcagtgtggcttaacgtctctttagtatgaagatttggccagaaaaagatacccagagaggaaatctaagataattataatggtccatactttttattgtatgaatcaaactcaagcataacattggccaaggaaaattaaataccattgctaacttgtgaaatggaagtctgtgatttcggagatgcaaagcattgtagtaaaaacaccaatgtgacctcgaccatctcagcccagatatcattcatatatctgttcaatgactattaaggtgcctactgtgtgctaggcactgtactggatactggggaccttgtctgtctggtttgctgctgtatcttctcccagggcattatatttatgatgaaagatgctgtggattcaattctttcagtcaagaataaacacagactttgtaggttcctgctgaataaagcaaatcccagaaacccagattttggaagaatcagcaaccccagcataaaataaacccctatcaaaatgtcagaggacatggcaaggtaaacttagcattttcaactttagaaccgggtcagcttcagggggactgctttcaaatcagccaaagagcctgtcagatcttcttagaaggaagaggttggtagttccctgctctgttttgaacatgctctagtttattaacctggggacattcccattgctgtcttaagtaagtctcatagccagctcctgtcacgtgactctcatatggattcattttcgggccagctctgaacaaagcatcatgaacatatgtgcttttggtcgtttgcaatgtgatggtggtggaggtaggtattggtttccttggaaggcatgataagaaagattcacaatggccaacagtgtgtatgaacaaaaaactgattggagcatcagctagtactgaaggtccttgctttgtgtcagaggcaaaggaacccaaggcgccaagtcctcagccttgagtgtactgctgacaactaaactcacaggctgcaaagcagacctctgatgaagatgcctgttatttcacatcactgtctttttgtgtatcatagtctgcaccttacaaatattaataaatgttccaataataggtgaaaaaaaaaa

SEQ ID NO: 92020 - DNA, 2865 bp, Artificial Sequence
  derived and/or modified sequence
atgaacaatcaccagctcgaactggccaagcagctccataaagaaggtcacctgttctactgtacctgtagggttctgacctgcccagggcaggcgaagtccattgcctcagcaccaggcaaatgtcaggactctgcagccctgacctccaccgcatttagcggactagatttcggcttgctcagtgggtatctgcacaagcaggccctcgtcaccgccactcatcctacttgtaccctgctgtttccgtcctgccacgctttcttccctctgcccctgacaccaacactgtataagatgcacaagggatggaaaaattactgttcccagaaaagcctgaacgaagccagcatggatgagtatctggggagccttggtctgttcaggaaactcaccgctaaggacgctagctgcctattcagggcaatctcagagcagctgttctgttctcaggtccaccacttggaaatcaggaaggcatgtgtgtcatacatgcgcgagaatcagcagaccttcgagtcttatgttgaaggatcattcgagaagtacctggagaggcttggggaccctaaagagtcggcaggacagctggaaattcgtgctctgtcactcatttataatcgggactttattttataccgcttcccaggcaaacctccgacctacgtaacagataacgggtatgaggataagatcctgctctgttattccagtagcggccattatgactcagtgtacagcaaacagttccagagttccgccgcagtttgccaggcagttctttacgagatactatacaaagatgtctttgttgtagacgaagaggagctcaagaccgctatcaagctgttcaggagcgggagcaaaaaaaacaggaacaacgccgtgaccgggtctgaagatgcacacactgattacaaatccagcaaccaaaaccggatggaggagtggggtgcctgctacaacgcggagaatatcccagaagggtataataagggaacagaggaaactaagtccccggagaatccctccaaaatgcccttcccctacaaagtacttaaggcgctggacccagaaatatatagaaacgtggaattcgatgtctggctggacagtcgaaaggagctgcagaaatccgattacatggaatacgctggccggcagtattacttgggagataagtgtcaggtttgcctcgaaagtgagggccgttattacaatgctcatattcaggaagtcgggaacgaaaataattcagtaacagtctttatcgaagagctcgccgaaaagcacgtcgtcccactcgctaacttgaagcccgtgacgcaagtgatgtccgttccagcctggaatgccatgccctcccggaaagggcggggctaccagaagatgccaggcggctatgttccagaaattgtaatctccgagatggatatcaagcagcaaaagaagatgtttaaaaagatcaggggcaaggaggtatatatgaccatggcttatgggaaaggcgaccctcttctcccgcctcgcttgcagcactccatgcactacggacatgatcctcctatgcactattctcagacagcgggaaatgtgatgagcaatgagcattttcatcctcaacacccctcacctagacagggtagaggctatgggatgcctaggaattccagcaggttcattaacaggcataatatgcctggacccaaggttgacttttaccccggtccaggaaagcggtgttgtcaaagctacgacaatttcagctaccggtctcgatcatttaggcggagtcatcgccagatgagttgcgtgaataaggagtctcagtacggcttcacacccggcaatggccagatgccccgaggcctcgaagagaccattacattctacgaggtggaggaaggtgacgagaccgcttaccctacgttgcctaaccacggaggccccagcaccatggtgcccgctacctcaggatattgcgtcggccgacggggacactcttccgggaagcagaccctcaatctggaggaaggaaacgggcagagcgaaaatgggcgctatcacgaggagtatctttacagggcagagccggattatgagacatccggcgtctacagtaccacggcatctacagcaaatctgtctctgcaggacagaaaatcctgtagcatgtcacctcaggacacagtgacgagctataactacccccaaaaaatgatgggaaacatagccgccgtcgctgcctcctgtgccaacaacgtgcccgctccagtcctgtccaacggcgcagcagcgaaccaggcgatatctacaacaagcgtcagctctcagaacgctatccaaccattgttcgtgtcaccacctacacacggcaggcccgacacaaaggtgctacagtactacttcaatctgggcctacagtgctactatcactcttactggcattccatggtgtacgtcccccaaatgcagcagcaattacatgtggaaaattatcccgtctacaccgaaccccccctggtagaccagactgtcccccagtgctactccgaggtgaggcgcgaggatggtatacaagctgaggcttcagctaatgatacattcccaaacgcagacagcagcagcgtgccccatggtgccgtctactatcctgtgatgtccgatccctatgggcagcctcccttgccaggattcgatagctgtcttccggtggtgcctgattacagctgtgtccccccatggcatccggttgggaccgcgtatggcggatcgagtcagattcacggcgccattaacccagggcccattggatgcatcgccccttcccctcctgcaagccattacgtccctcagggaatgtag

SEQ ID NO: 92021 - DNA, 2865 bp, Artificial Sequence
  derived and/or modified sequence
atgaacaaccaccagctggagctggccaagcagctgcacaaggagggccacctgttctactgcacctgccgggtgctgacctgccccggccaggccaagagcatcgccagcgcccctgggaagtgccaggacagcgctgccctgaccagcacagccttcagcggcctggactttggcctgctgagcggctacctgcacaagcaggccctggtgacagccacccaccccacctgcaccctgctcttccccagctgccacgccttcttccccctgcccctgacccccaccctgtacaagatgcacaagggctggaagaactactgcagccagaagagcctgaatgaggcctccatggatgagtacctgggcagcctgggcctcttcaggaagctgacagccaaggatgccagctgcctcttccgggccatcagcgagcagctgttctgcagccaggtgcaccacctggagatcaggaaggcctgtgtgtcctacatgagggagaaccagcagacctttgagagctatgtggagggcagctttgagaagtacctggagcggctgggggaccccaaggagagcgctggccagctggagatccgggccctgagcctcatctacaacagagacttcatcctgtaccgcttccctgggaagccacccacctacgtgacagacaatggctatgaggacaagatcctgctgtgctacagcagcagcggccactatgacagcgtgtacagcaagcagttccagagcagcgctgctgtgtgccaggccgtgctgtatgagatcctgtacaaggatgtgtttgtggtggatgaggaggagctgaagacagccatcaagctgttccgcagcggcagcaagaagaacagaaataatgctgtgactggaagtgaagatgcccacacagactacaagagcagcaaccagaacaggatggaggagtggggcgcctgctacaatgctgagaacatccctgagggctacaacaagggcacagaggagaccaagagccctgagaaccccagcaagatgcccttcccctacaaggtgctgaaggccctggaccctgagatctacagaaatgtggagtttgatgtgtggctggacagcaggaaggagctgcagaagagtgactacatggagtatgccggccggcagtactacctgggggacaagtgccaggtgtgcctggagagcgagggccgctactacaatgcccacatccaggaggtgggcaatgaaaacaacagcgtgacagtgttcatcgaggagctggccgagaagcacgtggtgcccctggccaacctgaagcctgtgacccaggtgatgtctgtgcctgcctggaatgccatgcccagcaggaagggccggggctaccagaagatgcctgggggctacgtgcctgagatcgtcatcagcgagatggacatcaagcagcagaagaagatgttcaagaagatccggggcaaggaggtgtacatgaccatggcctacggcaagggggaccccctgctgcccccccggctgcagcacagcatgcactacggccatgacccccccatgcactacagccagacagctggaaatgtgatgagcaatgagcacttccacccccagcaccccagcccccggcagggccggggctacggcatgcccaggaacagcagccgcttcatcaacagacacaacatgcctggccccaaggtggacttctacccaggccctgggaagcgctgctgccagagctatgacaacttctcctaccgcagccgctccttccgccgcagccaccggcagatgagctgtgtgaacaaggagagccagtatggcttcaccccaggaaatggccagatgccccggggcctggaggagaccatcaccttctatgaggtggaggagggagatgaaacagcctaccccaccctgcccaaccacggcggccccagcaccatggtgcctgccaccagcggctactgtgtgggccggcggggccacagcagcggcaagcagaccctgaacctggaggagggcaatggccagagtgaaaatggccgctaccacgaggagtacctgtacagagctgagccagactatgagaccagcggcgtgtacagcaccacagccagcacagccaacctgagcctgcaggacaggaagagctgcagcatgagcccccaggacacagtgaccagctacaactacccccagaagatgatgggcaacattgctgctgtggccgccagctgtgccaacaacgtgcctgcccctgtgctgagcaatggagctgctgccaaccaggccatcagcaccacctctgtgagcagccagaatgccatccagcccctgtttgtgagcccccccacccacggccgcccagacaccaaggtgctgcagtactacttcaacctgggcctgcagtgctactaccacagctactggcacagcatggtgtatgtgccccagatgcagcagcagctgcacgtggagaactaccctgtgtacacagagccccccctggtggaccagacagtgccccagtgctacagcgaggtgcggcgggaggatggcatccaggccgaggccagcgccaatgacaccttccccaatgctgacagcagctctgtgccccatggagctgtgtactaccctgtgatgtctgacccctacggccagccccccctgcccggctttgacagctgcctgcctgtggtgcctgactacagctgtgtgcccccctggcaccctgtgggcacagcctacggcggcagcagccagatccatggagccatcaaccctggccccatcggctgcatcgcccccagccccccagccagccactacgtgccccagggcatgtag

SEQ ID NO: 92022 - DNA, 2865 bp, Artificial Sequence
  derived and/or modified sequence
atgaacaaccaccagctggagctggccaagcagctgcacaaggaggggcacctcttttactgcacttgccgcgtcctgacctgccccggccaggctaagagcatcgcctctgctccgggtaagtgccaagatagcgccgctcttacttctacggccttcagcggactcgacttcggcttactgtccggttacctgcacaagcaggccctggttacagcaacccaccctacatgtaccctgctgtttccaagctgccacgccttctttcctctgcctctgactcccacgctctacaaaatgcacaagggatggaaaaactattgcagccagaagtctttaaacgaggcatccatggatgagtacctgggatcactcggactgttcagaaagttgaccgcgaaggacgccagctgcctgttcagagctattagtgagcagctcttttgcagccaggtgcaccaccttgaaatccgcaaagcttgtgtatcctatatgcgggaaaatcaacagacatttgaatcctatgtcgaaggttcgttcgaaaagtatctcgaacgcctgggcgatcctaaagaatcggcagggcagctggagattcgggccctttctctgatctataatcgcgactttattctctacaggtttcccggaaagccacccacatatgttaccgataatgggtatgaagataagatcctgctgtgctacagcagctctgggcactacgactccgtgtattccaagcagtttcagtcgagcgccgccgtttgtcaggctgtgctctatgagatactgtacaaggatgtctttgtagtggatgaggaggagctcaaaacagccattaaactgtttcggtccggcagcaagaagaaccgcaataatgccgtgaccggtagcgaagatgcacatactgattacaagtcctcgaaccagaatcgaatggaggaatggggggcatgctacaatgccgagaacattcccgagggctacaacaaaggcacagaagagaccaaatccccagagaatccgtctaaaatgcccttcccttacaaggtgctgaaggcgttggacccggagatttaccgcaacgtggaatttgatgtctggctcgattctaggaaggagctgcagaagagcgactacatggaatacgctggccgccaatattatttgggcgacaaatgtcaagtctgtttggaatcggagggacgatactacaatgcccatattcaggaggtcggcaacgaaaacaactcagtcacagtatttatagaagagctggccgagaagcatgtagtccctctggcaaacctcaaacctgtcactcaagtgatgtccgtacccgcttggaacgctatgccatctcggaaagggcgcggataccaaaagatgccaggtggctacgttccagagatcgtgatatctgaaatggacattaagcagcagaaaaaaatgttcaaaaagattaggggaaaagaggtctacatgacaatggcttatggcaagggggacccactcctcccgccgaggctccagcactctatgcactatggccacgatccccccatgcactatagccagaccgctggtaatgtgatgtcaaatgagcattttcacccacagcatccgagtcctcgacaggggagaggctatggaatgccacgtaactcatcacggtttataaacaggcataacatgcctgggcccaaagtcgatttctaccctggtcccgggaaacggtgttgccagagttacgataacttcagctatcgtagcagatctttccgccgatctcaccgtcagatgagttgtgtcaacaaagaatcccagtacggttttacaccaggcaacggtcagatgcctcgagggctggaagagacaatcaccttttacgaagtggaggaaggggacgagactgcctacccaaccctccctaatcacggtggaccttcgacaatggttccggcgaccagcggatattgtgtcgggagacggggccattcttcaggcaagcaaaccctcaacctggaggagggtaacggccagtcagaaaatggccggtaccacgaggagtatctgtatcgagctgagcctgactacgagacatccggggtctactcaacaacagcctccaccgctaatctgtctctgcaggaccgcaagagctgttcaatgtcccctcaggataccgtgacttcttataattatcctcagaaaatgatgggcaatatcgccgctgtcgcagcgagctgcgcaaacaacgtacccgctccagtgctgagtaacggagcggcagcgaaccaggcaatctcaactacaagcgtttccagtcagaacgccatccagcctctattcgtcagccccccaacccacggtcggcctgatacaaaggttctccagtactactttaatctgggacttcagtgctattatcattcttactggcatagtatggtgtatgttccacaaatgcaacaacaattgcacgtcgaaaactaccctgtgtacaccgagccccccttggtggatcaaacagtgccacagtgttactccgaggtgaggagggaagacggcatacaggccgaggcatcggctaatgatacctttcctaatgcagattcttcgtcagtaccccatggcgccgtctactatcctgtgatgtcagacccttatgggcaaccaccgttacccgggtttgattcttgccttcccgttgtgcccgactacagttgcgtcccaccttggcacccagtgggcaccgcttatggcggctcctctcagattcatggtgctatcaatccaggccctattgggtgtatcgcaccctccccacctgctagtcattacgttccgcagggcatgtag

SEQ ID NO: 92023 - DNA, 2865 bp, Artificial Sequence
  derived and/or modified sequence
atgaacaatcaccagttagagctggccaaacagctgcacaaagaggggcatcttttttactgcacctgtagagtgctgacatgccccggacaggctaagagcatcgctagtgccccagggaaatgtcaggactctgccgctcttacctctacggctttctcaggcctggacttcggcctgctatccggatacctgcataagcaagctctggtcacagctacgcacccaacatgtaccctcctttttcctagttgtcatgcttttttccccctgcccctgacacctacactgtataagatgcacaaaggttggaaaaactactgcagccaaaaatccctgaatgaagccagcatggatgagtacctgggaagtcttggtctttttcgtaagctgactgctaaagacgcctcttgtctctttcgtgctatttcagagcagttgttttgctctcaggttcaccatctggagatccggaaggcgtgtgtgtcttatatgcgcgaaaaccagcagaccttcgaatcttacgtggaggggagcttcgaaaaatacctggaaagacttggagacccaaaggaatccgcagggcagctggaaattagggctttgtcactgatttataatcgggatttcatcctgtatcggttccccggaaaaccccctacttacgttaccgataacggatacgaagataagattcttttgtgctacagtagctcaggccactacgacagcgtgtactccaaacaattccagagctccgccgctgtttgccaagcggtattatacgagatcctttacaaagatgtcttcgtggtggatgaggaagaactcaagacagccatcaagttattcagaagcggctctaaaaagaataggaacaacgcagtaactgggtccgaagacgcgcacacggactacaaaagcagcaaccaaaaccgcatggaggagtggggggcttgctataacgccgaaaacattcctgaagggtacaacaaaggaacggaagaaaccaagtcacctgagaatccaagcaagatgccgtttccatacaaggtactgaaagccctggacccagagatctaccgcaacgtggaattcgatgtgtggctggattcaagaaaagaactgcagaaaagtgactacatggagtacgcaggacggcaatactacctcggtgacaaatgtcaggtctgcctggagagtgagggacgctactacaacgcacacatccaggaagtgggaaacgaaaacaacagcgtaactgtatttatcgaggaactcgccgagaagcatgtagtgccgcttgcgaacctgaaacccgtgactcaggtcatgagtgtgcccgcatggaatgcaatgccgtccagaaagggcagaggctatcagaaaatgccagggggatacgtccccgagattgtgatcagcgaaatggatatcaagcaacagaagaagatgttcaaaaaaattcggggaaaggaggtgtatatgactatggcatacggaaaaggggatcccctgcttccacccaggctccagcattcaatgcattacggacatgatccccctatgcactacagccagacagcaggaaacgtcatgagcaatgaacattttcacccacagcacccaagccccagacagggacgtgggtatggcatgccacggaattcctctcgcttcatcaatcgccacaacatgccagggccaaaagtggatttttaccctggcccaggaaagagatgttgtcagtcgtatgataacttttcttatcggtctcgttctttccgccgatcacatcgccaaatgtcgtgtgtcaacaaagaaagtcagtacggctttacgccagggaacgggcagatgcctcggggtctcgaagagacaatcaccttttacgaggttgaggagggggatgagacagcttaccccacacttccaaatcatggtggtccgtcaaccatggtacctgccacttccggctattgtgtcgggagacgagggcatagcagtggcaagcagacgctcaatctggaggaagggaacgggcagtctgaaaatggccgatatcacgaagagtatctgtatcgggcagaacccgactatgagacttcaggagtgtacagcactacagcaagtaccgccaacctgagccttcaggacagaaaatcctgcagcatgagtccgcaggacactgtcacaagctacaattatccgcagaagatgatggggaatattgctgccgtcgctgcgtcctgtgccaataacgtccccgcaccagtactctctaatggcgctgcagctaaccaggctatatctaccacctctgtgtcatcccagaatgctatccagcctttgttcgtgtccccaccgacccatggaagacccgatacaaaggttcttcaatattatttcaatctcgggctccagtgctattaccacagttactggcactcaatggtgtatgtgccacagatgcagcagcagctccacgtggagaattacccagtctataccgagccacccctggtagatcaaaccgtgcctcagtgttacagtgaggttcggcgtgaggatggaatccaagcagaagcctccgccaacgacacattcccaaatgctgactcaagcagcgtaccccatggcgctgtgtactatcccgtgatgagcgacccctacggccagccccctcttcctggcttcgacagctgcctccctgtcgtgccagactactcctgcgtccctccatggcaccccgttggcacagcatacggcggttcaagccagatccacggcgcaataaatccgggacccattggatgtatcgcaccatcccccccagcatcacactatgtgccccagggcatgtag

SEQ ID NO: 92024 - DNA, 2865 bp, Artificial Sequence
  derived and/or modified sequence
atgaacaaccaccagctggagctggccaagcagctgcacaaggagggccacctgttctactgcacctgcagagtgctgacctgccccggccaggccaagagcatcgccagcgcccccggcaagtgccaggacagcgccgccctgaccagcaccgccttcagcggcctggacttcggcctgctgagcggctacctgcacaagcaggccctggtgaccgccacccaccccacctgcaccctgctgttccccagctgccacgccttcttccccctgcccctgacccccaccctgtacaagatgcacaagggctggaagaactactgcagccagaagagcctgaacgaggccagcatggacgagtacctgggcagcctgggcctgttcagaaagctgaccgccaaggacgccagctgcctgttcagagccatcagcgagcagctgttctgcagccaggtgcaccacctggagatcagaaaggcctgcgtgagctacatgagagagaaccagcagaccttcgagagctacgtggagggcagcttcgagaagtacctggagagactgggcgaccccaaggagagcgccggccagctggagatcagagccctgagcctgatctacaacagagacttcatcctgtacagattccccggcaagccccccacctacgtgaccgacaacggctacgaggacaagatcctgctgtgctacagcagcagcggccactacgacagcgtgtacagcaagcagttccagagcagcgccgccgtgtgccaggccgtgctgtacgagatcctgtacaaggacgtgttcgtggtggacgaggaggagctgaagaccgccatcaagctgttcagaagcggcagcaagaagaacagaaacaacgccgtgaccggcagcgaggacgcccacaccgactacaagagcagcaaccagaacagaatggaggagtggggcgcctgctacaacgccgagaacatccccgagggctacaacaagggcaccgaggagaccaagagccccgagaaccccagcaagatgcccttcccctacaaggtgctgaaggccctggaccccgagatctacagaaacgtggagttcgacgtgtggctggacagcagaaaggagctgcagaagagcgactacatggagtacgccggcagacagtactacctgggcgacaagtgccaggtgtgcctggagagcgagggcagatactacaacgcccacatccaggaggtgggcaacgagaacaacagcgtgaccgtgttcatcgaggagctggccgagaagcacgtggtgcccctggccaacctgaagcccgtgacccaggtgatgagcgtgcccgcctggaacgccatgcccagcagaaagggcagaggctaccagaagatgcccggcggctacgtgcccgagatcgtgatcagcgagatggacatcaagcagcagaagaagatgttcaagaagatcagaggcaaggaggtgtacatgaccatggcctacggcaagggcgaccccctgctgccccccagactgcagcacagcatgcactacggccacgacccccccatgcactacagccagaccgccggcaacgtgatgagcaacgagcacttccacccccagcaccccagccccagacagggcagaggctacggcatgcccagaaacagcagcagattcatcaacagacacaacatgcccggccccaaggtggacttctaccccggccccggcaagagatgctgccagagctacgacaacttcagctacagaagcagaagcttcagaagaagccacagacagatgagctgcgtgaacaaggagagccagtacggcttcacccccggcaacggccagatgcccagaggcctggaggagaccatcaccttctacgaggtggaggagggcgacgagaccgcctaccccaccctgcccaaccacggcggccccagcaccatggtgcccgccaccagcggctactgcgtgggcagaagaggccacagcagcggcaagcagaccctgaacctggaggagggcaacggccagagcgagaacggcagataccacgaggagtacctgtacagagccgagcccgactacgagaccagcggcgtgtacagcaccaccgccagcaccgccaacctgagcctgcaggacagaaagagctgcagcatgagcccccaggacaccgtgaccagctacaactacccccagaagatgatgggcaacatcgccgccgtggccgccagctgcgccaacaacgtgcccgcccccgtgctgagcaacggcgccgccgccaaccaggccatcagcaccaccagcgtgagcagccagaacgccatccagcccctgttcgtgagcccccccacccacggcagacccgacaccaaggtgctgcagtactacttcaacctgggcctgcagtgctactaccacagctactggcacagcatggtgtacgtgccccagatgcagcagcagctgcacgtggagaactaccccgtgtacaccgagccccccctggtggaccagaccgtgccccagtgctacagcgaggtgagaagagaggacggcatccaggccgaggccagcgccaacgacaccttccccaacgccgacagcagcagcgtgccccacggcgccgtgtactaccccgtgatgagcgacccctacggccagccccccctgcccggcttcgacagctgcctgcccgtggtgcccgactacagctgcgtgcccccctggcaccccgtgggcaccgcctacggcggcagcagccagatccacggcgccatcaaccccggccccatcggctgcatcgcccccagcccccccgccagccactacgtgccccagggcatgtag

SEQ ID NO: 92025 - protein, 559 aa, Artificial Sequence
  derived and/or modified sequence
MGDPGSEIIESVPPAGPEASESTTDENEDDIQFVSEGPLRPVLEYIDLVSSDDEEPSTSYTDRMPESKVPSSENHRPEMCSSCNVPLPIGDSSSFSGSCSSSPERIVSQTSSVENPLENQKNDQNNSDTKISETETLKSSQNFQTLPSSPLLVPQESLASSEVKENLRIDSSSASQHGRDAILYLQTQVAEMSRVIRDLQSRSCFRFHHSRPSENSSVPWDISTSKEENLSTVEEETDYKSPSADDKGQPSDPSQSSFTGLLKRMEQRGVIKRVTLQSEAESCEGKPDCVTSKKRLVPPLHPLLRIATTEVFKDPADCHPSSFMGHRVYPVAKDTSPFQPNPPAEGPIVEALEHSKRGNTTSPLDSTSKEMEVMGCRFYHAASIAARAASYMAYMTQYQRKLWEDMEDLVHDPEFDRGKARCIISDGMDAGLWQLCTTRDIMDSVVRVMAMAIDYRRQAWLRLTSLTKKTQEKISHLPFDGTSLFGQDVKAVVAEDNNIKENDYKDHKYYNQHRYFYSHDQKAHYHNRGYSKGDWYKPRNHPYRYRKKGDSPERHGYKN

SEQ ID NO: 92026 - DNA, 99 bp, Artificial Sequence
  derived and/or modified sequence
atggcgcctaagagacaatctccgcttccaccacagaaaaagaagccaagaccaccacctgccctgggacccgaagaaacttcggcctcagccggttag

SEQ ID NO: 92027 - DNA, 1680 bp, Artificial Sequence
  derived and/or modified sequence
atgggcgaccccggcagcgagatcatcgagagcgtgccccccgccggccccgaggccagcgagagcaccaccgacgagaacgaggacgacatccagttcgtgagcgagggccccctgagacccgtgctggagtacatcgacctggtgagcagcgacgacgaggagcccagcaccagctacaccgacagaatgcccgagagcaaggtgcccagcagcgagaaccacagacccgagatgtgcagcagctgcaacgtgcccctgcccatcggcgacagcagcagcttcagcggcagctgcagcagcagccccgagagaatcgtgagccagaccagcagcgtggagaaccccctggagaaccagaagaacgaccagaacaacagcgacaccaagatcagcgagaccgagaccctgaagagcagccagaacttccagaccctgcccagcagccccctgctggtgccccaggagagcctggccagcagcgaggtgaaggagaacctgagaatcgacagcagcagcgccagccagcacggcagagacgccatcctgtacctgcagacccaggtggccgagatgagcagagtgatcagagacctgcagagcagaagctgcttcagattccaccacagcagacccagcgagaacagcagcgtgccctgggacatcagcaccagcaaggaggagaacctgagcaccgtggaggaggagaccgactacaagagccccagcgccgacgacaagggccagcccagcgaccccagccagagcagcttcaccggcctgctgaagagaatggagcagagaggcgtgatcaagagagtgaccctgcagagcgaggccgagagctgcgagggcaagcccgactgcgtgaccagcaagaagagactggtgccccccctgcaccccctgctgagaatcgccaccaccgaggtgttcaaggaccccgccgactgccaccccagcagcttcatgggccacagagtgtaccccgtggccaaggacaccagccccttccagcccaacccccccgccgagggccccatcgtggaggccctggagcacagcaagagaggcaacaccaccagccccctggacagcaccagcaaggagatggaggtgatgggctgcagattctaccacgccgccagcatcgccgccagagccgccagctacatggcctacatgacccagtaccagagaaagctgtgggaggacatggaggacctggtgcacgaccccgagttcgacagaggcaaggccagatgcatcatcagcgacggcatggacgccggcctgtggcagctgtgcaccaccagagacatcatggacagcgtggtgagagtgatggccatggccatcgactacagaagacaggcctggctgagactgaccagcctgaccaagaagacccaggagaagatcagccacctgcccttcgacggcaccagcctgttcggccaggacgtgaaggccgtggtggccgaggacaacaacatcaaggagaacgactacaaggaccacaagtactacaaccagcacagatacttctacagccacgaccagaaggcccactaccacaacagaggctacagcaagggcgactggtacaagcccagaaaccacccctacagatacagaaagaagggcgacagccccgagagacacggctacaagaactag

SEQ ID NO: 92028 - DNA, 1680 bp, Artificial Sequence
  derived and/or modified sequence
atgggagaccctggaagtgaaatcatcgaatcggtacctcccgcaggaccagaagcctccgaatccacgacagacgagaacgaagacgacatacagttcgtcagtgagggtccccttaggcccgtgttggagtacatcgatctggtatcctcagatgatgaagagccttctactagctacactgaccgtatgccggagagcaaggtaccaagttctgagaaccataggcccgagatgtgcagtagttgtaatgtgcccttacctattggtgacagctcatcctttagcggtagctgtagctcgtctcccgaacgtatagtctcccaaacctcaagcgtcgaaaaccctctggaaaatcagaaaaacgatcagaataactccgacactaaaatttcggaaacagagacactgaaaagtagccagaatttccagacactgccaagttctccactcctcgttccccaggagtccctcgcttcttccgaggtgaaggaaaacctacgtatcgattctagttccgcctctcagcacggcagagacgcgatcctgtacttacagactcaggtcgccgagatgtctagagtgatccgtgacctgcagtcacgatcttgctttagatttcaccatagtcgtccatcggaaaattcgtctgttccttgggacatcagcacaagtaaggaagagaatctgtccactgtggaagaagaaacggattataaatcacctagcgctgatgataaaggtcagccatcagatccatcccaaagcagctttacaggactgctaaaacgaatggagcagaggggagtgattaaaagggtgactctgcagtccgaggcagagtcatgcgagggaaaacccgactgcgtcactagtaagaaacgcctggtaccacctttgcaccccctgctccggattgccaccaccgaggtgttcaaggatccggctgactgccacccttcgtcgtttatgggacatcgcgtttaccctgtggctaaagacacctctccatttcagcctaaccctcctgctgagggccctattgtcgaagctttagagcactctaagcgaggcaacacaacatcacctttagacagcacctctaaagaaatggaggttatggggtgcaggttttaccacgcagctagcatagctgcacgggctgccagctacatggcctatatgactcaataccagagaaagttgtgggaggacatggaagacctggtgcatgaccccgaattcgacagaggaaaagcccgctgtatcatctctgatggaatggacgctggattgtggcagttatgcaccacaagagacatcatggactctgtggtccgcgtaatggcaatggcgatagactacaggaggcaggcatggctacgtttaactagcttgacaaagaaaacccaagaaaaaatttcccaccttccatttgatgggacatccctgtttggacaggatgtgaaggcggtcgtagcggaagacaataatattaaggagaatgactacaaggaccacaaatactataatcagcacagatatttttactcccatgatcagaaagctcattatcacaaccgcggctactccaagggggattggtataagccacggaaccacccttatagataccgcaaaaagggagatagccctgagcgacatggatataaaaactag

SEQ ID NO: 92029 - DNA, 1680 bp, Artificial Sequence
  derived and/or modified sequence
atgggagaccccggcagcgagatcattgaatctgtgcccccagctggccctgaggccagcgagagcaccacagatgaaaatgaagatgacatccagtttgtgtctgagggccccctgcggcctgtgctggagtacatcgacctggtgtccagtgatgatgaggagcccagcaccagctacacagacaggatgcctgagagcaaggtgcccagcagcgagaaccacaggcctgagatgtgcagcagctgcaatgtgcccctgcccatcggggacagcagcagcttcagcggcagctgcagcagcagccctgagcgcatcgtgtcccagaccagctctgtggagaaccccctggagaaccagaagaatgaccagaacaacagcgacaccaagatcagcgagacagagaccctgaagagcagccagaacttccagaccctgcccagcagccccctgctggtgccccaggagagcctggccagcagcgaggtgaaggagaacctgagaattgacagcagcagcgccagccagcacggcagagatgccatcctgtacctgcagacccaggtggccgagatgagcagggtcatccgggacctgcagagccgcagctgcttccgcttccaccacagccggcccagcgagaacagctctgtgccctgggacatcagcaccagcaaggaggagaacctgagcacagtggaggaggagacagactacaagagccccagcgcagatgacaagggccagcccagcgaccccagccagagcagcttcaccggcctgctgaagaggatggagcagaggggcgtcatcaagagggtgaccctgcagagcgaggccgagagctgtgagggcaagccagactgtgtgaccagcaagaagaggctggtgccccccctgcaccccctgctgcgcatcgccaccacagaggtgttcaaggaccctgctgactgccaccccagcagcttcatgggccaccgggtgtaccctgtggccaaggacaccagccccttccagcccaaccccccagctgagggccccatcgtggaggccctggagcacagcaagaggggcaacaccaccagccccctggacagcaccagcaaggagatggaggtgatgggctgccgcttctaccacgccgccagcattgctgcccgggccgccagctacatggcctacatgacccagtaccagaggaagctgtgggaggacatggaggacctggtgcatgaccctgagtttgaccggggcaaggcccgctgcatcatcagtgatggcatggatgctggcctgtggcagctgtgcaccacccgggacatcatggacagcgtggtgcgggtgatggccatggccatcgactaccgccggcaggcctggctgcggctgaccagcctgaccaagaagacccaggagaagatcagccacctgccctttgatggcaccagcctgtttggccaggatgtgaaggctgtggtggccgaggacaacaacatcaaggaaaatgactacaaggaccacaagtactacaaccagcaccgctacttctacagccatgaccagaaggcccactaccacaacagaggctacagcaagggggactggtacaagcccaggaaccacccctaccgctacaggaagaagggggacagccctgagagacatggctacaagaactag

SEQ ID NO: 92030 - DNA, 1680 bp, Artificial Sequence
  derived and/or modified sequence
atgggcgaccccggcagcgagatcatcgagagcgtgccccccgccgggccagaggcgtcggaatcgactaccgacgagaacgaggacgacatccagttcgtgagcgagggacccctgcgccccgttctggagtatattgatcttgtctcctccgatgatgaagagccttcaacttcttataccgacagaatgcccgagtcaaaggttcctagttccgagaatcatcggccagaaatgtgctcctcttgcaacgtgcctttacccatcggagatagctcgtccttcagcgggagttgtagctccagtcctgagcgcatcgtctcacaaacttcgagcgtggaaaaccccttagagaaccagaagaatgatcaaaacaactccgacacgaaaatatcagagactgagaccttgaagtcatctcagaatttccaaacactcccttcatctcccctcctggtcccccaggaatcacttgcatccagcgaagtgaaggaaaacctccgaatagattcttcatcagctagtcaacatgggagagacgctatcctgtacctgcagacacaggtcgctgagatgtccagagtcattcgtgatttgcagagccggtcatgctttaggttccaccactctagacctagcgaaaactcatccgtcccctgggatatctccacgagcaaggaggagaatctgtccaccgttgaagaggaaaccgattacaaaagtcccagcgccgacgataaggggcagccttccgatccctcacaatccagcttcacaggcctcctgaagagaatggaacagagaggagtcatcaaacgagttactctacaaagtgaggcagagagctgcgagggtaagcctgactgcgtgacgtcaaaaaagcggctggttccccctctgcacccactgcttcgaatcgccaccaccgaggtgtttaaggacccagccgattgtcacccgagttcctttatgggacatagggtatatcctgtcgcaaaagacaccagccctttccagccaaatccacctgctgaggggcctatagttgaggctctcgagcattctaagcggggaaatacaactagtccgctggacagcacctcaaaggagatggaggtgatgggctgccgattttatcacgcggcctcaatagcggctcgcgccgctagttacatggcctacatgacacagtatcagagaaagctttgggaggatatggaggaccttgtccatgaccccgagtttgaccggggaaaagcccggtgtattatctctgacggtatggatgccggcctgtggcagttgtgtacaacaagggatatcatggactctgtggttcgcgtcatggcgatggctattgactataggcggcaagcctggctgcgcctgaccagcctgacgaagaaaactcaagagaagatatcacatttaccttttgacggcacatccttgttcggtcaggacgtgaaggctgtagtggcagaggacaataatattaaggaaaacgattataaagatcacaagtattataaccaacaccgctatttctactcccacgatcagaaagctcattaccataaccgcggctactccaaaggcgattggtataagcctagaaaccatccgtacaggtatcggaaaaaaggggactcacccgagaggcacggctataaaaactag

SEQ ID NO: 92031 - DNA, 1680 bp, Artificial Sequence
  derived and/or modified sequence
atgggggacccgggaagtgagattatcgaatccgtacccccagccggacccgaagcaagtgagtctaccacagacgagaatgaggacgatattcagttcgtgagtgagggaccgctccgccctgtgctggagtatatcgatttagtgtcctcagacgacgaagagccttcaacatcctacacagaccggatgccggagagcaaggttccctcttctgaaaatcaccggccagaaatgtgctcttcatgcaatgttcccctgcctatcggcgactccagcagcttttccggcagttgcagctcatcgccggaaaggatcgtatcccaaacaagctcggtggagaaccccttggagaatcagaaaaatgatcagaataattcagacacaaagatcagcgaaactgagactctcaagagctcccagaactttcagacgctgccaagctctccattattggtgcctcaagagtctttggcgagctccgaggtgaaggaaaacctgagaattgactcgagctccgcctctcagcacggtagggacgccatattgtacctgcaaactcaggttgctgagatgtcgagggtgattcgggaccttcagagtaggtcatgtttccgctttcatcattcaaggccctccgagaactcaagcgtgccatgggatattagtacatctaaggaagagaatttatcaaccgtcgaagaagaaaccgattacaaatccccctccgccgatgacaagggtcagccctcggatccaagccagagcagctttaccggcctgctgaagcgaatggagcagcgcggagttatcaaacgggttacgctacaaagtgaggcagagtcctgcgaggggaagcctgattgcgtcacttcgaagaaacgattggtcccacccctccaccctttgctacgcattgcaacaaccgaggtattcaaagaccccgctgactgtcacccttccagcttcatggggcaccgtgtgtaccctgtggctaaggacacctccccatttcagccaaacccgcctgcagaaggaccgattgtcgaggctcttgaacatagtaaaagaggcaacacaacttccccactggatagcaccagcaaggaaatggaagtgatgggatgcagattttaccatgctgctagcatcgctgccagagctgcttcttacatggcctacatgacacaatatcagcgcaagctgtgggaggatatggaggacctggtgcacgatccagagtttgatcggggtaaggccaggtgcatcatttccgatggcatggacgccggtctgtggcagttgtgcacgacgagggatatcatggactctgtggtgcgagtgatggcaatggctatcgactaccgtagacaggcttggcttagactgacctctcttacaaagaagacccaggaaaaaattagtcacctaccctttgacggcacttccctcttcggccaggacgtgaaggccgtagtggccgaggataacaacatcaaagaaaatgactacaaagaccataagtactacaaccagcaccgatatttctactcccacgaccaaaaagcccattatcacaacaggggttactccaaaggcgactggtataaaccacggaaccatccgtatagatacagaaagaaaggggactccccagagagacacggatacaagaattag

SEQ ID NO: 92032 - DNA, 9478 bp, Artificial Sequence
  derived and/or modified sequence
agtaagggccgctcctcctttgaagaggttttgcgtctctttccgccggtggcgtcggcgctcacgcaggggcgggtcccggtagcgccaggcggtgcagggcgggaaggggattcgtggcgacggcggcggcagggacagcaggagcagtggtgctgtcagcgcggccgtcggagacatgggagacccggggtcggagataatagaatctgtccctccagctggccctgaggcatctgagtcaacaacggatgaaaatgaagacgacattcagtttgtcagtgaaggaccattacgacctgttcttgaatacattgatctggtcagcagtgatgatgaagagcctagcacctcttatactgatagaatgcctgaatctaaggtgccatcctctgagaatcatcgcccagaaatgtgctctagctgcaatgttcctcttcccattggagatagcagctccttctctgggagttgttccagcagtccagaaaggatagtttctcaaacttcctctgttgagaacccattggagaaccagaaaaatgatcaaaataattcagatactaagatctctgagacagagacccttaaatcatcacagaattttcagactctgccttcatctccacttctggtcccccaagaatctttggcctcttctgaggtcaaagagaatttacgtatagattcttcttcagcttcacagcatggacgggatgccatcctctatctccagacacaagtagctgaaatgtcccgagtgatacgtgatctgcagtccaggagctgttttagatttcatcattctaggccaagtgagaactcctcagttccttgggacatctccacctctaaagaggaaaatttatccacagttgaagaagaaactgattacaaatcaccatcagctgatgacaaagggcagccatctgaccccagccaatctagtttcacaggtcttttgaagagaatggaacaaagaggtgttataaaaagggtgacattacaatctgaagcggagtcatgtgaagggaaacctgattgtgtgacttctaaaaaacgtttggttcctccattgcatcctcttctgagaattgccaccactgaggtttttaaagaccctgctgattgccatccttcttccttcatgggacacagggtatatcctgtggccaaggacacctctcctttccaaccaaacccaccagctgaaggccccattgtagaagcattagaacacagcaaaagaggaaacacaacatcccctctagattctacctcaaaagaaatggaggtcatgggttgtaggttttaccacgctgcctccattgcagcccgagctgctagctacatggcctatatgactcaatatcagcgtaaactctgggaagacatggaagatctggttcatgacccagaatttgatcgtggaaaagcaagatgcataatatctgatggtatggatgcaggcctttggcaactttgtactactagggacataatggactctgtagtcagagttatggccatggccatagactatagacggcaggcctggcttcgacttacatctctcactaagaaaacccaggagaagatctcccacttgccctttgatggtacttccctttttggacaagatgtgaaagctgttgttgcagaagacaacaatataaaagaaaatgactataaagatcacaaatactataatcagcatcgatacttttatagtcatgatcagaaagcacattatcacaatagaggatactccaaaggggattggtacaaacctcgaaaccacccctatagatatagaaagaagggagactctccagaacgccatgggtacaagaattaataacctgtttaatgttcagcagagtagtcattcaagatcctaactattttacttgttcctccttgtacaaataggatctacaggtaggagatcatctcaaaaactggatgcatgtctggaatgatcacagctgacatttgaattctagacttttgaaatgaagtatataataaagaaactcatgacttattggccaagtgagcagtggagactttcttgaaagggttggacaaatgtttatcctttatttctggtccaaaaataagtgtggaggaggaccactcaggaatctgaatcctcttgtgattaaagaaaaatataaagatgtgttcctcaggaaaatcttatttgtaaactgaggactagcagattttgaatctagaaataatactagatgtctgtttactaagaccagaggtaaatccttaacttttaggttatcagtgcttccttgttcaggcttcagtttgacagatcttcacaaaatgacacatctgttaaaatgtctttatgtcaagatggtcaactcaccaagagtccgtactactatcaagctctgtgagacttcagaatcagccatgaagctttgtgtcaactggaattcaaatcaaattttgccaaatccagtttgcttccccttggaatggctagatgtcgcaggtctattatggacaccaactggaaaaagacttctacctgtaacatctctgtagaaattgcacagtaactatcttcatcaagactttgatggccaccataccatcactactcataaagctacatgtgagagaattgtttgttgttatcaatcctaatagtctttgacctatcaagctctcgtatcaagctgtaagactgagtcatggtagtctctcactgtaagctgggcctttcaccaagatggccttcttaaacaacctaccttctaaacatttaattcttttgagcttgatagtgcatcacactctaaatacaaaaaagatacgcacatcagtgccctggaaataaaggatgttacacgatccaggcatgcaaatctgaactcctaagaccaagaattccaaacatgcctgacaatcttgtccccttattgtaataaagagggataccatcagtctagattttattgagaatccttaagatttaaagcatagctgtggatgtggtgaagagaacaagccacacagctctgtttctggatatctaagtgatgatatccattaatgatttgaaaggctgaaatcaagatttaagtgatacgctcttggttaattggttacttaatttagtcagattcttagtgtaagagacagcttatctttttgctcccaattggtcccattaatagtttttcaccatactggaactggcagcagatacctcaattatatgtcccacagtatcttctctttagactcaaggtagtggatgtatggtatatcagcccttagatccatgtcttcacagcatgacatcaggaatggagaatatgtcaaatttgaggggtctgaatacatcacctagtattatttgcttggcagccaaaaacagttgtttttattgacagacttaattctgtaacttctgcgttttttcatctgcttgatcaaggcattttggatgtactgctaatggaatatggcactgttttacggtttatgtggcttctgttcttgccacagttgttgcacagtggtaattgatgttttctctggtgccacactttttaataatctattggaagctcattcctcctcccccatcataaccatattcagcacccatttttaaatctacttttcttccttatttgtgctacagaggttgatggcgtaaattttcctacttggaagaaattactttatcagttaatttcagggtactgtattgatcttgtttgtcctatttgtagattaaacttgaactagtcttaataaaggggatattgttttgcaaatttagcccagtcatatcaagagttaatatttatcttatttttctgtattttactcaaaattttatttccacttctgtagaaataggtccatgccagtgttctctacaaagtgtctttcaaactaaactctagaagaatatcgattacctgaacagaaacaaaggcctaagaaatcatacatttttgtagcttatgtgtattgcaccaatcaagcaatcccatgtgctcttgatattggcactgtagttttatcttagaggacttgccactggagaactcagtggtgagagaccttggaaatgttttatgtggctgcacataagtgtttctgactagctaaggctacttcagacttttcactttccatttgtccccttttccttccctgaattagatgctatgtcataaacttggtggtttttgaaatactcttatttcaaaccttaaactaaaccgaaataagttatgcctgagaatgcgtttgtctgaaacgattttggcacttccctttaatatgcttccccttccctttgccttttaaattgtggttaaaaaaaaagaaaaaaaaaggcacataaagctgagcaccttaaccattttttaagcgtatggtagtgttgactatatttgcattgttgcgcagctcctccattcttaaatatttgtaagatgatgttgctgttctcttttcctcctgtgatatttatgttgcccagtaataagtaaaagtatcctttcttagttactctaactgatatgcccaagtgtctccagatactctgttttcctggaagtgtaaaggtattgggaaattatcaaattggtgaccaagtagttctgaaaggatttgaccgtttaatagggatggggacagaatgcagatcaggaagagtttttagtaatagattagtttcttgattgcaaaagaaatatctttaatgtgttaattttttattattttaaaatctctggcatacttgaatgataatgttataaaacttaaagtgaggatttggtctagggagattaccccaatagaatcagaaactcttagtcagataataaatcctcatattatgcctgccatgttcagaacctgcaacaaaattccctactaggccaacctctaacgtttaaatacctctaggttttctaggaggccttggaatagttgcaagtttaatgatctggtattctcaaaaaggatgtatctaatgatcttgattcttcaaaatgttatttcttgattagatatacaatgtatatagagacaatatggtttcttgtagttactgtgtatagagaagtactgtttccatttttatatgaagtgcctttttaattctacacttttctttaaaacttaaactttgatgtcttgcatatattgctggtggtatttatgtgaattttgtacagtgatttaatcttgtagtttatcatttgtacaattgcactatctaaatgtactcccttctgaatgttaatttgttttctttatagcactgttgattcatttcagaaggttgtagagtatacctccctcccccttatttaactaactagacagtagttcctttttgttattagtgagtggctaattttggggggccttaaggcagctttgttttctatagatatgctctaggttttctgattgtctcgtatctaaccttgttcttagccatgataacacaacttatatttgataagtggatgtgtttacttggttagaataagcaaggacatttttaaaaagcagtaaatttgctgacacttttatctttttttaaaagaatgaatgacagcttccttatcagtataattacatttaaacttttttttttaaaccgtgtggcagcttctttatcaatcagtataattccatttatttacttagccctcaaaatgacattttgaagggagcataaactctttcaggctacttggacagtatttagtattctatattagtactacactaataatttactgagtgctacctaagtgacctgattgataatgtccttaaggacctgatacatccaggataacctctcaggtactgtaaacaaggaggttgaaaaagacacattccggaatccctttgtctggtaaaattggatactgatgtggatggacatgacattcattattcttgaagatataactagttgactgggattctgatgaaggtttgaaattatggattagatctttgtagaagtagtttaaagattgcaataagtgaaatcttttttttttttttttttttgagacagtttcgctcttgttgcccaggctggagtgcaatggcacgatcttggctgactgcaaccgccacctcccgggttcaagcaattctgtctcagcctcccgagtagctgggattacaggcatgtgtcaccatgacctgctaattttgtatttttagtagagacggggtctctccatgttggtcaggctggtctcaaactcctgacctcaagtgatccgcccgccttggcctcccaaagtgctgggattataggcgtgagccaccgcgcctggctgtgaaattttttttttttttttttttatgtgaggcatattttgccacagtctcgcactgtttaggttctcttgtcttttggaatctatcattctgtatttaatgttagtggctagtccaataattgattgtctcatctgtatgcatcttatgcatgtgattcaatagactagatcgattctgtgtggtttatcatagtagatacacaaaccagtctttattttttacttaagaaaatatataagtggaagttatcagtaaactggtgattattgtattgaatgcaaatctttttattatttttccagatatattgagttttataaaccattaaaatattattttatgaaatttcccttcctggatgaacagaatattgttttattaaatcttctcttattagtggaatattttttacttctttgtcttttcatttacttgttttttgttataatgaaaactttactagtgtttggtaccattgagataacttattactggaaattttgtttgcttcctgtgggatatatctggaagtggtcatagtccaaccatgtccttttgatgttgttagcatatcagttattctatgtattgatcttttcttctcctgtattcaacacctctttctgaaaggatgtctgatcttcccataatcgctttgatgtagatgatatttttattctatcagtgtatactagacaggattttgatgtggctttgtatttgtatatttaaataccatgtctttaaagcattattagaagagatattctagtttcttctaatgtcccttttaaaaaaaatatagccagtccaatatctcaaactactttgatttttgaacttaaatcaacttttagtgctaccttgtttaatggtagtagtattttctcatttctacatgttcacacaagtttattatatatagtttatggtcatatgtatcttataaaaattttgaagcccatccccatggatttattataatacagctctgatatatcttaaagttaacccgttttccgtagatgttaagggctttactggttgaggtaacctatttcaaatggtctgttgggttttgtggtaccttgtcaagaattcaataagaattctcaggctgtctgtattttcttttaggactttggagatctctcaagttgtactgttttctagtattcctgagtatattcctttggtaacgtgaaagtaaatagtttatatttgatgattttttttttttttttttgagacggagtcttgctctgtcacccaggctggagtacagtggtgagatcacggctcactgcaagctctgcctcccgggttcacgccattctcctgcctaagcctcctgagtagctgggactacaggcgcccgccaccacacccggcgaattttttgtatttttagtagagatggggtttcaccgtgttagtccaggtggtctcaatctcctgaaccttgtgatccacctaccttggcctcccaaagtgctgggattacaggcgtgagccacagtgcccggcctgtatttggtgatattttaaaaaattctactttgaccttaagtgcttcaagaattgtgttcagttagtagtccttttgtaagactaactttcatatgctatctttgctccatgagctatcatagtactgttttctttcattacccgtaagagtggctctatcacagcatttactgttaagggctacagttagacctcttgttaactctacttttatttgtgatggctgtgtttcacactaccttgatttataaatgtagtaatgtgttaaataactatatgttgtggtcccttaatacctcttttgattggtgaggtaacagtgatgtggatgatgaaataaaaacgtttccccaagtcactaaacacagttttcaattcatttttttttacatatttaatttacatctaactactgttaggtatgcagcccgttcctttttgccttcagtagaatatagttatataagtagtctcatttagattcttgggacagaacggcctgtgtattgatctttctttaatggcttggaacagcttctatatattctgacaggtcttggaagcatgttaatatccgtgtgtttaattgtcatcttcctgcctgggaaggcagtagaagaaagaatctacatttgtatagtctgtagtacaggctctgtgctgattgcaaggcactcttgagagaaattcattcttattttgcagaagaagaactgaaacttcattaagtcattaagcaacttgctcaggtggtggaactgagctttaaatatggactttttccagtctcaattcagcattatactaggctgcctccatgtgtttttcaaagccccattcaagttttacttctatggtaaactaattttacatacacaaatcttttcattttctgaacttcctttatggctttactgtcaccccactagtatttgatgtcttagctattaactaattcctgattatttcacttgtcacatcaggaaccctatcctcttagttctcccattgagatttcactgctggactaagattattcttgattcgtagtcattggtttctgtttccattcattttcagcactgattatgttaatcgtattgcttgagttttttctttgttcaatgttgtttattacattcattttgtttcatatacacacattttttttttttaactggcattttgaggatattggtttaatggaaggaaaaaggaatggtgcaaagcacatggtatttgaattccaaagaccttgaccctcagcattagcaagtcacttgttttctgagcctcagttttcttactctcaaatgaggtaatatccgaaagtactttgacaacacactaaagcctgatgcagatttcctttttgaagtaattgtgctgtttctattcatattggatatggtattctatggtattggctatagatacatacattttaaaatgttatttaacagcatgtaaatgttcatttcatgccatgtgatcatgttcccctttatgattttttaaggctgtcttacaagcctaacagtgtactaagtcattaaaagatatatttaaagtaaaa

SEQ ID NO: 92033 - protein, 603 aa, Artificial Sequence
  derived and/or modified sequence
MSHPDYRMNLRPLGTPRGVSAVAGPHDIGASPGDKKSKNRSTRGKKKSIFETYMSKEDVSEGLKRGTLIQGVLRINPKKFHEAFIPSPDGDRDIFIDGVVARNRALNGDLVVVKLLPEEHWKVVKPESNDKETEAAYESDIPEELCGHHLPQQSLKSYNDSPDVIVEAQFDGSDSEDGHGITQNVLVDGVKKLSVCVSEKGREDGDAPVTKDETTCISQDTRALSEKSLQRSAKVVYILEKKHSRAATGFLKLLADKNSELFRKYALFSPSDHRVPRIYVPLKDCPQDFVARPKDYANTLFICRIVDWKEDCNFALGQLAKSLGQAGEIEPETEGILTEYGVDFSDFSSEVLECLPQGLPWTIPPEEFSKRRDLRKDCIFTIDPSTARDLDDALSCKPLADGNFKVGVHIADVSYFVPEGSDLDKVAAERATSVYLVQKVVPMLPRLLCEELCSLNPMSDKLTFSVIWTLTPEGKILDEWFGRTIIRSCTKLSYEHAQSMIESPTEKIPAKELPPISPEHSSEEVHQQNADKDGAAHLQASHSPSAEDAEAQPSTEERLPETRGICDRDPDTRLFFLQQQSRVLEAKPQNTIRVEEQTTQLQI

SEQ ID NO: 92034 - DNA, 1812 bp, Artificial Sequence
  derived and/or modified sequence
atgagtcacccggactaccgcatgaacttaaggcctctgggtacccctagaggcgtgtccgccgttgccggaccacacgacatcggagcttccccaggggacaagaaaagcaagaatcgatcgacacgcggcaaaaaaaaaagcatctttgaaacctatatgtcaaaggaagatgtgagcgaagggctgaaaagaggaacactgatccagggagtgctccggataaacccgaagaaatttcacgaggcgtttatcccttcacccgacggggacagagatatatttatcgacggcgtggtcgcaagaaaccgcgccctgaatggagatttggtagttgtgaaactccttcctgaggaacattggaaagtggtgaaacctgagagtaacgataaagagacggaggccgcctatgagagtgatatacctgaggaattgtgtggacatcaccttccgcagcaatctttgaaatcttataatgactccccagatgtaatcgtcgaggcacagtttgatggctcagattcagaggacggccatggcataactcagaacgtgttagtggacggcgtcaagaagctgtctgtctgcgtctctgagaaaggccgggaggacggagacgccccagtgactaaggatgaaacaacctgcatctcccaagatactcgagccctttccgagaagagtctgcagaggtccgctaaggtcgtctacatcctagaaaaaaaacactcgagggccgccacagggtttctcaaactcctggcagacaagaactcagaactgtttaggaaatatgctttattctccccttccgaccatcgcgttccccggatttatgtgccgttaaaggactgccctcaggacttcgtggctcgacccaaggactatgctaacactctgttcatctgtaggatcgtcgattggaaggaggactgcaattttgctctcgggcaacttgctaaaagcctgggccaagctggcgaaatagaaccagagacagagggaattttgactgagtatggggtggacttctcagacttctctagcgaagttctggagtgcttgccccaaggcctgccatggaccattcctcccgaagagtttagcaagcgcagggaccttcgaaaagattgcattttcacgatcgatcccagtacagcgcgagatctagacgatgccctgagttgcaagcctttggcggacggaaatttcaaggtgggggtgcacattgctgacgtgagctatttcgttcccgagggaagtgacctagataaagtggctgccgagcgggccacttctgtatacttggtccaaaaggtggtccccatgctcccaagactgctgtgcgaggagctgtgcagtttgaatccaatgtctgataaactgactttcagcgtcatatggacacttacacccgaaggcaaaatccttgatgaatggtttgggcgtactatcattcggtcctgtaccaaactcagctacgagcacgcccagtctatgattgagagtcccactgaaaagattcccgctaaagaactgcctcccatttcacccgaacactctagcgaggaggttcaccaacaaaacgccgacaaggatggcgctgcccacctccaggcctcacactcaccatcagccgaagacgccgaagcccagccctcaacagaggaaagactgccagaaacgaggggaatctgtgaccgtgatccagatacccggttgttttttttacaacagcagtcccgagtcctagaggcaaaacctcagaacacaatccgcgtggaggagcaaacaactcagcttcaaatttag

SEQ ID NO: 92035 - DNA, 1812 bp, Artificial Sequence
  derived and/or modified sequence
atgagccacccagactacaggatgaacctgcggcccctgggcaccccccggggcgtgtctgctgtggccggcccccatgacatcggggccagccctggggacaagaagagcaagaacagaagcacccggggcaagaagaagagcatctttgagacctacatgagcaaagaagatgtgtctgagggcctgaagaggggcaccctcatccagggcgtgctgcgcatcaaccccaagaagttccacgaggccttcatccccagcccagatggagaccgggacatcttcattgatggagtggtggccaggaacagagccctgaatggagacctggtggtggtgaagctgctgcctgaggagcactggaaggtggtgaagccagagagcaatgacaaggagacagaagctgcctatgaaagtgacatccctgaggagctgtgtggccaccacctgccccagcagagcctgaagagctacaatgacagcccagatgtgattgtggaggcccagtttgatggcagtgacagtgaagatggccacggcatcacccagaatgtgctggtggatggagtgaagaagctgtctgtgtgtgtgtctgagaagggcagagaagatggagatgcccctgtgaccaaggatgagaccacctgcatcagccaggacacccgggccctgtctgagaagagcctgcagaggtctgccaaggtggtgtacatcctggagaagaagcacagccgggccgccaccggcttcctgaagctgctggccgacaagaacagcgagctgttcagaaaatatgccctcttcagccccagcgaccaccgggtgccccgcatctacgtgcccctgaaggactgcccccaggactttgtggcccggcccaaggactatgccaacaccctcttcatctgcagaattgtggactggaaggaggactgcaactttgccctgggccagctggccaagagcctgggccaggccggggagattgagcctgagacagagggcatcctgacagaatatggagtggacttcagtgacttcagcagcgaggtgctggagtgcctgccccagggcctgccctggaccatccccccagaggagttcagcaagagaagagacctgaggaaggactgcatcttcaccatcgaccccagcacagcccgggacctggatgatgccctgagctgcaagcccctggctgatggcaacttcaaggtgggcgtgcacatcgcagatgtgtcctactttgtgcctgagggcagtgacctggacaaggtggccgctgagcgggccacctctgtgtacctggtgcagaaggtggtgcccatgctgccccggctgctgtgtgaggagctgtgcagcctgaaccccatgtctgacaagctgaccttcagcgtcatctggaccctgaccccagagggcaagatcctggatgagtggtttggaagaaccatcatccgcagctgcaccaagctgtcctatgagcacgcccagagcatgattgagagccccacagagaagatcccagccaaggagctgccccccatcagccctgagcacagcagcgaggaggtgcaccagcagaatgctgacaaggatggagctgcccacctgcaggccagccacagccccagcgcagaagatgctgaggcccagcccagcacagaggagcggctgcctgagacccggggcatctgtgaccgggaccctgacaccaggctcttcttcctgcagcagcagagccgggtgctggaggccaagccccagaacaccatccgggtggaggagcagaccacccagctgcagatctag

SEQ ID NO: 92036 - DNA, 1812 bp, Artificial Sequence
  derived and/or modified sequence
atgagccaccccgactaccggatgaacctgcggcccctgggcaccccaagaggcgtgtcagcagttgcagggccccatgacattggcgccagtccaggggataagaaatccaagaatcggagtacgcgggggaagaagaagtccatcttcgagacatatatgtcgaaagaggatgtatccgaaggcttgaaaagaggcaccctgatccagggtgtgctacggatcaatccaaagaaattccacgaagcttttatcccatcacccgatggagatcgcgatattttcatcgacggcgtcgtggctcgcaatcgagccctgaatggagatctagtggtggttaaactgctcccggaagaacattggaaggttgtcaagccagagtccaacgacaaggaaactgaggctgcgtatgaatccgatatccccgaagaactctgtgggcatcacctgccccagcagagcctaaaatcctacaatgacagcccagatgtgatcgttgaggcacaatttgacgggtcagactccgaagacggacatggcatcacacagaatgttttggttgatggcgtgaagaagctcagcgtgtgtgtctctgaaaagggaagagaggacggcgacgctccagttactaaggatgagaccacttgcatatcacaggacactcgcgcactcagcgaaaaatctctccaacggtccgccaaggttgtgtatatcctggaaaaaaaacactcgagggctgccacggggttcttgaagttgcttgccgataaaaatagcgagctgtttaggaaatacgccctcttctcaccttccgatcatcgcgtcccgagaatctatgtgcctctgaaggattgtcctcaagacttcgtggctaggccaaaggactatgcgaataccctgtttatttgccgtatcgtagactggaaggaggattgcaacttcgccctcggccagcttgcgaagtctctgggacaagccggagaaatcgagcctgagacggagggcattctgactgagtacggcgtggatttctcagatttcagctccgaggttctcgagtgcttaccacaggggctgccttggaccattccgcccgaagagttctcgaagaggagggaccttagaaaagactgtatatttactatcgatccttctactgcgagagatctggatgatgcactgtcatgtaaaccattagcagatggaaatttcaaagttggagtgcacatcgcagacgtgtcctattttgtcccagaaggcagcgacttagacaaggttgcagctgagagggcgacgtcagtctacctggtacaaaaagtcgtgcctatgttgcccaggcttctctgcgaagagctgtgctctctgaatccgatgtctgataagctgacattctctgttatctggacattaactccagaaggcaagattctagatgagtggtttgggagaaccattatacgatcgtgcacaaaattaagctatgaacacgcacagagtatgatcgagagccccacggaaaaaatcccggctaaggaactcccgccaatttcccctgagcacagtagtgaggaggttcaccaacagaatgctgacaaggatggtgccgcacacttgcaggctagtcacagccccagcgctgaggatgcagaggcccaaccttccacagaagagcgcctcccggaaacacgcggcatttgcgaccgtgaccccgacacccgactgttttttctccagcagcagagtcgggtactggaggcaaagccccagaacacaattcgagtggaggaacagactacacagctgcaaatttag

SEQ ID NO: 92037 - DNA, 1812 bp, Artificial Sequence
  derived and/or modified sequence
atgagccatcctgactatcggatgaacctgagacctttgggaactcctaggggcgtgtccgccgttgcgggtccccacgatatcggagcctccccaggagataagaaaagcaaaaacagaagcacgcgaggaaaaaaaaagtccatcttcgaaacctatatgagcaaggaggacgtgtctgagggtctgaagcgcggaacgttaattcaaggcgtgctgcgaataaacccaaagaaattccacgaggcttttatccctagccccgatggcgacagggatattttcatcgatggcgtggtcgcaagaaatcgagctctgaacggtgatcttgtggtcgtcaagttgctcccagaggagcattggaaagtcgttaaacccgagagcaatgacaaggaaacggaggccgcttatgagagtgacatccccgaggagctttgtgggcaccacctaccgcaacaaagcctgaaatcttacaatgacagtccagatgtgatagtagaagcacaattcgatggctctgacagcgaagacggacacgggatcacacagaacgtgcttgtggatggcgtgaagaagttatccgtctgtgtgagcgaaaaagggagagaagatggggatgcaccggttactaaggatgagacaacatgtatctctcaagataccagggcgttgagcgaaaagtccctgcagcgcagcgctaaggtggtttacatattagagaaaaagcactctagggccgcaaccggatttctgaaactcttagctgataagaattcggaactgttccgaaaatatgctctgttctcgccgtccgatcaccgcgttcccagaatctatgtacccctaaaggattgtcctcaggacttcgtcgcccgtcccaaggattatgcaaacactttatttatctgtaggatcgtcgattggaaagaggattgtaactttgctctggggcagctggcaaagtctttgggccaggctggggagattgaaccagaaaccgaaggtatcctgaccgagtatggggtcgattttagcgatttctcttctgaggtgctggaatgcctgccccaaggcctgccatggactatcccgcctgaggaattttcaaaacggcgagacctgaggaaggattgtatcttcacaattgatccttcaactgccagagatctggacgacgctttgtcatgtaagccactagctgatggcaactttaaagtcggggtacatatcgccgacgtgtcttactttgtacctgaggggtctgatctggacaaggtcgcagccgaacgggcaacgagtgtctacctggtgcagaaggtggtgccaatgctccctaggctgctgtgcgaggaactgtgcagcctgaatcctatgtctgataagttaactttctccgtgatctggacgctgaccccagaaggtaagatcttagacgaatggttcggccgaaccatcattagaagttgtacaaaactgtcctacgagcatgcccagtctatgatcgaatctcccacagaaaaaatccccgctaaggagctccctccaatctcaccagagcattcctccgaagaggtacaccaacagaatgcagataaagacggcgcagctcacctgcaggcatctcacagcccatctgctgaggacgcggaagcccagccatctactgaggaacggttaccggaaacacgcggaatctgcgacagggaccctgatactaggctgttttttttacagcagcaatctcgagttctggaggctaaaccccaaaacacgatcagagtcgaagaacagacaacccagctccagatctag

SEQ ID NO: 92038 - DNA, 1812 bp, Artificial Sequence
  derived and/or modified sequence
atgagccaccccgactacagaatgaacctgagacccctgggcacccccagaggcgtgagcgccgtggccggcccccacgacatcggcgccagccccggcgacaagaagagcaagaacagaagcaccagaggcaagaagaagagcatcttcgagacctacatgagcaaggaggacgtgagcgagggcctgaagagaggcaccctgatccagggcgtgctgagaatcaaccccaagaagttccacgaggccttcatccccagccccgacggcgacagagacatcttcatcgacggcgtggtggccagaaacagagccctgaacggcgacctggtggtggtgaagctgctgcccgaggagcactggaaggtggtgaagcccgagagcaacgacaaggagaccgaggccgcctacgagagcgacatccccgaggagctgtgcggccaccacctgccccagcagagcctgaagagctacaacgacagccccgacgtgatcgtggaggcccagttcgacggcagcgacagcgaggacggccacggcatcacccagaacgtgctggtggacggcgtgaagaagctgagcgtgtgcgtgagcgagaagggcagagaggacggcgacgcccccgtgaccaaggacgagaccacctgcatcagccaggacaccagagccctgagcgagaagagcctgcagagaagcgccaaggtggtgtacatcctggagaagaagcacagcagagccgccaccggcttcctgaagctgctggccgacaagaacagcgagctgttcagaaagtacgccctgttcagccccagcgaccacagagtgcccagaatctacgtgcccctgaaggactgcccccaggacttcgtggccagacccaaggactacgccaacaccctgttcatctgcagaatcgtggactggaaggaggactgcaacttcgccctgggccagctggccaagagcctgggccaggccggcgagatcgagcccgagaccgagggcatcctgaccgagtacggcgtggacttcagcgacttcagcagcgaggtgctggagtgcctgccccagggcctgccctggaccatcccccccgaggagttcagcaagagaagagacctgagaaaggactgcatcttcaccatcgaccccagcaccgccagagacctggacgacgccctgagctgcaagcccctggccgacggcaacttcaaggtgggcgtgcacatcgccgacgtgagctacttcgtgcccgagggcagcgacctggacaaggtggccgccgagagagccaccagcgtgtacctggtgcagaaggtggtgcccatgctgcccagactgctgtgcgaggagctgtgcagcctgaaccccatgagcgacaagctgaccttcagcgtgatctggaccctgacccccgagggcaagatcctggacgagtggttcggcagaaccatcatcagaagctgcaccaagctgagctacgagcacgcccagagcatgatcgagagccccaccgagaagatccccgccaaggagctgccccccatcagccccgagcacagcagcgaggaggtgcaccagcagaacgccgacaaggacggcgccgcccacctgcaggccagccacagccccagcgccgaggacgccgaggcccagcccagcaccgaggagagactgcccgagaccagaggcatctgcgacagagaccccgacaccagactgttcttcctgcagcagcagagcagagtgctggaggccaagccccagaacaccatcagagtggaggagcagaccacccagctgcagatctag

SEQ ID NO: 92039 - DNA, 3201 bp, Artificial Sequence
  derived and/or modified sequence
atgcgggggttgtccatctctgtatccccagtgccagcactgcacctcgccccaagcagttgtccaataaatgagcagtgagtaaatgaaagaatgagcaaagccttgtaacaggaaaggggccggcggcgtctgccgtgcaagacctggcccagtggagcagagcctggaggttcaggagccgggtctggaaggctccttccggtggaagaggggcccggagccagccggcgcctggcacaaggcgtctcagaggccgcccactgggagccaaccgttgcagccagttgtccccgcgagcgaggccggagaaggcgcggcggcccctggcctggccatttcgcccttgtcgcagctgaaccgccgactacgagctcctgcaccgcgcacacaccccgcgcgcttcgctctcggcctcgcccggccaccgtcgctctctagaacgccgcgcccgtgacccggaagagcattctccttagcaactgcgggactgcggcggcgccggcctccggggagaaacgcgaatgacaacagagctgctcaaggcgggaactctgagctaagcagtggaggtttctctggatctggagagaagagtgaccttggagccaataatgagccatcctgactacagaatgaacctccggcccctggggacccccagaggtgtgtctgctgtggctggtccacatgacattggtgcttcgccaggtgacaaaaagtcaaagaacaggtccacacgagggaagaaaaagagcatatttgaaacttacatgtccaaggaggatgtttcagaaggcttgaagagaggaacactcatccagggtgtattgagaattaatccaaagaagtttcatgaagccttcattccttccccggatggtgatcgagacatttttattgatggggttgttgctcgtaatagagccttaaatggggatctggtggtcgtgaaactgcttcccgaggagcattggaaggtagttaaaccagagagcaatgacaaagaaacagaagctgcgtatgaatcagatatccccgaggagctctgtggacaccatctcccgcaacagtccctgaaaagctataatgacagtcctgatgtcattgtagaggctcagtttgatggcagcgactcagaagatggacatggcatcacacaaaatgtgctggttgatggtgttaagaaactctcagtttgtgtttctgagaaaggaagagaggatggtgatgcaccggttacaaaagatgagaccacctgcatttcacaagacacaagagctttatcggagaaatccctgcaaagatcagcaaaggtggtttacatcttggagaaaaaacattctcgagcagcaaccggcttcctcaaactcttggctgataagaacagcgaactgtttaggaaatacgccctgttttctccctcagaccaccgagtgcctagaatttatgtgcctctcaaggactgtccccaggactttgtggcacggcctaaagattatgccaacacactgttcatctgccgcattgtggactggaaggaggactgcaattttgccctggggcagctggctaagagtcttgggcaggctggtgaaattgagcctgaaacagaaggaatactaacagagtatggcgtggatttctctgatttctcttcagaagttctagaatgtcttcctcaaggcctgccatggacaattccaccagaggagttcagcaagagaagggatttaagaaaagactgtatcttcaccattgacccatcaaccgcccgagacctcgatgatgccctctcctgcaagccactcgctgacggcaacttcaaagtgggagttcacattgctgacgtgagttactttgttccggagggatctgatctggataaagtggctgccgagagggctacaagcgtctacttggttcaaaaggtggtccccatgcttcccaggctgctgtgtgaggagctgtgcagcctcaaccccatgtccgacaagctgaccttctctgtgatctggacactgactccagagggcaagatccttgatgaatggtttggccggaccatcatccgctcctgcaccaaacttagctacgagcatgcacagagcatgattgaaagcccaactgagaaaatccctgcgaaagagctgccccccatttccccagagcatagcagcgaggaggtacaccagcagaacgcagacaaggatggggctgcccatcttcaggcctctcacagcccctctgctgaagatgcagaagcacagccctccacagaggaacgcctgcctgagactcggggcatatgtgacagggatccagacacacgactgtttttccttcagcaacagagccgtgtattggaagcaaagccccaaaacacgataagagtagaggagcagacaacccagttgcagatttgaagaagcatgtggaattccttgtggcggagaaggaaagattatggaaagaaagtaaacaggtaaaggctgaaaaggccagacttctaaaaggtccagtagaaaaggagctggatgtgggtgctgattttgtggaaaagtcagagttacggagctcgcctctgcattcagaaactgctataccctcttcagccttgcagaggtttgcagcagatgccaggaaagccaagtacattccaatacccaatcttttccctcagattttccatctccagagcttccctttatggagctttctgaggatattctgaaaggatttatgagtaactaaaatggaaggccatagaagaagggagaagaggaaataatactaagtcatacagttaatccagcaacaaaaaatgaaaagggaaagccacaggcaagggtaatcctggaaatgcctcgtcatctggtgtactgtaggagaagacgcattgccaggatgtggggaacagtcgctgtgaagcgtgtcacatacctgattcactgacttgagctgatgatgccgacctggcagacactaaactcgtggagggtcagtttctcttgacaccaaccaaatggctgcctgaaagaattttttcaagcaacaattatttttcttatcttcagggttaaaatgtataaaagtatgttatgtataattaatctgttatgtcataagtgatcatgcaaaacctaaatattatggcagcctgaggggctgcttcgtatttgaaacatgctttgtctcagg

SEQ ID NO: 92040 - protein, 356 aa, Artificial Sequence
  derived and/or modified sequence
MSHPDYRMNLRPLGTPRGVSAVAGPHDIGASPGDKKSKNRSTRGKKKSIFETYMSKEDVSEGLKRGTLIQGVLRINPKKFHEAFIPSPDGDRDIFIDGVVARNRALNGDLVVVKLLPEEHWKVVKPESNDKETEAAYESDIPEELCGHHLPQQSLKSYNDSPDVIVEAQFDGSDSEDGHGITQNVLVDGVKKLSVCVSEKDNEIEAQRSSWAYPVSHRKSEERMVMHRLQKMRPPAFHKTQELYRRNPCKDQQRWFTSWRKNILEQQPASSNSWLIRTANCLGNTPCFLPQTTECLEFMCLSRTVPRTLWHGLKIMPTHCSSAALWTGRRTAILPWGSWLRVLGRLVKLSLKQKEY

SEQ ID NO: 92041 - protein, 249 aa, Artificial Sequence
  derived and/or modified sequence
MSHPDYRMNLRPLGTPRGVSAVAGPHDIGASPGDKKSKNRSTRGKKKSIFETYMSKEDVSEGLKRGTLIQGVLRINPKKFHEAFIPSPDGDRDIFIDGVVARNRALNGDLVVVKLLPEEHWKVVKPESNDKETEAAYESDIPEELCGHHLPQQSLKSYNDSPDVIVEAQFDGSDSEDGHGITQNVLVDGVKKLSVCVSEKGREDGDAPVTKDETTCISQDTRALSEKSLQRSAKVIAYRFSPRVQMAFT

SEQ ID NO: 92042 - DNA, 1071 bp, Artificial Sequence
  derived and/or modified sequence
atgtcccatcccgattatcggatgaacctgcggcctttggggactcctcgaggagtcagcgccgtcgcaggcccacacgacatcggtgcatctccaggagataagaagagcaaaaatagatcaacgagggggaagaaaaaatcaatctttgagacttacatgtcaaaggaagatgtctccgaagggctcaagagggggaccttgatacagggggtgctccgtattaatcctaagaaatttcacgaggcatttatcccatccccagacggagacagagatatcttcattgacggggtcgtagccaggaacagagcactgaatggcgacctggtggttgtcaagctgctccctgaagagcattggaaggtcgtaaagccagaaagtaacgataaggagactgaggccgcttacgaatcagacattcctgaggaactgtgcggccaccatctgcctcagcagtctttgaaaagctacaatgactctccagacgtgatcgttgaagcccagtttgacggatcggactcggaagacggacacggtatcacacaaaatgttctcgttgatggggtgaaaaagctctcagtgtgtgtgtcagagaaggacaatgaaatcgaggcgcagcggtcaagctgggcttaccccgtctcccataggaaatccgaggagagaatggtgatgcacagactccagaagatgcgccccccagccttccacaagactcaggagctgtacagaagaaatccatgtaaggaccagcaaagatggtttacgtcatggcgcaaaaacatcctagaacagcaaccagccagctcaaattcttggttgatccgaactgctaattgcctaggcaacactccttgcttcctaccacagacgacagaatgcctagaatttatgtgcctgagtagaaccgtacctcgcacactctggcatgggctgaagataatgccaactcactgtagcagtgctgcactttggaccggtcgccgcactgccatcctcccctggggcagctggcttcgcgttctggggcgcctggtcaagctgtctttgaagcagaaggagtactag

SEQ ID NO: 92043 - DNA, 750 bp, Artificial Sequence
  derived and/or modified sequence
atgtcgcaccctgactaccggatgaatctgaggcctttaggcacccccagaggtgtttccgccgtggctggccctcatgatatcggagcttcccctggtgacaaaaagagcaaaaacagaagtacgcgcgggaagaaaaagagcatcttcgaaacctatatgagcaaggaggatgtgagcgagggcctcaaacgcggcactctgatccaaggagtcctgcgtatcaacccaaaaaagttccatgaggcctttattccaagccctgacggcgatcgcgacattttcatagacggggtggtggcacgcaacagagcgctaaacggagatctcgtggtggtgaagttactaccagaagagcattggaaggtggtcaagcccgagtcaaatgataaagaaactgaagccgcctatgaatcagacatcccagaagagctctgcggacaccatctccctcagcaaagcctcaaaagctacaacgactctcccgacgtcatcgtggaggctcagtttgatggcagtgattctgaggacggacatggtattacccaaaacgttcttgttgacggcgtgaaaaagttgagcgtgtgcgtttccgagaaggggagagaagacggggacgctcccgtcactaaagacgagaccacctgcatttcacaggacacaagagccttgagcgaaaagagtcttcaacgctccgccaaagtaatcgcataccgcttctcaccgcgcgtgcagatggccttcacttag

SEQ ID NO: 92044 - DNA, 435 bp, Artificial Sequence
  derived and/or modified sequence
atgtcgcaccctgactaccgaatgaatctacgacctctggggaccccacgtggggtctctgccgtggcaggtccacacgatattggcgcaagtcctggtgataagaaatcaaagaaccgttcgacaaggggcaaaaagaaatccatctttgaaacatatatgagcaaggaggatgtcagtgagggactaaagcgcggaacgctaatccagggagtactgaggatcaatcccaagaaatttcacgaagcctttattccctccccagacggagatcgggacatttttattgatggagttgtggcaagaaacagggctctgaatggggacctcgtagtggtgaagctgctgcccgaggaacattggaaagtcgtgaagccggaaagtaacgacaaggaaactgaggccgcgtacgagtccgacattccagaagaatag

SEQ ID NO: 92045 - DNA, 1071 bp, Artificial Sequence
  derived and/or modified sequence
atgagccacccagactacaggatgaacctgcggcccctgggcaccccccggggcgtgtctgctgtggccggcccccatgacatcggggccagccctggggacaagaagagcaagaacagaagcacccggggcaagaagaagagcatctttgagacctacatgagcaaagaagatgtgtctgagggcctgaagaggggcaccctcatccagggcgtgctgcgcatcaaccccaagaagttccacgaggccttcatccccagcccagatggagaccgggacatcttcattgatggagtggtggccaggaacagagccctgaatggagacctggtggtggtgaagctgctgcctgaggagcactggaaggtggtgaagccagagagcaatgacaaggagacagaagctgcctatgaaagtgacatccctgaggagctgtgtggccaccacctgccccagcagagcctgaagagctacaatgacagcccagatgtgattgtggaggcccagtttgatggcagtgacagtgaagatggccacggcatcacccagaatgtgctggtggatggagtgaagaagctgtctgtgtgtgtgtctgagaaggacaatgaaattgaggcccagaggagctcctgggcctaccctgtgagccacaggaagtctgaggagaggatggtgatgcaccggctgcagaagatgaggcccccagccttccacaagacccaggagctgtacagaagaaacccctgcaaggaccagcagcgctggttcacctcctggaggaagaacatcctggagcagcagcctgccagcagcaacagctggctgatcagaacagccaactgcctgggcaacaccccctgcttcctgccccagaccacagagtgcctggagttcatgtgcctgagcaggacagtgcccaggaccctgtggcacggcctgaagatcatgcccacccactgcagcagcgctgccctgtggacaggaagaagaacagccatcctgccctggggctcctggctgcgggtgctgggccgcctggtgaagctgagcctgaagcagaaggagtactag

SEQ ID NO: 92046 - DNA, 750 bp, Artificial Sequence
  derived and/or modified sequence
atgagccacccagactacaggatgaacctgcggcccctgggcaccccccggggcgtgtctgctgtggccggcccccatgacatcggggccagccctggggacaagaagagcaagaacagaagcacccggggcaagaagaagagcatctttgagacctacatgagcaaagaagatgtgtctgagggcctgaagaggggcaccctcatccagggcgtgctgcgcatcaaccccaagaagttccacgaggccttcatccccagcccagatggagaccgggacatcttcattgatggagtggtggccaggaacagagccctgaatggagacctggtggtggtgaagctgctgcctgaggagcactggaaggtggtgaagccagagagcaatgacaaggagacagaagctgcctatgaaagtgacatccctgaggagctgtgtggccaccacctgccccagcagagcctgaagagctacaatgacagcccagatgtgattgtggaggcccagtttgatggcagtgacagtgaagatggccacggcatcacccagaatgtgctggtggatggagtgaagaagctgtctgtgtgtgtgtctgagaagggcagagaagatggagatgcccctgtgaccaaggatgagaccacctgcatcagccaggacacccgggccctgtctgagaagagcctgcagaggtctgccaaggtgattgcctaccgcttcagcccccgggtgcagatggccttcacctag

SEQ ID NO: 92047 - DNA, 435 bp, Artificial Sequence
  derived and/or modified sequence
atgagccacccagactacaggatgaacctgcggcccctgggcaccccccggggcgtgtctgctgtggccggcccccatgacatcggggccagccctggggacaagaagagcaagaacagaagcacccggggcaagaagaagagcatctttgagacctacatgagcaaagaagatgtgtctgagggcctgaagaggggcaccctcatccagggcgtgctgcgcatcaaccccaagaagttccacgaggccttcatccccagcccagatggagaccgggacatcttcattgatggagtggtggccaggaacagagccctgaatggagacctggtggtggtgaagctgctgcctgaggagcactggaaggtggtgaagccagagagcaatgacaaggagacagaagctgcctatgaaagtgacatccctgaggagtag

SEQ ID NO: 92048 - DNA, 1071 bp, Artificial Sequence
  derived and/or modified sequence
atgagccaccccgactaccggatgaacctgcggcccctgggcaccccaaggggtgtttccgcggtcgccggacctcacgacatcggggcctccccgggagataaaaaaagtaagaacagaagtactcgcggaaaaaaaaagagtatcttcgaaacatacatgtccaaagaagatgtgtcagaggggcttaaaaggggcacactgattcagggggtcctcagaatcaacccaaagaagtttcacgaggccttcatcccatcgccagatggcgatagggatatcttcattgatggagtagtcgccagaaacagagccctgaacggcgatttggttgtcgtcaagcttctaccagaagaacattggaaggtcgtgaaaccagagagcaacgataaagaaacggaagcagcgtatgaatctgacattccagaggaactgtgcggccatcacttacctcaacaaagcctgaagtcttacaacgactctcccgacgtcatcgtggaagctcaatttgatggatcagactctgaggacggccatgggatcactcagaacgttctggttgatggagttaagaagctgagcgtgtgtgtctccgagaaggataacgagattgaagcacagaggagctcttgggcttatccagtgagtcacaggaagagcgaagagcgcatggtgatgcacaggctgcagaagatgcggccacccgctttccacaagactcaggaactgtatcggaggaatccttgtaaggaccagcaaaggtggttcacctcttggaggaaaaatatactagagcagcagcctgcaagctcaaacagctggctgatccgtaccgctaactgcctcgggaacacaccttgtttcttgccacagacaaccgaatgcttagagttcatgtgtttgtctaggaccgtgccacgtacgctttggcatggattaaagatcatgcctactcattgctccagcgctgcgctgtggaccggaagaaggacagcgatcttaccttggggctcttggctgcgggttttaggtcggctcgttaagcttagcttaaaacagaaggagtattag

SEQ ID NO: 92049 - DNA, 750 bp, Artificial Sequence
  derived and/or modified sequence
atgagccaccccgactaccggatgaacctgcggcccctgggcaccccccgtggagtgagcgctgtagcgggaccccacgatataggcgcttcccctggtgacaagaaatccaagaacagatctactcgcggtaaaaagaagtctattttcgagacatatatgagcaaagaggacgtcagcgaagggctcaagcggggcacactcatccagggggtattgagaattaaccccaagaaatttcacgaagcctttattcctagtccagacggcgacagagacatattcattgatggtgttgtcgcccgtaatagagctctgaacggcgatctggttgtcgtgaagctgttgccagaagaacactggaaagtcgtgaagcccgagtccaacgataaggaaaccgaggcggcttacgagtccgacattcctgaggagctctgcgggcaccatctccctcaacagtccctcaagtcttataacgatagcccggacgtgattgtcgaggctcagtttgatgggagcgattccgaagatggccatggaatcacccagaatgtgctagtggacggcgttaaaaagctgtccgtctgtgttagcgagaaggggcgggaggacggagatgcacctgtgactaaagacgagacgacatgcatatcccaagatacccgcgctctgagcgaaaagagcctacagaggtcagccaaggtgatcgcttataggttttctccaagagtgcagatggccttcacatag

SEQ ID NO: 92050 - DNA, 435 bp, Artificial Sequence
  derived and/or modified sequence
atgagccaccccgactaccggatgaacctgcggcccctgggcacccctagaggggtgagtgccgtggccgggccacatgacataggagcaagcccaggggacaaaaaatctaagaaccgatctaccaggggcaagaagaagtccatttttgaaacatacatgtctaaggaagacgttagtgagggcctgaaaaggggcacgttgattcaaggcgtcctacgaattaacccaaagaaatttcatgaagcatttatcccatcccctgacggggaccgggacatcttcatcgatggcgtggtggctcgaaacagggctctgaatggcgacctggtggttgtcaaactgctaccagaagaacactggaaggtcgttaagcctgagtcaaacgataaggagactgaagcggcctacgagagtgatattcccgaggaatag

SEQ ID NO: 92051 - DNA, 1071 bp, Artificial Sequence
  derived and/or modified sequence
atgagtcacccggattaccggatgaacttgaggcccctgggaacccctcgaggcgtgagcgccgttgctgggcctcacgacatcggtgcatcccccggagacaagaagtcaaagaatcgcagcactaggggcaagaagaagtcgatctttgagacctatatgtccaaagaagacgtgtccgaggggttaaaaaggggcacgctgattcaaggcgttctgcggatcaacccaaagaaattccatgaagccttcattccaagtcctgatggcgacagagatattttcatagatggcgttgtagctcggaacagggcgttgaacggggacttggttgtagtcaaactgctaccggaagagcattggaaggtggtcaagcctgaaagcaacgataaagaaactgaagctgcttatgaaagcgacataccagaagaattatgcgggcaccatctgccccagcagtccctgaagagctataacgatagccctgacgtgatagtcgaagctcagttcgacgggtctgatagcgaagatggccatgggatcacccagaacgttctagtggacggcgtgaaaaagctatccgtgtgcgtcagtgaaaaagataacgagattgaggcccagcgatctagttgggcctatcccgtgagtcaccggaaatctgaagagcgcatggtgatgcacagactgcaaaaaatgcggccacctgcgtttcacaagactcaggaactttatcgcaggaatccgtgtaaagatcagcagcgatggtttacctcatggcggaaaaatatacttgaacaacaaccggcttcatcaaattcctggctcattcggactgcaaattgtttgggaaatactccctgcttcctgccccagacaacagagtgtctggagttcatgtgcttgtccagaactgttcccaggacactgtggcacgggctgaagattatgccaactcactgctcatccgccgcactgtggaccggacggcgtacagccatcttaccctgggggtcgtggctgagggtcttgggaagactggtgaaactgtccttgaagcagaaggaatattag

SEQ ID NO: 92052 - DNA, 750 bp, Artificial Sequence
  derived and/or modified sequence
atgtcacacccagactataggatgaatttacggccactggggaccccgcgaggcgtgagtgctgtggccggtccacatgacattggcgctagcccaggagacaagaagtcaaaaaacaggagtacacgcggtaaaaaaaaaagcatctttgagacatatatgtctaaggaggatgtgagtgaggggttgaagcggggaacgcttatccagggagtgctcaggatcaatccaaaaaaatttcatgaggcctttatcccatctcccgacggagatcgggacatcttcatcgatggtgtcgtagccaggaatcgggctttgaacggcgacctcgtggtggtcaaattactccccgaagaacactggaaagtggtgaagccagagagcaacgataaagagactgaggctgcctatgaatcggatatccccgaagaactttgcgggcatcacctgcctcagcagtccctcaaatcctacaatgacagcccggacgtgattgtagaagctcagttcgatggcagcgattcggaggacggccacggcataactcaaaacgtcctggtcgatggggtgaaaaagctgtcagtgtgcgtgagcgaaaagggtagagaggatggtgatgctcccgtgactaaggatgagaccacctgcatttcacaagatacacgggcactctccgagaagtctttgcaacggtctgccaaagtaatcgcataccgctttagtcctcgagtacagatggcctttacttag

SEQ ID NO: 92053 - DNA, 435 bp, Artificial Sequence
  derived and/or modified sequence
atgagccatcctgattacaggatgaacctgcggccactgggtactccccgtggagtgtcggctgtggcaggaccgcacgacataggcgcttctcccggagacaagaagtctaaaaatcggagcaccaggggcaagaagaagtcaatctttgaaacttatatgtctaaggaagacgtaagcgagggattgaaacgcggtaccttaatccagggcgttttacgaattaacccaaagaaattccatgaagcatttatacctagccccgacggtgatcgcgatatattcatcgatggggtcgtcgcacgcaatcgcgcactgaacggcgatctcgttgtagtgaagctgctgcccgaggagcactggaaagtggtcaaacctgaatccaacgataaggagaccgaggccgcttacgagtctgacattccggaagagtag

SEQ ID NO: 92054 - DNA, 1071 bp, Artificial Sequence
  derived and/or modified sequence
atgagccaccccgactacagaatgaacctgagacccctgggcacccccagaggcgtgagcgccgtggccggcccccacgacatcggcgccagccccggcgacaagaagagcaagaacagaagcaccagaggcaagaagaagagcatcttcgagacctacatgagcaaggaggacgtgagcgagggcctgaagagaggcaccctgatccagggcgtgctgagaatcaaccccaagaagttccacgaggccttcatccccagccccgacggcgacagagacatcttcatcgacggcgtggtggccagaaacagagccctgaacggcgacctggtggtggtgaagctgctgcccgaggagcactggaaggtggtgaagcccgagagcaacgacaaggagaccgaggccgcctacgagagcgacatccccgaggagctgtgcggccaccacctgccccagcagagcctgaagagctacaacgacagccccgacgtgatcgtggaggcccagttcgacggcagcgacagcgaggacggccacggcatcacccagaacgtgctggtggacggcgtgaagaagctgagcgtgtgcgtgagcgagaaggacaacgagatcgaggcccagagaagcagctgggcctaccccgtgagccacagaaagagcgaggagagaatggtgatgcacagactgcagaagatgagaccccccgccttccacaagacccaggagctgtacagaagaaacccctgcaaggaccagcagagatggttcaccagctggagaaagaacatcctggagcagcagcccgccagcagcaacagctggctgatcagaaccgccaactgcctgggcaacaccccctgcttcctgccccagaccaccgagtgcctggagttcatgtgcctgagcagaaccgtgcccagaaccctgtggcacggcctgaagatcatgcccacccactgcagcagcgccgccctgtggaccggcagaagaaccgccatcctgccctggggcagctggctgagagtgctgggcagactggtgaagctgagcctgaagcagaaggagtactag

SEQ ID NO: 92055 - DNA, 750 bp, Artificial Sequence
  derived and/or modified sequence
atgagccaccccgactacagaatgaacctgagacccctgggcacccccagaggcgtgagcgccgtggccggcccccacgacatcggcgccagccccggcgacaagaagagcaagaacagaagcaccagaggcaagaagaagagcatcttcgagacctacatgagcaaggaggacgtgagcgagggcctgaagagaggcaccctgatccagggcgtgctgagaatcaaccccaagaagttccacgaggccttcatccccagccccgacggcgacagagacatcttcatcgacggcgtggtggccagaaacagagccctgaacggcgacctggtggtggtgaagctgctgcccgaggagcactggaaggtggtgaagcccgagagcaacgacaaggagaccgaggccgcctacgagagcgacatccccgaggagctgtgcggccaccacctgccccagcagagcctgaagagctacaacgacagccccgacgtgatcgtggaggcccagttcgacggcagcgacagcgaggacggccacggcatcacccagaacgtgctggtggacggcgtgaagaagctgagcgtgtgcgtgagcgagaagggcagagaggacggcgacgcccccgtgaccaaggacgagaccacctgcatcagccaggacaccagagccctgagcgagaagagcctgcagagaagcgccaaggtgatcgcctacagattcagccccagagtgcagatggccttcacctag

SEQ ID NO: 92056 - DNA, 435 bp, Artificial Sequence
  derived and/or modified sequence
atgagccaccccgactacagaatgaacctgagacccctgggcacccccagaggcgtgagcgccgtggccggcccccacgacatcggcgccagccccggcgacaagaagagcaagaacagaagcaccagaggcaagaagaagagcatcttcgagacctacatgagcaaggaggacgtgagcgagggcctgaagagaggcaccctgatccagggcgtgctgagaatcaaccccaagaagttccacgaggccttcatccccagccccgacggcgacagagacatcttcatcgacggcgtggtggccagaaacagagccctgaacggcgacctggtggtggtgaagctgctgcccgaggagcactggaaggtggtgaagcccgagagcaacgacaaggagaccgaggccgcctacgagagcgacatccccgaggagtag

SEQ ID NO: 92057 - DNA, 1347 bp, Artificial Sequence
  derived and/or modified sequence
tttcgcccttgtcgcagctgaaccgccgactacgagctcctgcaccgcgcacacaccccgcgcgcttcgctctcggcctcgcccggccaccgtcgctctctagaacgccgcgcccgtgacccggaagagcattctccttagcaactgcgggactgcggcggcgccggcctccggggagaaacgcgaatgacaacagagctgctcaaggcgggaactctgagctaagcagtggaggtttctctggatctggagagaagagtgaccttggagccaataatgagccatcctgactacagaatgaacctccggcccctggggacccccagaggtgtgtctgctgtggctggtccacatgacattggtgcttcgccaggtgacaaaaagtcaaagaacaggtccacacgagggaagaaaaagagcatatttgaaacttacatgtccaaggaggatgtttcagaaggcttgaagagaggaacactcatccagggtgtattgagaattaatccaaagaagtttcatgaagccttcattccttccccggatggtgatcgagacatttttattgatggggttgttgctcgtaatagagccttaaatggggatctggtggtcgtgaaactgcttcccgaggagcattggaaggtagttaaaccagagagcaatgacaaagaaacagaagctgcgtatgaatcagatatccccgaggagctctgtggacaccatctcccgcaacagtccctgaaaagctataatgacagtcctgatgtcattgtagaggctcagtttgatggcagcgactcagaagatggacatggcatcacacaaaatgtgctggttgatggtgttaagaaactctcagtttgtgtttctgagaaagacaatgaaattgaggctcagagaagttcctgggcttatccagtatcccacaggaagtcagaagagaggatggtgatgcaccggttacaaaagatgagaccacctgcatttcacaagacacaagagctttatcggagaaatccctgcaaagatcagcaaaggtggtttacatcttggagaaaaaacattctcgagcagcaaccggcttcctcaaactcttggctgataagaacagcgaactgtttaggaaatacgccctgttttctccctcagaccaccgagtgcctagaatttatgtgcctctcaaggactgtccccaggactttgtggcacggcctaaagattatgccaacacactgttcatctgccgcattgtggactggaaggaggactgcaattttgccctggggtagctggctaagagtcttgggcaggctggtgaaattgagcctgaaacagaaggaatactaa

SEQ ID NO: 92058 - DNA, 2048 bp, Artificial Sequence
  derived and/or modified sequence
agaacgccgcgcccgtgacccggaagagcattctccttagcaactgcgggactgcggcggcgccggcctccggggagaaacgcgaatgacaacagagctgctcaaggcgggaactctgagctaagcagtggaggtttctctggatctggagagaagagtgaccttggagccaataatgagccatcctgactacagaatgaacctccggcccctggggacccccagaggtgtgtctgctgtggctggtccacatgacattggtgcttcgccaggtgacaaaaagtcaaagaacaggtccacacgagggaagaaaaagagcatatttgaaacttacatgtccaaggaggatgtttcagaaggcttgaagagaggaacactcatccagggtgtattgagaattaatccaaagaagtttcatgaagccttcattccttccccggatggtgatcgagacatttttattgatggggttgttgctcgtaatagagccttaaatggggatctggtggtcgtgaaactgcttcccgaggagcattggaaggtagttaaaccagagagcaatgacaaagaaacagaagctgcgtatgaatcagatatccccgaggagctctgtggacaccatctcccgcaacagtccctgaaaagctataatgacagtcctgatgtcattgtagaggctcagtttgatggcagcgactcagaagatggacatggcatcacacaaaatgtgctggttgatggtgttaagaaactctcagtttgtgtttctgagaaaggaagagaggatggtgatgcaccggttacaaaagatgagaccacctgcatttcacaagacacaagagctttatcggagaaatccctgcaaagatcagcaaaggtcattgcctacagattttctccacgtgtccaaatggctttcacctgagctacttgttgaagatctcgtgtgattcagtcaggactgtatttggtcatttaatcagaaaagttagagcagagaatcataaaaagtgaattaaaaaaaaaaaactttaaacatataaatacgaatccatcttcctgcctttggataaggggtcaaggccttttctttgagtgtgggtatgttgattggagttctgtgttatctttcttgcttaaaccacacttgtaatgcagcatttatcactttgagttttggtggagtgagaatttagacagtggagaagcagtatgaatatagactctcttcagatttgtacagtttttgctccaatttttttgttgttaccatgcccatacctaatttaaaaataattttaatgtcttttttagtttttccaaagtattcaatttagttatagaaacaattgtttttatattcctatttcaccattttgcacaattcacttgtattctttaattatagaagctagtgtcattttcagatgtgggatgaaacagctgacttcttttttttttgttttgagacagagtttcactgttgttgcccaggctggagtgcaatggcacgatcttggctcactgcaacctctgcctccctggttcaagcgattcttctgcctcagcctcctgagtagctgggattacaggcgtgtaccaccatgcctggctaattttttgtatttttagtagaaatggggtttcgccaggctggtctcgaactcctgacctcgtgatctgcctgcctcagcctcccaaagtgctgggattacaggtgtgagccaacatgctcgactaaacacagctgacttctagctgtgcacatagctcatagtggcagaaatggtgaagggcaacgtataaagtggcataatggcatgaggctttatgtttcagaagcatccatcagtgtgtttcatatgggaatgcagtgtgcttactctaccaagcaagttgattaatagagtattgctcttgcatactgacatgaggaatttctaaattatactctatatatttgagtactaactgtgctccaggcagcatgctaagtgtgggagattagaatgaatggaaagcctggggatggatctggctcacagacc

SEQ ID NO: 92059 - DNA, 570 bp, Artificial Sequence
  derived and/or modified sequence
agagcattctccttagcaactgcgggactgcggcggcgccggcctccggggagaaacgagctgctcaaggcgggaactctgagctaagcagtggaggtttctctggatctggagagaagagtgaccttggagccaataatgagccatcctgactacagaatgaacctccggcccctggggacccccagaggtgtgtctgctgtggctggtccacatgacattggtgcttcgccaggtgacaaaaagtcaaagaacaggtccacacgagggaagaaaaagagcatatttgaaacttacatgtccaaggaggatgtttcagaaggcttgaagagaggaacactcatccagggtgtattgagaattaatccaaagaagtttcatgaagccttcattccttccccggatggtgatcgagacatttttattgatggggttgttgctcgtaatagagccttaaatggggatctggtggtcgtgaaactgcttcccgaggagcattggaaggtagttaaaccagagagcaatgacaaagaaacagaagctgcgtatgaatcagatatccccgaggag

SEQ ID NO: 92060 - DNA, 2128 bp, Artificial Sequence
  derived and/or modified sequence
gagacgctgcagcctagctgggccctggcaggtgaggggtggggggtggtgctgggaagccccaagcccagcctcaagcttgctggggctcaggacctcaaagcccacccttgggttcaaactgctgtgcaggtcctggacaggggcgggatccctgaaggccttgaaaccacaccctatttatgctgacagctataggctctgcagggccccaggcagctggggtattccttaggggctgagtctcctggtatccctaagactgggcttggcttaggcactgaggactttttcctggccattatcctgcaggacagcagcgcagattccttctggaaccccaacgccttcgagacggattccgacctgccggctggatggatgagggtccaggacacctcagggacctattactggcacatcccaacagggaccacccagtgggaaccccccggccgggcctccccctcacaggggagcagcccccaagaggagtcccagctcacctggacaggttttgctcatggagaaggctttgaggatggagaattttggaaggatgaacccagtgatgaggccccaatggagctgggactgaaggaacctgaggaggggacgttgaccttcccagctcagagcctcagcccagagccgttgccccaagaggaggagaagcttcccccacggaataccaacccagggatcaagtgtttcgccgtgcgctccctaggctgggtagagatgaccgaggaggagctggcccctggacgcagcagtgtggcagtcaacaattgcatccgtcagctctcttaccacaaaaacaacctgcatgaccccatgtctgggggctggggggaaggaaaggatctgctactgcagctggaggatgagacactaaagctagtggagccacagagccaggcactgctgcacgcccaacccatcatcagcatccgcgtgtggggcgtcgggcgggacagtggaagcaacagggactttgcctacgtagctcgtgataagctgacccagatgctcaagtgccacgtgtttcgctgtgaggcacctgccaagaacatcgccaccagcctgcatgagatctgctctaagatcatggccgaacggcgtaatgcccgctgcttggtaaatggactctccctggaccactctaaacttgtggatgtccctttccaagtggaattcccagcgcctaagaatgagttggtccagaagttccaagtctattacctggggaatgtacctgttgctaaacctgttggggtagatgtgattaatggggccctcgagtcagtcctgtcctccagcagccgtgaacaatggaccccaagtcatgtcagtgtggcccctgctaccctcaccatcttgcaccagcagacagaggcagtgctgggagagtgtcgggtgcgtttcctctccttcctggccgtgggcagagatgtccacacgtttgcattcatcatggctgccggcccagcctccttctgctgccacatgttctggtgcgagcccaatgctgccagcctctcagaggctgtgcaggctgcgtgcatgcttcgctaccagaagtgtctggatgcccgttcccaggcctccacctcctgcctcccagcaccccctgctgagtctgtggcacggcgtgtagggtggactgtccgcaggggtgttcagtcgctgtggggctccctgaagcccaaacggctgggggcccataccccatgaagaagcccccaccttccctccacctgcttgtgttgggccccagggaactaaagggtgtgggtcagggaggggtctagaggctattcctaggcctcaggcctcccaaatatgcccctccccagtagctacggttccctgcctaggagctggggagggagagatctaatcccttcaaggaagtgataacactggagtggtaacaagaggagcaggaagcaaggccagccctggttctccatccccatgtgtttcaggtggaacaggaggaactggtccaggccaggcctcatcctcctggacccagcaggggcagaaggaggaagggactggtccaggcatgggtcccttccccctgctccatgggcacctctgctgtattgatatcactaat

SEQ ID NO: 92061 - DNA, 789 bp, Artificial Sequence
  derived and/or modified sequence
atgcgcgtgcaggatacttcagggacttactattggcatatcccgacgggcaccacacagtgggagccccccggacgtgcatctccctcacagggaagtagcccccaggaagagagccaactgacctggacaggcttcgcacacggcgaggggtttgaggacggggaattctggaaggatgagccgtccgacgaggcaccaatggagctgggactgaaagagcccgaagaaggcaccctgaccttccccgctcagtctttatcgccagagcccctacctcaggaggaggagaaactgccccccaggaacaccaatcctgggatcaagtgctttgctgtgaggtctctgggctgggtcgagatgactgaggaggaattggccccaggacggtcctccgttgctgtgaacaactgcatcaggcagctctcttatcacaaaaacaacctgcacgatccaatgtcagggggatggggagagggaaaggatttgctattacaactggaggatgaaactctcaagctcgtggaaccacagagccaggcacttttacacgcgcaacctattatttccatccgggtgtggggtgtgggcagagattccgggcgcgacttcgcttatgtcgctcgtgacaaactgactcagatgttgaaatgccatgtgtttagatgtgaggcccccgccaagaatatcgccacatcgctgcatgaaatttgtagtaaggcccgcccaccacccttaccaggactggtcgctacttttgcgctgcagggctgcggttggggccattag

SEQ ID NO: 92062 - DNA, 789 bp, Artificial Sequence
  derived and/or modified sequence
atgagggtgcaggacaccagcggcacctactactggcacatccccaccggcaccacccagtgggagcccccaggccgggccagccccagccagggcagcagcccccaggaggagagccagctgacctggacaggctttgcccacggggagggctttgaagatggagagttctggaaggatgagcccagtgatgaggcccccatggagctgggcctgaaggagcctgaggagggcaccctgaccttccctgcccagagcctgagccctgagcccctgccccaggaggaggagaagctgccccccaggaacaccaaccctggcatcaagtgctttgctgtgcgcagcctgggctgggtggagatgacagaggaggagctggcccctggccgcagctctgtggccgtgaacaactgcatccggcagctgagctaccacaagaacaacctgcatgaccccatgtctgggggctggggcgagggcaaggacctgctgctgcagctggaggatgagaccctgaagctggtggagccccagagccaggccctgctgcacgcccagcccatcatcagcatccgggtgtggggcgtgggccgggacagcggccgggactttgcctacgtggcccgggacaagctgacccagatgctgaagtgccacgtgttccgctgtgaggccccagccaagaacatcgccaccagcctgcacgagatctgcagcaaggcccggcccccacccctgcccggcctggtggccacctttgccctgcagggctgcggctggggccactag

SEQ ID NO: 92063 - DNA, 789 bp, Artificial Sequence
  derived and/or modified sequence
atgcgggtgcaggacaccagcggcacctactactggcacatccccactggcaccactcaatgggaaccacctggccgtgcctcgccaagtcaaggatctagtcctcaagaggaatcacagctcacatggaccggttttgcacatggtgagggcttcgaggatggcgagttttggaaggacgagccaagcgacgaggcacctatggaattgggcctgaaggaacctgaggagggcaccctgacctttccagcccagtccttaagccccgaacccttgcctcaggaagaagagaagctccccccaagaaacaccaaccccggcattaaatgttttgcggtccgttccctgggctgggtggagatgaccgaggaagaactggcccctggaaggtcatcagttgcggttaataactgcatacgacagttatcttatcacaagaacaatttgcacgatccaatgtccggggggtggggagagggtaaagacctactgctgcagttagaggacgagacacttaaactggtagagccacagtctcaggccctgttgcacgcccagccgattatctccattcgagtgtggggtgtcggacgtgactcaggccgggactttgcttacgtggcgcgcgataaattgactcagatgctaaaatgtcatgtgttccgttgcgaagctcccgccaaaaatatcgctacctcactgcacgagatctgcagtaaggcaaggccacctccactgcccggcctggtagctacttttgcactgcaggggtgcggttggggccattag

SEQ ID NO: 92064 - DNA, 1385 bp, Artificial Sequence
  derived and/or modified sequence
gatgttgtgatggagaagccgcggcggagcccgaaccccgcagcctgagccacctccgtcatctgggcccggggcctcaccgcgcagattccttctggaaccccaacgccttcgagacggattccgacctgccggctggatggatgagggtccaggacacctcagggacctattactggcacatcccaacagggaccacccagtgggaaccccccggccgggcctccccctcacaggggagcagcccccaagaggagtcccagctcacctggacaggttttgctcatggagaaggctttgaggatggagaattttggaaggatgaacccagtgatgaggccccaatggagctgggactgaaggaacctgaggaggggacgttgaccttcccagctcagagcctcagcccagagccgttgccccaagaggaggagaagcttcccccacggaataccaacccagggatcaagtgtttcgccgtgcgctccctaggctgggtagagatgaccgaggaggagctggcccctggacgcagcagtgtggcagtcaacaattgcatccgtcagctctcttaccacaaaaacaacctgcatgaccccatgtctgggggctggggggaaggaaaggatctgctactgcagctggaggatgagacactaaagctagtggagccacagagccaggcactgctgcacgcccaacccatcatcagcatccgcgtgtggggcgtcgggcgggacagtggaagggactttgcctacgtagctcgtgataagctgacccagatgctcaagtgccacgtgtttcgctgtgaggcacctgccaagaacatcgccaccagcctgcatgagatctgctctaaggcacggccccctccactccctggactagttgccacctttgctctacaagggtgtgggtggggtcactgagtgctgtaggggggccccagggcaatgaggctctaatagattctccctggctcctcgcctcccttccttcctcagatcatggccgaacggcgtaatgcccgctgcttggtaaatggactctccctggaccactctaaacttgtggatgtccctttccaaggtcagtgtcaaaacccctccaggtccagctcagctttgttggcaaaggtgggtgacccaaggaaaggcatgagctcctggacagcgctgatagaaaaatgaacacatgaagactgaatactccaatacgtggagggactccggttaaagggaggcaggggacgagatgaaagtagggcctcggctgggcaagtgtccagcttatgccctgctggtggggctgcgggtgagcaaggtctgccaccatgatcaaccttctcttctttcccatagtggaattcccagcgcctaaga

SEQ ID NO: 92065 - DNA, 789 bp, Artificial Sequence
  derived and/or modified sequence
atgagggtgcaggacacatcaggaacatattattggcacattccaaccgggaccacccagtgggaacctccagggcgtgccagcccttcccagggctccagcccccaggaggagtcccagctgacttggacaggattcgcccacggagagggtttcgaggacggggagttctggaaagatgagccctccgatgaagctcccatggaactgggcctcaaggagcctgaggagggcactctaacctttccggctcagagtctgagtcccgagccacttccgcaggaggaggagaaactgccgccacgaaacaccaatccagggattaagtgtttcgcagtccgttcgctgggttgggtcgagatgacagaagaggagctggccccaggacgatctagtgtggccgtgaataattgtatccggcaactttcatatcacaagaataatctgcatgaccctatgagcggagggtggggagagggtaaagatcttctgctccagctcgaggatgagacactgaagctggtggagccccagagccaggctctcctgcacgcccagcctatcatctccatccgcgtctggggcgtgggccgtgattccggtcgggatttcgcatacgtggcccgagataaactgacacagatgctgaagtgtcacgtgttccgctgtgaagcgccagccaaaaacatcgccactagcctgcacgagatctgtagcaaagcaaggccacctccacttcctgggctcgtcgccactttcgctcttcagggctgtggatgggggcattag

SEQ ID NO: 92066 - DNA, 789 bp, Artificial Sequence
  derived and/or modified sequence
atgagagtgcaggacaccagcggcacctactactggcacatccccaccggcaccacccagtgggagccccccggcagagccagccccagccagggcagcagcccccaggaggagagccagctgacctggaccggcttcgcccacggcgagggcttcgaggacggcgagttctggaaggacgagcccagcgacgaggcccccatggagctgggcctgaaggagcccgaggagggcaccctgaccttccccgcccagagcctgagccccgagcccctgccccaggaggaggagaagctgccccccagaaacaccaaccccggcatcaagtgcttcgccgtgagaagcctgggctgggtggagatgaccgaggaggagctggcccccggcagaagcagcgtggccgtgaacaactgcatcagacagctgagctaccacaagaacaacctgcacgaccccatgagcggcggctggggcgagggcaaggacctgctgctgcagctggaggacgagaccctgaagctggtggagccccagagccaggccctgctgcacgcccagcccatcatcagcatcagagtgtggggcgtgggcagagacagcggcagagacttcgcctacgtggccagagacaagctgacccagatgctgaagtgccacgtgttcagatgcgaggcccccgccaagaacatcgccaccagcctgcacgagatctgcagcaaggccagacccccccccctgcccggcctggtggccaccttcgccctgcagggctgcggctggggccactag

SEQ ID NO: 92067 - protein, 475 aa, Artificial Sequence [sequence omitted]

SEQ ID NO: 92068 - DNA, 1428 bp, Artificial Sequence
  derived and/or modified sequence
atgactcaaatgagggattcgttctggaatccaaacgcgttcgagacagattctgacctccctgcgggttggatgagggtccaagacacctccggaacctactactggcatattccgacgggcaccacacagtgggagccccctgggcgggctagcccaagccagggctctagccctcaggaggagtcccaactcacttggactgggtttgcccacggggagggcttcgaagatggggagttctggaaggatgagccatctgatgaggccccaatggagctcggcctgaaggagcccgaagagggaactctgactttccccgcccagtcactgtcaccagagccattacctcaggaagaggagaagcttcctccaagaaataccaatcctgggataaaatgcttcgctgtgaggtccctgggctgggttgagatgacggaagaggaactggcccctggtagaagctccgtcgccgtgaataactgcatcaggcaactcagttaccataaaaataatcttcacgatcctatgtccggagggtggggggaaggaaaagacctccttctgcagctcgaggatgagactctcaaactggtagagccacagtcgcaggccctccttcatgcccagccaatcatcagcattagggtttggggggtcggacgggattccggttctaatcgggattttgcctacgtggcccgagacaagctcacacagatgctcaagtgccatgtgtttaggtgcgaagcccctgccaagaacatcgccacaagtttgcacgaaatatgttccaaaatcatggccgaacgcaggaatgcaaggtgcctcgtgaatgggctgagcctggaccatagcaaactggtcgacgttcctttccaggtcgaattcccagctcccaagaatgaactggtgcaaaagttccaggtgtattacctgggcaacgtccccgtggctaaacccgttggggtggacgtcatcaacggagctttggagtcagtcttgtcgagtagttccagggaacaatggactccctcccacgtgtccgtggctcccgctacacttaccattcttcaccaacagactgaggcggtgctgggcgaatgtcgcgtgcgcttcttatcattcctggccgtgggacgtgatgtgcacactttcgcgtttattatggccgctgggccagccagtttttgctgccacatgttctggtgcgagcccaacgccgcttcgctgagcgaggccgtgcaggctgcttgtatgctgagataccagaagtgtcttgacgcgagatctcaggcatccacgagttgcctcccagctccacccgccgaaagcgtggcccggagagtaggttggaccgtcaggagaggcgtccagagcctgtggggaagcctgaaaccaaagcgcctgggtgcgcacaccccgtag

SEQ ID NO: 92069 - DNA, 1428 bp, Artificial Sequence
  derived and/or modified sequence
atgacccagatgagggacagcttctggaaccccaatgcctttgaaacagacagcgacctgcctgctggctggatgagggtgcaggacaccagcggcacctactactggcacatccccaccggcaccacccagtgggagcccccaggccgggccagccccagccagggcagcagcccccaggaggagagccagctgacctggacaggctttgcccacggggagggctttgaagatggagagttctggaaggatgagcccagtgatgaggcccccatggagctgggcctgaaggagcctgaggagggcaccctgaccttccctgcccagagcctgagccctgagcccctgccccaggaggaggagaagctgccccccaggaacaccaaccctggcatcaagtgctttgctgtgcgcagcctgggctgggtggagatgacagaggaggagctggcccctggccgcagctctgtggccgtgaacaactgcatccggcagctgagctaccacaagaacaacctgcatgaccccatgtctgggggctggggcgagggcaaggacctgctgctgcagctggaggatgagaccctgaagctggtggagccccagagccaggccctgctgcacgcccagcccatcatcagcatccgggtgtggggcgtgggccgggacagcggcagcaacagagactttgcctacgtggcccgggacaagctgacccagatgctgaagtgccacgtgttccgctgtgaggccccagccaagaacatcgccaccagcctgcacgagatctgcagcaagatcatggccgagaggagaaatgcccgctgcctggtgaatggcctgagcctggaccacagcaagctggtggatgtgcccttccaggtggagttccctgcccccaagaatgagctggtgcagaagttccaggtgtactacctgggcaatgtgcctgtggccaagcctgtgggcgtggatgtgatcaacggggccctggagagcgtgctgagcagcagcagccgggagcagtggacccccagccacgtgtctgtggccccagccaccctgaccatcctgcaccagcagacagaggccgtgctgggggagtgccgggtgcgcttcctgtccttcctggccgtgggcagagatgtgcacacctttgccttcatcatggccgccggccctgccagcttctgctgccacatgttctggtgtgagcccaatgctgccagcctgtctgaggccgtgcaggccgcctgcatgctgcgctaccagaagtgcctggatgcccggagccaggccagcaccagctgcctgcctgcccctcctgctgagagcgtggcccggcgggtgggctggacagtgagaagaggagtgcagagcctgtggggcagcctgaagcccaagaggctgggcgcccacaccccctag

SEQ ID NO: 92070 - DNA, 1428 bp, Artificial Sequence
  derived and/or modified sequence
atgacccagatgcgggacagcttctggaaccccaacgccttcgagactgatagcgacttgcctgcgggctggatgcgtgttcaagatacaagcggaacttactattggcacatcccgaccggcaccacacagtgggagcccccaggtcgagccagtccatctcaaggaagctcccctcaggaagagtctcagctgacctggacaggatttgcacacggtgagggctttgaggacggcgaattctggaaggacgagcccagcgatgaggccccaatggaactgggcctgaaagagccagaagaaggcaccctgacattcccggcccagtccttatctcctgaaccactgcctcaagaggaggaaaagctcccccctcggaatacaaatccaggtattaagtgctttgccgtgagatctctggggtgggtggagatgacggaggaagaactggccccagggagaagttctgtggcggttaataattgtatacggcagctctcctatcacaagaacaatctccacgaccctatgtcgggagggtggggcgagggaaaagacttgctgctccagcttgaagatgagaccctaaagcttgtcgaaccacagtcacaagccctgctgcacgcacagcccataatctccataagggtgtggggggtcggacgagactcaggaagcaatcgggattttgcttacgttgctagagacaagttaacgcagatgctgaagtgccacgtattcagatgcgaagcgccagcaaaaaacattgcgacatcccttcacgagatctgctcaaagatcatggcagaaaggcgaaatgcacggtgtctagtgaatggattgtccttggaccattcaaaactcgtcgacgtgcccttccaggtcgagtttccggcaccaaaaaacgaactggttcagaagttccaggtgtactatctagggaatgttcctgtagcaaagccagtgggagtggacgttatcaatggtgccctggaatcagtgcttagcagtagtagcagggagcagtggacgccttctcacgtgtccgtagcacccgccactctcacaatcctgcaccagcagacagaagctgtccttggggaatgcagagtgcggttcttgtcgtttctggccgtgggccgcgatgtgcacacttttgcctttatcatggctgctggcccagcctctttctgttgccacatgttttggtgcgaacccaatgctgctagcttatcagaggcagtgcaggcggcttgtatgctaaggtaccaaaaatgtctggatgctaggagccaggctagcacaagctgcctccctgccccccctgccgaaagcgtggcaaggagggttggctggactgtacgtaggggggtgcaatccctgtggggttctctgaagcccaaaaggctcggcgcccacaccccgtag

SEQ ID NO: 92071 - DNA, 1569 bp, Artificial Sequence
  derived and/or modified sequence
gttggagtggtgtggctctgccggcagacaagggtgtatgacacagatgcgagattccttctggaaccccaacgccttcgagacggattccgacctgccggctggatggatgagggtccaggacacctcagggacctattactggcacatcccaacagggaccacccagtgggaaccccccggccgggcctccccctcacaggggagcagcccccaagaggagtcccagctcacctggacaggttttgctcatggagaaggctttgaggatggagaattttggaaggatgaacccagtgatgaggccccaatggagctgggactgaaggaacctgaggaggggacgttgaccttcccagctcagagcctcagcccagagccgttgccccaagaggaggagaagcttcccccacggaataccaacccagggatcaagtgtttcgccgtgcgctccctaggctgggtagagatgaccgaggaggagctggcccctggacgcagcagtgtggcagtcaacaattgcatccgtcagctctcttaccacaaaaacaacctgcatgaccccatgtctgggggctggggggaaggaaaggatctgctactgcagctggaggatgagacactaaagctagtggagccacagagccaggcactgctgcacgcccaacccatcatcagcatccgcgtgtggggcgtcgggcgggacagtggaagcaacagggactttgcctacgtagctcgtgataagctgacccagatgctcaagtgccacgtgtttcgctgtgaggcacctgccaagaacatcgccaccagcctgcatgagatctgctctaagatcatggccgaacggcgtaatgcccgctgcttggtaaatggactctccctggaccactctaaacttgtggatgtccctttccaagtggaattcccagcgcctaagaatgagttggtccagaagttccaagtctattacctggggaatgtacctgttgctaaacctgttggggtagatgtgattaatggggccctcgagtcagtcctgtcctccagcagccgtgaacaatggaccccaagtcatgtcagtgtggcccctgctaccctcaccatcttgcaccagcagacagaggcagtgctgggagagtgtcgggtgcgtttcctctccttcctggccgtgggcagagatgtccacacgtttgcattcatcatggctgccggcccagcctccttctgctgccacatgttctggtgcgagcccaatgctgccagcctctcagaggctgtgcaggctgcgtgcatgcttcgctaccagaagtgtctggatgcccgttcccaggcctccacctcctgcctcccagcaccccctgctgagtctgtggcacggcgtgtagggtggactgtccgcaggggtgttcagtcgctgtggggctccctgaagcccaaacggctgggggcccataccccatgaagaagcccccaccttccctccacctgcttgtgttgggccccagggaactaaagggtgtgggtcagggaggggtctagaggctattcctaggcctcaggcctccc

SEQ ID NO: 92072 - DNA, 1428 bp, Artificial Sequence
  derived and/or modified sequence
atgacacagatgagagactccttttggaatccgaacgcttttgagacagacagcgacctcccagccggttggatgcgtgtacaagatacttccgggacctattactggcatattcccactggcaccactcagtgggaaccacctggaagagcgagcccgagccagggatctagtccccaggaagagtcccagctaacgtggaccggattcgcccacggtgaaggattcgaagacggcgagttctggaaagatgaaccgtccgatgaggcgccaatggagctaggcctcaaggagcccgaagagggaactctgacctttcctgcccaaagtctgtcacctgagccgctcccacaggaagaggaaaaattaccaccacgcaacacgaatccagggatcaaatgtttcgccgtaaggtccctgggatgggtggaaatgacagaagaagagctggcgcctggtcgctcctctgtcgccgttaataactgtatccgccagctgagctaccacaagaataatctgcatgaccccatgtcgggcggttggggggagggaaaagacctactgctgcagcttgaagacgaaacgctaaagctggtggagccccagtcacaggccctgctgcatgcccagccaattatatctatacgagtgtggggtgtagggcgagattctggatccaaccgcgatttcgcttatgtggccagagataagctcacccagatgttaaaatgtcacgtcttcaggtgcgaagcccctgctaaaaatattgctaccagtcttcatgagatatgctccaagattatggcagaaaggcgcaatgcgcgttgcctggtgaatggactcagccttgaccactccaaactggtggacgtccccttccaagtggaattcccggcacccaagaatgaactggttcagaaatttcaagtgtattatttaggcaacgtgcccgttgccaagcccgtgggggtggacgtgattaacggggcactggagtctgttctcagcagctccagccgggagcagtggaccccgtcccatgtatcggtggcacccgctaccctgaccattttacaccagcaaactgaagcagtgctgggcgaatgcagagtacgattccttagtttcttggcagtgggtcgcgacgttcacacattcgcttttattatggcagcgggtccagcaagtttctgctgtcacatgttttggtgtgagccaaatgcggcaagtttatcagaggccgtgcaggccgcatgcatgctgagatatcagaaatgccttgatgccaggagccaggccagtacctcatgcttgcctgctcctccagccgagtccgtggcaaggagggtggggtggaccgtcagaagaggtgtccaaagcttatgggggtccctaaaaccgaaaaggcttggggctcataccccctag

SEQ ID NO: 92073 - DNA, 1428 bp, Artificial Sequence
  derived and/or modified sequence
atgacccagatgagagacagcttctggaaccccaacgccttcgagaccgacagcgacctgcccgccggctggatgagagtgcaggacaccagcggcacctactactggcacatccccaccggcaccacccagtgggagccccccggcagagccagccccagccagggcagcagcccccaggaggagagccagctgacctggaccggcttcgcccacggcgagggcttcgaggacggcgagttctggaaggacgagcccagcgacgaggcccccatggagctgggcctgaaggagcccgaggagggcaccctgaccttccccgcccagagcctgagccccgagcccctgccccaggaggaggagaagctgccccccagaaacaccaaccccggcatcaagtgcttcgccgtgagaagcctgggctgggtggagatgaccgaggaggagctggcccccggcagaagcagcgtggccgtgaacaactgcatcagacagctgagctaccacaagaacaacctgcacgaccccatgagcggcggctggggcgagggcaaggacctgctgctgcagctggaggacgagaccctgaagctggtggagccccagagccaggccctgctgcacgcccagcccatcatcagcatcagagtgtggggcgtgggcagagacagcggcagcaacagagacttcgcctacgtggccagagacaagctgacccagatgctgaagtgccacgtgttcagatgcgaggcccccgccaagaacatcgccaccagcctgcacgagatctgcagcaagatcatggccgagagaagaaacgccagatgcctggtgaacggcctgagcctggaccacagcaagctggtggacgtgcccttccaggtggagttccccgcccccaagaacgagctggtgcagaagttccaggtgtactacctgggcaacgtgcccgtggccaagcccgtgggcgtggacgtgatcaacggcgccctggagagcgtgctgagcagcagcagcagagagcagtggacccccagccacgtgagcgtggcccccgccaccctgaccatcctgcaccagcagaccgaggccgtgctgggcgagtgcagagtgagattcctgagcttcctggccgtgggcagagacgtgcacaccttcgccttcatcatggccgccggccccgccagcttctgctgccacatgttctggtgcgagcccaacgccgccagcctgagcgaggccgtgcaggccgcctgcatgctgagataccagaagtgcctggacgccagaagccaggccagcaccagctgcctgcccgccccccccgccgagagcgtggccagaagagtgggctggaccgtgagaagaggcgtgcagagcctgtggggcagcctgaagcccaagagactgggcgcccacaccccctag

SEQ ID NO: 92074 - protein, 330 aa, Artificial Sequence
  derived and/or modified sequence
MGEKPGTRVFKKSSPNCKLTVYLGKRDFVDHLDKVDPVDGVVLVDPDYLKDRKVFVTLTCAFRYGREDLDVLGLSFRKDLFIATYQAFPPVPNPPRPPTRLQDRLLRKLGQHAHPFFFTIPQNLPCSVTLQPGPEDTGKACGVDFEIRAFCAKSLEEKSHKRNSVRLVIRKVQFAPEKPGPQPSAETTRHFLMSDRSLHLEASLDKELYYHGEPLNVNVHVTNNSTKTVKKIKVSVRQYADICLFSTAQYKCPVAQLEQDDQREGGCQQGGAGNPGVLQGQGEAGGVSRRGCLCGAAFCSYAPQAPRPHPPPQTPVSRSGDRCPCGHQPH

SEQ ID NO: 92075 - DNA, 993 bp, Artificial Sequence
  derived and/or modified sequence
atgggggagaaacctggtaccagagtgtttaaaaagtcatcaccaaactgcaaactcaccgtctatttaggcaaaagagatttcgtggatcaccttgataaggtcgaccccgtcgacggggtcgtgctggttgatccagactatctcaaagaccggaaggtgtttgtgacacttacatgtgcgttccggtatggtcgtgaagatcttgacgtactgggtttgagcttcaggaaagacctgttcattgctacttatcaagcattcccacctgtacccaatccaccaagacctccaactcgcctccaggacaggctgctgagaaagctcgggcagcacgctcatccttttttttttaccattcctcagaacttgccctgcagcgtgactttgcaacctggaccagaggacacaggtaaagcgtgcggagtggacttcgaaatccgggccttttgtgctaagagcctggaggagaaaagtcacaagcgaaattctgtgaggctggtgatccgcaaagtacagttcgcccctgagaaacctgggccgcagcctagcgcggagactacacgccatttcctgatgtccgacaggtcgctgcatctagaggcttccttggacaaggaactgtattaccacggtgagcctcttaacgtgaacgtgcatgtgaccaacaattcaacaaaaacggttaaaaagataaaggtcagtgtgcggcagtatgctgatatctgcttgtttagcaccgctcaatacaagtgcccagtggcacagctggagcaagacgatcagagggaaggaggctgtcagcagggcggcgctggcaaccccggcgtactccagggtcagggcgaggctgggggagtgagccgccgggggtgcctgtgcggcgctgccttttgctcctatgcccctcaggcacctaggccccatccacccccacaaaccccagtctcacgcagcggagatcgatgcccttgcggccaccagccccattag

SEQ ID NO: 92076 - DNA, 993 bp, Artificial Sequence
  derived and/or modified sequence
atgggagagaagccaggcaccagggtcttcaagaagagcagccccaactgcaagctgactgtgtacctgggcaagagggactttgtggaccacctggacaaggtggaccctgtggatggagtggtgctggtggaccctgactacctgaaggacaggaaggtgtttgtgaccctgacctgtgccttccgctatggaagagaggacctggatgtgctgggcctgtccttcaggaaggacctcttcatcgccacctaccaggccttcccccctgtgcccaacccccccaggcctcccacccggctgcaggaccggctgctgaggaagctgggccagcacgcccaccccttcttcttcaccatcccccagaacctgccctgcagcgtgaccctgcagcccggcccagaagatactgggaaggcctgtggggtggactttgagatccgggccttctgtgccaagagcctggaggagaagagccacaagaggaacagcgtgcggctggtgatcaggaaggtgcagtttgcccctgagaagccaggcccccagcccagcgctgagaccaccaggcacttcctgatgtctgacaggagcctgcacctggaggccagcctggacaaggagctgtactaccatggagagcccctgaatgtgaatgtgcacgtgaccaacaacagcaccaagacagtgaagaagatcaaggtgtctgtgcggcagtatgctgacatctgcctcttcagcacagcccagtacaagtgccctgtggcccagctggagcaggatgaccagcgggagggcggctgccagcagggcggggccggcaaccctggggtgctgcagggccagggcgaggccggcggcgtgtccagaagaggctgcctgtgtggggccgccttctgcagctatgccccccaggccccccggccccaccccccaccccagacccctgtgagccgcagcggggaccgctgcccctgtggccaccagccccactag

SEQ ID NO: 92077 - DNA, 993 bp, Artificial Sequence
  derived and/or modified sequence
atgggcgagaagcccggcacccgggtgttcaagaagagcagccccaattgcaagctgactgtgtatctggggaaaagagacttcgtcgatcacctggataaggttgatcctgtcgacggtgtcgtcctggtggacccggactacctgaaagacaggaaggtttttgttacgctcacttgcgcgttccggtacggaagggaggacttagatgtgctcggattaagcttccggaaggacttattcattgctacttatcaagcattcccccctgtgcctaacccaccccgtccgccgacacggctgcaggataggctcctgaggaagctggggcagcatgctcaccccttttttttcactataccccaaaatttgccgtgctctgttaccctgcagcctggaccagaggacacaggcaaggcatgtggcgtagatttcgaaatccgagctttttgcgccaaatctttggaagaaaaaagccacaaacgaaacagcgtcagactcgtgattaggaaagtgcaatttgctcctgagaagccaggccctcagccaagcgctgaaaccacaagacatttcctaatgagcgatcgatcgttacacctagaggcgtccctcgataaagagctctactaccacggcgaacctcttaacgtgaacgttcatgtcacaaacaactctacgaaaaccgttaagaaaattaaggtcagcgtccgacagtacgctgatatttgcctgttctcaactgctcagtataaatgcccagttgcccagctggagcaggacgatcagcgggaggggggctgccagcagggtggtgctggcaacccaggggtgctgcagggccaaggcgaggctgggggagtatcacgtcgtggatgcctgtgcggggccgccttctgctcatatgcaccccaggcccctaggcctcatccgccccctcaaacacccgtatctcggtccggggacaggtgtccttgtggacaccaaccacactag

SEQ ID NO: 92078 - DNA, 993 bp, Artificial Sequence
  derived and/or modified sequence
atgggcgagaaaccaggtacaagggtgttcaagaagagctccccaaactgtaaactaacagtctatctcggcaagcgcgacttcgtcgatcacctcgacaaagttgacccagtggatggcgttgtccttgttgaccccgattacctgaaagacagaaaggtgttcgtcactctcacctgtgccttccgctacgggagggaggatctcgatgttctgggcctgtctttcaggaaagacttgttcatagccacatatcaggctttcccccctgttccgaaccctcctcgaccccctacccggctgcaggaccgtttacttcggaaactgggccagcacgcacatccttttttctttaccatccctcagaaccttccatgctctgtgacactgcagcctgggcctgaggataccggtaaagcctgcggcgtggactttgagataagggccttttgtgccaagtctctggaagaaaagtcccacaaacggaacagtgttaggttggtgatcagaaaggtccaatttgctcctgagaaaccagggccacagcctagcgctgagacaactagacattttcttatgtccgatcgcagccttcacctcgaggccagcttggacaaggaactgtactatcacggcgagcccctgaatgttaatgtacatgtgactaataatagcacgaagaccgttaaaaaaattaaagtcagtgtgcggcaatacgcagacatttgtttgttctctaccgcacaatacaaatgccctgtggcccagcttgaacaggatgaccagagggagggcggatgccagcaaggcggagccggaaaccccggagtcctgcagggtcagggtgaggcgggtggcgtttccagacgcggatgcctatgcggtgcggcattttgctcctatgctccgcaggcccctcgacctcaccctcctccccagacgccagtaagtagaagcggtgatcggtgtccctgtgggcatcagccccactag

SEQ ID NO: 92079 - DNA, 1579 bp, Artificial Sequence
  derived and/or modified sequence
agcgggcggcgggcgcgcgcaccatgggggagaaacccgggaccagggtcttcaagaagtcgagccctaactgcaagctcaccgtgtacttgggcaagcgggacttcgtagatcacctggacaaagtggaccctgtagatggcgtggtgcttgtggaccctgactacctgaaggaccgcaaagtgtttgtgaccctcacctgcgccttccgctatggccgtgaagacctggatgtgctgggcttgtccttccgcaaagacctgttcatcgccacctaccaggccttccccccggtgcccaacccaccccggccccccacccgcctgcaggaccggctgctgaggaagctgggccagcatgcccaccccttcttcttcaccataccccagaatcttccatgctccgtcacactgcagccaggcccagaggatacaggaaaggcctgcggcgtagactttgagattcgagccttctgtgctaaatcactagaagagaaaagccacaaaaggaactctgtgcggctggtgatccgaaaggtgcagttcgccccggagaaacccggcccccagccttcagccgaaaccacacgccacttcctcatgtctgaccggtccctgcacctcgaggcttccctggacaaggagctgtactaccatggggagcccctcaatgtaaatgtccacgtcaccaacaactccaccaagaccgtcaagaagatcaaagtctctgtgagacagtacgccgacatctgcctcttcagcaccgcccagtacaagtgtcctgtggctcaactcgaacaagatgaccagcgtgaaggagggtgccaacaaggaggtgctgggaatcctggtgtcctacagggtcaaggtgaagctggtggtgtctcgaggcggggatgtctctgtggagctgccttttgttcttatgcaccccaagccccacgaccacatccccctccccagaccccagtcagccgctccggagacagatgtccctgtggacaccaacctcattgaatttgataccaactatgccacagatgatgacattgtgtttgaggactttgcccggcttcggctgaaggggatgaaggatgacgactatgatgatcaactctgctaggaagcggggtgggaagaagggaggggatggggttgggagaggtgagggcaggattaagatccccactgtcaatgggggattgtcccagcccctcttcccttcccctcacctggaagcttcttcaaccaatcccttcacactctctcccccatccccccaagatacacactggaccctctcttgctgaatgtgggcattaattttttgactgcagctctgcttctccagccccgccgtgggtggcaagctgtgttcatacctaaattttctggaaggggacagtgaaaagaggagtgacaggagggaaagggggagacaaaactcctactctcaacctcacaccaacacctcccattatcactctctctgcccccattccttcaagaggagaccctttggggacaaggccgtttctttgtttctgagcataaagaagaaaataaatcttttactaagc

SEQ ID NO: 92080 - DNA, 993 bp, Artificial Sequence
  derived and/or modified sequence
atgggcgagaagcccggcaccagagtgttcaagaagagcagccccaactgcaagctgaccgtgtacctgggcaagagagacttcgtggaccacctggacaaggtggaccccgtggacggcgtggtgctggtggaccccgactacctgaaggacagaaaggtgttcgtgaccctgacctgcgccttcagatacggcagagaggacctggacgtgctgggcctgagcttcagaaaggacctgttcatcgccacctaccaggccttcccccccgtgcccaacccccccagaccccccaccagactgcaggacagactgctgagaaagctgggccagcacgcccaccccttcttcttcaccatcccccagaacctgccctgcagcgtgaccctgcagcccggccccgaggacaccggcaaggcctgcggcgtggacttcgagatcagagccttctgcgccaagagcctggaggagaagagccacaagagaaacagcgtgagactggtgatcagaaaggtgcagttcgcccccgagaagcccggcccccagcccagcgccgagaccaccagacacttcctgatgagcgacagaagcctgcacctggaggccagcctggacaaggagctgtactaccacggcgagcccctgaacgtgaacgtgcacgtgaccaacaacagcaccaagaccgtgaagaagatcaaggtgagcgtgagacagtacgccgacatctgcctgttcagcaccgcccagtacaagtgccccgtggcccagctggagcaggacgaccagagagagggcggctgccagcagggcggcgccggcaaccccggcgtgctgcagggccagggcgaggccggcggcgtgagcagaagaggctgcctgtgcggcgccgccttctgcagctacgccccccaggcccccagaccccacccccccccccagacccccgtgagcagaagcggcgacagatgcccctgcggccaccagccccactag

SEQ ID NO: 92081 - protein, 421 aa, Artificial Sequence
  derived and/or modified sequence
MGEKPGTRVFKKSSPNCKLTVYLGKRDFVDHLDKVDPVDGVVLVDPDYLKDRKVFVTLTCAFRYGREDLDVLGLSFRKDLFIATYQAFPPVPNPPRPPTRLQDRLLRKLGQHAHPFFFTIPQNLPCSVTLQPGPEDTGKACGVDFEIRAFCAKSLEEKSHKRNSVRLVIRKVQFAPEKPGPQPSAETTRHFLMSDRSLHLEASLDKELYYHGEPLNVNVHVTNNSTKTVKKIKVSVRQYADICLFSTAQYKCPVAQLEQDDQVSPSSTFCKVYTITPLLSDNREKRGLALDGKLKHEDTNLASSTIVKEGANKEVLGILVSYRVKVKLVVSRGGDVSVELPFVLMHPKPHDHIPLPRPQSAPTPTPPLPVPPAAPETDVPVDTNLIEFDTNYATDDDIVFEDFARLRLKGMKDDDYDDQLC

SEQ ID NO: 92082 - DNA, 1266 bp, Artificial Sequence
  derived and/or modified sequence
atgggggaaaagcccggcaccagagtcttcaaaaaatcctccccaaactgtaaacttactgtttatctgggaaaacgggacttcgtggaccaccttgataaagtcgaccccgtcgacggtgttgtgttagttgatcctgattatttaaaggatagaaaggtgtttgtgaccctgacatgtgcctttcggtacggaagagaggatctggatgtgctggggctgtcttttcgcaaggatctctttatagccacgtatcaagcttttcctcctgtacctaacccgccccggcctccgacacgactgcaggacagactgctgcgaaagctcggccagcatgctcaccctttcttctttacgatccctcagaatctgccgtgttccgtgacactgcaacctggccctgaagacaccggaaaggcatgcggcgtcgattttgagattagagcattctgcgctaaatctctggaggaaaagagtcacaaaagaaacagtgtcaggcttgtgatacggaaggtgcagtttgcgcccgaaaaacctggcccacagccttcagccgaaaccacccgccatttcctgatgtctgatcggagcctacaccttgaggcctccctggacaaggagctgtactaccacggagagccactgaatgttaatgtgcatgtcactaacaactccacaaaaactgttaagaagattaaagtttctgtaagacagtacgctgacatttgcctgttctcaaccgcacagtacaaatgcccggtggctcagttagagcaagacgatcaggtgagtccctcctcaaccttttgtaaagtgtataccataacccccctactttcagacaatagggaaaagagagggctggcgcttgatggtaagctgaaacatgaggacacaaatttggcatctagtacaattgtgaaggagggggccaacaaggaagtgctgggaatcctagtcagctaccgggtgaaggtgaagctggtcgtctcaagaggcggggatgttagtgtcgaactaccatttgtgctgatgcatcccaagccccacgaccatatccctctgcctcgaccccagtcagcccccaccccgactcctcccctgcccgtgcctccagccgcacccgaaacggatgtgccagtcgacactaacctgattgagtttgataccaactacgccacggacgatgacatcgtgtttgaggattttgccaggctgcgcctgaaaggcatgaaggatgatgactatgatgaccagttgtgttag

SEQ ID NO: 92083 - DNA, 1266 bp, Artificial Sequence
  derived and/or modified sequence
atgggagagaagccaggcaccagggtcttcaagaagagcagccccaactgcaagctgactgtgtacctgggcaagagggactttgtggaccacctggacaaggtggaccctgtggatggagtggtgctggtggaccctgactacctgaaggacaggaaggtgtttgtgaccctgacctgtgccttccgctatggaagagaggacctggatgtgctgggcctgtccttcaggaaggacctcttcatcgccacctaccaggccttcccccctgtgcccaacccccccaggcctcccacccggctgcaggaccggctgctgaggaagctgggccagcacgcccaccccttcttcttcaccatcccccagaacctgccctgcagcgtgaccctgcagcccggcccagaagatactgggaaggcctgtggggtggactttgagatccgggccttctgtgccaagagcctggaggagaagagccacaagaggaacagcgtgcggctggtgatcaggaaggtgcagtttgcccctgagaagccaggcccccagcccagcgctgagaccaccaggcacttcctgatgtctgacaggagcctgcacctggaggccagcctggacaaggagctgtactaccatggagagcccctgaatgtgaatgtgcacgtgaccaacaacagcaccaagacagtgaagaagatcaaggtgtctgtgcggcagtatgctgacatctgcctcttcagcacagcccagtacaagtgccctgtggcccagctggagcaggatgaccaggtgagccccagcagcaccttctgcaaggtgtacaccatcacccccctgctgagtgacaaccgggagaagaggggcctggccctggatggcaagctgaagcatgaggacaccaacctggccagcagcaccatcgtgaaggagggcgccaacaaggaggtgctgggcatcctggtgtcctacagagtgaaggtgaagctggtggtgtccagaggaggagatgtgtctgtggagctgccctttgtgctgatgcaccccaagccccatgaccacatccccctgccccggccccagagcgcccccacccccaccccacccctgcctgtgcccccagctgcccctgagacagatgtgcctgtggacaccaacctgattgaatttgacaccaactatgccacagatgatgacatcgtgtttgaagattttgcccggctgcggctgaagggcatgaaggatgatgattatgatgaccagctgtgctag

SEQ ID NO: 92084 - DNA, 1266 bp, Artificial Sequence
  derived and/or modified sequence
atgggcgagaagcccggcacccgggtgttcaagaagagcagccccaactgtaagctgaccgtgtacctcggaaagagggacttcgttgaccacctcgataaggttgatcctgtggatggggtggttctggtagatccagattatctgaaggaccgtaaggtctttgtgacattgacctgcgcttttcgttatggccgagaagatctggacgtattaggtctatctttccgaaaggatctgttcatcgccacctaccaggccttccctccagtccctaatccgccaagacccccgacccgcctgcaggatcgcttacttagaaagctggggcagcacgctcacccgttctttttcacaatcccacagaacctcccatgctctgtgacgctccaacctggcccggaagacactgggaaggcatgtggggtggattttgagatccgcgctttttgtgcgaagagcctggaagaaaaaagtcataagagaaattccgtgagactggtgatacgcaaggtccagtttgccccagaaaagccgggaccacagccttcagctgaaactactcgccatttcctaatgagtgatcggagtttacatctcgaagcctcactagataaggaactgtactatcacggcgagcctcttaatgtgaatgtgcatgtgaccaataattctacaaagaccgtcaagaaaattaaggtgtccgtgagacagtacgctgacatctgcttgttttccaccgcccagtacaaatgcccagttgcccagctagaacaggacgatcaggtgtctccaagctcaacattttgtaaggtttatactataactcctcttctgtccgacaaccgagaaaagcgggggcttgccttagacggaaagttgaaacacgaggatactaatttggccagcagcacaatcgtcaaggaaggcgcaaataaggaggtcctcggcatcctagtgagctatagggtaaaggttaagctggtcgtgtccagagggggcgacgtctcagtggaactgcccttcgtgcttatgcacccgaagcctcacgaccatattccattgccgcggcctcagagcgctcctacacccactcctcctcttccagtgccccccgctgcccctgagacagacgtgcctgtggacacaaatctcattgaattcgatactaactatgccaccgatgatgacattgtcttcgaggattttgcacggctgaggctcaagggcatgaaggacgacgactatgatgaccagttatgctag

SEQ ID NO: 92085 - DNA, 1266 bp, Artificial Sequence
  derived and/or modified sequence
atgggcgaaaagcccggaactcgggtatttaagaagtcttcacctaattgtaaacttacagtgtacctgggtaaaagggacttcgttgaccaccttgacaaggtcgaccccgtggatggcgttgtcctggtggaccccgactacttgaaggatagaaaagtttttgttaccctaacttgcgctttccgctacgggcgtgaggacctcgacgtccttgggctttcctttagaaaagacttattcattgctacgtaccaggcctttccacccgtgccaaatcccccacgtccgcctacaagacttcaggataggctcttaaggaagctgggtcagcacgcccatccttttttttttaccatccctcagaacttgccgtgtagtgtgacgttgcagccaggacccgaagataccggtaaagcctgcggggtggactttgaaatccgagccttctgcgccaaaagtctggaggaaaaatcccataagcgcaattccgtgcgtctagtgatccgaaaagtgcaatttgcgccagagaagcccggaccacagccgagcgccgagactaccaggcactttctcatgtccgacaggagtctacatctcgaggcgagcctggataaggaactgtactaccacggcgagccactgaacgtcaatgttcatgtgaccaacaatagcacaaaaactgtcaaaaagattaaggtgtctgttaggcagtacgctgatatctgccttttcagcacagcacagtataaatgccctgtcgcccaactggagcaggatgatcaggtctctccctcctcaactttttgtaaagtctataccatcaccccactgttaagtgataaccgggagaaaagaggcttggctctagatgggaaactcaagcacgaggatactaatttggcttctagcaccatagtgaaagagggggctaacaaggaagttctggggattctggtgtcgtaccgcgtgaaggtaaagctagtggtcagtagaggcggagacgttagcgtagagctccccttcgtgctgatgcatccaaaaccccatgaccatatacctcttccacgcccacagagtgccccaacccctacgccacccctacctgttcctcccgcagccccagaaacagatgtgccggtcgacactaatctaatcgaattcgacactaactatgctactgacgatgatatcgtgtttgaagacttcgccaggctgcgcctcaaaggaatgaaggatgatgactacgatgaccagctttgttag

SEQ ID NO: 92086 - DNA, 1960 bp, Artificial Sequence
  derived and/or modified sequence
aatggccccgcgtgtctgctaggagagggcgggcagcgccgcggcgcgcgcgatccggctgacgcatctggccccggttccccaagaccagagcggggccgggagggagggggaagaggcgagagcgcggagggcgcgcgtgcgcattggcgcggggaggagcagggatcttggcagcgggcgaggaggctgcgagcgagccgcgaaccgagcgggcggcgggcgcgcgcaccatgggggagaaacccgggaccagggtcttcaagaagtcgagccctaactgcaagctcaccgtgtacttgggcaagcgggacttcgtagatcacctggacaaagtggaccctgtagatggcgtggtgcttgtggaccctgactacctgaaggaccgcaaagtgtttgtgaccctcacctgcgccttccgctatggccgtgaagacctggatgtgctgggcttgtccttccgcaaagacctgttcatcgccacctaccaggccttccccccggtgcccaacccaccccggccccccacccgcctgcaggaccggctgctgaggaagctgggccagcatgcccaccccttcttcttcaccataccccagaatcttccatgctccgtcacactgcagccaggcccagaggatacaggaaaggcctgcggcgtagactttgagattcgagccttctgtgctaaatcactagaagagaaaagccacaaaaggaactctgtgcggctggtgatccgaaaggtgcagttcgccccggagaaacccggcccccagccttcagccgaaaccacacgccacttcctcatgtctgaccggtccctgcacctcgaggcttccctggacaaggagctgtactaccatggggagcccctcaatgtaaatgtccacgtcaccaacaactccaccaagaccgtcaagaagatcaaagtctctgtgagacagtacgccgacatctgcctcttcagcaccgcccagtacaagtgtcctgtggctcaactcgaacaagatgaccaggtatctcccagctccacattctgtaaggtgtacaccataaccccactgctcagcgacaaccgggagaagcggggtctcgccctggatgggaaactcaagcacgaggacaccaacctggcttccagcaccatcgtgaaggagggtgccaacaaggaggtgctgggaatcctggtgtcctacagggtcaaggtgaagctggtggtgtctcgaggcggggatgtctctgtggagctgccttttgttcttatgcaccccaagccccacgaccacatccccctccccagaccccagtcagcacccacccccacaccccctcttcccgtccccccagccgctccggagacagatgtccctgtggacaccaacctcattgaatttgataccaactatgccacagatgatgacattgtgtttgaggactttgcccggcttcggctgaaggggatgaaggatgacgactatgatgatcaactctgctaggaagcggggtgggaagaagggaggggatggggttgggagaggtgagggcaggattaagatccccactgtcaatgggggattgtcccagcccctcttcccttcccctcacctggaagcttcttcaaccaatcccttcacactctctcccccatccccccaagatacacactggaccctctcttgctgaatgtgggcattaattttttgactgcagctctgcttctccagccccgccgtgggtggcaagctgtgttcatacctaaattttctggaaggggacagtgaaaagaggagtgacaggagggaaagggggagacaaaactcctactctcaacctcacaccaacacctcccattatcactctctctgcccccattccttcaagaggagaccctttggggacaaggccgtttctttgtttctgagcataaagaagaaaataaatcttttactaagcatga

SEQ ID NO: 92087 - DNA, 1266 bp, Artificial Sequence
  derived and/or modified sequence
atgggcgagaagcccggcaccagagtgttcaagaagagcagccccaactgcaagctgaccgtgtacctgggcaagagagacttcgtggaccacctggacaaggtggaccccgtggacggcgtggtgctggtggaccccgactacctgaaggacagaaaggtgttcgtgaccctgacctgcgccttcagatacggcagagaggacctggacgtgctgggcctgagcttcagaaaggacctgttcatcgccacctaccaggccttcccccccgtgcccaacccccccagaccccccaccagactgcaggacagactgctgagaaagctgggccagcacgcccaccccttcttcttcaccatcccccagaacctgccctgcagcgtgaccctgcagcccggccccgaggacaccggcaaggcctgcggcgtggacttcgagatcagagccttctgcgccaagagcctggaggagaagagccacaagagaaacagcgtgagactggtgatcagaaaggtgcagttcgcccccgagaagcccggcccccagcccagcgccgagaccaccagacacttcctgatgagcgacagaagcctgcacctggaggccagcctggacaaggagctgtactaccacggcgagcccctgaacgtgaacgtgcacgtgaccaacaacagcaccaagaccgtgaagaagatcaaggtgagcgtgagacagtacgccgacatctgcctgttcagcaccgcccagtacaagtgccccgtggcccagctggagcaggacgaccaggtgagccccagcagcaccttctgcaaggtgtacaccatcacccccctgctgagcgacaacagagagaagagaggcctggccctggacggcaagctgaagcacgaggacaccaacctggccagcagcaccatcgtgaaggagggcgccaacaaggaggtgctgggcatcctggtgagctacagagtgaaggtgaagctggtggtgagcagaggcggcgacgtgagcgtggagctgcccttcgtgctgatgcaccccaagccccacgaccacatccccctgcccagaccccagagcgcccccacccccaccccccccctgcccgtgccccccgccgcccccgagaccgacgtgcccgtggacaccaacctgatcgagttcgacaccaactacgccaccgacgacgacatcgtgttcgaggacttcgccagactgagactgaagggcatgaaggacgacgactacgacgaccagctgtgctag

SEQ ID NO: 92088 - protein, 58 aa, Artificial Sequence
  derived and/or modified sequence
MLSVRVAAAVVRALPRRAGLVSRNALGSSFIAARNFHASNTHLQKTGKLLFLSLRRTY

SEQ ID NO: 92089 - protein, 531 aa, Artificial Sequence
  derived and/or modified sequence
MLSVRVAAAVVRALPRRAGLVSRNALGSSFIAARNFHASNTHLQKTGTAEMSSILEERILGADTSVDLEETGRVLSIGDGIARVHGLRNVQAEEMVEFSSGLKGMSLNLEPDNVGVVVFGNDKLIKEGDIVKRTGAIVDGPIGSKTRRRVGLKAPGIIPRISVREPMQTGIKAVDSLVPIGRGQRELIIGDRQTGKTSIAIDTIINQKRFNDGSDEKKKLYCIYVAIGQKRSTVAQLVKRLTDADAMKYTIVVSATASDAAPLQYLAPYSGCSMGEYFRDNGKHALIIYDDLSKQAVAYRQMSLLLRRPPGREAYPGDVFYLHSRLLERAAKMNDAFGGGSLTALPVIETQAGDVSAYIPTNVISITDGQIFLETELFYKGIRPAINVGLSVSRVGSAAQTRAMKQVAGTMKLELAQYREVAAFAQFGSDLDAATQQLLSRGVRLTELLKQGQYSPMAIEEQVAVIYAGVRGYLDKLEPSKITKFENAFLSHVVSQHQALLGTIRADGKISEQSDAKLKEIVTNFLAGFEA

SEQ ID NO: 92090 - DNA, 177 bp, Artificial Sequence
  derived and/or modified sequence
atgctgtccgtgagagtggctgctgcagtggtgcgagccctcccgaggcgagctgggttggtctcccggaacgccctaggctcaagctttatagccgccagaaacttccacgcgagcaatacgcatttgcagaagacaggcaaattgctgttcctatcactcaggaggacgtactag

SEQ ID NO: 92091 - DNA, 1596 bp, Artificial Sequence
  derived and/or modified sequence
atgctgtcagtgagggtggcagccgccgtggtgagggccttgcctaggcgagcaggcttggtctcgcgcaacgccctagggtcgagtttcatagccgctcggaacttccacgccagcaacacccacctccagaagaccggaactgccgagatgtcttcgatcctggaagaacggatcctgggggcagatacaagcgtggatctggaggagaccggcagagtattgtccatcggggacggaatagctcgtgttcatggcttgaggaacgtgcaggctgaggagatggttgagttctcgagtggtctgaagggaatgtccctgaatttggaacctgacaatgtcggcgtcgtggtttttgggaacgacaaactgatcaaggagggggatattgttaaaagaaccggagccattgtggacggtccaatcggctcgaaaacgcgaagaagggttgggctgaaggctccagggatcatcccccggataagcgtgagggaacccatgcagactggtataaaggcggtcgattcgttggttccaattggtcggggccaaagagagctcatcattggagaccggcaaaccggaaaaacctcaattgcaattgacactatcataaaccagaagcgctttaacgatggctcagatgaaaaaaagaaactctactgtatttatgttgctatcggccagaaacgttctaccgtggcccagctcgttaaacgcctcaccgacgcagatgctatgaaatataccattgtggtgtcggctactgccagcgacgccgctcctctgcagtacctggccccatattccggctgctccatgggtgagtattttcgggataatggtaaacacgccctcattatttacgacgatctgagtaaacaggccgtggcgtaccggcaaatgtctttgctgcttcgacgtccgcctgggcgggaggcatacccaggtgatgtcttttacctccactccagacttcttgagagagcggcaaagatgaatgacgctttcggcggcggctcactcacagctctccctgttatcgagactcaggcaggggacgtaagcgcctacattcctactaatgtaatttcgataaccgacgggcagatcttcttggagaccgagcttttctataaaggtatccgccctgcaattaatgtcgggctttccgtatcacgcgttgggtccgccgctcaaacccgggctatgaaacaagtcgctggcactatgaagctcgagttggctcagtacagggaggtggctgcctttgcccagtttgggagcgacctagatgccgcaacgcagcagttgctgtcacgcggcgtgcgtttaactgaactgttgaagcaggggcaatactcaccaatggctattgaggaacaggtggccgtgatctacgccggagtaaggggctatctggataaactggagcctagcaagattacaaagttcgaaaatgcctttctgtctcacgtggtgagtcaacaccaagccctcctgggcactatccgggcagacggcaagatttctgaacagtccgacgcaaaactgaaagaaatcgtcaccaattttctcgccggctttgaggcatag

SEQ ID NO: 92092 - DNA, 177 bp, Artificial Sequence
  derived and/or modified sequence
atgctgtctgtgcgggtggccgctgctgtggtgcgggccctgccccggcgggccggcctggtgtccagaaatgccctgggcagcagcttcatcgccgccaggaacttccacgccagcaacacccacctgcagaagacaggcaagctgctcttcctgagcctgcggaggacctactag

SEQ ID NO: 92093 - DNA, 1596 bp, Artificial Sequence
  derived and/or modified sequence
atgctgtctgtgcgggtggccgctgctgtggtgcgggccctgccccggcgggccggcctggtgtccagaaatgccctgggcagcagcttcatcgccgccaggaacttccacgccagcaacacccacctgcagaagacaggaacagctgagatgagcagcatcctggaggagcgcatcctgggcgctgacacctctgtggacctggaggagaccggccgggtgctgagcattggagatggcatcgcccgggtgcacggcctgagaaatgtgcaggccgaggagatggtggagttcagcagcggcctgaagggcatgagcctgaacctggagccagacaacgtgggcgtggtggtgtttggaaatgacaagctgatcaaggagggggacatcgtgaagaggactggagccatcgtggatggccccatcggcagcaagacccggcggcgggtgggcctgaaggcccctggcatcatcccccgcatctctgtgcgggagcccatgcagacaggcatcaaggctgtggacagcctggtgcccatcggccggggccagcgggagctgatcattggagaccggcagacaggcaagaccagcatcgccatcgacaccatcatcaaccagaagcgcttcaatgatggcagtgatgagaagaagaagctgtactgcatctacgtggccatcggccagaagaggagcacagtggcccagctggtgaagaggctgacagatgctgatgccatgaagtacaccatcgtggtgtctgccacagccagtgatgctgcccccctgcagtacctggccccctacagcggctgcagcatgggagagtacttccgggacaatggcaagcacgccctgatcatctatgatgacctgagcaagcaggccgtggcctaccggcagatgagcctgctgctgcggcggcccccaggccgggaggcctacccaggagatgtgttctacctgcacagccggctgctggagcgggccgccaagatgaatgatgcctttggaggcggcagcctgacagccctgcccgtcatcgagacccaggccggagatgtgtctgcctacatccccaccaacgtcatcagcatcacagatggccagatcttcctggagacagagctgttctacaagggcatccggcctgccatcaacgtgggcctgtctgtgtcccgggtgggcagcgctgcccagacccgggccatgaagcaggtggccggcaccatgaagctggagctggcccagtaccgggaggtggccgcctttgcccagtttggaagtgacctggatgctgccacccagcagctgctgagccggggcgtgcggctgacagagctgctgaagcagggccagtacagccccatggccatcgaggagcaggtggccgtcatctatgctggggtgcggggctacctggacaagctggagcccagcaagatcaccaagtttgaaaatgccttcctgagccacgtggtgtcccagcaccaggccctgctgggcaccatccgggcagatggcaagatcagcgagcagagtgatgccaagctgaaggagatcgtgaccaacttcctggccggctttgaggcctag

SEQ ID NO: 92094 - DNA, 177 bp, Artificial Sequence
  derived and/or modified sequence
atgctgagcgtgcgggtggccgccgccgtggtgcgggccctgccccgcagagctggattggtgtctaggaacgcccttggctcttcattcattgccgcccggaattttcatgcctctaacacacacctacagaaaacgggcaaattactgtttctgtccctgcggcggacctattag

SEQ ID NO: 92095 - DNA, 1596 bp, Artificial Sequence
  derived and/or modified sequence
atgctgagcgtgcgggtggccgccgccgtggtgcgggccctgccccgcagagcagggctggtctcaagaaacgctctgggatccagcttcattgccgccagaaattttcacgcctcaaatacccacttgcagaaaactggaacagctgagatgtcgtccatactggaggagcggatcttgggcgcagatacaagcgtggaccttgaggagacaggccgagtcctgtccattggcgacggtatcgcgagagttcatggcctgcgtaatgttcaggccgaggagatggtcgagtttagcagcggtttgaagggcatgtcccttaacctggaacctgacaacgtcggggtggttgtgttcggcaatgataagctcatcaaggaaggggatatcgtgaagcggacgggtgctatcgtggacggacctattggatcgaagacgcgccgtcgcgtcgggctcaaggcacctggcatcataccgcgaatttccgtcagagagcctatgcaaactggcatcaaggctgtcgattcactggtcccaatcggtagaggacaacgggagttaatcataggggacaggcagacaggaaaaaccagcattgcgatcgatacgatcatcaatcagaagaggtttaatgacggttctgacgagaaaaaaaaactgtactgtatctacgtggctattggacagaagaggagtactgtcgcccagctagtgaaaagattaaccgatgccgatgccatgaaatatactatcgtggtgagcgccaccgcatccgatgccgctcctctgcagtacttggccccctattctgggtgtagtatgggcgagtactttagggataatggcaagcacgccctgatcatctatgatgatctttcaaagcaagcggtggcctaccggcagatgagtctcctcctgcggagacctcccggaagagaggcctaccctggtgatgtgttttacctgcactccagacttcttgagcgcgcagccaagatgaatgatgctttcggtgggggcagcctgaccgccctacccgtgattgagacccaggccggggatgtgtccgcttatatcccaaccaatgtgatcagtatcacagacggacagatctttctggaaaccgaactcttttataaaggcatcaggccggcgatcaacgtgggcctgtctgtgagcagagtcggatccgccgcccaaacgcgggctatgaagcaagttgcgggtactatgaaacttgaactcgctcagtaccgtgaggttgcggcctttgctcagttcggctccgacttggacgccgcaactcagcagctgttgagtaggggggttcgattgactgaactccttaagcaagggcagtattctcccatggccatcgaagaacaggtggcagtcatttacgccggcgtgcggggctacctcgataagttagaaccaagtaaaatcacaaaattcgagaacgcgttccttagtcatgtggtctcgcagcatcaagccttgcttggcacaattcgggctgacgggaagatatccgagcagagtgacgcaaagcttaaggaaatcgttactaacttcctcgcaggcttcgaagcctag

SEQ ID NO: 92096 - DNA, 177 bp, Artificial Sequence
  derived and/or modified sequence
atgctgtctgtgagagtggccgcagccgtcgtgcgggctcttccccgtcgggcaggcctggtgtcaagaaatgccctgggtagttctttcattgctgctaggaacttccacgctagcaatactcatctgcagaagactgggaagctgttatttttaagcctgaggagaacatattag

SEQ ID NO: 92097 - DNA, 1596 bp, Artificial Sequence
  derived and/or modified sequence
atgctgtctgtgcgagtagctgctgcagtggtccgagcgttgcccaggcgagcgggattagtgtctcgtaacgcccttggttcttcgttcatcgctgcaaggaactttcatgcttcaaacacacacctacagaaaaccggcaccgccgagatgtcttccattttggaagagcgaattttgggcgcagatacaagtgtagatctggaggaaaccggaagggtgctttcaatcggggatggcattgccagggttcacggtctgcggaacgtccaggcagaagagatggttgagttctcctccggtttaaaaggcatgtccctgaatcttgagcctgataacgtgggtgtagttgtctttgggaacgataagttgataaaggagggcgacatcgtgaaacgcactggcgctattgtggatggacctattggtagcaagactcggcgaagagtcggcctcaaggcaccaggcatcatcccaagaatatccgtacgggagcccatgcagacagggattaaagctgtggacagcctcgtacccatcggaagaggtcagcgagagcttatcatcggagataggcaaactggcaagacaagcatcgctattgacactatcatcaatcagaaacgctttaatgacggatcggacgagaaaaagaaactctattgcatctacgtcgctattggacagaagcgatctactgtggcacagctggtcaaaagacttacggatgcggatgccatgaaatataccatcgttgtatcggcgaccgccagtgacgccgcaccactgcagtatcttgctccttacagcggatgttctatgggggagtattttagagataacgggaaacacgctttgatcatctacgatgatctgtctaaacaggctgtggcttaccgacagatgtcactgctattgagacggccacccggacgggaagcctaccccggagatgtcttttatctccatagtagactgctcgaaagagctgcgaaaatgaatgatgcgtttggaggaggaagcctcacagcactgcccgttattgagactcaagccggtgatgtttctgcctacatccctacaaacgttatcagtatcaccgatgggcagatctttctggaaactgagctcttctacaagggcattcgtcccgcaatcaacgttggcttgagcgtgtcccgtgtgggatcggctgcccagacacgcgctatgaaacaggtggcgggtactatgaagctcgagctagcccagtaccgagaggttgccgctttcgctcaattcggctcagacctggacgcggcaacacaacagttgcttagccgaggcgttcggctgactgagctgctcaaacagggccagtattctccaatggccattgaggaacaggtggcagtgatctacgctggcgttaggggctacctggacaaactggaaccaagtaagatcaccaaatttgagaatgcatttctgtcacacgttgtgagccaacatcaggcgctgctgggaaccatccgcgcagatggcaagatttctgaacagtccgacgctaagctgaaggagatcgtgaccaacttcctggcaggttttgaagcctag

SEQ ID NO: 92098 - DNA, 1793 bp, Artificial Sequence
  derived and/or modified sequence
cattttgtcccagtcagtccggaggctgcggctgcagaagtaccgcctgcggagtaactgcaaagatgctgtccgtgcgcgttgctgcggccgtggtccgcgcccttcctcggcgggccggactggtctccagaaatgctttgggttcatctttcattgctgcaaggaacttccatgcctctaacactcatcttcaaaagactgggactgctgagatgtcctctattcttgaagagcgtattcttggagctgatacctctgttgatcttgaagaaactgggcgtgtcttaagtattggtgatggtattgcccgcgtacatgggctgaggaatgttcaagcagaagaaatggtagagttttcttcaggcttaaagggtatgtccttgaacttggaacctgacaatgttggtgttgtcgtgtttggaaatgataaactaattaaggaaggagatatagtgaagaggacaggagccattgtggacggtccaattggttccaagacgcgtaggcgagttggtctgaaagcccccggtatcattcctcgaatttcagtgcgggaaccaatgcagactggcattaaggctgtggatagcttggtgccaattggtcgtggtcagcgtgaactgattattggtgaccgacagactgggaaaacctcaattgctattgacacaatcattaaccagaaacgtttcaatgatggatctgatgaaaagaagaagctgtactgtatttatgttgctattggtcaaaagagatccactgttgcccagttggtgaagagacttacagatgcagatgccatgaagtacaccattgtggtgtcggctacggcctcggatgctgccccacttcagtacctggctccttactctggctgttccatgggagagtattttagagacaatggcaaacatgctttgatcatctatgacgacttatccaaacaggctgttgcttaccgtcagatgtctctgttgctccgccgaccccctggtcgtgaggcctatcctggtgatgtgttctacctacactcccggttgctggagagagcagccaaaatgaacgatgcttttggtggtggctccttgactgctttgccagtcatagaaacacaggctggtgatgtgtctgcttacattccaacaaatgtcatttccatcactgacggacagatcttcttggaaacagaattgttctacaaaggtatccgccctgcaattaacgttggtctgtctgtatctcgtgtcggatccgctgcccaaaccagggctatgaagcaggtagcaggtaccatgaagctggaattggctcagtatcgtgaggttgctgcttttgcccagttcggttctgacctcgatgctgccactcaacaacttttgagtcgtggcgtgcgtctaactgagttgctgaagcaaggacagtattctcccatggctattgaagaacaagtggctgttatctatgcgggtgtaaggggatatcttgataaactggagcccagcaagattacaaagtttgagaatgctttcttgtctcatgtcgtcagccagcaccaagccttgttgggcactatcagggctgatggaaagatctcagaacaatcagatgcaaagctgaaagagattgtaacaaatttcttggctggatttgaagcttaaactcctgtggattcacatcaaataccagttcagttttgtcattgttctagtaaattagttccatttgtaaaagggttactctcatactccttatgtacagaaatcacatgaaaaataaaggttccataatgc

SEQ ID NO: 92099 - DNA, 177 bp, Artificial Sequence
  derived and/or modified sequence
atgctgagcgtgagagtggccgccgccgtggtgagagccctgcccagaagagccggcctggtgagcagaaacgccctgggcagcagcttcatcgccgccagaaacttccacgccagcaacacccacctgcagaagaccggcaagctgctgttcctgagcctgagaagaacctactag

SEQ ID NO: 92100 - DNA, 1596 bp, Artificial Sequence
  derived and/or modified sequence
atgctgagcgtgagagtggccgccgccgtggtgagagccctgcccagaagagccggcctggtgagcagaaacgccctgggcagcagcttcatcgccgccagaaacttccacgccagcaacacccacctgcagaagaccggcaccgccgagatgagcagcatcctggaggagagaatcctgggcgccgacaccagcgtggacctggaggagaccggcagagtgctgagcatcggcgacggcatcgccagagtgcacggcctgagaaacgtgcaggccgaggagatggtggagttcagcagcggcctgaagggcatgagcctgaacctggagcccgacaacgtgggcgtggtggtgttcggcaacgacaagctgatcaaggagggcgacatcgtgaagagaaccggcgccatcgtggacggccccatcggcagcaagaccagaagaagagtgggcctgaaggcccccggcatcatccccagaatcagcgtgagagagcccatgcagaccggcatcaaggccgtggacagcctggtgcccatcggcagaggccagagagagctgatcatcggcgacagacagaccggcaagaccagcatcgccatcgacaccatcatcaaccagaagagattcaacgacggcagcgacgagaagaagaagctgtactgcatctacgtggccatcggccagaagagaagcaccgtggcccagctggtgaagagactgaccgacgccgacgccatgaagtacaccatcgtggtgagcgccaccgccagcgacgccgcccccctgcagtacctggccccctacagcggctgcagcatgggcgagtacttcagagacaacggcaagcacgccctgatcatctacgacgacctgagcaagcaggccgtggcctacagacagatgagcctgctgctgagaagaccccccggcagagaggcctaccccggcgacgtgttctacctgcacagcagactgctggagagagccgccaagatgaacgacgccttcggcggcggcagcctgaccgccctgcccgtgatcgagacccaggccggcgacgtgagcgcctacatccccaccaacgtgatcagcatcaccgacggccagatcttcctggagaccgagctgttctacaagggcatcagacccgccatcaacgtgggcctgagcgtgagcagagtgggcagcgccgcccagaccagagccatgaagcaggtggccggcaccatgaagctggagctggcccagtacagagaggtggccgccttcgcccagttcggcagcgacctggacgccgccacccagcagctgctgagcagaggcgtgagactgaccgagctgctgaagcagggccagtacagccccatggccatcgaggagcaggtggccgtgatctacgccggcgtgagaggctacctggacaagctggagcccagcaagatcaccaagttcgagaacgccttcctgagccacgtggtgagccagcaccaggccctgctgggcaccatcagagccgacggcaagatcagcgagcagagcgacgccaagctgaaggagatcgtgaccaacttcctggccggcttcgaggcctag

SEQ ID NO: 92101 - protein, 584 aa, Artificial Sequence
  derived and/or modified sequence
MVAEVCSMPTASTVKKPFDLRSKMGKWCHHRFPCCRGSGKSNMGTSGDHDDSFMKMLRSKMGKCCRHCFPCCRGSGTSNVGTSGDHENSFMKMLRSKMGKWCCHCFPCCRGSSKSNVGAWGDYDHSAFMEPRYHVRREDLDKLHRAAWWGKVPRKDLIVMLRDTDMNKRDKEKRTALHLASANGNSEVVQLLLDRRCQLNVLDNKKRTALIKAIQCQEDECVLMLLEHGADRNIPDEYGNTALHYAIYNEDKLMAKALLLYGADIESKNKCGLTPLLLGVHEQKQQVVKFLIKKKANLNVLDRYGRTALILAVCCGSASIVNLLLEQNVDVSSQDLSGQTAREYAVSSHHHVICELLSDYKEKQMLKISSENSNPEQDLKLTSEEESQRLKVSENSQPEKMSQEPEINKDCDREVEEEIKKHGSNPVGLPENLTNGASAGNGDDGLIPQRRSRKPENQQFPDTENEEYHSDEQNDTRKQLSEEQNTGISQDEILTNKQKQIEVAEQKMNSELSLSHKKEEDLLRENSVLQEEIAVLRLELDETKHQNQLRENKILEEIESVKEKTDKLLRAMQLNEEALTKTNI

SEQ ID NO: 92102 - DNA, 1755 bp, Artificial Sequence
  derived and/or modified sequence
atggtggccgaggtgtgcagcatgcccaccgccagcaccgtgaagaagcccttcgacctgagaagcaagatgggcaagtggtgccaccacagattcccctgctgcagaggcagcggcaagagcaacatgggcaccagcggcgaccacgacgacagcttcatgaagatgctgagaagcaagatgggcaagtgctgcagacactgcttcccctgctgcagaggcagcggcaccagcaacgtgggcaccagcggcgaccacgagaacagcttcatgaagatgctgagaagcaagatgggcaagtggtgctgccactgcttcccctgctgcagaggcagcagcaagagcaacgtgggcgcctggggcgactacgaccacagcgccttcatggagcccagataccacgtgagaagagaggacctggacaagctgcacagagccgcctggtggggcaaggtgcccagaaaggacctgatcgtgatgctgagagacaccgacatgaacaagagagacaaggagaagagaaccgccctgcacctggccagcgccaacggcaacagcgaggtggtgcagctgctgctggacagaagatgccagctgaacgtgctggacaacaagaagagaaccgccctgatcaaggccatccagtgccaggaggacgagtgcgtgctgatgctgctggagcacggcgccgacagaaacatccccgacgagtacggcaacaccgccctgcactacgccatctacaacgaggacaagctgatggccaaggccctgctgctgtacggcgccgacatcgagagcaagaacaagtgcggcctgacccccctgctgctgggcgtgcacgagcagaagcagcaggtggtgaagttcctgatcaagaagaaggccaacctgaacgtgctggacagatacggcagaaccgccctgatcctggccgtgtgctgcggcagcgccagcatcgtgaacctgctgctggagcagaacgtggacgtgagcagccaggacctgagcggccagaccgccagagagtacgccgtgagcagccaccaccacgtgatctgcgagctgctgagcgactacaaggagaagcagatgctgaagatcagcagcgagaacagcaaccccgagcaggacctgaagctgaccagcgaggaggagagccagagactgaaggtgagcgagaacagccagcccgagaagatgagccaggagcccgagatcaacaaggactgcgacagagaggtggaggaggagatcaagaagcacggcagcaaccccgtgggcctgcccgagaacctgaccaacggcgccagcgccggcaacggcgacgacggcctgatcccccagagaagaagcagaaagcccgagaaccagcagttccccgacaccgagaacgaggagtaccacagcgacgagcagaacgacaccagaaagcagctgagcgaggagcagaacaccggcatcagccaggacgagatcctgaccaacaagcagaagcagatcgaggtggccgagcagaagatgaacagcgagctgagcctgagccacaagaaggaggaggacctgctgagagagaacagcgtgctgcaggaggagatcgccgtgctgagactggagctggacgagaccaagcaccagaaccagctgagagagaacaagatcctggaggagatcgagagcgtgaaggagaagaccgacaagctgctgagagccatgcagctgaacgaggaggccctgaccaagaccaacatctag

SEQ ID NO: 92103 - DNA, 1755 bp, Artificial Sequence
  derived and/or modified sequence
atggtggccgaggtctgctccatgccaacagcttccactgtcaaaaaacctttcgacctccggtccaagatgggaaaatggtgtcaccataggtttccatgctgtagaggatcaggcaagtccaatatggggacctcaggagaccatgacgacagcttcatgaaaatgttaagatccaaaatgggaaaatgttgccgccattgcttcccctgttgtaggggtagcgggaccagtaacgtgggtacctccggtgatcatgagaattcctttatgaagatgctgagatcaaagatgggtaagtggtgttgtcactgctttccttgctgccgaggtagtagtaaaagtaatgttggtgcttggggcgattacgatcacagcgcgtttatggagcctcggtatcacgtcaggagagaggatctggacaaactccaccgggccgcatggtgggggaaagtacctcggaaagacttaatcgtcatgctgagagatactgacatgaacaaacgcgataaggaaaaaagaacagctctccacctggcatctgctaacggtaacagcgaggtggtccagctcctgctagataggaggtgccagctgaatgttctggacaacaaaaaacggaccgccctcatcaaggccatccagtgccaggaggatgagtgcgtcctcatgttacttgaacatggtgcagaccgcaatatccccgacgagtacggcaacactgcactgcactatgccatctacaacgaagataagctgatggcgaaggctttgctgctgtatggcgccgatatcgagagtaaaaataaatgcggcctgacaccattgcttctgggtgtgcacgaacagaaacagcaggttgtgaaatttttgatcaagaaaaaggccaacctgaacgtgctcgatcgctatggccggactgccctgattctggccgtgtgttgtggatctgctagtatcgtgaacctcttattggaacagaacgtggatgtcagcagtcaagatttgtcaggacaaactgcgagggaatatgcggtgtcctcacaccaccatgtcatctgcgagctgctttcagattacaaggaaaagcagatgctgaagatttcaagtgaaaactccaatcccgagcaggatctgaagctgacttccgaagaagagtcccaacggcttaaggtcagtgaaaattcccagcctgagaaaatgagtcaggaacctgagatcaataaggactgtgacagagaggttgaagaggagattaagaaacatggttcaaatcccgtcggtctgcctgaaaacctgaccaatggcgcctccgcgggtaacggtgacgatggattgatcccccagagaaggtccagaaagcccgagaatcaacagtttccagacaccgaaaatgaagagtaccatagcgatgagcagaatgatacaaggaagcaactcagcgaagagcagaatactggaatttctcaagatgagattttaacaaataaacaaaaacagattgaggtggcagagcagaaaatgaactcagaactctccctgagccataagaaggaggaggacctgctccgggagaacagcgtgcttcaggaggaaatagcagtcctcaggttggaactggacgagacaaagcaccagaaccaactcagggagaacaagatactggaggaaatcgagtccgtcaaggagaaaacagataaactcctgagggccatgcaactgaacgaagaggcactcactaagaccaacatctag

SEQ ID NO: 92104 - DNA, 1755 bp, Artificial Sequence
  derived and/or modified sequence
atggtggccgaggtgtgcagcatgcccacagccagcacagtgaagaagccctttgacctgcggagcaagatgggcaagtggtgccaccaccgcttcccctgctgccggggcagcggcaagagcaacatgggcaccagcggggaccatgatgacagcttcatgaagatgctgcggagcaagatgggcaagtgctgccgccactgcttcccctgctgccggggcagcggcaccagcaatgtgggcaccagcggggaccatgaaaattccttcatgaagatgctgcggagcaagatgggcaagtggtgctgccactgcttcccctgctgccggggcagcagcaagagcaatgtgggcgcctggggagactatgaccacagcgccttcatggagccccgctaccacgtgcggcgggaggacctggacaagctgcaccgggccgcctggtggggcaaggtgcccaggaaggacctgattgtgatgctgcgggacacagacatgaacaagagggacaaggagaagaggacagccctgcacctggccagcgccaatggaaacagcgaggtggtgcagctgctgctggaccggcgctgccagctgaatgtgctggacaacaagaagaggacagccctgatcaaggccatccagtgccaggaggatgaatgtgtgctgatgctgctggagcacggggctgacaggaacatcccagatgaatatggcaacacagccctgcactacgccatctacaatgaagacaagctgatggccaaggccctgctgctgtatggagctgacatcgagagcaagaacaagtgtggcctgacccccctgctgctgggcgtgcatgagcagaagcagcaggtggtgaagttcctgatcaagaagaaggccaacctgaatgtgctggacagatatggccgcacagccctgatcctggccgtgtgctgcggcagcgccagcatcgtgaacctgctgctggagcagaatgtggatgtgagcagccaggacctgagcggccagacagcccgggagtatgctgtgagcagccaccaccacgtgatctgtgagctgctgagtgactacaaggagaagcagatgctgaagatcagcagcgagaacagcaaccctgagcaggacctgaagctgaccagcgaggaggagagccagaggctgaaggtgtctgagaacagccagcctgagaagatgagccaggagcctgagatcaacaaggactgtgaccgggaggtggaggaggagatcaagaagcacggcagcaaccctgtgggcctgcctgagaacctgaccaatggagccagcgctggaaatggagatgatggcctcatcccccagaggaggagcaggaagccagagaaccagcagttcccagacacagaaaatgaggagtaccacagtgatgagcagaatgacaccaggaagcagctgtctgaggagcagaacacaggcatcagccaggatgagatcctgaccaacaagcagaagcagatcgaggtggccgagcagaagatgaacagcgagctgagcctgagccacaagaaggaggaggacctgctgagagaaaattctgtgctgcaggaggagattgctgtgctgcggctggagctggatgagaccaagcaccagaaccagctgcgggagaacaagatcctggaggagattgagagcgtgaaggagaagacagacaagctgctgcgggccatgcagctgaatgaggaggccctgaccaagaccaacatctag

SEQ ID NO: 92105 - DNA, 1755 bp, Artificial Sequence
  derived and/or modified sequence
atggtggccgaggtgtgcagcatgcccaccgccagcaccgtgaagaaacctttcgacttgaggtcaaagatgggtaagtggtgtcaccatcggtttccttgttgtcggggatcagggaaatccaacatggggacctcgggagaccacgatgatagcttcatgaagatgctgagatctaagatgggaaaatgttgccgtcattgctttccatgctgccgagggagtggtacctctaacgtagggacttccggagaccacgaaaattcttttatgaaaatgctgagatccaagatgggtaagtggtgttgtcactgttttccgtgttgccgggggtctagcaagagcaacgtcggcgcatggggcgactatgaccatagcgccttcatggagccccgttatcacgtaagacgggaggatttggataagctgcaccgtgccgcctggtgggggaaggttcctagaaaagatctgatcgtgatgctccgtgacacagatatgaataagcgcgacaaagagaagaggaccgccctgcacctggcctcggccaatggaaattccgaggtcgtacagctgctcctcgaccgtcgctgtcagctgaatgtactggataacaagaagagaaccgccctcatcaaagccattcaatgtcaggaggacgaatgcgtcctcatgcttctggagcacggcgcagaccgaaatattcccgatgagtatggcaacacggccctgcactacgctatctacaacgaagataaactaatggccaaagctctgcttctgtacggtgcagacatcgagtcaaaaaataagtgtggtctcacccccctcttgctcggggtgcatgaacagaagcaacaggtggttaaatttctaattaaaaagaaggcaaacctgaatgtcttagataggtatgggagaaccgccctgattcttgccgtctgctgtgggagcgcctctatcgtgaacttattgctggagcagaacgtggatgtgtcaagtcaggacctgagcggccaaaccgcacgagagtatgctgtgagcagccaccaccatgtcatatgcgagctgctatcagactacaaggagaagcagatgctgaaaatcagcagtgaaaattcaaatcccgagcaggacttaaagctgacctcagaagaagaatcccagcgcttgaaagtgagcgagaatagccagccggagaaaatgagtcaagagccggagataaacaaggattgcgaccgggaagtcgaggaggagattaaaaaacacgggtctaatccggtggggctcccagagaacctgactaatggagcatcggctggaaacggtgacgatgggctcattcctcagagacgctcacgaaagccagagaatcagcagttccctgatacagagaatgaagagtaccacagcgatgaacaaaatgacacacgcaagcaactgtccgaggagcaaaacactgggatttcacaggatgaaatcctgactaacaaacagaaacagatcgaggttgctgagcaaaaaatgaatagtgagctatcactctctcacaagaaggaggaagacctgctacgggagaactcagtgcttcaggaagagattgccgtgttgcggctcgagctcgatgagactaaacatcaaaaccagttaagggagaacaagattctggaggaaatcgagagcgtaaaggagaaaacagacaaactgctgagagctatgcagcttaacgaggaggccctgaccaaaactaatatttag

SEQ ID NO: 92106 - DNA, 1755 bp, Artificial Sequence
  derived and/or modified sequence
atggtggcagaggtctgcagcatgccaactgcatctaccgtcaaaaagcccttcgatttaaggagcaagatggggaagtggtgtcatcatcggttcccttgctgcagaggaagcggtaagtcaaatatggggacctccggagaccacgacgactcctttatgaagatgctgagatccaagatgggaaaatgctgtagacactgcttcccatgttgtcggggatccggcacaagcaatgtgggaaccagcggggaccacgagaattcttttatgaagatgctgagaagtaagatggggaagtggtgctgtcactgttttccatgctgcagaggcagcagtaaaagcaacgtgggagcctggggtgactatgatcactctgcattcatggaacctcgataccatgtgcgacgggaggatttagataaattacatcgtgccgcttggtgggggaaagttccaaggaaggatctaatcgtcatgctgcgcgatacagacatgaataagcgcgataaggagaagcgaactgccctgcacctggcctctgcaaacggcaactctgaagttgtccagttactgcttgacagacggtgtcagctcaacgtgctcgacaacaagaagcggacggccctcatcaaggcgatccagtgtcaggaagatgaatgcgtcctcatgttgctggaacacggcgctgataggaacattcccgatgagtatggtaatacggccctgcactacgctatttacaacgaagataagttgatggccaaggccctactgctgtacggggcagatattgagtccaagaacaagtgcggcctcactccccttctgctgggggtccatgagcaaaagcaacaggtcgtgaagttcctgatcaagaagaaggcaaacctgaacgttctcgaccggtacggcaggaccgccctgatcctggcggtgtgttgcggatccgcctctattgtgaatctgttgttggaacaaaacgtagatgtgtcatcacaagacctgagcggacaaaccgcccgtgaatatgccgtgagttcccatcaccacgttatttgcgagctgctctccgattacaaagagaaacagatgctgaagatctcatctgagaatagtaaccctgagcaggatctcaaactgaccagcgaggaagaaagccagcgcctgaaagtatctgagaattcccagcctgagaaaatgagtcaggagcccgagatcaacaaagattgtgaccgggaggtcgaggaagagataaaaaaacatggatctaatcctgttggactgcctgaaaatttgaccaacggggcatctgccggaaacggggatgatgggcttattcctcaacgccgttcccgaaagcctgagaatcaacagttcccagatacagagaatgaggaataccattctgacgagcaaaatgatacccggaaacagctgagcgaggaacagaacacagggattagccaggatgaaatcttgacaaacaagcagaagcagattgaggttgccgagcaaaaaatgaacagcgagctatcattgtcccacaaaaaggaagaggatttgctgcgggagaattctgtgctgcaagaagaaatcgctgtcctgcggctagagctagatgaaacgaaacaccagaaccagctgcgcgagaacaaaatcctcgaggagatcgagtctgtgaaagaaaagactgacaagctattaagagcaatgcagctgaatgaggaggccctcacaaagactaacatctag

SEQ ID NO: 92107 - DNA, 1826 bp, Artificial Sequence
  derived and/or modified sequence
ggtagacgcgatctgttcgctactaccggcctcccctggctgttaaaagcagatggtggctgaggtttgttcaatgcccactgcctctactgtgaagaagccatttgatctcaggagcaagatgggcaagtggtgccaccaccgcttcccctgctgcagggggagcggcaagagcaacatgggcacttctggagaccacgacgactcctttatgaagatgctcaggagcaagatgggcaagtgttgccgccactgcttcccctgctgcagggggagcggcacgagcaacgtgggcacttctggagaccatgaaaactcctttatgaagatgctcaggagcaagatgggcaagtggtgctgtcactgcttcccctgctgcagggggagcagcaagagcaacgtgggcgcttggggagactacgaccacagcgccttcatggagccgaggtaccacgtccgtcgagaagatctggacaagctccacagagctgcctggtggggtaaagtccccagaaaggatctcatcgtcatgctcagggacactgacatgaacaagagggacaaggaaaagaggactgctctacatttggcctctgccaatggaaattcagaagtagtacaactcctgctggacagacgatgtcaacttaatgtccttgacaacaaaaaaaggacagctctgataaaggccatacaatgccaggaagatgaatgtgtgttaatgttgctggaacatggcgctgatcgaaatattccagatgagtatggaaataccgctctacactatgctatctacaatgaagataaattaatggccaaagcactgctcttatatggtgctgatattgaatcaaaaaacaagtgtggcctcacaccacttttgcttggcgtacatgaacaaaaacagcaagtggtgaaatttttaatcaagaaaaaagctaatttaaatgtacttgatagatatggaagaactgccctcatacttgctgtatgttgtggatcagcaagtatagtcaatcttctacttgagcaaaatgttgatgtatcttctcaagatctatctggacagacggccagagagtatgctgtttctagtcatcatcatgtaatttgtgaattactttctgactataaagaaaaacagatgctaaaaatctcttctgaaaacagcaatccagaacaagacttaaagctgacatcagaggaagagtcacaaaggcttaaagtcagtgaaaatagccagccagagaaaatgtctcaagaaccagaaataaataaggactgtgatagagaggttgaagaagaaataaagaagcatggaagtaatcctgtgggattaccagaaaacctgactaatggtgccagtgctggcaatggtgatgatggattaattccacaaaggaggagcagaaaacctgaaaatcagcaatttcctgacactgagaatgaagagtatcacagtgacgaacaaaatgatacccggaaacaactttctgaagaacagaacactggaatatcacaagatgagattctgactaataaacaaaagcagatagaagtggctgaacagaaaatgaattctgagctttctcttagtcataagaaagaagaagatctcttgcgtgaaaacagcgtgttgcaggaagaaattgccgtgctaagactggaactagatgaaacaaaacatcagaaccagctaagggaaaataaaattttggaggaaattgaaagtgtgaaagaaaagactgataaacttctaagggctatgcaattgaatgaagaagcattaacgaaaaccaatatttaagtacagtggacagcttagg

SEQ ID NO: 92108 - protein, 574 aa, Artificial Sequence
  derived and/or modified sequence
MGNSEGCNTKKEGDLIAAQARLKDLEALLNSKEAALSTALSEKRTLEGELHDLRGQVAKLEAALGEAKKQLQDEMLRRVDAENRLQTMKEELDFQKNIYSEELRETKRRHETRLVEIDNGKQREFESRLADALQELRAQHEDQVEQYKKELEKTYSAKLDNARQSAERNSNLVGAAHEELQQSRIRIDSLSAQLSQLQKQLAAKEAKLRDLEDSLARERDTSRRLLAEKEREMAEMRARMQQQLDEYQELLDIKLALDMEIHAYRKLLEGEEERLRLSPSPTSQRSRGRASSHSSQTQGGGSVTKKRKLESTESRSSFSQHARTSGRVAVEEVDEEGKFVRLRNKSNEDQSMGNWQIKRQNGDDPLLTYRFPPKFTLKAGQVVTIWAAGAGATHSPPTDLVWKAQNTWGCGNSLRTALINSTGEEVAMRKLVRSVTVVEDDEDEDGDDLLHHHHGSHCSSSGDPAEYNLRSRTVLCGTCGQPADKASASGSGAQVGGPISSGSSASSVTVTRSYRSVGGSGGGSFGDNLVTRSYLLGNSSPRTQSPQNCSIIQEMGMRWEVEEGRRKVSLSCLP

SEQ ID NO: 92109 - DNA, 1725 bp, Artificial Sequence
  derived and/or modified sequence
atgggcaattctgaagggtgcaatacaaagaaggagggagacctgattgccgctcaagcccggcttaaagacctcgaggccctgcttaacagcaaggaggccgccttaagtacagccctgtcagagaaacggactctcgaaggtgagttgcatgatctgcgcggacaggtggccaagttagaggcagcccttggggaagccaagaagcagctccaagatgaaatgctacgtagagtggacgccgagaaccggctgcagactatgaaggaagaactggattttcagaagaacatctactctgaggaactaagggagaccaagagacggcacgagacacgcctggtggagattgacaatggcaagcagagagaattcgaaagtaggctcgctgatgccctgcaggaactcagagcgcagcacgaagatcaggttgagcagtacaaaaaagagctggaaaagacgtattccgcaaagctggataacgcccgccagagtgcggagagaaactccaatctggtcggggctgctcatgaggagctacaacagagcagaataagaatcgacagcctctcagcacaactgtcccaactgcagaagcagctggccgctaaagaggccaaactccgcgacctagaggacagcctggccagagaacgcgacaccagcagaagactactggccgagaaagaacgcgagatggctgaaatgcgtgctaggatgcagcaacagttggacgagtatcaggaattactggacatcaagctggcactggatatggagatccacgcgtataggaagttgctggagggagaggaggaaagactccgactgtcacctagtccgactagccagaggtcaaggggccgcgcatccagccattcttcccagacacagggaggggggagcgtgacaaaaaaacggaaactagagtcgacagaatcacgaagttctttcagtcagcacgcccgtacttccggccgggtggcggtggaagaagtggacgaggaggggaagtttgtccgtctcaggaacaaatccaacgaggaccagtcaatgggaaattggcagataaaaaggcagaatggggacgaccccctgctgacctatagatttccacctaagttcacactgaaagcaggacaagtagtgacaatttgggcagctggggctggagctactcactctcccccgaccgatctcgtctggaaagcccagaacacctggggatgcgggaatagtctgcgcaccgcactaataaattcaacaggcgaagaggtcgccatgcgcaagttggtcagatctgttacagtggtcgaggatgatgaagatgaggacggagatgatctccttcaccaccatcatgggtcacattgctcctcatctggggatccagcggaatataatttaaggtccagaaccgtgctgtgtgggacctgtggccaacccgccgacaaggcatccgcgtccggttccggcgcacaagtgggcgggcccatatccagcggtagttccgccagttccgttaccgtgacacggtcctatcgttcagtcggggggtccggggggggttcttttggagacaacctggtgaccagatcctacctgctgggtaattcgagcccgagaactcaaagcccgcagaattgctcaatcattcaggagatgggaatgaggtgggaagtcgaagagggccggagaaaagtgagcctgtcgtgcctcccctag

SEQ ID NO: 92110 - DNA, 1943 bp, Artificial Sequence
  derived and/or modified sequence
gagaccctctgctcttctgctcccttcctgtgtgctgcctggcaatggggaactctgagggctgcaataccaagaaggagggtgacctgatagctgctcaggctcggctgaaggacctggaggctctgctgaactccaaggaggccgcactgagcactgctctcagtgagaagcgcacgctggagggcgagctgcatgatctgcggggccaggtggccaagcttgaggcagccctaggtgaggccaagaagcaacttcaggatgagatgctgcggcgggtggatgctgagaacaggctgcagaccatgaaggaggaactggacttccagaagaacatctacagtgaggagctgcgtgagaccaagcgccgtcatgagacccgactggtggagattgacaatgggaagcagcgtgagtttgagagccggctggcggatgcgctgcaggaactgcgggcccagcatgaggaccaggtggagcagtataagaaggagctggagaagacttattctgccaagctggacaatgccaggcagtctgctgagaggaacagcaacctggtgggggctgcccacgaggagctgcagcagtcgcgcatccgcatcgacagcctctctgcccagctcagccagctccagaagcagctggcagccaaggaggcgaagcttcgagacctggaggactcactggcccgtgagcgggacaccagccggcggctgctggcggaaaaggagcgggagatggccgagatgcgggcaaggatgcagcagcagctggacgagtaccaggagcttctggacatcaagctggccctggacatggagatccacgcctaccgcaagctcttggagggcgaggaggagaggctacgcctgtcccccagccctacctcgcagcgcagccgtggccgtgcttcctctcactcatcccagacacagggtgggggcagcgtcaccaaaaagcgcaaactggagtccactgagagccgcagcagcttctcacagcacgcacgcactagcgggcgcgtggccgtggaggaggtggatgaggagggcaagtttgtccggctgcgcaacaagtccaatgaggaccagtccatgggcaattggcagatcaagcgccagaatggagatgatcccttgctgacttaccggttcccaccaaagttcaccctgaaggctgggcaggtggtgacgatctgggctgcaggagctggggccacccacagcccccctaccgacctggtgtggaaggcacagaacacctggggctgcgggaacagcctgcgtacggctctcatcaactccactggggaagaagtggccatgcgcaagctggtgcgctcagtgactgtggttgaggacgacgaggatgaggatggagatgacctgctccatcaccaccacggctcccactgcagcagctcgggggaccccgctgagtacaacctgcgctcgcgcaccgtgctgtgcgggacctgcgggcagcctgccgacaaggcatctgccagcggctcaggagcccaggtgggcggacccatctcctctggctcttctgcctccagtgtcacggtcactcgcagctaccgcagtgtggggggcagtgggggtggcagcttcggggacaatctggtcacccgctcctacctcctgggcaactccagcccccgaacccagagcccccagaactgcagcatcatacaagagatgggaatgaggtgggaggtggaagaagggagaagaaaggtgagtttgagctgccttccctagctttagaccctgggtgggctctgtgcagtcactggaggttgaagccaagtggggtgctgggaggagggagagggaggtcactggaaaggggagagcctgctggcacccaccgtggaggaggaaggcaagagggggtggaggggtgtggcagtggttttggcaaacgctaaagag

SEQ ID NO: 92111 - DNA, 1725 bp, Artificial Sequence
  derived and/or modified sequence
atgggcaacagcgagggctgcaacaccaagaaggagggggacctgattgctgcccaggcccggctgaaggacctggaggccctgctgaacagcaaggaggccgccctgagcacagccctgtctgagaagaggaccctggagggggagctgcatgacctgcggggccaggtggccaagctggaggccgccctgggggaggccaagaagcagctgcaggatgagatgctgcggcgggtggatgctgagaaccggctgcagaccatgaaggaggagctggacttccagaagaacatctacagcgaggagctgcgggagaccaagagaagacatgagacccggctggtggagattgacaatggcaagcagcgggagtttgagagccggctggctgatgccctgcaggagctgcgggcccagcacgaggaccaggtggagcagtacaagaaggagctggagaagacctacagcgccaagctggacaatgcccggcagagcgctgagaggaacagcaacctggtgggcgccgcccacgaggagctgcagcagagccgcatcagaattgacagcctgagcgcccagctgagccagctgcagaagcagctggccgccaaggaggccaagctgcgggacctggaggacagcctggcccgggagcgggacaccagccggcggctgctggccgagaaggagcgggagatggccgagatgagggccaggatgcagcagcagctggatgagtaccaggagctgctggacatcaagctggccctggacatggagatccacgcctacaggaagctgctggagggggaggaggagcggctgcggctgagccccagccccaccagccagaggagccggggccgggccagcagccacagcagccagacccagggcggcggctctgtgaccaagaagaggaagctggagagcacagagagccgcagcagcttcagccagcacgcccggaccagcggccgggtggccgtggaggaggtggatgaggagggcaagtttgtgcggctgaggaacaagagcaatgaagaccagagcatgggcaactggcagatcaagaggcagaatggagatgaccccctgctgacctaccgcttcccccccaagttcaccctgaaggccggccaggtggtgaccatctgggccgccggggccggggccacccacagccccccaacagacctggtgtggaaggcccagaacacctggggctgcggcaacagcctgaggacagccctgatcaacagcactggagaggaggtggccatgaggaagctggtgcgctctgtgacagtggtggaggatgatgaagatgaagatggagatgacctgctgcaccaccaccacggcagccactgcagcagcagcggggaccctgctgagtacaacctgcggagcaggacagtgctgtgtggcacctgtggccagcctgctgacaaggccagcgccagcggcagcggggcccaggtgggcggccccatcagcagcggcagcagcgccagctctgtgacagtgaccaggagctacagatctgtgggcggcagcggcggcggcagctttggagacaacctggtgaccaggagctacctgctgggcaacagcagccccaggacccagagcccccagaactgcagcatcatccaggagatgggcatgcgctgggaggtggaggagggccgcaggaaggtgtccctgagctgcctgccctag

SEQ ID NO: 92112 - DNA, 1725 bp, Artificial Sequence
  derived and/or modified sequence
atgggcaacagcgagggctgcaacaccaagaaggagggcgacctgattgctgcacaggcacgtctgaaggacctggaagccctgttaaactccaaagaggccgcactgagcacagctctgtccgaaaaacgaaccctggagggcgaactgcacgacctgcgaggccaggtcgcgaagctggaagcggctctcggcgaggcaaaaaaacagctgcaggatgaaatgctgcgccgcgtcgatgcagaaaaccgcctgcagacaatgaaagaggaacttgactttcaaaaaaacatctacagcgaagagctgcgcgagacaaaaagacggcatgagacaagactggttgagatagataatggaaagcaacgcgagttcgaatctcggcttgccgatgccctgcaggaactgcgagcccagcatgaagaccaggtggagcagtacaaaaaagagttggagaaaacttatagcgccaagcttgacaacgccaggcagagcgccgagcgcaacagcaatctggtcggagctgcccacgaagagcttcagcagtctaggatacggattgactctctgagcgcccagttgtctcaactccagaagcaacttgccgctaaagaggcaaagctgagggacctggaggatagtcttgccagagagcgggacacaagcaggcggctgctcgctgaaaaagagagagaaatggccgaaatgcgagcgcggatgcagcagcagctcgacgaataccaagagctgttggacattaaactagccctcgacatggagattcatgcttaccgcaagttgttggagggcgaggaggaaaggctgcggctgtctccatccccaacctcgcagcgctcccgcggcagggcctcaagccattcctcccagacccaaggcggaggcagcgtcacaaagaaacgaaagctcgaaagcactgagtcgcggtcctctttctctcagcacgcacgaacgagtgggcgcgtcgccgtcgaggaggttgacgaagagggcaaattcgttcgcctgaggaataaatccaacgaagatcagagcatgggtaattggcagatcaagcgccagaatggagacgatcctctcctgacatacaggtttcccccaaagttcactctgaaggctggacaggtggtgactatatgggccgccggtgccggcgctacccactctcctccaactgacctggtgtggaaggcccagaatacctggggttgcggaaactccctgcgaacagcccttatcaactccaccggcgaagaagtggccatgcgaaagctcgtccggagtgtaacggtcgtggaggatgatgaggatgaagacggggatgatttgttacatcatcaccatgggtcgcattgtagttctagcggtgaccccgctgagtacaacctgcggagcaggaccgtgttatgtgggacatgcggccaacccgccgataaggctagcgcgagcggatccggcgcccaggtcggtggacccatcagctccggctcgtcagcgagcagcgtgactgtgacccggagctatagaagtgtgggggggagcgggggcggatcgtttggggacaacctggtgactagaagttacttgctcgggaatagctcacctcggacccaatcgccccaaaattgctccattatccaggagatgggaatgcgctgggaggtcgaggagggcagacgtaaagtttcactaagttgtctgccgtag

SEQ ID NO: 92113 - DNA, 1725 bp, Artificial Sequence
  derived and/or modified sequence
atgggcaatagcgagggttgtaacactaagaaggagggggatctcattgccgctcaagcacggttgaaggatttagaggcactgctcaactctaaggaagctgcgttaagtaccgcactgagtgagaaacgaactctggagggcgagttgcacgatctgagaggacaagttgcaaaactggaagcggctcttggagaggccaagaagcagctgcaggacgagatgcttcgcagagtcgacgccgaaaatcgcctccagaccatgaaggaggaactggactttcagaaaaatatttattcggaagaactgcgtgagaccaaacgcagacatgaaactcgcctggtggagattgacaacgggaaacagagagagttcgagagcaggctggccgacgcactgcaagaactacgtgcccagcacgaagaccaagtggagcagtacaagaaagagctcgaaaaaacttattccgcaaaactcgacaatgccagacagagcgccgagagaaacagcaacctggttggtgccgcacatgaggagttgcaacagtcccgtattagaatcgactccctatcagcccagctctcacagctgcagaaacagctggcagccaaagaggctaagttacgcgacctggaggactctctggccagggagagagacacctccagaagactattggcagagaaggaacgggagatggccgaaatgcgtgcacgcatgcagcagcagctcgacgaatatcaggaacttctagatattaaacttgctttggacatggagattcacgcttatcggaaactcctggaaggtgaggaggagcgccttcggctgagtccttcaccaacttctcagcgttcacgaggtcgcgcaagttctcacagcagccaaacccagggtggcggttcagttacaaagaaaaggaagctagaaagcaccgagagccgttcctctttttctcagcatgccagaacatctggcagggtcgcagttgaggaggtcgatgaagagggcaaatttgtgcggttgaggaataagtctaatgaggatcagagcatggggaactggcagattaaacgccaaaacggcgacgatcctctgttgacatatcgtttccccccaaaattcaccctcaaagccggtcaggtggtgaccatttgggcggcaggggctggcgcaacgcactccccacctacagatctggtctggaaagcccagaatacctggggatgtggaaactccctgagaacagctctcattaattccacaggcgaagaagtggccatgaggaaactggttagaagcgttaccgtggtagaggatgacgaggacgaggacggtgacgacctgctgcaccaccatcatgggtcccactgctccagcagtggagacccagcggagtataacctgaggtctaggactgtgctatgcggcacatgtggacagcctgctgataaagcaagtgcatcagggtcaggggctcaagtcgggggtcctatcagttcaggatcctcagctagctccgtcacggtcactcgcagttacaggtcagtgggcggatctggcggaggatcatttggagataatctcgttacaagatcttacttattagggaattcctcgcccaggacacagagtcctcagaattgttcgataattcaggagatgggtatgcgttgggaagtcgaagagggacgcagaaaggtgtcccttagctgccttccttag

SEQ ID NO: 92114 - DNA, 1725 bp, Artificial Sequence
  derived and/or modified sequence
atgggcaacagcgagggctgcaacaccaagaaggagggcgacctgatcgccgcccaggccagactgaaggacctggaggccctgctgaacagcaaggaggccgccctgagcaccgccctgagcgagaagagaaccctggagggcgagctgcacgacctgagaggccaggtggccaagctggaggccgccctgggcgaggccaagaagcagctgcaggacgagatgctgagaagagtggacgccgagaacagactgcagaccatgaaggaggagctggacttccagaagaacatctacagcgaggagctgagagagaccaagagaagacacgagaccagactggtggagatcgacaacggcaagcagagagagttcgagagcagactggccgacgccctgcaggagctgagagcccagcacgaggaccaggtggagcagtacaagaaggagctggagaagacctacagcgccaagctggacaacgccagacagagcgccgagagaaacagcaacctggtgggcgccgcccacgaggagctgcagcagagcagaatcagaatcgacagcctgagcgcccagctgagccagctgcagaagcagctggccgccaaggaggccaagctgagagacctggaggacagcctggccagagagagagacaccagcagaagactgctggccgagaaggagagagagatggccgagatgagagccagaatgcagcagcagctggacgagtaccaggagctgctggacatcaagctggccctggacatggagatccacgcctacagaaagctgctggagggcgaggaggagagactgagactgagccccagccccaccagccagagaagcagaggcagagccagcagccacagcagccagacccagggcggcggcagcgtgaccaagaagagaaagctggagagcaccgagagcagaagcagcttcagccagcacgccagaaccagcggcagagtggccgtggaggaggtggacgaggagggcaagttcgtgagactgagaaacaagagcaacgaggaccagagcatgggcaactggcagatcaagagacagaacggcgacgaccccctgctgacctacagattcccccccaagttcaccctgaaggccggccaggtggtgaccatctgggccgccggcgccggcgccacccacagcccccccaccgacctggtgtggaaggcccagaacacctggggctgcggcaacagcctgagaaccgccctgatcaacagcaccggcgaggaggtggccatgagaaagctggtgagaagcgtgaccgtggtggaggacgacgaggacgaggacggcgacgacctgctgcaccaccaccacggcagccactgcagcagcagcggcgaccccgccgagtacaacctgagaagcagaaccgtgctgtgcggcacctgcggccagcccgccgacaaggccagcgccagcggcagcggcgcccaggtgggcggccccatcagcagcggcagcagcgccagcagcgtgaccgtgaccagaagctacagaagcgtgggcggcagcggcggcggcagcttcggcgacaacctggtgaccagaagctacctgctgggcaacagcagccccagaacccagagcccccagaactgcagcatcatccaggagatgggcatgagatgggaggtggaggagggcagaagaaaggtgagcctgagctgcctgccctag

SEQ ID NO: 92115 - protein, 457 aa, Artificial Sequence
  derived and/or modified sequence
METVMDTIVDSLFCFFVTLGAVPIIRCSRGTAAEMVAVKLDKKLRENLRDARNSLFTGDTLGAGQFSFQRPLLVLVDRNIDLATPLHHTWTYQALVHDVLDFHLNRVNLEESSGVENSPAGARPKRKNKKSYDLTPVDKFWQKHKGSPFPEVAESVQQELESYRAQEDEVKRLKSIMGLEGEDEGAISMLSDNTAKLTSAVSSLPELLEKKRLIDLHTNVATAVLEHIKARKLDVYFEYEEKIMSKTTLDKSLLDIISDPDAGTPEDKMRLFLIYYISTQQAPSEADLEQYKKALTDAGCNLNPLQYIKQWKAFTKMASAPASYGSTTTKPMGLLSRVMNTGSQFVMEGVKNLVLKQQNLPVTRILDNLMEMKSNPETDDYRYFDPKMLRGNDSSVPRNKNPFQEAIVFVVGGGNYIEYQNLVDYIKGKQGKHILYGCSELFNATQFIKQLSQLGQK

SEQ ID NO: 92116 - protein, 323 aa, Artificial Sequence
  derived and/or modified sequence
MVIQKYMPGGLCGYDRDGCPVWYDIIGPLDPKGLLFSVTKQDLLKTKMRDCERILHECDLQTERLGKKIETIVMIFDCEGLGLKHFWKPLVEVYQEFFGLLEENYPETLKFMLIVKATKLFPVGYNLMKPFLSEDTRRKIIVLGNNWKEGLLKLISPEELPAQFGGTLTDPDGNPKCLTKINYGGEIPKSMYVRDQVKTQYEHSVQINRGSSHQVEYEILFPGCVLRWQFSSDGADIGFGVFLKTKMGERQRAGEMTDVLPSQRYNAHMVPEDGNLTCSEAGVYVLRFDNTYSFVHAKKVSFTVEVLLPDEGMQKYDKELTPV

SEQ ID NO: 92117 - DNA, 972 bp, Artificial Sequence
  derived and/or modified sequence
atggtgatccagaaatacatgcctggtgggctttgcggttacgatcgcgatggttgtcccgtctggtatgacatcataggtcctctggacccgaagggcctccttttcagcgtgaccaagcaggacctcctgaaaactaagatgcgcgattgcgagcgcatcctccacgagtgtgacctgcagacagaaaggttgggtaagaagatcgagaccattgtaatgatattcgattgtgagggattggggcttaagcatttctggaagcctctggtcgaggtatatcaggaatttttcgggctcttagaggagaattatccggagactctaaagtttatgttaatcgtgaaggcgactaagctgttccccgttggttacaatttgatgaagcctttcctgtctgaagacacaaggcggaaaatcattgtcctagggaataattggaaggagggactcctgaagctaatctctcctgaggagttgcctgcacagttcggagggaccctaactgaccctgacgggaaccccaaatgtctaaccaaaattaactacgggggcgaaatccctaaatcgatgtacgtccgagatcaggtgaagacacagtacgaacacagtgtgcagatcaaccgggggtcatcacaccaagtggagtatgaaatattattcccgggctgcgtcctccgctggcagtttagcagcgacggggccgacattggctttggggtctttttaaagacgaagatgggagagagacagagagccggagagatgaccgacgtgttacctagccagcgctataatgcccacatggtgcccgaggacggaaaccttacctgctctgaggctggcgtatacgtgctccgttttgacaacacctatagctttgtgcacgccaagaaagtctcattcaccgtcgaggtgttgctgccggacgagggtatgcaaaagtatgataaggaactaacaccagtgtag

SEQ ID NO: 92118 - DNA, 972 bp, Artificial Sequence
  derived and/or modified sequence
atggtgatccagaagtacatgccaggtgggttatgtgggtatgaccgggacggctgccccgtgtggtatgatatcattggtcccctggaccccaaggggctgctgttctccgtgacaaagcaggacctgcttaagactaaaatgcgggattgtgaacgtatcctccacgaatgtgatctacagacagaaaggcttggtaagaaaattgaaacaatcgtcatgatcttcgattgcgagggattgggactgaagcacttctggaaacctctggtcgaggtctaccaggagttctttgggctactcgaggagaattaccccgagaccctcaaatttatgctcatcgtgaaggccactaagctgtttccagtgggatacaatctcatgaagccgttcctgagtgaggatactaggagaaagattatcgtgctggggaacaattggaaggagggattgctcaagctcatttcacccgaggagctacctgcccagtttggcggaactcttaccgacccagacggaaacccaaaatgcctgacaaaaattaattacggaggagagattccaaaaagcatgtatgtcagagatcaggtcaagacccagtacgagcattccgtccaaatcaaccggggtagcagtcaccaggtggaatacgagattctgtttccaggctgtgtgctgcgctggcagtttagctcggacggcgccgacatagggtttggtgtgttcctgaaaacaaaaatgggcgaacgccaacgagccggggagatgaccgacgtgctcccctctcagcgctataacgcacatatggtgcctgaagatgggaacctcacctgttctgaggcgggcgtctatgtgctgcggtttgataacacgtatagcttcgtccatgctaaaaaagtttccttcacagtggaagtgctgcttcctgatgaaggaatgcagaagtacgataaggagctcaccccagtctag

SEQ ID NO: 92119 - DNA, 972 bp, Artificial Sequence
  derived and/or modified sequence
atggtgatccagaagtacatgcctgggggcctgtgtggctatgacagagatggctgccctgtgtggtatgacatcatcggccccctggaccccaagggcctgctcttctctgtgaccaagcaggacctgctgaagaccaagatgagggactgtgagcgcatcctgcatgaatgtgacctgcagacagagcggctgggcaagaagattgagaccatcgtgatgatctttgactgtgagggcctgggcctgaagcacttctggaagcccctggtggaggtgtaccaggagttcttcggcctgctggaggagaactacccagagaccctgaagttcatgctgattgtgaaggccaccaagctgtttcctgtgggctacaacctgatgaagcccttcctgtctgaggacaccaggaggaagatcatcgtgctgggcaacaactggaaggagggcctgctgaagctgatcagccctgaggagctgcctgcccagtttggaggcaccctgacagatcctgatggcaaccccaagtgcctgaccaagatcaactatggaggagagatccccaagtccatgtatgtgcgggaccaggtgaagacccagtatgagcacagcgtgcagatcaacagaggcagcagccaccaggtggagtatgagatcctcttccctggctgtgtgctgcgctggcagttcagcagtgatggagctgacattggatttggagtcttcctgaagaccaagatgggagagcggcagagagctggggagatgacagatgtgctgcccagccagcgctacaatgcccacatggtgcctgaagatggcaacctgacctgcagcgaggccggcgtgtatgtgctgcgctttgacaacacctacagctttgtgcacgccaagaaggtgtccttcaccgtggaggtgctgctgcctgatgagggcatgcagaagtatgacaaggagctgacccctgtgtag

SEQ ID NO: 92120 - DNA, 972 bp, Artificial Sequence
  derived and/or modified sequence
atggtgatccagaagtacatgcccggcggcctgtgcggctacgacagagacggctgccccgtatggtacgatatcattggccctctggatccaaaggggctgctattctctgtaacaaagcaggacctcctaaaaacaaaaatgcgggactgcgagcggattctgcatgagtgtgacttgcagaccgagcgtcttggcaagaagattgagacgatcgtcatgatattcgactgtgagggattgggcctgaaacatttctggaagccgctggtggaggtgtatcaggagttttttggattgctggaagagaactaccctgaaacattgaagttcatgctgatcgtgaaagccaccaagttatttccagtggggtacaacctgatgaagcctttcctctccgaggacactaggcgaaagattatcgtgctcggaaataattggaaagagggattgctgaagctcattagtcccgaagagttgcctgctcagttcgggggaacactgacagatcccgatggaaacccaaaatgtctgactaagatcaattatgggggcgagatccccaaatctatgtatgtgcgcgaccaggtgaaaacgcaatacgagcattccgtgcagatcaacagaggcagctctcatcaggtggagtacgagattctgttcccaggttgtgtgttaaggtggcagttctcctccgatggagcggatattggctttggagttttcctcaaaacaaagatgggtgaaaggcaaagagccggcgagatgacggatgtgcttccaagccagcgttataacgctcatatggtgccggaagacggcaacctgacgtgttccgaagctggggtgtacgtgctaaggtttgacaacacatacagcttcgttcatgctaaaaaggtgtctttcacggtggaagtgctcctgcccgacgagggaatgcagaagtatgacaaggagttgaccccagtgtag

SEQ ID NO: 92121 - DNA, 972 bp, Artificial Sequence
  derived and/or modified sequence
atggtgatccagaagtacatgcccggcggcctgtgcggctacgaccgagacggctgtcctgtctggtacgacattattggccctctggacccaaaggggcttcttttctccgtcacaaaacaggacctgttaaagactaaaatgcgcgactgcgaaagaattctgcacgaatgtgacctgcaaactgagcgcctcgggaaaaaaattgagactatcgtgatgatttttgactgtgaaggactaggtctaaaacacttctggaaaccattagtagaggtgtaccaggagtttttcggtcttctggaagaaaattatcctgaaactttgaaattcatgttgatagtaaaagcaacaaagctgttcccagtcggatacaacctaatgaagccatttctctcggaagatacaagacggaaaattattgtcttggggaacaattggaaggagggcctgctcaagctgatcagccctgaggagctcccagcacagttcggaggcacccttaccgacccagacggaaatcccaaatgtttgaccaaaataaattatggcggcgaaatccccaagtcgatgtatgtgagagatcaggttaaaacccagtacgaacactcagtgcagattaacagagggagttctcaccaggtggaatatgagatactgttccccggatgcgtactgagatggcagtttagtagtgatggcgcggacatcggctttggagtctttctgaagaccaaaatgggggagcgacagcgagccggcgaaatgaccgacgtcctcccttctcagagatacaatgcccacatggtccccgaagacggaaatctgacctgcagtgaggccggtgtgtacgtgctgcgctttgataatacttattcttttgtgcacgcaaagaaggtgagctttactgtcgaagtgctcctccccgacgagggcatgcaaaagtacgacaaggagcttacacccgtgtag

SEQ ID NO: 92122 - DNA, 972 bp, Artificial Sequence
  derived and/or modified sequence
atggtgattcaaaagtacatgccagggggattgtgcgggtacgaccgcgacggctgtcccgtgtggtatgatatcattggccctttggacccaaaggggctcttattttctgtcacaaagcaagacttgctgaaaactaagatgagagactgtgaaaggattctgcacgagtgtgatcttcagacggagcggctgggcaagaagattgagaccatcgtgatgattttcgactgtgagggacttggacttaagcatttctggaagccactggtggaggtgtaccaggagtttttcggactccttgaggaaaactatcctgagacccttaaatttatgttgattgttaaagccactaagttgtttcctgtcggctacaaccttatgaagccttttctgagtgaagatacccgaaggaagatcatcgttctgggcaacaattggaaggagggtctgctcaaattgattagcccagaagaactgccggctcaattcggaggaaccctgaccgaccctgatgggaaccctaagtgtttgacaaagattaactatggcggagagataccaaaatccatgtacgtccgagaccaagtgaagacacagtacgagcactctgtgcagattaacaggggaagttctcaccaggtcgagtatgagattctgtttccaggttgtgtattgagatggcagttctcctctgacggggcagatattggcttcggagtttttctaaagactaagatgggagaacggcagcgagccggtgagatgaccgacgtgctccctagtcaacgctataatgcacatatggttccggaagacggaaacctgacctgcagtgaggccggagtgtatgtcctccggtttgataatacctattccttcgtgcacgctaagaaggtctccttcacagtggaggttctactgcccgacgaaggcatgcagaagtacgacaaagaactgaccccagtgtag

SEQ ID NO: 92123 - DNA, 972 bp, Artificial Sequence
  derived and/or modified sequence
atggtaatacagaagtatatgccaggcggattgtgtggctacgatcgcgatggctgtccagtgtggtatgacatcattggcccactcgatcctaaagggctcttgttttccgtgactaagcaggacttgctgaagaccaagatgagagactgcgaaagaatcctccatgaatgtgacctgcagaccgaacgcttaggaaagaagatcgagaccatcgtgatgatttttgattgcgagggccttggattaaaacatttctggaaacctttagttgaggtgtatcaagaattcttcggactgctggaagaaaactatccggaaacactaaaatttatgctgatagtcaaagctaccaagctctttccggtgggctataatctgatgaaacccttcctgagcgaggatacccggcgaaaaatcatcgttctgggtaataactggaaagagggattgctcaaactgattagccccgaggaattgccggctcagttcggtggaacattgacagatccagatgggaatcccaaatgtttaaccaagattaattacggcggagaaattcccaaatccatgtacgtcagggaccaggtgaaaacacagtatgaacatagtgtccaaatcaatcgtggaagctcgcaccaggtggagtatgaaatactcttccccggatgcgtgctgcggtggcagttcagttccgacggcgctgatatcgggttcggggtgttcctaaagacgaagatgggcgaacgccagagagctggtgaaatgaccgacgttctaccgagccaaagatataatgcacacatggttccagaggacggcaacctcacctgctccgaggccggagtatatgttctgagatttgataatacttattcctttgtgcacgcaaagaaggtgtcctttacagtggaggtcttgctgcctgacgagggcatgcaaaagtacgacaaggaattaacccccgtctag

SEQ ID NO: 92124 - DNA, 1837 bp, Artificial Sequence
  derived and/or modified sequence
cagttccgagaaaacgtccaggatgtgcttcctgccctgcccaaccctgatgattatttccttctacgctggctccgagctcggaattttgacttgcagaagtcggaggctttgctccgcaagtacatggagttccggaagaccatggatattgaccatatccttgattggcagcccccagagaaagggacacgggagacatcaggggcagacctaagaagtccaagggcctgctgagacctggctttgccatttaccctctgtgagcaaggccctcccctgcaggacctcagctttctcacctgagacaatagcactgtcttccagggagggacagtgctttttataccatggtgatccagaagtacatgcctgggggcctgtgtggctatgaccgtgatggctgccccgtgtggtatgacatcattgggccacttgatcccaaggggttgctcttctcagtcaccaagcaggacctgctcaagaccaagatgagggactgtgagcgcatcctgcatgagtgtgacctgcagacagagaggctagggaagaagattgagaccatcgtgatgatatttgactgtgagggcctgggactgaaacacttctggaaacctctggtagaagtgtaccaggagttctttggcctccttgaagagaattacccagagaccctgaagttcatgctcatcgtgaaagctaccaaactgttccctgtgggctacaacctcatgaagccattcctgagtgaggacactcgcaggaaaattattgtgttgggaaataactggaaggaaggtttgctgaaactcatcagtcctgaggaactgcctgcccagtttgggggcaccctgactgacccagatgggaaccccaaatgtttaaccaagattaactatggcggggagatccccaagtccatgtacgtgcgggaccaggtgaagactcagtacgagcactcggtgcagatcaaccgcggctcatcacaccaagtggaatacgagatcctatttccaggctgcgttctcaggtggcagttctcatctgatggtgcggacatcggcttcggagttttcctgaagaccaagatgggggagcgacagcgggcaggggagatgacagatgttctacccagccagcgctataacgcccacatggtgcccgaggatgggaacctcacctgctcagaggccggcgtctatgtcctacgcttcgacaacacctatagctttgtccacgccaagaaggtcagcttcacagtggaggtcctgctccctgacgagggcatgcagaaatatgataaggagctcacccctgtctaggtggctccctcatttctcagagacctcctaaccctttgatttctctgtttatatcctacactccctccctccctgaaattgattgttagtcctcctgactctgtgacgttagtgagtacagaaagagatgccctggggaaaactcatctactgtggtcagatcaagaaaggtatgagaggcacaaccttggagggtaccaaggttgcagaagaggaaaaagcaagggtaaaggcaagaagtgggtgtcatgaaactcaataaatagcaaaatgaatcccctagcctttgtcctcacctaccctaaggcaggtgtgtatgcttgaattccttccgtatggctgtgagcaacttgggttggagacatatctaaatcctttttacttccactccctatatatagtagatgctcagtgtatatttgtggcattgaatggaggaccagaaggtagggtgcaggtgactcaacagctgtacatgattaggaggagcctatgtggggtggatttcagcacct

SEQ ID NO: 92125 - DNA, 1964 bp, Artificial Sequence
  derived and/or modified sequence
caccactcctcaagccccagccagcaccatgagcggccgagttggagacctgagccccaaacaggcagagaccctggccaaggttcaagcaattctcctgcctcagcctcctgagtagctgggattacagttccgagaaaacgtccaggatgtgcttcctgccctgcccaaccctgatgattatttccttctacgctggctccgagctcggaattttgacttgcagaagtcggaggctttgctccgcaagtacatggagttccggaagaccatggatattgaccatatccttgattggcagcccccagagaaagggacacgggagacatcaggggcagacctaagaagtccaagggcctgctgagacctggctttgccatttaccctctgtgagcaaggccctcccctgcaggacctcagctttctcacctgagacaatagcactgtcttccagggagggacagtgctttttataccatggtgatccagaagtacatgcctgggggcctgtgtggctatgaccgtgatggctgccccgtgtggtatgacatcattgggccacttgatcccaaggggttgctcttctcagtcaccaagcaggacctgctcaagaccaagatgagggactgtgagcgcatcctgcatgagtgtgacctgcagacagagaggctagggaagaagattgagaccatcgtgatgatatttgactgtgagggcctgggactgaaacacttctggaaacctctggtagaagtgtaccaggagttctttggcctccttgaagagaattacccagagaccctgaagttcatgctcatcgtgaaagctaccaaactgttccctgtgggctacaacctcatgaagccattcctgagtgaggacactcgcaggaaaattattgtgttgggaaataactggaaggaaggtttgctgaaactcatcagtcctgaggaactgcctgcccagtttgggggcaccctgactgacccagatgggaaccccaaatgtttaaccaagattaactatggcggggagatccccaagtccatgtacgtgcgggaccaggtgaagactcagtacgagcactcggtgcagatcaaccgcggctcatcacaccaagtggaatacgagatcctatttccaggctgcgttctcaggtggcagttctcatctgatggtgcggacatcggcttcggagttttcctgaagaccaagatgggggagcgacagcgggcaggggagatgacagatgttctacccagccagcgctataacgcccacatggtgcccgaggatgggaacctcacctgctcagaggccggcgtctatgtcctacgcttcgacaacacctatagctttgtccacgccaagaaggtcagcttcacagtggaggtcctgctccctgacgagggcatgcagaaatatgataaggagctcacccctgtctaggtggctccctcatttctcagagacctcctaaccctttgatttctctgtttatatcctacactccctccctccctgaaattgattgttagtcctcctgactctgtgacgttagtgagtacagaaagagatgccctggggaaaactcatctactgtggtcagatcaagaaaggtatgagaggcacaaccttggagggtaccaaggttgcagaagaggaaaaagcaagggtaaaggcaagaagtgggtgtcatgaaactcaataaatagcaaaatgaatcccctagcctttgtcctcacctaccctaaggcaggtgtgtatgcttgaattccttccgtatggctgtgagcaacttgggttggagacatatctaaatcctttttacttccactccctatatatagtagatgctcagtgtatatttgtggcattgaatggaggaccagaaggtagggtgcaggtgactcaacagctgtacatgattaggaggagcctatgtggggtggatttcagcacct

SEQ ID NO: 92126 - DNA, 972 bp, Artificial Sequence
  derived and/or modified sequence
atggtgatccagaagtacatgcccggcggcctgtgcggctacgacagagacggctgccccgtgtggtacgacatcatcggccccctggaccccaagggcctgctgttcagcgtgaccaagcaggacctgctgaagaccaagatgagagactgcgagagaatcctgcacgagtgcgacctgcagaccgagagactgggcaagaagatcgagaccatcgtgatgatcttcgactgcgagggcctgggcctgaagcacttctggaagcccctggtggaggtgtaccaggagttcttcggcctgctggaggagaactaccccgagaccctgaagttcatgctgatcgtgaaggccaccaagctgttccccgtgggctacaacctgatgaagcccttcctgagcgaggacaccagaagaaagatcatcgtgctgggcaacaactggaaggagggcctgctgaagctgatcagccccgaggagctgcccgcccagttcggcggcaccctgaccgaccccgacggcaaccccaagtgcctgaccaagatcaactacggcggcgagatccccaagagcatgtacgtgagagaccaggtgaagacccagtacgagcacagcgtgcagatcaacagaggcagcagccaccaggtggagtacgagatcctgttccccggctgcgtgctgagatggcagttcagcagcgacggcgccgacatcggcttcggcgtgttcctgaagaccaagatgggcgagagacagagagccggcgagatgaccgacgtgctgcccagccagagatacaacgcccacatggtgcccgaggacggcaacctgacctgcagcgaggccggcgtgtacgtgctgagattcgacaacacctacagcttcgtgcacgccaagaaggtgagcttcaccgtggaggtgctgctgcccgacgagggcatgcagaagtacgacaaggagctgacccccgtgtag

SEQ ID NO: 92127 - DNA, 1026 bp, Artificial Sequence
  derived and/or modified sequence
atggagttccgcaaaaccatggacatagatcatatcttagactggcagcctccggaggtcatccagaagtacatgccaggagggctgtgtggctacgatcgtgacggatgtccggtgtggtacgacattatagggccgctggaccctaaggggctgctgttctctgtgaccaagcaagatctcttaaagacgaagatgcgagactgcgagaggatcctccacgagtgtgacctgcaaacagaacgactgggaaagaagattgaaaccatcgtcatgatctttgattgcgagggcttgggccttaaacacttctggaaacctcttgtggaggtatatcaggagttctttggactgctggaggaaaattatcctgaaaccttaaagtttatgctcatagtgaaagccactaaactcttcccagtcgggtacaatttgatgaagccatttctctctgaggatacacgtcgtaaaattatcgtgctcggcaataactggaaggagggactgctgaaactcatttcccccgaagagctgcctgctcagtttggaggaacactgactgatcctgatggaaaccccaagtgcctgaccaaaatcaactatggtggcgaaatcccaaaaagtatgtatgtgagagaccaggtgaaaactcaatatgagcactccgtgcagattaaccgcggttcatcacatcaggtggagtacgagatcctgttccctggctgcgtacttaggtggcagttttcctccgacggagccgacatcggttttggcgtgtttcttaagacaaaaatgggcgagagacagagagccggcgaaatgactgacgtcctgcccagtcaacgctacaacgcacacatggtgcccgaagatggaaatcttacatgcagcgaggccggagtgtacgtccttaggtttgataacacatactcattcgtgcacgctaaaaaggtttctttcacggtggaggtgctcttgccggacgagggcatgcagaaatatgacaaggaactcacccccgtatag

SEQ ID NO: 92128 - DNA, 1026 bp, Artificial Sequence
  derived and/or modified sequence
atggagttcaggaagaccatggacatcgaccacatcctggactggcagcccccagaggtgatccagaagtacatgcctgggggcctgtgtggctatgacagagatggctgccctgtgtggtatgacatcatcggccccctggaccccaagggcctgctcttctctgtgaccaagcaggacctgctgaagaccaagatgagggactgtgagcgcatcctgcatgaatgtgacctgcagacagagcggctgggcaagaagattgagaccatcgtgatgatctttgactgtgagggcctgggcctgaagcacttctggaagcccctggtggaggtgtaccaggagttcttcggcctgctggaggagaactacccagagaccctgaagttcatgctgattgtgaaggccaccaagctgtttcctgtgggctacaacctgatgaagcccttcctgtctgaggacaccaggaggaagatcatcgtgctgggcaacaactggaaggagggcctgctgaagctgatcagccctgaggagctgcctgcccagtttggaggcaccctgacagatcctgatggcaaccccaagtgcctgaccaagatcaactatggaggagagatccccaagtccatgtatgtgcgggaccaggtgaagacccagtatgagcacagcgtgcagatcaacagaggcagcagccaccaggtggagtatgagatcctcttccctggctgtgtgctgcgctggcagttcagcagtgatggagctgacattggatttggagtcttcctgaagaccaagatgggagagcggcagagagctggggagatgacagatgtgctgcccagccagcgctacaatgcccacatggtgcctgaagatggcaacctgacctgcagcgaggccggcgtgtatgtgctgcgctttgacaacacctacagctttgtgcacgccaagaaggtgtccttcaccgtggaggtgctgctgcctgatgagggcatgcagaagtatgacaaggagctgacccctgtgtag

SEQ ID NO: 92129 - DNA, 1026 bp, Artificial Sequence
  derived and/or modified sequence
atggagttccggaagaccatggacatcgaccacatcctggactggcaacctccggaggtgatacagaagtacatgcctggcgggttatgtggttatgacagggatggttgcccagtctggtacgacattattggccctctggatcctaaaggactgctgttttcagtgacaaagcaggacttgcttaaaacgaaaatgcgggactgcgagaggattctgcacgagtgtgacctgcagacggagagactcggcaagaagattgaaacaattgtcatgatttttgattgtgaaggcctaggactgaaacacttttggaaacccctcgtggaagtatatcaagaattctttggcttacttgaagaaaattaccccgagaccctgaagtttatgttaatcgtaaaagctactaagctgttcccagtgggctacaatctcatgaagccgtttttatctgaggatactcgtaggaaaatcatcgtgctgggcaataactggaaggaaggccttctcaaattaattagcccagaggagctgccagctcagttcggcgggactcttacagaccccgacggtaaccccaaatgtctgacaaagatcaactatgggggtgagattcctaagtcaatgtacgtcagagaccaggttaaaacacagtacgagcactccgtccagatcaaccgcgggtcatcacatcaggtcgagtacgagatactgtttcccggatgcgtgttgcgatggcagttcagtagtgatggcgcagacatagggttcggagtgttcctgaagaccaagatgggtgagcgccaacgcgccggggaaatgacggacgtcctgcctagccagagatacaacgcccatatggtgccagaggatgggaaccttacttgcagcgaggccggggtatatgtgctgcgatttgataacacatacagtttcgtccatgctaaaaaggtgtcttttaccgtggaggtgttactccccgacgaagggatgcagaaatacgataaagagctgactccagtgtag

SEQ ID NO: 92130 - DNA, 1026 bp, Artificial Sequence
  derived and/or modified sequence
atggaatttagaaagaccatggacatcgaccatattttggactggcagcctccagaggtcattcaaaagtatatgcccggagggctttgcgggtatgaccgggacgggtgccctgtttggtatgatatcatcggcccattggatccaaaaggtttgctcttctccgtaactaagcaagatctccttaagactaagatgcgcgactgcgagcgtatcctgcatgagtgcgacctgcagacggagcggctgggtaagaaaatcgagaccattgtgatgatatttgactgcgaggggctgggactcaagcacttttggaaaccactcgtagaggtgtaccaggagttcttcggcctccttgaggagaactatcccgagacccttaaattcatgctcatagttaaggctaccaagctctttcctgtaggttataacctgatgaagccctttttatctgaggatacgcgcaggaagataattgtgctgggcaacaattggaaagaagggctcctcaaactgatttcccctgaagaactgcccgcacaatttggtggaaccttgactgatcccgatggaaaccccaagtgtttaaccaagataaactacggcggagaaattcccaagtccatgtacgtgcgtgatcaggtaaaaacacagtacgaacactccgtccagatcaatagagggtcatctcaccaggttgagtacgaaattttatttccgggatgcgttcttaggtggcagttcagctctgatggggcagacatcggcttcggcgtgttcttaaagacaaaaatgggggagcgccagagggccggagagatgaccgacgtccttccatcccagagatataatgctcacatggtaccagaagacggaaatttaacctgcagcgaggctggggtttatgttctgcggtttgataacacctactccttcgtgcacgccaagaaggtctcatttactgtcgaagtgcttctgcccgacgaaggaatgcaaaagtacgacaaggagttgacacctgtatag

SEQ ID NO: 92131 - DNA, 1026 bp, Artificial Sequence
  derived and/or modified sequence
atggagttcagaaagaccatggacatcgaccacatcctggactggcagccccccgaggtgatccagaagtacatgcccggcggcctgtgcggctacgacagagacggctgccccgtgtggtacgacatcatcggccccctggaccccaagggcctgctgttcagcgtgaccaagcaggacctgctgaagaccaagatgagagactgcgagagaatcctgcacgagtgcgacctgcagaccgagagactgggcaagaagatcgagaccatcgtgatgatcttcgactgcgagggcctgggcctgaagcacttctggaagcccctggtggaggtgtaccaggagttcttcggcctgctggaggagaactaccccgagaccctgaagttcatgctgatcgtgaaggccaccaagctgttccccgtgggctacaacctgatgaagcccttcctgagcgaggacaccagaagaaagatcatcgtgctgggcaacaactggaaggagggcctgctgaagctgatcagccccgaggagctgcccgcccagttcggcggcaccctgaccgaccccgacggcaaccccaagtgcctgaccaagatcaactacggcggcgagatccccaagagcatgtacgtgagagaccaggtgaagacccagtacgagcacagcgtgcagatcaacagaggcagcagccaccaggtggagtacgagatcctgttccccggctgcgtgctgagatggcagttcagcagcgacggcgccgacatcggcttcggcgtgttcctgaagaccaagatgggcgagagacagagagccggcgagatgaccgacgtgctgcccagccagagatacaacgcccacatggtgcccgaggacggcaacctgacctgcagcgaggccggcgtgtacgtgctgagattcgacaacacctacagcttcgtgcacgccaagaaggtgagcttcaccgtggaggtgctgctgcccgacgagggcatgcagaagtacgacaaggagctgacccccgtgtag

SEQ ID NO: 92132 - protein, 611 aa, Artificial Sequence
  derived and/or modified sequence
MSSSNVEVFIPVSQGNTNGFPATASNDLKAFTEGAVLSFHNICYRVKLKSGFLPCRKPVEKEILSNINGIMKPGLNAILGPTGGGKSSLLDVLAARKDPSGLSGDVLINGAPRPANFKCNSGYVVQDDVVMGTLTVRENLQFSAALRLATTMTNHEKNERINRVIQELGLDKVADSKVGTQFIRGVSGGERKRTSIGMELITDPSILFLDEPTTGLDSSTANAVLLLLKRMSKQGRTIIFSIHQPRYSIFKLFDSLTLLASGRLMFHGPAQEALGYFESAGYHCEAYNNPADFFLDIINGDSTAVALNREEDFKATEIIEPSKQDKPLIEKLAEIYVNSSFYKETKAELHQLSGGEKKKKITVFKEISYTTSFCHQLRWVSKRSFKNLLGNPQASIAQIIVTVVLGLVIGAIYFGLKNDSTGIQNRAGVLFFLTTNQCFSSVSAVELFVVEKKLFIHEYISGYYRVSSYFLGKLLSDLLPMRMLPSIIFTCIVYFMLGLKPKADAFFVMMFTLMMVAYSASSMALAIAAGQSVVSVATLLMTICFVFMMVCWSISQPLHLGCHGFSTSAFHDMDLRLCSIMNFWDKTSAQDSMQQETILVTMQHVLAKNIW

SEQ ID NO: 92133 - DNA, 1836 bp, Artificial Sequence
  derived and/or modified sequence
atgagtagttctaatgtggaggtcttcattcctgtttcacaaggtaataccaacgggtttcccgcaactgcgagcaacgatctgaaagcatttaccgagggagctgtcctttctttccacaatatttgctatagagtcaaacttaagagtgggtttctgccctgtagaaagcccgtagaaaaagaaatactctctaacatcaatggcattatgaagccgggccttaacgccattttggggcctaccggcggtggaaagagcagcctgctggatgtcctggccgccaggaaggatccgagcggcctgtcgggggacgtgctgattaacggggcaccaaggcctgctaacttcaagtgtaacagtgggtatgtggtgcaagatgatgttgtaatgggcacactcacggtgagagagaatctgcaatttagcgctgcacttcgcctcgccaccaccatgactaatcatgaaaagaatgaacgaataaatcgcgtgattcaggagctgggcttagataaagtcgcggacagtaaagtaggaacacagttcatccgaggcgtaagcgggggagagagaaaaagaaccagcattgggatggaactgatcactgaccctagcattctctttctagacgaaccaacaaccgggctggactcctccacagctaatgccgtcctgcttcttttgaaacgcatgagtaagcagggcaggactatcattttctccatccatcagccccgctactcaatattcaaactttttgactccctcaccctccttgcctccgggaggttgatgttccatgggcctgcccaggaagcactggggtacttcgaatcggctggctaccattgcgaggcatacaataatcccgctgacttctttttagatatcattaacggcgattccaccgccgtcgctttgaatcgagaggaagatttcaaagcaacagagataatagagcctagcaagcaagataaacctctcattgagaagctggccgaaatctatgtgaacagctctttttacaaggaaactaaagctgagctccatcagctgtcgggtggcgagaagaaaaagaaaatcaccgtgttcaaggagatctcttataccacgtctttttgtcaccagttacggtgggtgtcaaagcgcagcttcaagaatctcctcggaaacccgcaagcttctatcgcccagattatcgttacagttgtcctcggactcgttataggtgcgatctacttcggcctgaagaacgacagtactggtattcaaaaccgtgcaggtgtgcttttttttttgacaaccaaccaatgctttagctccgtgtccgcagtcgaactctttgtggttgagaagaaattgtttatccatgagtacatttctggctattaccgtgtttccagctatttcctggggaaactgctctctgacctgttaccaatgcgtatgttgccttctatcatcttcacatgtattgtctacttcatgctgggtctgaaaccaaaggccgatgcttttttcgttatgatgttcacactaatgatggtggcatattccgcatcctccatggccctcgcgattgctgccggccagtcggtagtctcagtggctacactgctgatgacaatttgttttgtgtttatgatggtttgttggtcgataagtcagcctcttcatcttggctgtcatgggtttagtacatcagccttccatgacatggatctcaggctgtgttctataatgaacttttgggacaagacttctgcgcaggattctatgcaacaggaaacgatactggttacaatgcaacatgtgctggccaagaacatttggtag

SEQ ID NO: 92134 - DNA, 1836 bp, Artificial Sequence
  derived and/or modified sequence
atgagcagcagcaatgtggaggtgttcatccctgtgtcccagggcaacaccaacggcttccctgccacagccagcaatgacctgaaggccttcacagagggcgctgtgctgtccttccacaacatctgctacagagtgaagctgaagagcggcttcctgccctgcaggaagcctgtggagaaggagatcctgagcaacatcaatggcatcatgaagccaggcctgaatgccatcctgggccccaccggcggcggcaagagcagcctgctggatgtgctggccgccaggaaggaccccagcggcctgtctggagatgtgctgatcaatggagcccccaggcctgccaacttcaagtgcaacagcggctacgtggtgcaggatgatgtggtgatgggcaccctgactgtgcgggagaacctgcagttctctgctgccctgcggctggccaccaccatgaccaaccacgagaagaatgaaagaatcaacagagtcatccaggagctgggcctggacaaggtggccgacagcaaggtgggcacccagttcatccggggcgtgtctggaggagagaggaagaggaccagcatcggcatggagctgatcacagaccccagcatcctcttcctggatgagcccaccaccggcctggacagcagcacagccaatgctgtgctgctgctgctgaagaggatgagcaagcagggccgcaccatcatcttcagcatccaccagccccgctacagcatcttcaagctgtttgacagcctgaccctgctggccagcggccgcctgatgtttcatggccctgcccaggaggccctgggctactttgaatctgctggctaccactgtgaggcctacaacaacccagctgacttcttcctggacatcatcaatggagacagcacagctgtggccctgaaccgggaggaggacttcaaggccacagagatcatcgagcccagcaagcaggacaagcccctgattgagaagctggccgagatctacgtgaacagcagcttctacaaggagaccaaggccgagctgcaccagctgtctggaggagagaagaagaagaagatcaccgtcttcaaggagatctcctacaccaccagcttctgccaccagctgcgctgggtgtccaagaggagcttcaagaacctgctgggcaacccccaggccagcatcgcccagatcatcgtgacagtggtgctgggcctggtgattggagccatctacttcggcctgaagaatgacagcacaggcatccagaacagagctggggtgctcttcttcctgaccaccaaccagtgcttcagctctgtgtctgctgtggagctgtttgtggtggagaagaagctgttcatccacgagtacatcagcggctactacagagtgagcagctacttcctgggcaagctgctgagtgacctgctgcccatgaggatgctgcccagcatcatcttcacctgcatcgtgtacttcatgctgggcctgaagcccaaggcagatgccttctttgtgatgatgttcaccctgatgatggtggcctacagcgccagctccatggccctggccatcgctgctggccagagcgtggtgtctgtggccaccctgctgatgaccatctgctttgtgttcatgatggtgtgctggagcatcagccagcccctgcacctgggctgccacggcttcagcaccagcgccttccatgacatggacctgcggctgtgcagcatcatgaacttctgggacaagaccagcgcccaggacagcatgcagcaggagaccatcctggtgaccatgcagcacgtgctggccaagaacatctggtag

SEQ ID NO: 92135 - DNA, 1836 bp, Artificial Sequence
  derived and/or modified sequence
atgagcagcagcaacgtggaggtgttcatccccgtgagccagggcaatacgaacggcttccctgccactgcttcaaacgatctgaaggctttcactgagggagctgtgctaagtttccataatatttgctatagggtgaaactcaaaagtggcttcctgccttgtcgtaaacccgttgaaaaagaaattttatcaaacattaacggcataatgaagcccggactgaacgcaatcctcggaccaaccgggggaggaaaatcttctctgcttgacgtgctagctgccagaaaagatcccagtggcctgagcggggacgttttaatcaatggggccccgaggccagctaactttaagtgtaattccgggtacgtagttcaggatgatgtggtgatgggcactttaacagtcagagaaaatctgcagtttagtgccgccctcaggctggccaccactatgactaaccatgaaaaaaatgaacggatcaacagggtgatccaggaattaggcctagataaagtggccgacagtaaggtcgggacccaattcatccggggcgtcagcggcggagaaagaaaacggacatcgatcggaatggaactgatcacagatccttcaattctgtttcttgatgagccaactaccgggctcgattcttccaccgccaacgccgtgctgttattactgaagcgcatgtcaaagcagggaagaacgataatctttagcatacatcaacctaggtatagcatattcaagctgtttgacagcctgaccttactagcatccggtcgtctcatgttccacgggccagcacaggaggctctggggtactttgagtccgcgggctaccactgcgaggcctacaataaccccgcagactttttcctcgacatcatcaatggagattcaaccgctgttgcattgaatcgggaggaggacttcaaagctaccgagatcatcgagcccagcaagcaggacaagcctctgatagagaagttggcagaaatctacgtcaatagcagcttctataaagagactaaagccgagctgcaccaactgtccgggggcgaaaagaaaaaaaaaataacagtcttcaaagagatctcttacaccacttctttctgtcaccaactgaggtgggtttccaaacggtcctttaaaaatctgctgggcaatccacaagcgtcgattgctcagataattgtcaccgtcgtgctggggcttgttataggcgctatatatttcgggctgaaaaatgatagcacaggcattcagaatcgtgccggagtgctcttcttcctcaccactaaccagtgtttctcttctgtgagcgccgtggagctgtttgttgtggaaaaaaagcttttcatccacgagtacattagtggatattaccgcgtgtccagttatttcttgggcaaactactgagcgatctgttgcctatgagaatgctcccctccatcatatttacatgcatagtgtattttatgttgggtttgaagcccaaggcggacgcattttttgtcatgatgttcaccctgatgatggtcgcgtattcagcctcctccatggccctggcgattgcggccggccagagtgtggttagcgtcgctactctcctgatgaccatttgtttcgtcttcatgatggtctgctggagcatcagccagcccctgcacctgggatgccacggcttctccactagtgcctttcacgacatggacctgcgtctgtgctcaatcatgaatttctgggataaaacatccgcacaggacagcatgcagcaagaaaccatcctggtcaccatgcagcacgtgctagccaagaatatctggtag

SEQ ID NO: 92136 - DNA, 1836 bp, Artificial Sequence
  derived and/or modified sequence
atgtcttcctctaatgtggaggtttttattcccgttagtcaaggaaatacaaatggattcccggctaccgctagcaacgacctcaaggctttcaccgaaggagccgttctgagttttcataacatctgctacagggtcaagctgaaatcgggttttttaccttgccgcaagccggtggaaaaggagattctgtccaacattaatgggataatgaagcctggtctaaatgccatactcgggcctacaggcggtggaaaatccagtctgctggacgtcctcgcagctagaaaggatccctccggattgtctggcgatgtgctcatcaatggggctccccgtcctgcaaacttcaagtgcaattccgggtacgttgtgcaggatgacgtggttatggggacattaacagtgagagaaaatctccagttcagtgctgctctgaggctggctaccaccatgactaatcatgagaaaaatgaacggataaatcgcgttattcaggaattggggctggataaggtggccgacagtaaagtagggacacaatttatccgcggtgtgtccgggggagagaggaagcgcacctccatcggaatggagctcattaccgatccgtcgattcttttcctggatgagcctaccacagggctcgactcctccaccgctaacgctgtgctcctcttgctgaagcgcatgtcgaagcagggacggaccatcattttttccatacaccaacctagatattctatttttaaactgttcgattctttaacattgttggctagcggaagactgatgtttcacgggcctgcacaagaggctttggggtattttgaaagtgccggataccactgtgaagcctacaacaatccggctgattttttcctcgacattattaacggggatagcacagctgtggctctcaaccgggaggaggactttaaggctaccgaaatcatagaaccttctaagcaggataaacccctcattgagaagcttgccgagatctacgttaacagcagcttctacaaggaaaccaaggctgagctccaccagctctccggcggtgaaaagaaaaaaaaaatcacggtttttaaagagattagctacacaaccagcttttgccatcagctgagatgggtgtctaaacgcagttttaaaaacctgctaggtaaccctcaggcgagcatcgctcagatcatcgtcaccgtcgtattaggcttggttatcggagctatctatttcgggctgaagaatgacagcacaggaattcaaaacagagccggtgtgttattttttctcacaaccaatcagtgtttctcttctgtttcagcagtagagctgtttgtagtggaaaaaaagctgtttatccatgagtatattagcggatactatagggtgtcttcctattttctcggaaagctcctgagcgacctgctccccatgagaatgctcccctccattatctttacatgtatcgtctacttcatgctggggctcaagccaaaagcagacgcctttttcgtgatgatgtttacgctgatgatggtagcctacagtgcatccagcatggcactcgctattgctgctggacaaagcgtagtttcagtggccaccttgctcatgacaatttgcttcgtattcatgatggtctgctggtcgatttcgcaaccactgcacttaggctgtcacgggttctctacttctgcctttcacgacatggatttgaggttgtgctctatcatgaatttctgggacaagacttccgcccaagactctatgcagcaagaaactatccttgtgacaatgcaacacgttctggccaaaaacatctggtag

SEQ ID NO: 92137 - DNA, 4276 bp, Artificial Sequence
  derived and/or modified sequence
gaaaaaaggaacccaaggagataggagagctgttaatttcactcgggacatttcctcgaggctagtttactcggaaagcctcaatgttccctggtagctgcaggatctactttgggggctgccaagtttcctctctcattctttctcctgccccaagagcaggcaggaaggaaagttcctggactgatactcgtctgtttagtaggcgtgggtcctggttgaagtctgtctaggaaaactcctaagtgtagaaatcttcttcgtattaccactgtctctgcactgagatttgggctgctttgcttccagcgtcacacatcataactgagaaagataaaaactctccagatgtcttccagtaatgtcgaagtttttatcccagtgtcacaaggaaacaccaatggcttccccgcgacagcttccaatgacctgaaggcatttactgaaggagctgtgttaagttttcataacatctgctatcgagtaaaactgaagagtggctttctaccttgtcgaaaaccagttgagaaagaaatattatcgaatatcaatgggatcatgaaacctggtctcaacgccatcctgggacccacaggtggaggcaaatcttcgttattagatgtcttagctgcaaggaaagatccaagtggattatctggagatgttctgataaatggagcaccgcgacctgccaatttcaaatgtaattcaggttacgtggtacaagatgatgttgtgatgggcactctgacggtgagagaaaacttacagttctcagcagctcttcggcttgcaacaactatgacgaatcatgaaaaaaacgaacggattaacagggtcattcaagagttaggtctggataaagtggcagactccaaggttggaactcagtttatccgtggtgtgtctggaggagaaagaaaaaggactagtataggaatggagcttatcactgatccttccatcttgttcttggatgagcctacaactggcttagactcaagcacagcaaatgctgtccttttgctcctgaaaaggatgtctaagcagggacgaacaatcatcttctccattcatcagcctcgatattccatcttcaagttgtttgatagcctcaccttattggcctcaggaagacttatgttccacgggcctgctcaggaggccttgggatactttgaatcagctggttatcactgtgaggcctataataaccctgcagacttcttcttggacatcattaatggagattccactgctgtggcattaaacagagaagaagactttaaagccacagagatcatagagccttccaagcaggataagccactcatagaaaaattagcggagatttatgtcaactcctccttctacaaagagacaaaagctgaattacatcaactttccgggggtgagaagaagaagaagatcacagtcttcaaggagatcagctacaccacctccttctgtcatcaactcagatgggtttccaagcgttcattcaaaaacttgctgggtaatccccaggcctctatagctcagatcattgtcacagtcgtactgggactggttataggtgccatttactttgggctaaaaaatgattctactggaatccagaacagagctggggttctcttcttcctgacgaccaaccagtgtttcagcagtgtttcagccgtggaactctttgtggtagagaagaagctcttcatacatgaatacatcagcggatactacagagtgtcatcttatttccttggaaaactgttatctgatttattacccatgaggatgttaccaagtattatatttacctgtatagtgtacttcatgttaggattgaagccaaaggcagatgccttcttcgttatgatgtttacccttatgatggtggcttattcagccagttccatggcactggccatagcagcaggtcagagtgtggtttctgtagcaacacttctcatgaccatctgttttgtgtttatgatggtctgttggtcaatctcacaaccattgcatcttggctgtcatggcttcagtacttcagcattccacgatatggatttacggctttgcagcataatgaatttttgggacaaaacttctgcccaggactcaatgcaacaggaaacaatccttgtaactatgcaacatgtactggcgaagaatatttggtaaagcagggcatcgatctctcaccctggggcttgtggaagaatcacgtggccttggcttgtatgattgttattttcctcacaattgcctacctgaaattgttatttcttaaaaaatattcttaaatttccccttaattcagtatgatttatcctcacataaaaaagaagcactttgattgaagtattcaatcaagtttttttgttgttttctgttcccttgccatcacactgttgcacagcagcaattgttttaaagagatacatttttagaaatcacaacaaactgaattaaacatgaaagaacccaagacatcatgtatcgcatattagttaatctcctcagacagtaaccatggggaagaaatctggtctaatttattaatctaaaaaaggagaattgaattctggaaactcctgacaagttattactgtctctggcatttgtttcctcatctttaaaatgaataggtaggttagtagcccttcagtcttaatactttatgatgctatggtttgccattatttaataaatgacaaatgtattaatgctatactggaaatgtaaaattgaaaatatgttggaaaaaagattctgtcttatagggtaaaaaaagccaccgtgatagaaaaaaaatctttttgataagcacattaaagttaatagaacttactgatattcctgtctagtggtataatatctcaggaatcttggctgagggtttggaactgtgggtagagtagagggccaggagtccagtaatagaattcttgcaccatttctggaacattctagctctgggaggtcacgtaaccttcttggggtagttcagtggtttagtggtttataatccaggtgtgcgtcagaatcatctgaggaactttgctaaaatacaaaaatctggcctaagtagctccagatctaccttcataaaggaatctgaccactcctggatttggtaatttccaagttctgaaaattttacttaggatttaataactattaacatctgtccctacataggttttctttcctacttatataccttatgttctcttcattctaaccttcatcagtaatagggaaatgttttaattttatttttttagttgaagggtaatgtaccaaaaaatatagttcagtgaattaaaatgaacacacatgtgcaaccatcaattcaggtcaagaaatagaagattgtagcacacaaaagcctactcagccattctcccagtcactacttccttccttacccctgggttatttttgaaatgacacttgatgtatttccctctgttgctgttatgagaacattgctacagccaagtgttgtgtttctgtgtgcataggttgatacttaattatctccccactttttaataaacttttaatttggaaataattttagattgacagaaaagttgcaaagatagtgaggaaagttcctgtctactctttgctcagcttcccttaatgttaacattttatatagcaagatgcatttgtcaaagctaacaagttaacattggtacaatcactgttaattaaactgcacacaatattcagatttcaccacttttccactaatattctttcattgttctaggattcaattcaggagaccacatttcatctagccctcttttttaaaagtaaatacttttcagcacttacaggagttaactgagctggggcatcatggtgtatagacgccctgacactggtcatcttggaattcatttagtttgtcagtgggtgccctgacattctgtcacaacatcaatttgggaacatggcattatatttttatctttgaacttttttctttttggatgacatttgattaatgcgtcatcttggaacacattatcttttttcttggttatgtgatcaggaagattaatcagtttttcctgttcttggtataattcctgcttttcacatacctgtcccttacagttctctatatatacccttcccttattacacagagagaaatatctatctatactttttacacaaaatatacttcaaaagaaacaaaacagccacaattattaactttttaaataaatgagaatttaattatatccta

SEQ ID NO: 92138 - DNA, 1836 bp, Artificial Sequence
  derived and/or modified sequence
atgagcagcagcaacgtggaggtgttcatccccgtgagccagggcaacaccaacggcttccccgccaccgccagcaacgacctgaaggccttcaccgagggcgccgtgctgagcttccacaacatctgctacagagtgaagctgaagagcggcttcctgccctgcagaaagcccgtggagaaggagatcctgagcaacatcaacggcatcatgaagcccggcctgaacgccatcctgggccccaccggcggcggcaagagcagcctgctggacgtgctggccgccagaaaggaccccagcggcctgagcggcgacgtgctgatcaacggcgcccccagacccgccaacttcaagtgcaacagcggctacgtggtgcaggacgacgtggtgatgggcaccctgaccgtgagagagaacctgcagttcagcgccgccctgagactggccaccaccatgaccaaccacgagaagaacgagagaatcaacagagtgatccaggagctgggcctggacaaggtggccgacagcaaggtgggcacccagttcatcagaggcgtgagcggcggcgagagaaagagaaccagcatcggcatggagctgatcaccgaccccagcatcctgttcctggacgagcccaccaccggcctggacagcagcaccgccaacgccgtgctgctgctgctgaagagaatgagcaagcagggcagaaccatcatcttcagcatccaccagcccagatacagcatcttcaagctgttcgacagcctgaccctgctggccagcggcagactgatgttccacggccccgcccaggaggccctgggctacttcgagagcgccggctaccactgcgaggcctacaacaaccccgccgacttcttcctggacatcatcaacggcgacagcaccgccgtggccctgaacagagaggaggacttcaaggccaccgagatcatcgagcccagcaagcaggacaagcccctgatcgagaagctggccgagatctacgtgaacagcagcttctacaaggagaccaaggccgagctgcaccagctgagcggcggcgagaagaagaagaagatcaccgtgttcaaggagatcagctacaccaccagcttctgccaccagctgagatgggtgagcaagagaagcttcaagaacctgctgggcaacccccaggccagcatcgcccagatcatcgtgaccgtggtgctgggcctggtgatcggcgccatctacttcggcctgaagaacgacagcaccggcatccagaacagagccggcgtgctgttcttcctgaccaccaaccagtgcttcagcagcgtgagcgccgtggagctgttcgtggtggagaagaagctgttcatccacgagtacatcagcggctactacagagtgagcagctacttcctgggcaagctgctgagcgacctgctgcccatgagaatgctgcccagcatcatcttcacctgcatcgtgtacttcatgctgggcctgaagcccaaggccgacgccttcttcgtgatgatgttcaccctgatgatggtggcctacagcgccagcagcatggccctggccatcgccgccggccagagcgtggtgagcgtggccaccctgctgatgaccatctgcttcgtgttcatgatggtgtgctggagcatcagccagcccctgcacctgggctgccacggcttcagcaccagcgccttccacgacatggacctgagactgtgcagcatcatgaacttctgggacaagaccagcgcccaggacagcatgcagcaggagaccatcctggtgaccatgcagcacgtgctggccaagaacatctggtag

SEQ ID NO: 92139 - DNA, 681 bp, Artificial Sequence
  derived and/or modified sequence
atgagcagagagagcgacgtggaggcccagcagagccacggcagcagcgcctgcagccagccccacggcagcgtgacccagagccagggcagcagcagccagagccagggcatcagcagcagcagcaccagcaccatgcccaacagcagccagagcagccacagcagcagcggcaccctgagcagcctggagaccgtgagcacccaggagctgtacagcatcccccccgaggtgctggtgagcgtgggcaccgccggctacaacagagccgtggactgctggagcctgggcgtgatcctgttcatctgcctgagcggctacccccccttcagcgagcacagaacccaggtgagcctgaaggaccagatcaccagcggcaagtacaacttcatccccgaggtgtgggccgaggtgagcgagaaggccctggacctggtgaagaagctgctggtggtggaccccaaggccagattcaccaccgaggaggccctgagacacccctggctgcaggacgaggacatgaagagaaagttccaggacctgctgagcgaggagaacgagagcaccgccctgccccaggtgctggcccagcccagcaccagcagaaagagacccagagagggcgaggccgagggcgccgagaccaccaagagacccgccgtgtgcgccgccgtgctgtag

SEQ ID NO: 92140 - DNA, 492 bp, Artificial Sequence
  derived and/or modified sequence
atgagcagagagagcgacgtggaggcccagcagagccacggcagcagcgcctgcagccagccccacggcagcgtgacccagagccagggcagcagcagccagagccagggcatcagcagcagcagcaccagcaccatgcccaacagcagccagagcagccacagcagcagcggcaccctgagcagcctggagaccgtgagcacccaggagctgtacagcatccccgaggaccaggagcccgaggaccaggagcccgaggagcccacccccgccccctgggccagactgtgggccctgcaggacggcttcgccaacctgggcgacgaggacatgaagagaaagttccaggacctgctgagcgaggagaacgagagcaccgccctgccccaggtgctggcccagcccagcaccagcagaaagagacccagagagggcgaggccgagggcgccgagaccaccaagagacccgccgtgtgcgccgccgtgctgtag

SEQ ID NO: 92141 - DNA, 969 bp, Artificial Sequence
  derived and/or modified sequence
atgagcaagaccctgggcagcggcgcctgcggcgaggtgaagctggccttcgagagaaagacctgcaagaaggtggccatcaagatcatcagcaagagaaagttcgccatcggcagcgccagagaggccgaccccgccctgaacgtggagaccgagatcgagatcctgaagaagctgaaccacccctgcatcatcaagatcaagaacttcttcgacgccgaggactactacatcgtgctggagctgatggagggcggcgagctgttcgacaaggtggtgggcaacaagagactgaaggaggccacctgcaagctgtacttctaccagatgctgctggccgtgcagtacctgcacgagaacggcatcatccacagagacctgaagcccgagaacgtgctgctgagcagccaggaggaggactgcctgatcaagatcaccgacttcggccacagcaagatcctgggcgagaccagcctgatgagaaccctgtgcggcacccccacctacctggcccccgaggtgctggtgagcgtgggcaccgccggctacaacagagccgtggactgctggagcctgggcgtgatcctgttcatctgcctgagcggctacccccccttcagcgagcacagaacccaggtgagcctgaaggaccagatcaccagcggcaagtacaacttcatccccgaggtgtgggccgaggtgagcgagaaggccctggacctggtgaagaagctgctggtggtggaccccaaggccagattcaccaccgaggaggccctgagacacccctggctgcaggacgaggacatgaagagaaagttccaggacctgctgagcgaggagaacgagagcaccgccctgccccaggtgctggcccagcccagcaccagcagaaagagacccagagagggcgaggccgagggcgccgagaccaccaagagacccgccgtgtgcgccgccgtgctgtag

SEQ ID NO: 92142 - DNA, 835 bp, Artificial Sequence
  derived and/or modified sequence
atgtctcgggagtcggatgttgaggctcagcagtctcatggcagcagtgcctgttcacagccccatggcagcgttacccagtcccaaggctcctcctcacagtcccagggcatatccagctcctctaccagcacgatgccaaactccagccagtcctctcactccagctctgggacactgagctccttagagacagtgtccactcaggaactctattctattcctcctgaagttcttgtttctgttgggactgctgggtataaccgtgctgtggactgctggagtttaggagttattctttttatctgccttagtgggtatccacctttctctgagcataggactcaagtgtcactgaaggatcagatcaccagtggaaaatacaacttcattcctgaagtctgggcagaagtctcagagaaagctctggaccttgtcaagaagttgttggtagtggatccaaaggcacgttttacgacagaagaagccttaagacacccgtggcttcaggatgaagacatgaagagaaagtttcaagatcttctgtctgaggaaaatgaatccacagctctaccccaggttctagcccagccttctactagtcgaaagcggccccgtgaaggggaagccgagggtgccgagaccacaaagcgcccagctgtgtgtgctgctgtgttgtgaactccgtggtttgaacacgaaagaaatgtaccttctttcactctgtcatctttcttttctttgagtctgtttttttatagtttgtattttaattatgggaataattgctttttcacagtcactgatgtacaattaaaaacctgatggaacctgg

SEQ ID NO: 92143 - DNA, 718 bp, Artificial Sequence
  derived and/or modified sequence
gcaggtttagcgccactctgctggctgaggctgcggagagtgtgcggctccaggtgggctcacgcggtcgtgatgtctcgggagtcggatgttgaggctcagcagtctcatggcagcagtgcctgttcacagccccatggcagcgttacccagtcccaaggctcctcctcacagtcccagggcatatccagctcctctaccagcacgatgccaaactccagccagtcctctcactccagctctgggacactgagctccttagagacagtgtccactcaggaactctattctattcctgaggaccaagaacctgaggaccaagaacctgaggagcctacccctgccccctgggctcgattatgggcccttcaggatggatttgccaatcttggagatgaagacatgaagagaaagtttcaagatcttctgtctgaggaaaatgaatccacagctctaccccaggttctagcccagccttctactagtcgaaagcggccccgtgaaggggaagccgagggtgccgagaccacaaagcgcccagctgtgtgtgctgctgtgttgtgaactccgtggtttgaacacgaaagaaatgtaccttctttcactctgtcatctttcttttctttgagtctgtttttttatagtttgtattttaattatgggaataattgctttttcacagtcactgatgtacaattaaaaacctgatggaacctgg

SEQ ID NO: 92144 - DNA, 681 bp, Artificial Sequence
  derived and/or modified sequence
atgagtcgcgagagcgatgtagaggctcagcaaagccacggctcatccgcatgtagtcaacctcacgggagcgtgactcaatctcagggctctagttctcaaagccagggcatcagctcatccagcacatctaccatgccaaactccagtcagagcagccactctagttcaggtactctttcttctctcgaaacagtgagcactcaggagctgtatagcattcctcctgaggtattggtaagcgtagggaccgccggatataaccgagctgtggactgctggtccttaggggtgattctctttatctgtttgagtggctaccctccttttagtgagcatcgaactcaggtgtctctgaaggatcagattaccagtgggaagtacaattttatccccgaggtttgggctgaggtgtcagaaaaggctttagacctggtgaagaagctgttggtggttgaccccaaggcccgctttactactgaggaagctctgaggcatccttggctacaagatgaggacatgaagcgaaaatttcaagatctattgtccgaagagaacgagtcaacagcactgcctcaggtgctggcacagccttctacaagtcgcaagcggcctcgagagggtgaagccgagggggctgagaccaccaagcggcccgccgtgtgcgccgcggtactctag

SEQ ID NO: 92145 - DNA, 492 bp, Artificial Sequence
  derived and/or modified sequence
atgagccgtgaaagtgacgtagaagcgcaacagtctcacggctcctctgcatgctcccagccccacggcagcgtgacacagtcccagggctctagttcacagagccagggtataagtagttcatccacgtcaaccatgcccaacagcagccagtcaagccactcgagctctggtactctgagctcactggaaacagtgagtacccaggaattgtacagtatccctgaagaccaggagcctgaggaccaggagcccgaggaaccaaccccggctccttgggctcgcttgtgggcgctccaggacggttttgccaatctgggggacgaggacatgaaacgcaaattccaggatctgctctctgaagagaatgagagcactgctctgccacaggttttagcccaaccttcaacctcccgtaaaaggcctcgggaaggagaggccgagggggctgagaccactaaacgaccagccgtgtgtgcagctgtgctatag

SEQ ID NO: 92146 - DNA, 969 bp, Artificial Sequence
  derived and/or modified sequence
atgagcaaaactcttggatccggggcctgcggggaggtgaaactcgcctttgagagaaagacttgtaaaaaggttgccattaagataattagcaaaagaaagtttgctatcggcagcgccagagaagccgacccagccctgaacgtcgaaactgaaattgagatactgaaaaagttgaaccatccttgtattattaagatcaagaattttttcgatgcagaggactattatatagttctggagcttatggaaggcggggaattgtttgacaaagttgtgggcaataagagactcaaggaggccacatgcaaactgtatttctaccagatgctgctcgccgtacagtatctacatgagaacggcattatccatagggacctgaaacccgaaaatgtactcctgtcttcccaggaggaagactgcctgataaaaatcaccgatttcggccacagtaaaatcctgggggaaacaagcttgatgcgaacactatgcgggaccccaacatacctagcgcctgaagtgctggttagcgttgggaccgccgggtacaatcgggccgtagactgctggtccttgggcgtgatcctgtttatttgcttaagcggatatcccccctttagcgagcacaggacacaggtgtctcttaaggatcagataacaagcggtaagtataacttcatacccgaagtatgggcagaggtgtcagaaaaggcactcgatctggtcaagaagctgctggtggtggaccctaaagctagatttacaacagaggaagctcttaggcacccatggctccaggatgaggacatgaagcgaaagtttcaggacctgctgagcgaagagaacgagtccaccgctctgccccaggtattagcacaaccctcgacaagccgcaagcgcccacgcgagggggaggcagaaggggctgaaaccacaaagcggcctgctgtgtgcgccgccgttctgtag

SEQ ID NO: 92147 - DNA, 681 bp, Artificial Sequence
  derived and/or modified sequence
atgagccgggagagtgatgtggaggcccagcagagccacggcagcagcgcctgcagccagccccacggctctgtgacccagagccagggcagcagcagccagagccagggcatcagcagcagcagcaccagcaccatgcccaacagcagccagagcagccacagcagcagcggcaccctgagcagcctggagaccgtgtccacccaggagctgtacagcatccccccagaggtgctggtgtctgtgggcacagctggctacaacagagctgtggactgctggagcctgggcgtcatcctcttcatctgcctgagcggctacccacccttcagcgagcacaggacccaggtgtccctgaaggaccagatcaccagcggcaagtacaacttcatccctgaggtgtgggccgaggtgtctgagaaggccctggacctggtgaagaagctgctggtggtggaccccaaggcccgcttcaccacagaggaggccctgcggcacccctggctgcaggatgaggacatgaagaggaagttccaggacctgctgtctgaagaaaatgaaagcacagccctgccccaggtgctggcccagcccagcaccagcaggaagaggccccgggagggggaggccgagggcgctgagaccaccaagaggcctgctgtgtgtgccgctgtgctgtag

SEQ ID NO: 92148 - DNA, 492 bp, Artificial Sequence
  derived and/or modified sequence
atgagccgggagagtgatgtggaggcccagcagagccacggcagcagcgcctgcagccagccccacggctctgtgacccagagccagggcagcagcagccagagccagggcatcagcagcagcagcaccagcaccatgcccaacagcagccagagcagccacagcagcagcggcaccctgagcagcctggagaccgtgtccacccaggagctgtacagcatccctgaggaccaggagcctgaggaccaggagcctgaggagcccaccccagccccctgggcccggctgtgggccctgcaggacggctttgccaacctgggagatgaggacatgaagaggaagttccaggacctgctgtctgaggagaatgaaagcacagccctgccccaggtgctggcccagcccagcaccagcaggaagaggccccgggagggggaggccgagggcgctgagaccaccaagaggcctgctgtgtgtgccgctgtgctgtag

SEQ ID NO: 92149 - DNA, 969 bp, Artificial Sequence
  derived and/or modified sequence
atgagcaagaccctgggcagcggggcctgtggggaggtgaagctggcctttgagaggaagacctgcaagaaggtggccatcaagatcatcagcaagaggaagtttgccatcggcagcgcccgggaggccgaccctgccctgaatgtggagacagaaattgagatcctgaagaagctgaaccacccctgcatcatcaagatcaagaacttctttgatgctgaggactactacatcgtgctggagctgatggagggcggggagctgtttgacaaggtggtgggcaacaagaggctgaaggaggccacctgcaagctgtacttctaccagatgctgctggccgtgcagtacctgcatgaaaatggcatcatccaccgggacctgaagccagaaaatgtgctgctgagcagccaggaggaggactgcctgatcaagatcacagactttggccacagcaagatcctgggggagaccagcctgatgaggaccctgtgtggcacccccacctacctggcccctgaggtgctggtgtctgtgggcacagctggctacaacagagctgtggactgctggagcctgggcgtcatcctcttcatctgcctgagcggctacccacccttcagcgagcacaggacccaggtgtccctgaaggaccagatcaccagcggcaagtacaacttcatccctgaggtgtgggccgaggtgtctgagaaggccctggacctggtgaagaagctgctggtggtggaccccaaggcccgcttcaccacagaggaggccctgcggcacccctggctgcaggatgaggacatgaagaggaagttccaggacctgctgtctgaagaaaatgaaagcacagccctgccccaggtgctggcccagcccagcaccagcaggaagaggccccgggagggggaggccgagggcgctgagaccaccaagaggcctgctgtgtgtgccgctgtgctgtag

SEQ ID NO: 92150 - DNA, 681 bp, Artificial Sequence
  derived and/or modified sequence
atgagccgggagagcgacgtggaggcccagcagagccacggcagctctgcttgctcacaaccccacggctcagtgacacagagtcaggggagctcaagccaatcccaaggtatttcctctagctccacatccaccatgccaaatagctctcagagctcccattcatcttccgggacactgagcagccttgagactgtgtcgactcaggaactgtatagtattcctcccgaggtgctggtcagcgtgggaacggcagggtacaaccgcgctgtggactgttggtccttgggcgtgatcttgttcatctgcttgagcggttatccccctttctctgagcataggacccaggttagcctcaaggatcagattacatccggtaaatataacttcatcccagaggtttgggccgaggtcagcgaaaaggcgctggatttggtgaaaaaactacttgtggttgacccaaaggctaggttcaccacagaagaggctctgagacacccctggctgcaggatgaggatatgaaaagaaaattccaggacctcctcagtgaggagaacgagagcacagccctcccgcaggtcctggctcagccaagtacttctcgtaaacggcccagggaaggagaagctgaaggtgccgaaaccacaaagagacccgccgtgtgtgctgccgtgctgtag

SEQ ID NO: 92151 - DNA, 492 bp, Artificial Sequence
  derived and/or modified sequence
atgagccgggagagcgacgtggaggcccagcagagccacggcagctctgcatgctcacagccccacggctcggtaacccagtcccagggatcctcaagtcagagtcagggcattagcagctcttcaacatcaacaatgcctaatagttctcagtcgagccattcttcaagtggaaccctatccagtctcgaaactgtgagcactcaggagctgtacagtatacctgaggaccaggagcctgaggaccaagagcctgaggaacctacccccgctccttgggccaggctctgggcgctgcaggatggtttcgccaatcttggtgacgaagatatgaagcgaaaatttcaggacctgctgagtgaagaaaatgagtctaccgccctgccccaagtactggcccagccttcaactagccggaaaaggccccgagaaggcgaggccgagggcgcagaaacaacaaagcgtccggccgtgtgtgccgctgtgttgtag

SEQ ID NO: 92152 - DNA, 969 bp, Artificial Sequence
  derived and/or modified sequence
atgagcaagaccctgggcagcggcgcctgcggcgaggtgaagctggcattcgaaagaaagacctgcaaaaaggtggcgattaagattatctcgaagcgcaagttcgctatcggcagtgctcgagaagctgacccggcccttaatgtggagacagagatagagatcctcaaaaagctcaaccacccctgtattatcaagataaaaaacttctttgatgccgaagattattacatagtgctggagctgatggaaggtggcgaactgtttgacaaggtagttggtaacaagcgtttgaaagaagccacctgcaagctctatttttatcagatgctgttggcagtccagtatctgcacgagaatgggattatccaccgggatcttaagcccgaaaatgttctgctgagtagccaagaggaagactgcctcatcaagatcacagacttcggccattctaagatccttggcgagacctccctcatgcggacattatgcggaacacccacatatctcgcacccgaggtcctggtgtcagtcggtaccgctggatataaccgtgctgttgactgttggagtcttggtgtgatcctgtttatatgcctgtcaggttacccacccttttcggagcaccgtacccaagtgagtttaaaggaccagatcacctccggcaagtacaacttcatccctgaggtttgggccgaggtctcagagaaggcccttgacctagtcaagaaactgctagtcgtggacccaaaggctaggttcaccaccgaagaggccctgagacatccctggctgcaggacgaggacatgaaacgcaagttccaagacctgctcagcgaggagaacgagagcaccgcactcccccaggtgctcgcacaaccaagtacatcccgcaaaagacccagggaaggagaagccgagggcgctgaaaccactaagagacccgctgtctgtgccgctgtcctgtag

SEQ ID NO: 92153 - DNA, 681 bp, Artificial Sequence
  derived and/or modified sequence
atgtcccgagaatcagacgttgaggcccaacagtcccacggctcatcggcctgtagtcaaccacacggtagtgtgactcagtctcagggaagctccagccagtcccaaggcatcagcagcagtagcacaagtacaatgccaaacagcagccagtcctctcatagcagcagcggaacgctctcatccctcgaaacagtgagtactcaggagctttatagcattccacccgaagtcctggttagtgtgggaaccgctggatacaatcgagccgttgattgctggtccctcggggtgatactgtttatatgccttagcggatatccgccattcagtgagcatcggacgcaggtgtctcttaaggaccagataacaagcggcaagtataattttatccccgaagtgtgggctgaggtgagtgaaaaagctctcgatctggtgaaaaagctcctggtggttgatcctaaagcgaggttcacaacggaggaagcgctgcggcacccttggctgcaagatgaggacatgaaaaggaaattccaggatctactttcagaagagaatgaatctacagcccttccccaggtgctggcgcagccatctacgtctcgaaagcggccaagggagggcgaagccgagggagcagaaacaactaaacgaccggcagtgtgcgccgctgtgctttag

SEQ ID NO: 92154 - DNA, 492 bp, Artificial Sequence
  derived and/or modified sequence
atgagtcgggagagcgacgtggaagctcagcagtctcatgggagttcagcctgttcacagcctcacggcagcgtaactcagagccagggcagcagctcccagtcccaaggtatatcaagctcctcaacctctacaatgccaaattctagccagtcttcccatagtagctcaggaaccctatctagcctagagacagtctcaacccaggaactgtacagtattcccgaagatcaagagcctgaagaccaagagcccgaggagcctactccagctccctgggctcgcctctgggcactgcaggacgggttcgctaatttgggagacgaggacatgaaacggaaattccaggacctgctgagtgaggagaacgaatctaccgccctgccccaggttctggcccagccttccacctcaaggaaacgtccccgagagggtgaggcggagggagccgagaccacgaagcgacccgctgtatgcgcagccgtactctag

SEQ ID NO: 92155 - DNA, 969 bp, Artificial Sequence
  derived and/or modified sequence
atgtctaagacgctgggaagcggcgcttgtggcgaggttaaactagcctttgagcggaaaacatgtaaaaaggtggctatcaaaattatcagcaagaggaaattcgcgattggatcagccagagaggcagaccctgccttgaatgttgagacagaaatcgaaattctgaagaagttgaatcatccgtgcattattaagattaagaatttcttcgacgcagaggattattatatagtgctggaacttatggaaggcggagaactgttcgacaaagtggtgggcaataagagactgaaagaagccacctgtaaactctatttttaccagatgttactagccgtgcagtatttgcatgaaaacggcattattcaccgtgacctcaagcctgaaaacgtgttgttgtcctcacaggaagaggattgtctgatcaaaattactgactttggacatagtaagattctcggtgaaacatctctgatgcgaaccctgtgcgggactcccacatacctggcaccggaggtcctggtcagcgtaggaacagccggatacaatagagccgtagactgttggagtcttggcgtgatcctctttatctgcctgtccggctacccaccgttctcggaacacagaactcaggtgtcactcaaggatcagataacatctggcaagtacaacttcattcccgaagtctgggcagaggtgtctgagaaggccttggacttggtaaagaaattgctggtggtggatcccaaggctaggttcaccactgaggaggccctccgtcacccgtggctgcaggacgaggatatgaagaggaagttccaagatctgcttagtgaggagaacgagtcgaccgctttaccacaggttctggcccagccctctactagccgaaagcgtccgagagaaggggaagccgagggagctgagaccacgaagcggccagccgtctgtgcggctgttctgtag

SEQ ID NO: 92156 - protein, 215 aa, Artificial Sequence
  derived and/or modified sequence
MAVEGGMKCVKFLLYVLLLAFCGATPGSLLPVVIIAVGVFLFLVAFVGCCGACKENYCLMITFAIFLSLIMLVEVAAAIAGYVFRDKVMSEFNNNFRQQMENYPKNNHTASILDRMQADFKCCGAANYTDWEKIPSMSKNRVPDSCCINVTVGCGINFNEKAIHKEGCVEKIGGWLRKNVLVVAAAALGIAFVEVLGIVFACCLVKSIRSGYEVM

SEQ ID NO: 92157 - DNA, 648 bp, Artificial Sequence
  derived and/or modified sequence
atggccgtggagggcgggatgaaatgtgtcaagttcctgctctatgtcctcttgctggcattttgtggagctacacccggatctctcttgccagttgtgataattgctgtaggagtgtttcttttcctggtggcttttgttggctgttgtggcgcatgcaaggagaactactgccttatgattaccttcgcgatattcctctcactgatcatgttagtggaagttgcagcggctattgccgggtatgtgttccgggacaaggtgatgagcgagttcaataacaattttaggcagcaaatggagaattatccaaagaataaccatacagcgtcgatcctcgaccgcatgcaggccgactttaaatgctgcggggcggcgaactatacagactgggaaaagattccatcaatgagcaagaatcgcgtgccagatagctgctgcatcaacgttaccgtgggctgtggcattaatttcaacgagaaagcaatccataaagagggctgtgtggaaaaaatcgggggctggctacgtaaaaacgtactcgtggtagctgccgctgccctaggcattgcattcgtcgaggtgttagggatagtcttcgcatgttgcttggtgaaatcaattcgctctggctacgaggtcatgtag

SEQ ID NO: 92158 - DNA, 648 bp, Artificial Sequence
  derived and/or modified sequence
atggctgtggagggcggcatgaagtgtgtgaagttcctgctgtatgtgctgctgctggccttctgtggggccaccccaggcagcctgctgcctgtggtgatcatcgctgtgggcgtcttcctgttcctggtggcctttgtgggctgctgcggggcctgcaaggagaactactgcctgatgatcacctttgccatcttcctgagcctcatcatgctggtggaggtggccgccgccatcgccggctacgtgttccgggacaaggtgatgtctgagttcaacaacaacttccggcagcagatggagaactaccccaagaacaaccacacagccagcatcctggacaggatgcaggccgacttcaagtgctgcggggccgccaactacacagactgggagaagatccccagcatgagcaagaacagagtgcctgacagctgctgcatcaacgtgacagtgggctgcggcatcaacttcaatgagaaggccatccacaaggagggctgtgtggagaagattggaggctggctgaggaagaatgtgctggtggtggccgccgccgccctgggcatcgcctttgtggaggtgctgggcatcgtgtttgcctgctgcctggtgaagagcatccgcagcggctatgaggtgatgtag

SEQ ID NO: 92159 - DNA, 648 bp, Artificial Sequence
  derived and/or modified sequence
atggccgtggagggcggcatgaagtgcgtgaagttcctgctgtacgttttacttcttgctttttgcggagcaaccccgggcagtctcttgcccgtcgtgattatagccgtcggagtcttcctgttcctggtggcctttgtgggctgttgcggcgcttgtaaagaaaactactgcctcatgatcactttcgctattttcctgtcattaatcatgctcgtcgaagtggcagccgccatcgctggatacgtattccgtgataaggtgatgtccgaattcaacaataactttcggcagcaaatggaaaactaccctaaaaacaatcatacagcttctatccttgaccgcatgcaggcggattttaagtgctgtggagcagctaattatacagactgggaaaaaattccatcaatgagcaaaaatcgagtgcctgattcatgctgcattaatgtaactgttgggtgcggaattaactttaacgaaaaggcaattcacaaagaggggtgcgttgaaaagatcggggggtggctcagaaaaaatgtacttgtggtcgccgcagcagcattaggcattgcattcgtcgaggtgctggggatcgtttttgcctgttgtctggtcaagtcaatcagaagcggttacgaagtaatgtag

SEQ ID NO: 92160 - DNA, 648 bp, Artificial Sequence
  derived and/or modified sequence
atggccgtcgagggaggcatgaaatgtgtcaaatttctactgtatgtcttactcctcgccttctgtggggctactcctggcagtctcctgccagttgtaataatcgccgtgggggtcttcctgttcttggtggctttcgtaggttgttgcggcgcatgtaaagagaactattgtttaatgataacattcgcaatatttctttctctaatcatgttggtggaagtggctgctgccatagccggatacgtcttcagggacaaggtcatgtcagagttcaacaataacttcaggcagcagatggaaaattaccccaaaaacaaccacacagcatccatccttgatcggatgcaggccgatttcaagtgctgcggcgcagccaattataccgactgggaaaagatcccctccatgagcaaaaatcgagtgcctgactcctgttgcatcaacgtaactgttgggtgcggcatcaactttaatgagaaggctatccacaaagaaggatgcgtggagaagatcggaggttggctgcggaaaaatgtcctcgtggtcgcagccgctgctttgggaattgctttcgtggaagttctcggcattgtgttcgcatgctgcctcgtcaagagcatccggtcaggatacgaagtgatgtag

SEQ ID NO: 92161 - DNA, 682 bp, Artificial Sequence
  derived and/or modified sequence
cggcagccatggcggtggaaggaggaatgaaatgtgtgaagttcttgctctacgtcctcctgctggccttttgcggggctacccctggctctctgttgccagtggtcatcatcgcagtgggtgtcttcctcttcctggtggcttttgtgggctgctgcggggcctgcaaggagaactattgtcttatgatcacgtttgccatctttctgtctcttatcatgttggtggaggtggccgcagccattgctggctatgtgtttagagataaggtgatgtcagagtttaataacaacttccggcagcagatggagaattacccgaaaaacaaccacactgcttcgatcctggacaggatgcaggcagattttaagtgctgtggggctgctaactacacagattgggagaaaatcccttccatgtcgaagaaccgagtccccgactcctgctgcattaatgttactgtgggctgtgggattaatttcaacgagaaggcgatccataaggagggctgtgtggagaagattgggggctggctgaggaaaaatgtgctggtggtagctgcagcagcccttggaattgcttttgtcgaggttttgggaattgtctttgcctgctgcctcgtgaagagtatcagaagtggctacgaggtgatgtaggggtctggtctcctcagcctcctcat

SEQ ID NO: 92162 - DNA, 648 bp, Artificial Sequence
  derived and/or modified sequence
atggccgtggagggcggcatgaagtgcgtgaagttcctgctgtacgtgctgctgctggccttctgcggcgccacccccggcagcctgctgcccgtggtgatcatcgccgtgggcgtgttcctgttcctggtggccttcgtgggctgctgcggcgcctgcaaggagaactactgcctgatgatcaccttcgccatcttcctgagcctgatcatgctggtggaggtggccgccgccatcgccggctacgtgttcagagacaaggtgatgagcgagttcaacaacaacttcagacagcagatggagaactaccccaagaacaaccacaccgccagcatcctggacagaatgcaggccgacttcaagtgctgcggcgccgccaactacaccgactgggagaagatccccagcatgagcaagaacagagtgcccgacagctgctgcatcaacgtgaccgtgggctgcggcatcaacttcaacgagaaggccatccacaaggagggctgcgtggagaagatcggcggctggctgagaaagaacgtgctggtggtggccgccgccgccctgggcatcgccttcgtggaggtgctgggcatcgtgttcgcctgctgcctggtgaagagcatcagaagcggctacgaggtgatgtag

SEQ ID NO: 92163 - protein, 170 aa, Artificial Sequence
  derived and/or modified sequence
MPGEVQASYLKSQSKLSDEGRLEPRKFHCKGVKVPRNFRLLEELEEGQKGVGDGTVSWGLEDDEDMTLTRWTGMIIGPPRTIYENRIYSLKIECGPKYPEAPPFVRFVTKINMNGVNSSNGVVDPRAISVLAKWQNSYSIKVVLQELRRLMMSKENMKLPQPPEGQCYSN

SEQ ID NO: 92164 - DNA, 513 bp, Artificial Sequence
  derived and/or modified sequence
atgcccggcgaggtgcaggccagctacctgaagagccagagcaagctgagcgacgagggcagactggagcccagaaagttccactgcaagggcgtgaaggtgcccagaaacttcagactgctggaggagctggaggagggccagaagggcgtgggcgacggcaccgtgagctggggcctggaggacgacgaggacatgaccctgaccagatggaccggcatgatcatcggcccccccagaaccatctacgagaacagaatctacagcctgaagatcgagtgcggccccaagtaccccgaggccccccccttcgtgagattcgtgaccaagatcaacatgaacggcgtgaacagcagcaacggcgtggtggaccccagagccatcagcgtgctggccaagtggcagaacagctacagcatcaaggtggtgctgcaggagctgagaagactgatgatgagcaaggagaacatgaagctgccccagccccccgagggccagtgctacagcaactag

SEQ ID NO: 92165 - DNA, 513 bp, Artificial Sequence
  derived and/or modified sequence
atgccaggcgaggtgcaggccagttatctcaagtcgcagagcaagctatccgatgaggggcgcctcgagcccaggaagtttcattgtaagggtgtgaaggtccctcggaacttcaggctgcttgaagaactcgaggaaggacaaaaaggagtaggcgacggaactgtgtcatgggggcttgaagatgacgaggatatgaccctcacgcgatggaccggtatgataatcggccctccacgtacaatctacgagaaccgaatttatagtctgaagattgagtgcggaccaaagtatcctgaggccccccctttcgtgagattcgtcacgaagataaacatgaatggcgtcaacagttctaacggcgtggtagatccacgggccatttcagtcctagctaagtggcagaattcctactccatcaaagtagtgctccaggagctacgacgcttgatgatgagcaaggaaaacatgaagctgccacagcctcctgaaggccagtgctactccaattag

SEQ ID NO: 92166 - DNA, 513 bp, Artificial Sequence
  derived and/or modified sequence
atgcctggcgaggtgcaagcatcttacctgaagtcccagtctaaactgtctgatgagggacgccttgagcccagaaaattccattgcaaaggagtgaaagttcctcgaaactttagactgctagaagaattggaggaggggcagaagggtgtcggtgacggcactgttagctgggggctcgaagatgacgaagatatgactcttactcgctggaccggcatgatcataggacctcccagaactatttatgagaataggatctacagcttgaaaattgagtgcgggcccaagtaccctgaagcccctcccttcgtgcgtttcgttacaaaaataaacatgaatggtgtgaatagctcgaatggggtagtggacccccgcgctatctccgtgctggctaagtggcagaacagttactcgattaaggttgtcctgcaggaattgagaagactgatgatgagtaaagaaaatatgaaactgccacagcctccagaaggtcagtgttatagcaattag

SEQ ID NO: 92167 - DNA, 513 bp, Artificial Sequence
  derived and/or modified sequence
atgcctggagaggtgcaggccagctacctgaagagccagagcaagctgagtgatgagggccgcctggagcccaggaagttccactgcaagggcgtgaaggtgcccaggaacttccggctgctggaggagctggaggagggccagaagggcgtgggagatggcaccgtgtcctggggcctggaggatgatgaggacatgaccctgacccgctggacaggcatgatcatcggcccccccaggaccatctatgagaaccgcatctacagcctgaagattgaatgtggccccaagtacccagaggcccccccatttgtgcgctttgtgaccaagatcaacatgaatggagtgaacagcagcaatggagtggtggacccccgggccatctctgtgctggccaagtggcagaacagctacagcatcaaggtggtgctgcaggagctgcggcggctgatgatgagcaaagaaaacatgaagctgccccagcccccagagggccagtgctacagcaactag

SEQ ID NO: 92168 - DNA, 513 bp, Artificial Sequence
  derived and/or modified sequence
atgcccggcgaggtgcaggccagctacctgaagagccagagcaagctgtctgacgagggacggctggaaccccggaagttccactgtaaaggggttaaggtgcctcggaacttcagactgctagaagaactggaggagggtcagaagggcgtcggcgatgggacagtcagttgggggcttgaggatgacgaggacatgacgcttacacgttggaccggcatgattatcggcccaccgcggacaatttatgagaataggatatattccctgaagatagagtgtggcccgaagtatccagaggccccaccctttgtgaggttcgtcaccaagattaacatgaacggggtaaactccagcaacggagtggtggacccaagagccattagcgtcctggctaagtggcagaactcttactccatcaaggtggtgcttcaggagctcagaaggcttatgatgagtaaagagaatatgaaacttcctcagccccccgaaggccaatgctatagtaattag

SEQ ID NO: 92169 - DNA, 513 bp, Artificial Sequence
  derived and/or modified sequence
atgcccggcgaggtgcaggccagctacctgaagagccagagcaagctatctgacgaggggcgcctcgaaccgcggaaatttcactgtaagggggttaaagttcctcgtaattttagactgctggaagaacttgaggaaggccagaagggcgtgggcgatggcaccgtaagttggggtttagaggacgatgaagatatgacgctgacacggtggactgggatgataatcgggcccccacgcacaatatacgagaatcgcatctattcactgaagatcgaatgcggtcctaaataccctgaggccccaccattcgtacggtttgtgacgaaaatcaatatgaacggcgtaaatagcagtaacggggtcgttgaccctcgggctatcagtgtcctggcaaagtggcaaaactcttacagcattaaagttgttttacaggagctgcgccgcctcatgatgagcaaggaaaacatgaagttacctcagccaccggagggtcagtgctacagtaactag

SEQ ID NO: 92170 - DNA, 513 bp, Artificial Sequence
  derived and/or modified sequence
atgcccggtgaggtccaggcgagctacctcaagagccagagcaaactttcagacgaaggccgacttgagccacgcaaatttcattgcaagggcgtcaaggtccctagaaattttcgcctgcttgaagaactggaggaggggcaaaagggcgttggcgatgggacagtgagttgggggcttgaagatgatgaggatatgaccctgacgaggtggactgggatgatcatcgggccaccacgcacaatttacgagaacaggatatactctttgaaaattgagtgcgggcctaaatatccggaagctcctccgtttgttcgcttcgtaactaagatcaatatgaatggggttaactcttccaacggagtggtcgatcctagagcgatttcagtcctggcaaagtggcagaactcatactctatcaaagtcgtgttacaggagctccgaaggctgatgatgtccaaggaaaacatgaaactcccacagccgccagagggacaatgttacagtaactag

SEQ ID NO: 92171 - DNA, 513 bp, Artificial Sequence
  derived and/or modified sequence
atgccaggggaggtgcaagcctcctaccttaaatcccagtccaaattaagcgacgagggacgactcgagccccgtaagtttcactgcaagggtgtgaaggttccaagaaatttccggcttcttgaggaactggaggaagggcagaaaggcgttggagacggaactgtaagctggggattagaagatgatgaagacatgacactgaccagatggacaggaatgattattggaccaccccgaaccatttacgaaaatcgcatctactctctgaagatcgagtgtgggccaaaataccccgaggcaccgccatttgtgcgcttcgttactaaaattaacatgaatggtgttaatagcagcaacggggttgtcgatcctcgggcaatatcagtcctcgccaagtggcagaacagctattcaattaaggttgtgctgcaggagttacgaaggctgatgatgtcaaaagagaacatgaaactgcctcagcccccagaagggcaatgttattcaaattag

SEQ ID NO: 92172 - DNA, 2536 bp, Artificial Sequence
  derived and/or modified sequence
gcctaacctcttcctgcgatgagctcggcacgggaattattattgtcaattttacttgcaagaagtttcctacaagagccaaggaatccatgcgagtaaacatttacgggcaccatagataaaaggcttgtgttttaatcctcatcctctccacctgttagctctgagtctcagttttctcatctctaaaaatggggatattcacaggagttgctgcatcgagttgtgaggattaaaagttggatgtaacggcttggtaattatgagctcttctagtgtcccttcctcttccctgtgcccaaggggttttaggaaagcattttatctccacagcaatcctatgaggttgatactactatcctcatagaaggggaaactgatgccaggagaggttcaagcgtcttacctgaagtcacaaagcaaactgagtgatgaaggaagacttgaacctagaaaatttcactgcaaaggagtaaaagtccctcgcaatttccgactgttggaagaactcgaagaaggccagaaaggagtaggagatggcacagttagctggggtctagaagatgacgaagacatgacacttacaagatggacagggatgataattgggcctccaagaacaatttatgaaaaccgaatatacagccttaaaatagaatgtggacctaaatacccagaagcacccccctttgtaagatttgtaacaaaaattaatatgaatggagtaaatagttctaatggagtggtggacccaagagccatatcagtgctagcaaaatggcagaattcatatagcatcaaagttgtcctgcaagagcttcggcgcctaatgatgtctaaagaaaatatgaaactccctcagccgcccgaaggacagtgttacagcaattaatcaaaaagaaaaaccacaggcccttccccttccccccaattcgatttaatcagtcttcattttccacagtagtaaattttctagatacgtcttgtagacctcaaagtaccggaaaggaagctcccattcaaaggaaatttatcttaagatactgtaaatgatactaattttttgtccatttgaaatatataagttgtgctataacaaatcatcctgtcaagtgtaaccactgtccacgtagttgaacttctgggatcaagaaagtctatttaaattgattcccatcataactggtggggcacatctaactcaactgtgaaaagacacatcacacaatcaccttgctgctgattacacggcctggggtctctgccttctccccttaccctcccgcctcccaccctccctgcaacaacagccctctagcctggggggcttgttagagtagatgtgaaggtttcaggtcgcagcctgtgggactactgctaggtgtgtggggtgtttcgcctgcacccctggtttctttaagtcttaagtgatgccccttccaaaccatcatcctgtccccacgctcctccactcccgcccttggccgaagcatagattgtaacccctccactcccctctgagattggccttcggtgaggaattcagggctttccccatatcttctctcccccacctttatcgaggggtgctgctttttctccctcctcctcaagttcctttttgcaccgtcaccacccaacaccttccatgacacttccttgctttggccagaagccatcaggtaaggttggaaagagcctctgacctcccttgtttagttttggaaccatactcactcactctccaccagcctgggaaatgaatattgggtcctcagccctgccaccctctgctgtcatcagctgatgcattgtttttagctcaggttttgataaggtgaaaagaatagtcaccagggttactcagacctgccagctctcggagtccttggtggttgaacttggagaaagaccgcatgaagatacttgtaagcacacatgatccctctgaattgttttactttcctgtaactgcttttgcttttaaaaattgaagaagttttaaacagggctttcatttggtcatccttgcaatccattggggtctagtttggaatctgacaactggaacaaaaagaaccttgaatccggtgcatgccttggttttggtgctgctgctgcttcccaagatcctcagcagggattaagaaggaacccggtgtgcacagcagatccccgaaattggtgggcttgacctcctggcaaattgctgcgtctttccacttgctgttcaggaccactaaatgctgaaatgtggatgcataccgaaataaaagcaattcattgtgtactaaaggttttttttttttttttaatttagtatttgtgtaaaaccaccttttgaagcagcaactatcaagtctgaaaagcaattgatgtttccattaatctttttctggggggaaaaccttagttctaaggatttaacatcctgtaagtgaagtttaacataacagtattccataagcagcctttttattgtcagaccattgcctgattttaatataataaaaaaaaagtgtgcgttaatatttaa

SEQ ID NO: 92173 - DNA, 2459 bp, Artificial Sequence
  derived and/or modified sequence
gcctaacctcttcctgcgatgagctcggcacgggaattattattgtcaattttacttgcaagaagtttcctacaagagccaaggaatccatgcgagtaaacatttacgggcaccatagataaaaggcttgtgttttaatcctcatcctctccacctgttagctctgagtctcagttttctcatctctaaaaatggggatattcacaggagttgctgcatcgagttgtgaggattaaaagttggatgtaacggcttgcaatcctatgaggttgatactactatcctcatagaaggggaaactgatgccaggagaggttcaagcgtcttacctgaagtcacaaagcaaactgagtgatgaaggaagacttgaacctagaaaatttcactgcaaaggagtaaaagtccctcgcaatttccgactgttggaagaactcgaagaaggccagaaaggagtaggagatggcacagttagctggggtctagaagatgacgaagacatgacacttacaagatggacagggatgataattgggcctccaagaacaatttatgaaaaccgaatatacagccttaaaatagaatgtggacctaaatacccagaagcacccccctttgtaagatttgtaacaaaaattaatatgaatggagtaaatagttctaatggagtggtggacccaagagccatatcagtgctagcaaaatggcagaattcatatagcatcaaagttgtcctgcaagagcttcggcgcctaatgatgtctaaagaaaatatgaaactccctcagccgcccgaaggacagtgttacagcaattaatcaaaaagaaaaaccacaggcccttccccttccccccaattcgatttaatcagtcttcattttccacagtagtaaattttctagatacgtcttgtagacctcaaagtaccggaaaggaagctcccattcaaaggaaatttatcttaagatactgtaaatgatactaattttttgtccatttgaaatatataagttgtgctataacaaatcatcctgtcaagtgtaaccactgtccacgtagttgaacttctgggatcaagaaagtctatttaaattgattcccatcataactggtggggcacatctaactcaactgtgaaaagacacatcacacaatcaccttgctgctgattacacggcctggggtctctgccttctccccttaccctcccgcctcccaccctccctgcaacaacagccctctagcctggggggcttgttagagtagatgtgaaggtttcaggtcgcagcctgtgggactactgctaggtgtgtggggtgtttcgcctgcacccctggtttctttaagtcttaagtgatgccccttccaaaccatcatcctgtccccacgctcctccactcccgcccttggccgaagcatagattgtaacccctccactcccctctgagattggccttcggtgaggaattcagggctttccccatatcttctctcccccacctttatcgaggggtgctgctttttctccctcctcctcaagttcctttttgcaccgtcaccacccaacaccttccatgacacttccttgctttggccagaagccatcaggtaaggttggaaagagcctctgacctcccttgtttagttttggaaccatactcactcactctccaccagcctgggaaatgaatattgggtcctcagccctgccaccctctgctgtcatcagctgatgcattgtttttagctcaggttttgataaggtgaaaagaatagtcaccagggttactcagacctgccagctctcggagtccttggtggttgaacttggagaaagaccgcatgaagatacttgtaagcacacatgatccctctgaattgttttactttcctgtaactgcttttgcttttaaaaattgaagaagttttaaacagggctttcatttggtcatccttgcaatccattggggtctagtttggaatctgacaactggaacaaaaagaaccttgaatccggtgcatgccttggttttggtgctgctgctgcttcccaagatcctcagcagggattaagaaggaacccggtgtgcacagcagatccccgaaattggtgggcttgacctcctggcaaattgctgcgtctttccacttgctgttcaggaccactaaatgctgaaatgtggatgcataccgaaataaaagcaattcattgtgtactaaaggttttttttttttttttaatttagtatttgtgtaaaaccaccttttgaagcagcaactatcaagtctgaaaagcaattgatgtttccattaatctttttctggggggaaaaccttagttctaaggatttaacatcctgtaagtgaagtttaacataacagtattccataagcagcctttttattgtcagaccattgcctgattttaatataataaaaaaaaagtgtgcgttaatatttaa

SEQ ID NO: 92174 - protein, 105 aa, Artificial Sequence
  derived and/or modified sequence
MAATTGSGVKVPRNFRLLEELEEGQKGVGDGTVSWGLEDDEDMTLTRWTGMIIGPPRVDPRAISVLAKWQNSYSIKVVLQELRRLMMSKENMKLPQPPEGQCYSN

SEQ ID NO: 92175 - DNA, 318 bp, Artificial Sequence
  derived and/or modified sequence
atggccgccaccaccggcagcggcgtgaaggtgcccagaaacttcagactgctggaggagctggaggagggccagaagggcgtgggcgacggcaccgtgagctggggcctggaggacgacgaggacatgaccctgaccagatggaccggcatgatcatcggcccccccagagtggaccccagagccatcagcgtgctggccaagtggcagaacagctacagcatcaaggtggtgctgcaggagctgagaagactgatgatgagcaaggagaacatgaagctgccccagccccccgagggccagtgctacagcaactag

SEQ ID NO: 92176 - DNA, 318 bp, Artificial Sequence
  derived and/or modified sequence
atggccgcaacaaccggttcaggcgtgaaagttccaaggaacttccgactgctggaagaactggaagaaggacagaagggagtgggggacggtactgtctcctggggcctggaagatgacgaggacatgacacttacgaggtggaccggcatgattattgggcccccaagagtggacccacgagccatctctgtgcttgccaagtggcagaatagctactctattaaagtggtgctgcaggagctacggcgacttatgatgagcaaggagaatatgaaactacctcaaccccccgaaggccaatgctactcaaactag

SEQ ID NO: 92177 - DNA, 318 bp, Artificial Sequence
  derived and/or modified sequence
atggccgccaccactggaagtggagtgaaggtgcccaggaacttccggctgctggaggagctggaggagggccagaagggcgtgggagatggcaccgtgtcctggggcctggaggatgatgaggacatgaccctgacccgctggacaggcatgatcatcggccccccccgggtggacccccgggccatctctgtgctggccaagtggcagaacagctacagcatcaaggtggtgctgcaggagctgcggcggctgatgatgagcaaggagaacatgaagctgccccagcccccagagggccagtgctacagcaactag

SEQ ID NO: 92178 - DNA, 318 bp, Artificial Sequence
  derived and/or modified sequence
atggccgccaccaccggcagcggcgtgaaggtgccccggaacttcaggttgcttgaggagctcgaggaagggcagaaaggagtaggcgacggaaccgtgtcatggggcctggaggatgacgaggatatgactcttaccaggtggacgggcatgattatcggcccaccacgggttgatccacgcgccattagcgtgctggccaagtggcaaaattcttattccattaaggtggttcttcaagagctcagacgcctgatgatgagcaaagagaacatgaaactacctcagccacctgaggggcaatgctacagcaactag

SEQ ID NO: 92179 - DNA, 318 bp, Artificial Sequence
  derived and/or modified sequence
atggccgcaaccactgggtccggagtaaaggtccccaggaacttccgcctccttgaagaactggaagagggacagaaaggggtgggtgatggcaccgtttcatggggattggaagacgacgaggacatgacacttacccgttggactggtatgattataggcccacccagggtggacccgagagctatcagtgtgttggcgaaatggcagaactcatacagtattaaagtggttttacaggagctccgacggctgatgatgagcaaagagaatatgaagctgccacagcccccagagggtcagtgttattctaattag

SEQ ID NO: 92180 - DNA, 1973 bp, Artificial Sequence
  derived and/or modified sequence
agcgacgcaagatggcagccaccacgggctcgggagtaaaagtccctcgcaatttccgactgttggaagaactcgaagaaggccagaaaggagtaggagatggcacagttagctggggtctagaagatgacgaagacatgacacttacaagatggacagggatgataattgggcctccaagagtggacccaagagccatatcagtgctagcaaaatggcagaattcatatagcatcaaagttgtcctgcaagagcttcggcgcctaatgatgtctaaagaaaatatgaaactccctcagccgcccgaaggacagtgttacagcaattaatcaaaaagaaaaaccacaggcccttccccttccccccaattcgatttaatcagtcttcattttccacagtagtaaattttctagatacgtcttgtagacctcaaagtaccggaaaggaagctcccattcaaaggaaatttatcttaagatactgtaaatgatactaattttttgtccatttgaaatatataagttgtgctataacaaatcatcctgtcaagtgtaaccactgtccacgtagttgaacttctgggatcaagaaagtctatttaaattgattcccatcataactggtggggcacatctaactcaactgtgaaaagacacatcacacaatcaccttgctgctgattacacggcctggggtctctgccttctccccttaccctcccgcctcccaccctccctgcaacaacagccctctagcctggggggcttgttagagtagatgtgaaggtttcaggtcgcagcctgtgggactactgctaggtgtgtggggtgtttcgcctgcacccctggtttctttaagtcttaagtgatgccccttccaaaccatcatcctgtccccacgctcctccactcccgcccttggccgaagcatagattgtaacccctccactcccctctgagattggccttcggtgaggaattcagggctttccccatatcttctctcccccacctttatcgaggggtgctgctttttctccctcctcctcaagttcctttttgcaccgtcaccacccaacaccttccatgacacttccttgctttggccagaagccatcaggtaaggttggaaagagcctctgacctcccttgtttagttttggaaccatactcactcactctccaccagcctgggaaatgaatattgggtcctcagccctgccaccctctgctgtcatcagctgatgcattgtttttagctcaggttttgataaggtgaaaagaatagtcaccagggttactcagacctgccagctctcggagtccttggtggttgaacttggagaaagaccgcatgaagatacttgtaagcacacatgatccctctgaattgttttactttcctgtaactgcttttgcttttaaaaattgaagaagttttaaacagggctttcatttggtcatccttgcaatccattggggtctagtttggaatctgacaactggaacaaaaagaaccttgaatccggtgcatgccttggttttggtgctgctgctgcttcccaagatcctcagcagggattaagaaggaacccggtgtgcacagcagatccccgaaattggtgggcttgacctcctggcaaattgctgcgtctttccacttgctgttcaggaccactaaatgctgaaatgtggatgcataccgaaataaaagcaattcattgtgtactaaaggttttttttttttttttaatttagtatttgtgtaaaaccaccttttgaagcagcaactatcaagtctgaaaagcaattgatgtttccattaatctttttctggggggaaaaccttagttctaaggatttaacatcctgtaagtgaagtttaacataacagtattccataagcagcctttttattgtcagaccattgcctgattttaatataataaaaaaaaagtgtgcgttaatatttaa

SEQ ID NO: 92181 - DNA, 471 bp, Artificial Sequence
  derived and/or modified sequence
atgatcacgtttgccatatttctttcattgataatgctggtggaggtggcagccgctattgcaggttatgttttcagggataaagtaatgtcagagttcaataacaattttcggcagcaaatggagaactatcccaagaataaccatacagcttccattctcgatagaatgcaggcggacttcaagtgctgtggcgctgcaaattacacagattgggagaagatcccttcaatgtctaagaacagggtcccagatagctgttgcattaatgttacagtgggttgcggcataaacttcaatgaaaaagccatacataaggagggatgcgtggagaagatcggcggatggctgaggaaaaacgtcttggtcgtcgcagcagccgccctgggtatagccttcgtggaggtcctcgggattgtgtttgcatgttgcctcgtaaagagcatcagaagcggctacgaggtaatgtag

SEQ ID NO: 92182 - DNA, 471 bp, Artificial Sequence
  derived and/or modified sequence
atgatcacatttgcaattttcctttctctgatcatgctggtcgaagtcgccgcggccattgccggctacgtgtttagggacaaggttatgtctgagttcaataacaattttcggcaacagatggagaattatccaaaaaacaaccacacagccagcattcttgatcggatgcaggcagactttaagtgctgcggagcagctaattacactgattgggaaaaaataccatccatgtccaagaaccgcgtgcctgactcttgttgtataaacgttacagtgggttgtggcatcaatttcaacgaaaaggccatccacaaagagggctgcgtcgagaaaataggggggtggctccgtaagaatgtgctcgtcgtggctgctgcagccttgggtattgctttcgtggaagtattaggaattgtcttcgcctgctgcttggtgaaaagcattcggtcaggctacgaggtaatgtag

SEQ ID NO: 92183 - DNA, 471 bp, Artificial Sequence
  derived and/or modified sequence
atgatcacctttgccatcttcctgagcctcatcatgctggtggaggtggccgccgccatcgccggctacgtgttccgggacaaggtgatgtctgagttcaacaacaacttccggcagcagatggagaactaccccaagaacaaccacacagccagcatcctggacaggatgcaggccgacttcaagtgctgcggggccgccaactacacagactgggagaagatccccagcatgagcaagaacagagtgcctgacagctgctgcatcaacgtgacagtgggctgcggcatcaacttcaatgagaaggccatccacaaggagggctgtgtggagaagattggaggctggctgaggaagaatgtgctggtggtggccgctgctgccctgggcatcgcctttgtggaggtgctgggcatcgtgtttgcctgctgcctggtgaagagcatccgcagcggctatgaggtgatgtag

SEQ ID NO: 92184 - DNA, 471 bp, Artificial Sequence
  derived and/or modified sequence
atgatcaccttcgccatcttcctgagcctgatcatgctggtggaggtggctgccgctattgccggctacgtgttcagagataaggtgatgtccgagttcaacaataactttaggcagcagatggaaaattatcctaaaaacaaccacacagcctcgatactggaccgcatgcaagctgattttaaatgttgtggggcggctaattataccgattgggaaaaaattccatctatgagtaagaatagagtgccagactcgtgctgcatcaacgtgactgtgggatgcggcatcaattttaacgaaaaggctatccacaaggaaggatgtgtggaaaaaatcggcggatggctccgcaaaaatgtactggttgtcgccgcggcagccctgggcatcgccttcgtagaggtgctcgggattgttttcgcgtgttgcctcgtgaaatcaattcggtccggctacgaggtgatgtag

SEQ ID NO: 92185 - DNA, 471 bp, Artificial Sequence
  derived and/or modified sequence
atgatcaccttcgccatcttcctgagcctgatcatgctggtggaggtagctgcagcaatagctggctacgtgtttagggataaggtaatgagtgagtttaacaataacttcaggcagcaaatggagaattaccctaagaacaaccacaccgcaagcatcctggacaggatgcaggcggactttaaatgttgcggcgccgctaactatacagactgggaaaagatcccaagcatgtctaaaaatagggtcccagacagctgttgcattaatgtaaccgtcggctgcggaataaattttaacgaaaaggccatccacaaagagggatgcgtagagaagatcggagggtggctacgaaagaatgtccttgtggtggctgctgcggcactggggatcgcattcgttgaggtgttagggattgtattcgcatgttgtctcgtgaagagtattagaagcggatacgaagtgatgtag

SEQ ID NO: 92186 - DNA, 471 bp, Artificial Sequence
  derived and/or modified sequence
atgatcactttcgcaatctttctaagcctgattatgctggtcgaagtcgctgcagccatcgccggttacgtcttcagagacaaagtgatgtcagagttcaataacaattttcgtcaacagatggagaattatccaaagaacaatcacacggctagcatcctcgatcgtatgcaggcagactttaagtgctgcggagcagcgaactataccgattgggaaaagattccctctatgtctaaaaacagggtgccggactcctgttgcattaatgtgaccgtcggatgtggtattaacttcaatgagaaagcgatccataaagaagggtgcgtggaaaagatcggcggatggttacgaaaaaacgtgttggtggtggccgcagctgctctcggcatcgcatttgtggaagtgctgggcatcgtgtttgcctgctgtttggtcaaaagtataaggtccggatacgaagtaatgtag

SEQ ID NO: 92187 - DNA, 471 bp, Artificial Sequence
  derived and/or modified sequence
atgatcactttcgccatttttttgagtctgatcatgctcgttgaagttgcagcggcaattgctggctacgtcttccgggataaggttatgtcggagtttaataataatttccgacagcaaatggaaaactaccccaagaacaaccacacagctagcattttagatcgcatgcaggctgactttaagtgctgcggtgccgctaattacactgactgggagaaaatcccatcgatgtcaaaaaaccgggtgccagatagctgctgtataaacgtaacagtgggatgtggaatcaactttaatgagaaggcaatccacaaagagggctgcgttgaaaaaattgggggttggctgagaaagaatgtgctggtcgtagctgctgccgctctgggcatcgcctttgtggaggtgctgggcatcgtgttcgcatgttgtctggtaaaatccattcgctccggctatgaggtaatgtag

SEQ ID NO: 92188 - DNA, 471 bp, Artificial Sequence
  derived and/or modified sequence
atgatcaccttcgccatcttcctgagcctgatcatgctggtggaggtggccgccgccatcgccggctacgtgttcagagacaaggtgatgagcgagttcaacaacaacttcagacagcagatggagaactaccccaagaacaaccacaccgccagcatcctggacagaatgcaggccgacttcaagtgctgcggcgccgccaactacaccgactgggagaagatccccagcatgagcaagaacagagtgcccgacagctgctgcatcaacgtgaccgtgggctgcggcatcaacttcaacgagaaggccatccacaaggagggctgcgtggagaagatcggcggctggctgagaaagaacgtgctggtggtggccgccgccgccctgggcatcgccttcgtggaggtgctgggcatcgtgttcgcctgctgcctggtgaagagcatcagaagcggctacgaggtgatgtag

SEQ ID NO: 92189 - protein, 274 aa, Artificial Sequence
  derived and/or modified sequence
  misc_feature (1)..(1): Xaa can be any naturally occurring amino acid
XDHIQQAKYQGRLHVSHKVPGDVSLQLSTLEMDDRSHYTCEVTWQTPDGNQVVRDKITELRVQKLSVSKPTVTTGSGYGFTVPQGMRISLQCQARGSPPISYIWYKQQTNNQEPIKVATLSTLLFKPAVIADSGSYFCTAKGQVGSEQHSDIVKFVVKDSSKLLKTKTEAPTTMTYPLKATSTVKQSWDWTTDMDGYLGETSAGPGKSLPVFAIILIISLCCMVVFTMAYIMLCRKTSQQEHVYEAASPKCPPTNTGAAGSHWLCPGICQMHLK

SEQ ID NO: 92190 - DNA, 825 bp, Artificial Sequence
  derived and/or modified sequence
tgagaccacatccagcaggccaagtaccagggcagactgcacgtgagccacaaggtgcccggcgacgtgagcctgcagctgagcaccctggagatggacgacagaagccactacacctgcgaggtgacctggcagacccccgacggcaaccaggtggtgagagacaagatcaccgagctgagagtgcagaagctgagcgtgagcaagcccaccgtgaccaccggcagcggctacggcttcaccgtgccccagggcatgagaatcagcctgcagtgccaggccagaggcagcccccccatcagctacatctggtacaagcagcagaccaacaaccaggagcccatcaaggtggccaccctgagcaccctgctgttcaagcccgccgtgatcgccgacagcggcagctacttctgcaccgccaagggccaggtgggcagcgagcagcacagcgacatcgtgaagttcgtggtgaaggacagcagcaagctgctgaagaccaagaccgaggcccccaccaccatgacctaccccctgaaggccaccagcaccgtgaagcagagctgggactggaccaccgacatggacggctacctgggcgagaccagcgccggccccggcaagagcctgcccgtgttcgccatcatcctgatcatcagcctgtgctgcatggtggtgttcaccatggcctacatcatgctgtgcagaaagaccagccagcaggagcacgtgtacgaggccgccagccccaagtgcccccccaccaacaccggcgccgccggcagccactggctgtgccccggcatctgccagatgcacctgaagtag

SEQ ID NO: 92191 - DNA, 825 bp, Artificial Sequence
  derived and/or modified sequence
taagatcacattcagcaggcaaaataccaagggcgcctgcacgtgtctcataaggtaccaggggatgtgtctctgcaattaagcacactcgaaatggacgacaggagccactacacgtgcgaggtgacatggcaaacaccagatggtaatcaggtcgtgcgggataaaatcaccgagctgagagtacaaaagctgtcggtgtccaagcccaccgtgacgacaggttccggctacgggtttactgtcccccaggggatgcgaatttcattgcaatgccaggccaggggatcccctcctattagttacatttggtacaagcagcagaccaataaccaggaacctattaaggtcgctactctatctactctcttgttcaaacccgcggtcatcgcagattccggctcctatttttgcacggccaaaggacaggttgggtcagagcagcactcagatatcgtgaagtttgtggtgaaggacagttcgaagctgttaaaaacgaaaaccgaggcccccactacaatgacatatccacttaaggctaccagtactgtcaagcagagctgggattggacaaccgatatggacgggtacctgggcgaaacatccgccggccctggtaagtcactacccgttttcgccatcattctcatcattagcctatgttgcatggtcgtgtttactatggcatacatcatgctctgtcggaaaaccagccagcaggagcacgtgtacgaggcagcatccccaaaatgccccccgactaacactggagccgctggatcgcactggctgtgcccgggcatatgccagatgcatttgaaatag

SEQ ID NO: 92192 - DNA, 825 bp, Artificial Sequence
  derived and/or modified sequence
tgagaccacatccagcaggccaagtaccagggccgcctgcacgtgagccacaaggtgcctggagatgtgtccctgcagctgagcaccctggagatggatgacaggagccactacacctgtgaggtgacctggcagaccccagatggcaaccaggtggtgcgggacaagatcacagagctgcgggtgcagaagctgtctgtgtccaagcccaccgtgaccaccggcagcggctacggcttcaccgtgccccagggcatgaggatcagcctgcagtgccaggcccggggcagcccccccatctcctacatctggtacaagcagcagaccaacaaccaggagcccatcaaggtggccaccctgagcaccctgctcttcaagccagctgtgattgctgacagcggcagctacttctgcacagccaagggccaggtgggcagcgagcagcacagcgacatcgtgaagtttgtggtgaaggacagcagcaagctgctgaagaccaagacagaggcccccaccaccatgacctaccccctgaaggccaccagcacagtgaagcagagctgggactggaccacagacatggatggctacctgggggagaccagcgctggccctgggaagagcctgcctgtgtttgccatcatcctgatcatcagcctgtgctgcatggtggtgttcaccatggcctacatcatgctgtgcaggaagaccagccagcaggagcacgtgtatgaggccgccagccccaagtgcccccccaccaacacaggagctgctggcagccactggctgtgccccggcatctgccagatgcacctgaagtag

SEQ ID NO: 92193 - DNA, 825 bp, Artificial Sequence
  derived and/or modified sequence
tgagaccacatccagcaggccaagtaccagggccggctgcacgtgtctcataaggtgcctggggatgttagcttacaattgtctacgcttgagatggatgaccgctcccattacacctgcgaggtaacttggcagacacctgatggtaatcaggtggtgagggacaagataactgaactcagggtgcagaagctgagcgtctccaaacccactgtgacaacaggatcgggttacgggtttaccgtgccacagggtatgcggatcagccttcagtgtcaagccagggggtctcccccgatctcatacatctggtataagcagcagactaacaatcaggagcccatcaaggtggccacgctgagcacacttttatttaaacctgctgtgatagcagactccgggagctatttctgcactgcaaagggacaggtgggttcagaacagcactccgatattgtgaaatttgttgtcaaagatagctccaagttgctgaagacaaagaccgaagccccaaccaccatgacttatccactcaaagccacaagcaccgtaaagcagtcctgggattggacaaccgacatggatgggtacctgggcgagacatctgccggacccggtaagagcctgccagttttcgcaattatactgatcatctcactgtgttgtatggtggtgttcacaatggcctacattatgctctgtcgtaagacatcacagcaagaacacgtttacgaggcagcttcccccaagtgccctccaacaaatacaggcgcagctggttcccactggctgtgccccggaatctgccagatgcacctgaagtag

SEQ ID NO: 92194 - DNA, 825 bp, Artificial Sequence
  derived and/or modified sequence
taggaccacatccagcaggccaagtaccaagggagactgcacgtttcccataaagtaccaggagacgtgtctctccaactgtctacattagagatggatgatcgcagtcactacacctgtgaagtgacatggcagacacctgacggtaaccaggtagtaagggacaaaataactgagctacgcgttcaaaagttgtctgtttccaaacccactgtgaccacagggagtggttacgggttcaccgtaccacagggcatgcgaatatcgctccagtgccaggccagggggtccccacccatctcttacatttggtacaagcaacagaccaataaccaggagccaatcaaggtggccacactctccactctactatttaagccagccgtgatcgctgattctggcagctacttttgcacagctaaagggcaggtcggctccgagcagcattcagatatagtcaagtttgtggtcaaagactcaagcaagttacttaagacaaaaacagaagctccaaccacaatgacatatccccttaaggcgacttccactgtgaagcagtcatgggactggaccactgacatggacggctatttaggcgagaccagcgccggacccggtaaatctttgccagtgttcgccattattctgattatctccctgtgctgtatggtagtcttcactatggcgtatataatgctttgtcgcaagacctcccagcaggaacacgtgtatgaggccgcatccccgaaatgccctcctacgaatacaggggcagcagggtcacattggctatgccccggaatttgccagatgcatctaaagtag

SEQ ID NO: 92195 - DNA, 1170 bp, Artificial Sequence
  derived and/or modified sequence
agaccatatccagcaggcaaagtaccagggccgcctgcatgtgagccacaaggttccaggagatgtatccctccaattgagcaccctggagatggatgaccggagccactacacgtgtgaagtcacctggcagactcctgatggcaaccaagtcgtgagagataagattactgagctccgtgtccagaaactctctgtctccaagcccacagtgacaactggcagcggttatggcttcacggtgccccagggaatgaggattagccttcaatgccaggctcggggttctcctcccatcagttatatttggtataagcaacagactaataaccaggaacccatcaaagtagcaaccctaagtaccttactcttcaagcctgcggtgatagccgactcaggctcctatttctgcactgccaagggccaggttggctctgagcagcacagcgacattgtgaagtttgtggtcaaagactcctcaaagctactcaagaccaagactgaggcacctacaaccatgacataccccttgaaagcaacatctacagtgaagcagtcctgggactggaccactgacatggatggctaccttggagagaccagtgctgggccaggaaagagcctgcctgtctttgccatcatcctcatcatctccttgtgctgtatggtggtttttaccatggcctatatcatgctctgtcggaagacatcccaacaagagcatgtctacgaagcagccagcccaaagtgtccgcctaccaacactggagccgctgggagtcactggctttgccctggaatttgccagatgcatctcaagtaagccagctgctggatttggctctgggcccttctagtatctctgccgggggcttctggtactcctctctaaataccagagggaagatgcccatagcactaggacttggtcatcatgcctacagacactattcaactttggcatcttgccaccagaagacccgagggaggctcagctctgccagctcagaggaccagctatatccaggatcatttctctttcttcagggccagacagcttttaattgaaattgttatttcacaggccagggttcagttctgctcctccactataagtctaatgttctgactctctcctggtgctcaataaatatctaatcataacagcaa

SEQ ID NO: 92196 - protein, 810 aa, Artificial Sequence
  derived and/or modified sequence
MQKDARREGNMKVLQEPTCVSDYMSISTCEWKMNGPTNCSTELRLLYQLVFLLSEAHTCIPENNGGAGCVCHLLMDDVVSADNYTLDLWAGQQLLWKGSFKPSEHVKPRAPGNLTVHTNVSDTLLLTWSNPYPPDNYLYNHLTYAVNIWSENDPADFRIYNVTYLEPSLRIAASTLKSGISYRARVRAWAQCYNTTWSEWSPSTKWHNSYREPFEQHLLLGVSVSCIVILAVCLLCYVSITKIKKEWWDQIPNPARSRLVAIIIQDAQGSQWEKRSRGQEPAKCPHWKNCLTKLLPCFLEHNMKRDEDPHKAAKEMPFQGSGKSAWCPVEISKTVLWPESISVVRCVELFEAPVECEEEEEVEEEKGSFCASPESSRDDFQEGREGIVARLTESLFLDLLGEENGGFCQQDMGESCLLPPSGSTSAHMPWDEFPSAGPKEAPPWGKEQPLHLEPSPPASPTQSPDNLTCTETPLVIAGNPAYRSFSNSLSQSPCPRELGPDPLLARHLEEVEPEMPCVPQLSEPTTVPQPEPETWEQILRRNVLQHGAAAAPVSAPTSGYQEFVHAVEQGGTQASAVVGLGPPGEAGYKAFSSLLASSAVSPEKCGFGASSGEEGYKPFQDLIPGCPGDPAPVPVPLFTFGLDREPPRSPQSSHLPSSSPEHLGLEPGEKVEDMPKPPLPQEQATDPLVDSLGSGIVYSALTCHLCGHLKQCHGQEDGGQTPVMASPCCGCCCGDRSSPPTTPLRAPDPSPGGVPLEASLCPASLAPSGISEKSKSSSSFHPAPGNAQSSSQTPKIVNFVSVGPTYMRVS

SEQ ID NO: 92197 - DNA, 2433 bp, Artificial Sequence
  derived and/or modified sequence
atgcaaaaagacgctagaagagagggcaacatgaaggtcctccaggaacccacgtgcgtttccgattatatgtccatctcgacctgtgagtggaagatgaacggccccactaactgtagcaccgagttacgactgctgtatcaactagtgttcctcctttccgaggcgcacacatgcatccctgagaacaacggaggcgctggctgtgtgtgtcatctgctcatggacgatgtagtctcagcagataactatactttggacctgtgggccggtcagcagcttctgtggaagggctctttcaaaccaagcgagcacgtgaagccacgggcccctgggaatctcaccgtgcacactaatgtatccgatactttgttactgacatggagcaacccgtatcctcctgacaactatctttacaatcacctcacctatgctgtaaatatctggtctgaaaatgatcctgcagacttcagaatttataacgtcacctacctggaaccctccttgaggatagcggcttcgactttaaagtccggcatttcgtatcgggctcgggtccgagcctgggctcagtgttacaataccacctggtcagaatggtccccatctaccaaatggcataactcctacagagagccgttcgaacagcacctcctcctcggtgtttccgtgagctgcatcgtgatcctggcggtctgtctgctgtgttacgtgtctatcacaaaaattaagaaagaatggtgggatcaaataccaaatcccgctcgatcccggctcgtcgccattattattcaggatgcgcagggatctcagtgggaaaaaagaagccgagggcaggagcccgcaaagtgcccgcattggaaaaattgcttaacaaagctattgccttgctttctggaacacaacatgaagcgcgatgaagatcctcataaagctgctaaagagatgcccttccagggctccggcaagtccgcgtggtgtccagtcgaaatttcgaagacggtcctctggcccgaaagcattagtgtcgtacgctgcgtcgagctctttgaagcccctgtcgaatgcgaagaggaagaggaggtggaagaggaaaagggcagcttttgtgcctctccggaaagcagccgggacgactttcaggagggccgtgaaggaattgtcgcaaggctgactgagtcactttttctggaccttctcggtgaggagaacggcgggttctgtcagcaggacatgggtgagagttgcctccttccccccagcggctccaccagcgctcatatgccttgggatgagttcccttctgccgggcccaaggaggcccctccgtggggaaaggaacagcccctgcacctggagcccagtcccccagcatctcctacacaaagccccgacaacctgacctgcactgaaaccccactggtaatagctggtaaccctgcctacaggagctttagcaattccttgagtcagtcaccatgccccagggagctgggccccgacccgctgctggcgcgccatctggaagaggtagaacctgagatgccatgtgttccacaactgagcgaaccgacaactgtaccacagccagaacctgaaacctgggaacagatccttagaaggaatgtgttgcagcacggcgcagccgcggctccagtgtctgccccgacttctggttaccaagagtttgtgcacgccgtcgagcaggggggaactcaggccagcgccgtggttgggttgggacctccaggggaggccggctataaggctttctcaagcctgttggctagttctgcggtctctcctgagaagtgtgggtttggcgccagctcaggcgaagaggggtacaagccgttccaagatctgatacctgggtgccccggagacccagctccggtgccggtgccgctcttcacatttgggctggatcgtgagcctccaaggagtccgcagtctagtcatctgccctcatcatctccagagcaccttggccttgagccaggtgagaaggtggaagacatgcctaaacctcctctaccacaggagcaggcgactgaccccctagtagacagcctcggtagcggaatcgtctacagtgcactgacatgccatttgtgtggccacctcaagcagtgtcacggacaggaagacggaggccaaacacccgtgatggcatccccgtgttgcggctgttgctgtggggatcgctcgtctccacctacgacaccactccgtgccccagacccttctccaggcggggtccccctcgaggcaagcctttgcccggcttcattggctccctcaggaatttcagaaaagtctaaatctagcagcagcttccatcctgcaccaggaaatgcccagtcaagcagccagacgccaaagatcgtgaacttcgtgagtgtcggccccacctacatgagggtgagttag

SEQ ID NO: 92198 - DNA, 2900 bp, Artificial Sequence
  derived and/or modified sequence
gcgcggcgcgggccagggaagggccacccaggggtcccccacttcccgcttgggcgcccggacggcgaatggagcaggggcgcgcaggtgccttggcatctcccaatggggtggctttgctctgggctcctgttccctgtgagctgcctggtcctgctgcaggtggcaagctctggactcttcaggatgccgtgtggagaaaggaagagggtggaagccaggaggtctggagggaggtctggagtggaggagatgagaggctccggatccctctgggaggtagatttgaggacagattggaattgaggtgaaagacagagaaagagaagtggccaggatgactccaagatttctgacctaaactactgggaaggacgcggttgtcatttctgaaatgcagaaggatgccagaagagaagggaacatgaaggtcttgcaggagcccacctgcgtctccgactacatgagcatctctacttgcgagtggaagatgaatggtcccaccaattgcagcaccgagctccgcctgttgtaccagctggtttttctgctctccgaagcccacacgtgtatccctgagaacaacggaggcgcggggtgcgtgtgccacctgctcatggatgacgtggtcagtgcggataactatacactggacctgtgggctgggcagcagctgctgtggaagggctccttcaagcccagcgagcatgtgaaacccagggccccaggaaacctgacagttcacaccaatgtctccgacactctgctgctgacctggagcaacccgtatccccctgacaattacctgtataatcatctcacctatgcagtcaacatttggagtgaaaacgacccggcagatttcagaatctataacgtgacctacctagaaccctccctccgcatcgcagccagcaccctgaagtctgggatttcctacagggcacgggtgagggcctgggctcagtgctataacaccacctggagtgagtggagccccagcaccaagtggcacaactcctacagggagcccttcgagcagcacctcctgctgggcgtcagcgtttcctgcattgtcatcctggccgtctgcctgttgtgctatgtcagcatcaccaagattaagaaagaatggtgggatcagattcccaacccagcccgcagccgcctcgtggctataataatccaggatgctcaggggtcacagtgggagaagcggtcccgaggccaggaaccagccaagtgcccacactggaagaattgtcttaccaagctcttgccctgttttctggagcacaacatgaaaagggatgaagatcctcacaaggctgccaaagagatgcctttccagggctctggaaaatcagcatggtgcccagtggagatcagcaagacagtcctctggccagagagcatcagcgtggtgcgatgtgtggagttgtttgaggccccggtggagtgtgaggaggaggaggaggtagaggaagaaaaagggagcttctgtgcatcgcctgagagcagcagggatgacttccaggagggaagggagggcattgtggcccggctaacagagagcctgttcctggacctgctcggagaggagaatgggggcttttgccagcaggacatgggggagtcatgccttcttccaccttcgggaagtacgagtgctcacatgccctgggatgagttcccaagtgcagggcccaaggaggcacctccctggggcaaggagcagcctctccacctggagccaagtcctcctgccagcccgacccagagtccagacaacctgacttgcacagagacgcccctcgtcatcgcaggcaaccctgcttaccgcagcttcagcaactccctgagccagtcaccgtgtcccagagagctgggtccagacccactgctggccagacacctggaggaagtagaacccgagatgccctgtgtcccccagctctctgagccaaccactgtgccccaacctgagccagaaacctgggagcagatcctccgccgaaatgtcctccagcatggggcagctgcagcccccgtctcggcccccaccagtggctatcaggagtttgtacatgcggtggagcagggtggcacccaggccagtgcggtggtgggcttgggtcccccaggagaggctggttacaaggccttctcaagcctgcttgccagcagtgctgtgtccccagagaaatgtgggtttggggctagcagtggggaagaggggtataagcctttccaagacctcattcctggctgccctggggaccctgccccagtccctgtccccttgttcacctttggactggacagggagccacctcgcagtccgcagagctcacatctcccaagcagctccccagagcacctgggtctggagccgggggaaaaggtagaggacatgccaaagcccccacttccccaggagcaggccacagacccccttgtggacagcctgggcagtggcattgtctactcagcccttacctgccacctgtgcggccacctgaaacagtgtcatggccaggaggatggtggccagacccctgtcatggccagtccttgctgtggctgctgctgtggagacaggtcctcgccccctacaacccccctgagggccccagacccctctccaggtggggttccactggaggccagtctgtgtccggcctccctggcaccctcgggcatctcagagaagagtaaatcctcatcatccttccatcctgcccctggcaatgctcagagctcaagccagacccccaaaatcgtgaactttgtctccgtgggacccacatacatgagggtctcttaggtgcatgtcctcttgttgctgagtctgcagatgaggactagggcttatccatgcctgggaaatgccacctcct

SEQ ID NO: 92199 - DNA, 2433 bp, Artificial Sequence
  derived and/or modified sequence
atgcagaaggatgcccggcgggagggcaacatgaaggtgctgcaggagcccacctgtgtgtctgactacatgagcatcagcacctgtgagtggaagatgaatggccccaccaactgcagcacagagctgcggctgctgtaccagctggtgttcctgctgtctgaggcccacacctgcatccctgagaacaacggcggggccggctgtgtgtgccacctgctgatggatgatgtggtgtctgctgacaactacaccctggacctgtgggccggccagcagctgctgtggaagggcagcttcaagcccagcgagcacgtgaagccccgggcccctggcaacctgactgtgcacaccaacgtgtctgacaccctgctgctgacctggagcaacccctaccccccagacaactacctgtacaaccacctgacctatgctgtgaacatctggagcgaaaatgaccctgctgacttccgcatctacaacgtgacctacctggagcccagcctgagaattgctgccagcaccctgaagagcggcatctcctaccgggcccgggtgcgggcctgggcccagtgctacaacaccacctggagcgagtggagccccagcaccaagtggcacaacagctaccgggagccctttgagcagcacctgctgctgggcgtgtctgtgtcctgcatcgtcatcctggccgtgtgcctgctgtgctacgtgtccatcaccaagatcaagaaggagtggtgggaccagatccccaacccagcccggagccggctggtggccatcatcatccaggatgcccagggcagccagtgggagaagaggagccggggccaggagcccgccaagtgcccccactggaagaactgcctgaccaagctgctgccctgcttcctggagcacaacatgaagagagatgaggacccccacaaggccgccaaggagatgcccttccagggcagcggcaagagcgcctggtgccctgtggagatcagcaagacagtgctgtggccagagagcatctctgtggtgcgctgtgtggagctgtttgaggcccctgtggagtgtgaggaggaggaggaggtggaggaggagaagggcagcttctgtgccagccctgagagcagcagagatgacttccaggagggccgggagggcatcgtggcccggctgacagagagcctcttcctggacctgctgggggaggagaatggaggcttctgccagcaggacatgggagagagctgcctgctgcccccatctggcagcaccagcgcccacatgccctgggatgagttccccagcgctggccccaaggaggccccaccctggggcaaggagcagcccctgcacctggagcccagccccccagccagccccacccagagcccagacaacctgacctgcacagagacccccctggtgattgctggcaacccagcctaccgctccttcagcaacagcctgagccagagcccctgcccccgggagctgggccctgaccccctgctggcccggcacctggaggaggtggagcctgagatgccctgtgtgccccagctgtctgagcccaccaccgtgccccagcctgagcctgagacctgggagcagatcctgcggagaaatgtgctgcagcacggggctgctgctgcccctgtgtctgcccccaccagcggctaccaggagtttgtgcatgctgtggagcagggcggcacccaggccagcgctgtggtgggcctgggccccccaggagaggccggctacaaggccttcagcagcctgctggccagcagcgctgtgtccccagagaagtgtggctttggagccagcagtggagaggagggctacaagcccttccaggacctgatccctggctgccctggggaccctgcccctgtgcctgtgcccctcttcaccttcggcctggaccgggagccccccaggagcccccagagcagccacctgcccagcagcagccctgagcacctgggcctggagcctggagagaaggtggaggacatgcccaagccacccctgccccaggagcaggccacagaccccctggtggacagcctgggcagcggcatcgtgtacagcgccctgacctgccacctgtgtggccacctgaagcagtgccacggccaggaggatggcggccagacccctgtgatggccagcccctgctgcggctgctgctgcggggacaggagcagcccccccaccacccccctgcgggccccagaccccagccctggaggagtgcccctggaggccagcctgtgcccagccagcctggcccccagcggcatcagcgagaagagcaagagcagcagcagcttccacccagcccctggaaatgcccagagcagcagccagacccccaagatcgtgaactttgtgtctgtgggccccacctacatgagggtgtcctag

SEQ ID NO: 92200 - DNA, 2433 bp, Artificial Sequence
  derived and/or modified sequence
atgcagaaggacgcccggcgggagggcaacatgaaggtgctgcaggagcccacgtgcgtgtccgactacatgtccattagtacttgtgaatggaagatgaacgggccaaccaattgttctacggaactgaggctcctgtaccaattggtgtttctgctgtcggaagcacacacatgcattcctgaaaacaacggcggggctggctgcgtatgccatctactgatggatgatgtagtctccgcggataactataccctggatctttgggccggacagcagttactctggaaggggagcttcaagccaagcgaacacgtcaaaccccgcgctcccgggaatctgaccgttcacaccaacgttagcgatacattgctattaacatggtccaacccatacccacctgataattatctatataatcatttgacctatgccgtcaacatttggtcagagaatgaccctgctgactttaggatttacaatgtgacttatcttgagcccagccttcgcatcgccgcttctactctcaaaagcggtatctcgtacagggcccgagtcagagcatgggctcagtgttacaacactacctggtctgagtggagcccatccaccaagtggcacaacagttatcgggagccgtttgagcagcacctgctgttgggggtttctgtgtcatgcattgtcatccttgccgtgtgtttgttatgttatgtatcaatcaccaaaattaaaaaggagtggtgggatcaaatccctaacccagcccgcagcagattggtcgctattatcattcaggacgcacagggatcacagtgggagaagaggagccgggggcaggagccggcgaagtgccctcactggaagaactgtctgacaaaactgcttccctgtttcctcgagcataatatgaagagggatgaggacccccacaaagccgccaaagagatgcctttccagggcagcgggaaatcagcctggtgtcctgtggagatcagcaaaactgttctgtggcctgaatccatctcagtcgtccggtgtgtggaactgtttgaagctccggtcgaatgtgaggaggaagaagaggtcgaggaggagaaaggttctttttgcgctagcccagaatcttctcgggatgacttccaagagggacgggaggggatcgtcgcacgactcactgagtcccttttccttgatctccttggcgaagagaatgggggcttctgccagcaggacatgggggagagctgcttgctgcccccaagcggctcgacttccgcccacatgccatgggacgagttcccatccgccggacccaaggaagcccctccatggggtaaggaacagcccctccatctggagccttcaccgccagcttcaccaacccagagtcccgacaacctgacctgcacagaaacaccattggtcattgctggaaatcctgcctaccgaagttttagcaactctctgagccagtccccatgcccacgggaactcgggccagatcctctgctggctaggcatctcgaagaggttgagcccgagatgccatgtgtgcctcaactatcagaaccaactactgttcctcagcccgaaccggagacctgggaacaaattcttagacggaatgtcctacagcatggggccgctgctgcgcctgtgagcgctcccaccagcggctaccaggaatttgtgcacgctgtggaacagggcggaacacaggcatcagcggttgtgggtcttgggccacccggggaagctgggtataaagccttctcctctctcttggccagctcggccgtgagccctgaaaagtgcggttttggagcctcctccggggaggaaggctacaagcctttccaggatttgatcccaggatgccccggagaccccgcgccagtgccggtgcctctgtttacctttggactggatcgagagccaccacgcagcccacagagttctcacctgccatccagcagccctgagcacctgggcctcgagcctggggaaaaggtggaggatatgcccaagccacccctcccccaagagcaggctactgatcctctggtcgactccctgggctccggcatcgtgtacagcgctctaacgtgccacctctgcggccacttaaaacagtgtcacggacaggaggatgggggccagactccagtcatggcctctccatgctgcggctgctgctgtggagaccgttcatctcctcccacaacccctctgcgggcaccagatccctcaccagggggtgtccccctggaagcctccctctgtccagcatccttggctccttctgggatatcggagaaatcaaagagcagcagctctttccaccctgctccaggcaacgcccaatcttcgagtcagactccgaagatcgttaattttgtgtcagtcgggcccacttacatgcgggtatcctag

SEQ ID NO: 92201 - DNA, 2433 bp, Artificial Sequence
  derived and/or modified sequence
atgcagaaggatgccaggcgcgagggcaacatgaaagtactgcaggaacccacatgcgtgtcagactatatgagtatcagtacctgcgaatggaaaatgaacggaccaaccaattgctcaacggaactgcggttgctgtatcagctggttttcttgttgtctgaggcccacacgtgcattccagaaaacaatggcggagccggatgcgtgtgtcacctccttatggacgatgtagtgtccgcagataactataccttagatctatgggcgggtcagcagctgctctggaagggctctttcaagcccagtgagcacgtaaagccaagggcccctgggaatttaaccgtgcatacgaacgtctccgacacccttctccttacatggagcaacccatatcctcctgacaactatctgtacaatcaccttacttacgctgtgaacatctggagtgagaacgatcccgctgacttccgcatctataacgttacttaccttgagccctccctgcggatagctgcgagtaccctgaaaagtggcatttcctatagagccagggtgcgcgcttgggcccagtgttataacacaacttggtctgagtggagcccgtctacaaagtggcataattcatacagggaaccttttgaacaacacttgctacttggtgtctccgtcagctgtatcgtgatactcgcagtgtgtctgttgtgttacgtatcgattacaaaaatcaagaaggaatggtgggatcagattccgaatcctgctcgctctagactggtggctatcatcattcaggatgctcaagggtcccagtgggaaaaacgaagtcgcggtcaggagcctgccaagtgcccgcactggaaaaactgtctgactaaattgctgccatgcttcctggagcacaatatgaagagggatgaggaccctcacaaggcagccaaggaaatgccatttcagggcagtggtaagtccgcctggtgccccgtggagatctctaagaccgtgctctggcccgaaagcattagcgttgtacgctgtgtggaattatttgaagcccctgtagagtgcgaagaagaggaggaggtggaagaggagaaagggagcttttgcgcatcgcccgagtcgtcccgcgacgatttccaggaaggcagagagggcattgttgcgaggcttactgaatcactgtttctcgatcttttgggcgaagagaacggtggtttctgccagcaagacatgggagagtcttgcttactacctcccagcggatcaacaagcgcacatatgccatgggatgagtttccctcagccggtcccaaagaggctccaccttgggggaaggagcagcccctacacctcgaaccaagcccccctgcctcccccactcagagcccagacaacctcacctgtactgagacgcccctggtgatcgctggcaatccagcctaccgctccttttctaactcgttatcccagtccccctgtcctcgtgaactgggcccagaccccttgttagccaggcacctggaagaagtggaaccagagatgccatgcgtgcctcagctgtcagagcctacaaccgtccctcagccagagcctgagacctgggagcaaatcctaaggagaaacgtcttgcagcacggggcagcggctgcacccgtgtccgctccaacctcaggatatcaggaatttgtccatgctgttgagcaagggggaacccaagcttctgccgtggtggggcttggcccaccaggggaggcgggttacaaagccttcagctccctgctggcatcgtctgccgtcagccccgaaaagtgtggatttggagcttcttccggggaagaggggtacaagccatttcaggatctcataccaggttgccccggtgatccagctcctgtacctgtccctctcttcaccttcgggcttgatcgcgaaccccctcggtcgccacaaagttcacacctcccttcctccagccccgaacaccttggcctcgagcctggggagaaagtggaggacatgccaaagcccccactgccccaggagcaggcaacagatccactcgtggacagtcttgggagcgggatagtttacagcgcattgacatgtcacttgtgcgggcacctgaagcagtgccacggccaagaagacgggggtcagactcccgtcatggcaagcccgtgctgcgggtgttgttgtggagatcggtccagtccgcctaccacgccactgcgcgcacctgatccgagccccggaggagttcccttggaggccagcctttgcccggctagtcttgccccatctggcattagcgagaagtccaagtcgtcatcctcctttcacccagcgcctggcaatgctcagagtagctcacaaacaccaaaaatcgtgaatttcgtgtcagtgggcccaacatacatgcgggtgtcctag

SEQ ID NO: 92202 - DNA, 2433 bp, Artificial Sequence
  derived and/or modified sequence
atgcagaaggacgccagaagagagggcaacatgaaggtgctgcaggagcccacctgcgtgagcgactacatgagcatcagcacctgcgagtggaagatgaacggccccaccaactgcagcaccgagctgagactgctgtaccagctggtgttcctgctgagcgaggcccacacctgcatccccgagaacaacggcggcgccggctgcgtgtgccacctgctgatggacgacgtggtgagcgccgacaactacaccctggacctgtgggccggccagcagctgctgtggaagggcagcttcaagcccagcgagcacgtgaagcccagagcccccggcaacctgaccgtgcacaccaacgtgagcgacaccctgctgctgacctggagcaacccctacccccccgacaactacctgtacaaccacctgacctacgccgtgaacatctggagcgagaacgaccccgccgacttcagaatctacaacgtgacctacctggagcccagcctgagaatcgccgccagcaccctgaagagcggcatcagctacagagccagagtgagagcctgggcccagtgctacaacaccacctggagcgagtggagccccagcaccaagtggcacaacagctacagagagcccttcgagcagcacctgctgctgggcgtgagcgtgagctgcatcgtgatcctggccgtgtgcctgctgtgctacgtgagcatcaccaagatcaagaaggagtggtgggaccagatccccaaccccgccagaagcagactggtggccatcatcatccaggacgcccagggcagccagtgggagaagagaagcagaggccaggagcccgccaagtgcccccactggaagaactgcctgaccaagctgctgccctgcttcctggagcacaacatgaagagagacgaggacccccacaaggccgccaaggagatgcccttccagggcagcggcaagagcgcctggtgccccgtggagatcagcaagaccgtgctgtggcccgagagcatcagcgtggtgagatgcgtggagctgttcgaggcccccgtggagtgcgaggaggaggaggaggtggaggaggagaagggcagcttctgcgccagccccgagagcagcagagacgacttccaggagggcagagagggcatcgtggccagactgaccgagagcctgttcctggacctgctgggcgaggagaacggcggcttctgccagcaggacatgggcgagagctgcctgctgccccccagcggcagcaccagcgcccacatgccctgggacgagttccccagcgccggccccaaggaggcccccccctggggcaaggagcagcccctgcacctggagcccagcccccccgccagccccacccagagccccgacaacctgacctgcaccgagacccccctggtgatcgccggcaaccccgcctacagaagcttcagcaacagcctgagccagagcccctgccccagagagctgggccccgaccccctgctggccagacacctggaggaggtggagcccgagatgccctgcgtgccccagctgagcgagcccaccaccgtgccccagcccgagcccgagacctgggagcagatcctgagaagaaacgtgctgcagcacggcgccgccgccgcccccgtgagcgcccccaccagcggctaccaggagttcgtgcacgccgtggagcagggcggcacccaggccagcgccgtggtgggcctgggcccccccggcgaggccggctacaaggccttcagcagcctgctggccagcagcgccgtgagccccgagaagtgcggcttcggcgccagcagcggcgaggagggctacaagcccttccaggacctgatccccggctgccccggcgaccccgcccccgtgcccgtgcccctgttcaccttcggcctggacagagagccccccagaagcccccagagcagccacctgcccagcagcagccccgagcacctgggcctggagcccggcgagaaggtggaggacatgcccaagccccccctgccccaggagcaggccaccgaccccctggtggacagcctgggcagcggcatcgtgtacagcgccctgacctgccacctgtgcggccacctgaagcagtgccacggccaggaggacggcggccagacccccgtgatggccagcccctgctgcggctgctgctgcggcgacagaagcagcccccccaccacccccctgagagcccccgaccccagccccggcggcgtgcccctggaggccagcctgtgccccgccagcctggcccccagcggcatcagcgagaagagcaagagcagcagcagcttccaccccgcccccggcaacgcccagagcagcagccagacccccaagatcgtgaacttcgtgagcgtgggccccacctacatgagagtgagctag

SEQ ID NO: 92203 - protein, 463 aa, Artificial Sequence
  derived and/or modified sequence
  misc_feature (1)..(1): Xaa can be any naturally occurring amino acid
XQEQSVPADDSMKVKDEYSERDENVLKSEPMGNAEEPEIPYSYSREYNEYENIKLERHVVSFDSSRPTSGKMNCDVCGLSCISFNVLMVHKRSHTGERPFQCNQCGASFTQKGNLLRHIKLHTGEKPFKCHLCNYACQRRDALTGHLRTHSVEKPYKCEFCGRSYKQRSSLEEHKERCRTFLQSTDPGDTASAEARHIKAEMGSERALVLDRLASNVAKRKSSMPQKFIGEKRHCFDVNYNSSYMYEKESELIQTRMMDQAINNAISYLGAEALRPLVQTPPAPTSEMVPVISSMYPIALTRAEMSNGAPQELEKKSIHLPEKSVPSERGLSPNNSGHDSTDTDSNHEERQNHIYQQNHMVLSRARNGMPLLKEVPRSYELLKPPPICPRDSVKVINKEGEVMDVYRCDHCRVLFLDYVMFTIHMGCHGFRDPFECNMCGYRSHDRYEFSSHIARGEHRALLK

SEQ ID NO: 92204 - protein, 475 aa, Artificial Sequence
  derived and/or modified sequence
MEDIQTNAELKSTQEQSVPADDSMKVKDEYSERDENVLKSEPMGNAEEPEIPYSYSREYNEYENIKLERHVVSFDSSRPTSGKMNCDVCGLSCISFNVLMVHKRSHTGERPFQCNQCGASFTQKGNLLRHIKLHTGEKPFKCHLCNYACQRRDALTGHLRTHSVEKPYKCEFCGRSYKQRSSLEEHKERCRTFLQSTDPGDTASAEARHIKAEMGSERALVLDRLASNVAKRKSSMPQKFIGEKRHCFDVNYNSSYMYEKESELIQTRMMDQAINNAISYLGAEALRPLVQTPPAPTSEMVPVISSMYPIALTRAEMSNGAPQELEKKSIHLPEKSVPSERGLSPNNSGHDSTDTDSNHEERQNHIYQQNHMVLSRARNGMPLLKEVPRSYELLKPPPICPRDSVKVINKEGEVMDVYRCDHCRVLFLDYVMFTIHMGCHGFRDPFECNMCGYRSHDRYEFSSHIARGEHRALLK

SEQ ID NO: 92205 - DNA, 1392 bp, Artificial Sequence
  derived and/or modified sequence
tgacaggagcagagcgtgcccgccgacgacagcatgaaggtgaaggacgagtacagcgagagagacgagaacgtgctgaagagcgagcccatgggcaacgccgaggagcccgagatcccctacagctacagcagagagtacaacgagtacgagaacatcaagctggagagacacgtggtgagcttcgacagcagcagacccaccagcggcaagatgaactgcgacgtgtgcggcctgagctgcatcagcttcaacgtgctgatggtgcacaagagaagccacaccggcgagagacccttccagtgcaaccagtgcggcgccagcttcacccagaagggcaacctgctgagacacatcaagctgcacaccggcgagaagcccttcaagtgccacctgtgcaactacgcctgccagagaagagacgccctgaccggccacctgagaacccacagcgtggagaagccctacaagtgcgagttctgcggcagaagctacaagcagagaagcagcctggaggagcacaaggagagatgcagaaccttcctgcagagcaccgaccccggcgacaccgccagcgccgaggccagacacatcaaggccgagatgggcagcgagagagccctggtgctggacagactggccagcaacgtggccaagagaaagagcagcatgccccagaagttcatcggcgagaagagacactgcttcgacgtgaactacaacagcagctacatgtacgagaaggagagcgagctgatccagaccagaatgatggaccaggccatcaacaacgccatcagctacctgggcgccgaggccctgagacccctggtgcagaccccccccgcccccaccagcgagatggtgcccgtgatcagcagcatgtaccccatcgccctgaccagagccgagatgagcaacggcgccccccaggagctggagaagaagagcatccacctgcccgagaagagcgtgcccagcgagagaggcctgagccccaacaacagcggccacgacagcaccgacaccgacagcaaccacgaggagagacagaaccacatctaccagcagaaccacatggtgctgagcagagccagaaacggcatgcccctgctgaaggaggtgcccagaagctacgagctgctgaagcccccccccatctgccccagagacagcgtgaaggtgatcaacaaggagggcgaggtgatggacgtgtacagatgcgaccactgcagagtgctgttcctggactacgtgatgttcaccatccacatgggctgccacggcttcagagaccccttcgagtgcaacatgtgcggctacagaagccacgacagatacgagttcagcagccacatcgccagaggcgagcacagagccctgctgaagtag

SEQ ID NO: 92206 - DNA, 1428 bp, Artificial Sequence
  derived and/or modified sequence
atggaggacatccagaccaacgccgagctgaagagcacccaggagcagagcgtgcccgccgacgacagcatgaaggtgaaggacgagtacagcgagagagacgagaacgtgctgaagagcgagcccatgggcaacgccgaggagcccgagatcccctacagctacagcagagagtacaacgagtacgagaacatcaagctggagagacacgtggtgagcttcgacagcagcagacccaccagcggcaagatgaactgcgacgtgtgcggcctgagctgcatcagcttcaacgtgctgatggtgcacaagagaagccacaccggcgagagacccttccagtgcaaccagtgcggcgccagcttcacccagaagggcaacctgctgagacacatcaagctgcacaccggcgagaagcccttcaagtgccacctgtgcaactacgcctgccagagaagagacgccctgaccggccacctgagaacccacagcgtggagaagccctacaagtgcgagttctgcggcagaagctacaagcagagaagcagcctggaggagcacaaggagagatgcagaaccttcctgcagagcaccgaccccggcgacaccgccagcgccgaggccagacacatcaaggccgagatgggcagcgagagagccctggtgctggacagactggccagcaacgtggccaagagaaagagcagcatgccccagaagttcatcggcgagaagagacactgcttcgacgtgaactacaacagcagctacatgtacgagaaggagagcgagctgatccagaccagaatgatggaccaggccatcaacaacgccatcagctacctgggcgccgaggccctgagacccctggtgcagaccccccccgcccccaccagcgagatggtgcccgtgatcagcagcatgtaccccatcgccctgaccagagccgagatgagcaacggcgccccccaggagctggagaagaagagcatccacctgcccgagaagagcgtgcccagcgagagaggcctgagccccaacaacagcggccacgacagcaccgacaccgacagcaaccacgaggagagacagaaccacatctaccagcagaaccacatggtgctgagcagagccagaaacggcatgcccctgctgaaggaggtgcccagaagctacgagctgctgaagcccccccccatctgccccagagacagcgtgaaggtgatcaacaaggagggcgaggtgatggacgtgtacagatgcgaccactgcagagtgctgttcctggactacgtgatgttcaccatccacatgggctgccacggcttcagagaccccttcgagtgcaacatgtgcggctacagaagccacgacagatacgagttcagcagccacatcgccagaggcgagcacagagccctgctgaagtag

SEQ ID NO: 92207 - DNA, 1392 bp, Artificial Sequence
  derived and/or modified sequence
tgacaggagcaaagcgtacctgcagatgacagcatgaaggtgaaggacgagtatagtgaaagagatgaaaacgtcttaaagagcgaacccatgggcaatgccgaagaaccagagattccgtacagctattcaagagagtataatgagtatgagaatatcaagctggaacgacacgtagtctccttcgatagtagccgaccaacctctgggaagatgaattgtgacgtttgtggtctgtcctgtattagtttcaatgtcctgatggtgcataaacgaagccacaccggcgagcgtccattccaatgcaaccagtgcggagctagttttacacaaaaggggaacctcttgcgccacataaagcttcatacaggggagaagccattcaaatgccacctgtgtaactatgcctgtcagagaagggacgccttgacaggacatctgcggacccactccgtcgagaaaccctataaatgcgaattctgcgggaggtcttacaaacagagaagtagtctagaggagcacaaggaacgatgcagaacattcctgcaatcaacagaccccggggacacagcctcggctgaagcccggcatattaaggccgagatggggtctgaaagagcattagtgctggatcgcttagcatctaatgtggctaagcgtaagtcttctatgccccagaagttcattggagaaaagcgccattgtttcgacgtaaattacaattcctcatatatgtatgagaaggaatccgaactaattcaaaccaggatgatggaccaggctattaataacgctatctcatatctgggagcagaagcgctcagaccactagttcagacgcccccggccccaacatcagagatggtgccagttatttcctccatgtaccccattgccctgacgcgtgccgaaatgagtaacggagcccctcaggaactggagaagaagtccattcacctgcccgagaaatctgtgccctctgagagaggactcagcccaaataacagcggccatgacagcactgacacagactctaaccacgaagaacgccagaatcacatttaccaacagaatcatatggtgttaagcagggcccggaatggcatgccgctgctgaaggaagtcccacggagctatgagttgctcaagcctccccccatttgtccacgcgactcagtgaaggtaattaataaagagggcgaggtcatggatgtatatcggtgcgatcattgtcgggtgctcttcctggactacgtgatgtttactatccacatgggctgccacggtttccgggatcccttcgagtgtaatatgtgcggttatagatcacacgaccggtacgaattttcctcacatatcgcacgcggcgagcatagagctctgctcaagtag

SEQ ID NO: 92208 - DNA, 1428 bp, Artificial Sequence
  derived and/or modified sequence
atggaagatatccagaccaatgcagagctgaaatccacccaggaacagtctgtccctgctgatgattctatgaaagttaaagacgaatacagcgaacgcgacgagaacgtcctgaaaagcgaaccgatgggcaacgcagaggaaccagaaattccttacagctattctcgcgagtacaatgaatatgagaacattaaactcgagcgccacgtggtctccttcgattccagccggcccacaagcggaaaaatgaactgtgacgtctgtggcctttcatgcatttcctttaacgtcctcatggtgcacaaacggagccacaccggagaaagaccgttccaatgcaatcagtgcggcgcctccttcacacagaagggcaatttgcttcggcacataaagctccacaccggcgagaagccatttaagtgccacctttgcaactatgcctgtcaaagacgcgatgcattgaccggacatctgcggacacattctgtcgagaagccttataagtgtgagttttgtggccgctcatacaagcagcgcagctctctggaggaacacaaagagaggtgcaggacgttcctccagtcgactgaccctggcgacaccgcttctgcagaggctcgccacatcaaagccgaaatgggatctgaacgtgccctcgttcttgatagactggccagtaacgtcgcgaaacgcaaatccagcatgccccaaaagttcatcggagagaaacggcactgcttcgatgtgaactacaacagctcctacatgtatgagaaggaaagcgagttaatccagactcgcatgatggaccaggcgattaataatgcaatcagttacctgggggctgaggcgttgcgtccgctcgtacagacgcctccggcaccaacctctgaaatggttcccgtaatttcatcaatgtacccaatcgctctaacacgggccgagatgtccaatggagcccctcaggagctggaaaaaaagagtatacatctgccagaaaagagcgtcccctcagaaagagggctgagccccaacaacagcggccacgattccacagatactgacagcaatcacgaagaacgacagaatcatatttatcagcaaaatcatatggtcttgtctagagcaaggaatggtatgcccttactgaaggaagttcctcgcagctatgagcttctgaaacccccaccgatctgccctagggatagcgtgaaggtaattaacaaagaaggcgaagtgatggatgtctacagatgtgaccactgtcgcgtgttgtttctggactacgttatgttcaccatccatatgggctgccatggattccgggaccccttcgagtgtaacatgtgcggctaccgttcccacgacaggtacgagtttagttctcacatcgcccggggggaacacagggccctgctgaagtag

SEQ ID NO: 92209 - DNA, 1392 bp, Artificial Sequence
  derived and/or modified sequence
tgacaggagcagagcgtgcctgcagatgacagcatgaaggtgaaggatgagtacagcgagagagatgaaaatgtgctgaagtctgagcccatgggaaatgctgaggagcctgagatcccctacagctacagccgggagtacaatgaatatgagaacatcaagctggagcggcacgtggtgtcctttgacagcagccggcccaccagcggcaagatgaactgtgatgtgtgtggcctgagctgcatctccttcaacgtgctgatggtgcacaagaggagccacactggagagcggcccttccagtgcaaccagtgtggggccagcttcacccagaagggcaacctgctgcggcacatcaagctgcacactggagagaagcccttcaagtgccacctgtgcaactatgcctgccagaggagagatgccctgaccggccacctgcggacccacagcgtggagaagccctacaagtgtgagttctgtggccgcagctacaagcagaggagcagcctggaggagcacaaggagcgctgcaggaccttcctgcagagcacagatcctggggacacagccagcgctgaggcccggcacatcaaggccgagatgggcagcgagcgggccctggtgctggaccggctggccagcaatgtggccaagaggaagagctccatgccccagaagttcatcggggagaagaggcactgctttgatgtgaactacaacagcagctacatgtatgagaaggagagcgagctgatccagaccaggatgatggaccaggccatcaacaatgccatctcctacctgggcgctgaggccctgcggcccctggtgcagaccccaccagcccccaccagcgagatggtgcctgtgatcagctccatgtaccccatcgccctgaccagggctgagatgagcaatggagccccccaggagctggagaagaagagcatccacctgcctgagaagtctgtgcccagcgagcggggcctgagccccaacaacagcggccatgacagcacagacacagacagcaaccacgaggagcggcagaaccacatctaccagcagaaccacatggtgctgagccgggccagaaatggcatgcccctgctgaaggaggtgcccaggagctatgagctgctgaagcccccacccatctgcccccgggacagcgtgaaggtgatcaacaaggagggggaggtgatggatgtgtaccgctgtgaccactgccgggtgctcttcctggactatgtgatgttcaccatccacatgggctgccacggcttccgggacccctttgagtgcaacatgtgtggctaccgcagccatgacagatatgagttcagcagccacatcgcccggggggagcaccgggccctgctgaagtag

SEQ ID NO: 92210 - DNA, 1428 bp, Artificial Sequence
  derived and/or modified sequence
atggaggacatccagaccaatgctgagctgaagagcacccaggagcagagcgtgcctgcagatgacagcatgaaggtgaaggatgagtacagcgagagagatgaaaatgtgctgaagtctgagcccatgggaaatgctgaggagcctgagatcccctacagctacagccgggagtacaatgaatatgagaacatcaagctggagcggcacgtggtgtcctttgacagcagccggcccaccagcggcaagatgaactgtgatgtgtgtggcctgagctgcatctccttcaacgtgctgatggtgcacaagaggagccacactggagagcggcccttccagtgcaaccagtgtggggccagcttcacccagaagggcaacctgctgcggcacatcaagctgcacactggagagaagcccttcaagtgccacctgtgcaactatgcctgccagaggagagatgccctgaccggccacctgcggacccacagcgtggagaagccctacaagtgtgagttctgtggccgcagctacaagcagaggagcagcctggaggagcacaaggagcgctgcaggaccttcctgcagagcacagatcctggggacacagccagcgctgaggcccggcacatcaaggccgagatgggcagcgagcgggccctggtgctggaccggctggccagcaatgtggccaagaggaagagctccatgccccagaagttcatcggggagaagaggcactgctttgatgtgaactacaacagcagctacatgtatgagaaggagagcgagctgatccagaccaggatgatggaccaggccatcaacaatgccatctcctacctgggcgctgaggccctgcggcccctggtgcagaccccaccagcccccaccagcgagatggtgcctgtgatcagctccatgtaccccatcgccctgaccagggctgagatgagcaatggagccccccaggagctggagaagaagagcatccacctgcctgagaagtctgtgcccagcgagcggggcctgagccccaacaacagcggccatgacagcacagacacagacagcaaccacgaggagcggcagaaccacatctaccagcagaaccacatggtgctgagccgggccagaaatggcatgcccctgctgaaggaggtgcccaggagctatgagctgctgaagcccccacccatctgcccccgggacagcgtgaaggtgatcaacaaggagggggaggtgatggatgtgtaccgctgtgaccactgccgggtgctcttcctggactatgtgatgttcaccatccacatgggctgccacggcttccgggacccctttgagtgcaacatgtgtggctaccgcagccatgacagatatgagttcagcagccacatcgcccggggggagcaccgggccctgctgaagtag

SEQ ID NO: 92211 - DNA, 1897 bp, Artificial Sequence
  derived and/or modified sequence
ctcaggagcagtctgtgcccgcagatgattcaatgaaagtgaaagatgaatacagtgaaagagatgagaatgttttaaagtcagaacccatgggaaatgcagaagagcctgaaatcccttacagctattcaagagaatataatgaatatgaaaacattaagttggagagacatgttgtctcattcgatagtagcaggccaaccagtggaaagatgaactgcgatgtgtgtggattatcctgcatcagcttcaatgtcttaatggttcataagcgaagccatactggtgaacgcccattccagtgtaatcagtgtggggcatcttttactcagaaaggtaacctcctccgccacattaaactgcacacaggggaaaaaccttttaagtgtcacctctgcaactatgcatgccaaagaagagatgcgctcacggggcatcttaggacacattctgtggagaaaccctacaaatgtgagttttgtggaaggagttacaagcagagaagttcccttgaggagcacaaggagcgctgccgtacatttcttcagagcactgacccaggggacactgcaagtgcggaggcaagacacatcaaagcagagatgggaagtgaaagagctctcgtactggacagattagcaagcaatgtggcaaaacgaaaaagctcaatgcctcagaaattcattggtgagaagcgccactgctttgatgtcaactataattcaagttacatgtatgagaaagagagtgagctcatacagacccgcatgatggaccaagccatcaataacgccatcagctatcttggcgccgaagccctgcgccccttggtccagacaccgcctgctcccacctcggagatggttccagttatcagcagcatgtatcccatagccctcacccgggctgagatgtcaaacggtgcccctcaagagctggaaaagaaaagcatccaccttccagagaagagcgtgccttctgagagaggcctctctcccaacaatagtggccacgactccacggacactgacagcaaccatgaagaacgccagaatcacatctatcagcaaaatcacatggtcctgtctcgggcccgcaatgggatgccacttctgaaggaggttccccgctcttacgaactcctcaagcccccgcccatctgcccaagagactccgtcaaagtgatcaacaaggaaggggaggtgatggatgtgtatcggtgtgaccactgccgcgtcctcttcctggactatgtgatgttcacgattcacatgggctgccacggcttccgtgaccctttcgagtgtaacatgtgtggatatcgaagccatgatcggtatgagttctcgtctcacatagccagaggagaacacagagccctgctgaagtgaatatctggtctcagggattgctcctatgtattcagcatcgtttctaaaaaccaatgacctcgcctaacagattgctctcaaaacatactcagttccaaacttcttttcataccatttttagctgtgttcacaggggtagccagggaaacactgtcttccttcagaaattattcgcaggtctagcatattattacttttgtgaaacctttgttttcccatcagggacttgaattttatggaatttaaaagccaaaaaggtatttggtcattatcttctacagcagtggaatgagtggtcccggagatgtgctatatgaaacattctttctgagatatatcaaccacacgtggaaaagcctttcagtcatacatgcaaatccacaaagaggaagagctgaccagctgaccttgctgggaagcctcacccttctgcccttcacaggctgaagggttaagatctaatctccctaatctaaatgacagtctaagagtaagtaaaagaacag

SEQ ID NO: 92212 - DNA, 1996 bp, Artificial Sequence
  derived and/or modified sequence
gcaggagcacgtggagaggccgagtagccacagcggcagctccagcccggcccggcagcgacatggaagatatacaaacaaatgcggaactgaaaagcactcaggagcagtctgtgcccgcagatgattcaatgaaagtgaaagatgaatacagtgaaagagatgagaatgttttaaagtcagaacccatgggaaatgcagaagagcctgaaatcccttacagctattcaagagaatataatgaatatgaaaacattaagttggagagacatgttgtctcattcgatagtagcaggccaaccagtggaaagatgaactgcgatgtgtgtggattatcctgcatcagcttcaatgtcttaatggttcataagcgaagccatactggtgaacgcccattccagtgtaatcagtgtggggcatcttttactcagaaaggtaacctcctccgccacattaaactgcacacaggggaaaaaccttttaagtgtcacctctgcaactatgcatgccaaagaagagatgcgctcacggggcatcttaggacacattctgtggagaaaccctacaaatgtgagttttgtggaaggagttacaagcagagaagttcccttgaggagcacaaggagcgctgccgtacatttcttcagagcactgacccaggggacactgcaagtgcggaggcaagacacatcaaagcagagatgggaagtgaaagagctctcgtactggacagattagcaagcaatgtggcaaaacgaaaaagctcaatgcctcagaaattcattggtgagaagcgccactgctttgatgtcaactataattcaagttacatgtatgagaaagagagtgagctcatacagacccgcatgatggaccaagccatcaataacgccatcagctatcttggcgccgaagccctgcgccccttggtccagacaccgcctgctcccacctcggagatggttccagttatcagcagcatgtatcccatagccctcacccgggctgagatgtcaaacggtgcccctcaagagctggaaaagaaaagcatccaccttccagagaagagcgtgccttctgagagaggcctctctcccaacaatagtggccacgactccacggacactgacagcaaccatgaagaacgccagaatcacatctatcagcaaaatcacatggtcctgtctcgggcccgcaatgggatgccacttctgaaggaggttccccgctcttacgaactcctcaagcccccgcccatctgcccaagagactccgtcaaagtgatcaacaaggaaggggaggtgatggatgtgtatcggtgtgaccactgccgcgtcctcttcctggactatgtgatgttcacgattcacatgggctgccacggcttccgtgaccctttcgagtgtaacatgtgtggatatcgaagccatgatcggtatgagttctcgtctcacatagccagaggagaacacagagccctgctgaagtgaatatctggtctcagggattgctcctatgtattcagcatcgtttctaaaaaccaatgacctcgcctaacagattgctctcaaaacatactcagttccaaacttcttttcataccatttttagctgtgttcacaggggtagccagggaaacactgtcttccttcagaaattattcgcaggtctagcatattattacttttgtgaaacctttgttttcccatcagggacttgaattttatggaatttaaaagccaaaaaggtatttggtcattatcttctacagcagtggaatgagtggtcccggagatgtgctatatgaaacattctttctgagatatatcaaccacacgtggaaaagcctttcagtcatacatgcaaatccacaaagaggaagagctgaccagctgaccttgctgggaagcctcacccttctgcccttcacaggctgaagggttaagatctaatctccctaatctaaatgacagtctaagagtaagtaaaagaacag

SEQ ID NO: 92213 - DNA, 1392 bp, Artificial Sequence
  derived and/or modified sequence
tgacaggagcagagcgtgcccgccgacgacagcatgaaggtgaaggacgagtacagcgaacgagacgagaatgtgctgaaatctgagcctatggggaatgccgaggaacccgagatcccttatagttacagcagggaatacaacgaatacgaaaatatcaaactggaacggcatgtggtctctttcgattcctcccgaccgacatccgggaagatgaactgtgatgtctgtgggttgtcctgtatttctttcaatgtgctaatggtgcataagcggagccacactggggaacgcccattccagtgtaatcagtgcggtgcatccttcacccagaagggtaacctcttgcgccacattaagttacatacaggggagaagccctttaaatgtcacctctgtaactatgcttgccagcgtagggatgctttgactggacacctcagaacacattccgttgagaagccttacaagtgcgagttctgcgggcgctcctacaaacagagaagttctttagaggaacacaaagagagatgccggacattcttgcagtcgacggaccctggtgacactgcgagcgccgaagcccgtcatataaaggcagaaatgggaagtgagcgcgccctggtgttagacaggttagctagcaatgtggcgaagaggaagagttctatgccccagaagttcatcggtgagaagcgccactgcttcgacgtcaattacaactcgagctatatgtacgaaaaggagtctgagctgatccaaaccaggatgatggatcaggctatcaataatgccatcagttacctgggcgctgaggcattacgaccactcgtgcaaacgcccccagcacctaccagtgagatggttcccgtcatatccagcatgtaccctatcgctttaactagagctgaaatgtcaaacggtgccccccaggagctggaaaaaaaatcaatacaccttccggagaaatctgtgccaagcgaaagaggcttgtctccaaacaactccgggcatgactctactgacaccgactcgaatcatgaagagagacaaaatcatatttaccaacagaatcatatggttttatccagggcaagaaatgggatgccactgctgaaggaagtgccaaggtcgtatgaactgcttaaaccacctcctatttgccccagagattctgttaaggttataaacaaggagggagaggtgatggatgtgtataggtgcgatcactgcagagttctattccttgattacgtgatgtttacaattcatatgggctgtcacgggtttcgggatcccttcgaatgcaacatgtgcggttatcgcagtcatgacagatatgagttctccagccacatcgcaagaggcgagcacagggccctgcttaaatag

SEQ ID NO: 92214 - DNA, 1428 bp, Artificial Sequence
  derived and/or modified sequence
atggaggacatccagaccaacgccgagctgaagagcacccaggagcaatctgtccccgctgacgatagtatgaaggttaaagatgaatacagtgagcgagacgagaatgtcctcaagagcgaacccatgggaaatgctgaggaacccgagattccgtactcttacagtagagaatataacgaatatgaaaatattaagcttgagcgtcacgttgtgtcattcgatagctcccgaccaaccagtggcaagatgaattgcgacgtctgcggattatcatgtatctcgtttaacgtcctgatggtgcacaagagatcccatacaggagagagaccattccagtgcaatcagtgtggtgctagttttacacaaaagggaaatcttctgaggcacatcaagctgcataccggcgaaaagccctttaagtgccatctctgtaactatgcatgccaacgccgagacgccctcaccggccatctgcggactcacagcgtcgaaaagccatacaagtgcgagttttgcggcaggtcatataaacagcgaagttctttagaggaacacaaggagcgatgccgaaccttcctgcagagtactgacccaggtgacactgcaagcgctgaggccagacacattaaggctgagatgggaagcgaaagagctttagtgttggacagactggccagtaacgtggctaagcgcaagagttcgatgccccaaaagtttattggcgagaaacgacactgttttgacgtgaattacaactcatcctatatgtatgaaaaagaaagcgagctgatacagacccgcatgatggatcaggcgatcaacaacgctatttcatatctgggagcggaggctctgcgaccacttgtacagaccccccccgcccccacgagcgaaatggtgcccgttattagtagtatgtatccaatcgccttaacccgggcagaaatgtctaatggcgccccccaggagctggagaagaaatccatccatctcccagaaaagtcagtgccatccgagcgcgggctgtcaccgaataattcgggtcacgacagtaccgatacagacagtaaccatgaggagagacagaaccacatttaccaacagaatcacatggtgttgtcaagagcccgcaatggaatgcctttgctcaaggaagtcccgcggtcatacgagttgctcaagccaccacccatctgccctcgcgacagtgtgaaggtgattaataaggaaggggaggtcatggatgtctataggtgtgaccactgccgggtcctctttctggactacgtgatgtttaccatccatatgggctgccacggcttcagggatcccttcgagtgtaatatgtgtgggtacagatcccatgatagatacgaattctcttcgcacatcgccaggggggagcatcgagccctgcttaagtag

SEQ ID NO: 92215 - DNA, 1392 bp, Artificial Sequence
  derived and/or modified sequence
taacaggaacagagtgtgcctgcagatgactccatgaaagtcaaggatgaatattctgagcgggacgaaaatgtgctcaagtctgagcctatgggaaacgcagaggaaccagaaataccttactcctactcacgagagtataacgaatacgagaacattaagctggaaaggcatgtggtgtcatttgatagctcaaggcccacctctgggaagatgaactgtgatgtttgtgggcttagttgcatatcttttaacgtcttgatggtgcacaaacggagccataccggcgagagacctttccagtgcaatcagtgtggggcaagcttcacgcagaagggaaacctgctgcgccatataaagttgcatacaggcgagaagccgtttaaatgtcatctgtgtaattacgcgtgtcaacggcgtgatgcgctcacagggcatctcaggacccattcggttgagaagccatataagtgtgaattttgtggcagaagctacaagcaacggtcgagcctcgaggagcataaggagcgatgccgcactttccttcagagtacggacccaggagacaccgcatccgcggaggcaagacatattaaagcggagatggggagtgaaagggctcttgtcctggacaggctggcaagcaacgtggccaaacggaagagctccatgccccaaaaatttattggagagaaacgacactgctttgatgtgaattacaatagctcgtacatgtatgagaaggaaagcgagctcatccagacgagaatgatggatcaggcgataaataatgccatatcctatttgggagccgaggctcttcgaccactggtacaaaccccccctgcccctacatccgagatggtgcctgttataagcagtatgtacccaattgccctgactcgggctgagatgagtaatggagctccccaggagcttgaaaaaaagtcaattcatctgccggagaaatcagttccatctgaaagggggctgagtccaaataattccggccacgactctactgatactgacagcaaccacgaggaacgacagaatcatatttaccaacagaatcacatggtcttgtccagagcccgaaatggaatgccccttttgaaagaggtaccacggtcttatgagctgctgaagcctccccctatctgtccacgtgatagcgtgaaggtgattaataaggagggagaggtaatggacgtctatcgctgtgaccactgccgggttctctttctcgactacgtgatgtttacgatacatatgggctgccatggatttagggaccctttcgagtgcaacatgtgcggctaccgttctcatgatcgctatgaattctccagccacattgctaggggtgaacacagagctctgctgaagtag

SEQ ID NO: 92216 - DNA, 1428 bp, Artificial Sequence
  derived and/or modified sequence
atggaggacatacagactaacgccgaattgaagagcacacaggaacagtcagtgccggctgatgacagtatgaaagttaaggatgaatattcagaacgagacgagaacgtgctgaaatctgaaccaatgggtaacgcagaagaacccgagatcccgtactcttacagccgggagtataacgagtacgagaatattaagctggagcggcacgtggtcagcttcgacagctccaggcccaccagcggcaaaatgaattgtgacgtctgcggactgagctgcatcagtttcaacgtgttgatggtgcacaagaggagccatacaggagagaggccctttcagtgtaaccagtgtggggcttcatttacccagaaggggaacctcctgaggcacataaagctccacaccggggaaaagccttttaaatgccatctgtgtaactacgcctgtcaacggagggatgccctgaccggccatttgcgtacccactctgtggagaagccgtataagtgtgaattctgtggcagatcatacaaacaacgctctagtcttgaggaacataaagagcgatgtcgaacatttctgcagagtactgaccctggagacaccgcatccgcagaagctcgccatatcaaagccgagatggggagcgagcgagcccttgtgcttgaccgtctcgcttctaacgtggctaaaaggaaatccagtatgccacagaaattcataggagaaaagagacattgcttcgacgtgaactacaattcttcttatatgtacgagaaggaaagcgagctcatccaaacccgcatgatggaccaggcaatcaacaacgcaatttcctatctaggagcggaagcactgaggcctctagtgcagactcctcctgcacccacctcagagatggtgccagtaatttcaagtatgtacccgattgccttgactagggcggaaatgtcaaacggcgctccacaagaactagagaagaaaagcatccatctgcccgaaaagtccgtcccttccgaaagaggcctgtccccgaacaactctggccacgatagtaccgatactgacagtaatcacgaggagcgccagaatcacatatatcagcaaaaccacatggtcctcagcagggctcgaaacggtatgcccctgctgaaggaagtgcctcgctcctatgaactcctcaagcctccacccatctgtcccagggactcagtcaaggtgataaacaaagagggggaggttatggatgtctaccgctgcgaccactgtcgagtgctattcctggattatgtgatgtttacgatccacatgggatgccacggattcagggacccattcgaatgcaacatgtgcgggtatcgttctcacgatcgatacgagttctctagtcatatcgccaggggcgagcaccgggctctgctaaagtag

SEQ ID NO: 92217 - protein, 424 aa, Artificial Sequence
  derived and/or modified sequence
  misc_feature (1)..(1): Xaa can be any naturally occurring amino acid
XQEQSVPADDSMKVKDEYSERDENVLKSEPMGNAEEPEIPYSYSREYNEYENIKLERHVVSFDSSRPTSGKMNCDVCGLSCISFNVLMVHKRSHTGERPFQCNQCGASFTQKGNLLRHIKLHTGEKPFKCHLCNYACQRRDALTGHLRTHSASAEARHIKAEMGSERALVLDRLASNVAKRKSSMPQKFIGEKRHCFDVNYNSSYMYEKESELIQTRMMDQAINNAISYLGAEALRPLVQTPPAPTSEMVPVISSMYPIALTRAEMSNGAPQELEKKSIHLPEKSVPSERGLSPNNSGHDSTDTDSNHEERQNHIYQQNHMVLSRARNGMPLLKEVPRSYELLKPPPICPRDSVKVINKEGEVMDVYRCDHCRVLFLDYVMFTIHMGCHGFRDPFECNMCGYRSHDRYEFSSHIARGEHRALLK

SEQ ID NO: 92218 - DNA, 1275 bp, Artificial Sequence
  derived and/or modified sequence
tgacaggagcagagcgtgcccgccgacgacagcatgaaggtgaaggacgagtacagcgagagagacgagaacgtgctgaagagcgagcccatgggcaacgccgaggagcccgagatcccctacagctacagcagagagtacaacgagtacgagaacatcaagctggagagacacgtggtgagcttcgacagcagcagacccaccagcggcaagatgaactgcgacgtgtgcggcctgagctgcatcagcttcaacgtgctgatggtgcacaagagaagccacaccggcgagagacccttccagtgcaaccagtgcggcgccagcttcacccagaagggcaacctgctgagacacatcaagctgcacaccggcgagaagcccttcaagtgccacctgtgcaactacgcctgccagagaagagacgccctgaccggccacctgagaacccacagcgccagcgccgaggccagacacatcaaggccgagatgggcagcgagagagccctggtgctggacagactggccagcaacgtggccaagagaaagagcagcatgccccagaagttcatcggcgagaagagacactgcttcgacgtgaactacaacagcagctacatgtacgagaaggagagcgagctgatccagaccagaatgatggaccaggccatcaacaacgccatcagctacctgggcgccgaggccctgagacccctggtgcagaccccccccgcccccaccagcgagatggtgcccgtgatcagcagcatgtaccccatcgccctgaccagagccgagatgagcaacggcgccccccaggagctggagaagaagagcatccacctgcccgagaagagcgtgcccagcgagagaggcctgagccccaacaacagcggccacgacagcaccgacaccgacagcaaccacgaggagagacagaaccacatctaccagcagaaccacatggtgctgagcagagccagaaacggcatgcccctgctgaaggaggtgcccagaagctacgagctgctgaagcccccccccatctgccccagagacagcgtgaaggtgatcaacaaggagggcgaggtgatggacgtgtacagatgcgaccactgcagagtgctgttcctggactacgtgatgttcaccatccacatgggctgccacggcttcagagaccccttcgagtgcaacatgtgcggctacagaagccacgacagatacgagttcagcagccacatcgccagaggcgagcacagagccctgctgaagtag

SEQ ID NO: 92219 - DNA, 1275 bp, Artificial Sequence
  derived and/or modified sequence
tagcaggagcagtccgttcccgcagacgacagcatgaaggtgaaagacgaatacagtgaaagagatgaaaacgtgctaaaatcagaacctatgggtaatgcggaagaacccgagatcccatacagctactccagggagtataatgagtatgagaacattaaattggagaggcacgtggtgagcttcgacagtagccgtccaacaagcggaaagatgaattgtgacgtgtgcgggctgagctgcatcagtttcaacgtactgatggtgcataagagatcccataccggagagagaccgtttcagtgcaatcagtgcggcgcatccttcacccagaaaggaaatctactcaggcacatcaagctgcacacaggagagaagcctttcaagtgccacctctgtaactatgcctgccagagaagagatgcccttacgggacatctcaggacgcacagtgccagcgctgaagctagacacatcaaagccgagatgggctccgaacgtgccctggttctggaccgactcgcttccaatgtagccaagagaaagagttccatgccacagaagttcatcggggagaagcgtcactgtttcgatgtgaactataattctagttacatgtacgaaaaggaatctgagctcatccaaactcgaatgatggatcaggctattaacaacgccatttcttacctgggtgctgaggctttacgtcccctagttcaaacaccgcctgcccccaccagcgagatggtgccagtcatcagtagcatgtaccccatcgccctgacgagggcagaaatgagcaatggagctcctcaggaactggaaaaaaagtccatccatctgcctgagaaaagcgttcctagtgaaagagggctgagccctaacaattccgggcacgacagcaccgacacagattcaaatcacgaagagcggcagaaccacatctaccagcagaatcatatggtgctgtctagggccagaaacggaatgcctctgctaaaagaagttcctcgctcttacgagctgcttaagcctcccccaatttgtccaagggactccgtaaaagtgatcaataaggaaggagaagtgatggacgtgtataggtgcgaccattgtcgcgtgttgtttctggattacgtcatgttcaccatacacatgggctgtcacggcttccgcgacccatttgagtgcaacatgtgcgggtatcgaagtcacgatagatacgagttctctagccacatagctaggggcgagcatagagccctgctgaaatag

SEQ ID NO: 92220 - DNA, 1275 bp, Artificial Sequence
  derived and/or modified sequence
tgacaggagcagagcgtgcctgcagatgacagcatgaaggtgaaggatgagtacagcgagagagatgaaaatgtgctgaagtctgagcccatgggaaatgctgaggagcctgagatcccctacagctacagccgggagtacaatgaatatgagaacatcaagctggagcggcacgtggtgtcctttgacagcagccggcccaccagcggcaagatgaactgtgatgtgtgtggcctgagctgcatctccttcaacgtgctgatggtgcacaagaggagccacactggagagcggcccttccagtgcaaccagtgtggggccagcttcacccagaagggcaacctgctgcggcacatcaagctgcacactggagagaagcccttcaagtgccacctgtgcaactatgcctgccagaggagagatgccctgaccggccacctgcggacccacagcgccagcgctgaggcccggcacatcaaggccgagatgggcagcgagcgggccctggtgctggaccggctggccagcaatgtggccaagaggaagagctccatgccccagaagttcatcggggagaagaggcactgctttgatgtgaactacaacagcagctacatgtatgagaaggagagcgagctgatccagaccaggatgatggaccaggccatcaacaatgccatctcctacctgggcgctgaggccctgcggcccctggtgcagaccccaccagcccccaccagcgagatggtgcctgtgatcagctccatgtaccccatcgccctgaccagggctgagatgagcaatggagccccccaggagctggagaagaagagcatccacctgcctgagaagtctgtgcccagcgagcggggcctgagccccaacaacagcggccatgacagcacagacacagacagcaaccacgaggagcggcagaaccacatctaccagcagaaccacatggtgctgagccgggccagaaatggcatgcccctgctgaaggaggtgcccaggagctatgagctgctgaagcccccacccatctgcccccgggacagcgtgaaggtgatcaacaaggagggggaggtgatggatgtgtaccgctgtgaccactgccgggtgctcttcctggactatgtgatgttcaccatccacatgggctgccacggcttccgggacccctttgagtgcaacatgtgtggctaccgcagccatgacagatatgagttcagcagccacatcgcccggggggagcaccgggccctgctgaagtag

SEQ ID NO: 92221 - DNA, 1780 bp, Artificial Sequence
  derived and/or modified sequence
ctcaggagcagtctgtgcccgcagatgattcaatgaaagtgaaagatgaatacagtgaaagagatgagaatgttttaaagtcagaacccatgggaaatgcagaagagcctgaaatcccttacagctattcaagagaatataatgaatatgaaaacattaagttggagagacatgttgtctcattcgatagtagcaggccaaccagtggaaagatgaactgcgatgtgtgtggattatcctgcatcagcttcaatgtcttaatggttcataagcgaagccatactggtgaacgcccattccagtgtaatcagtgtggggcatcttttactcagaaaggtaacctcctccgccacattaaactgcacacaggggaaaaaccttttaagtgtcacctctgcaactatgcatgccaaagaagagatgcgctcacggggcatcttaggacacattctgcaagtgcggaggcaagacacatcaaagcagagatgggaagtgaaagagctctcgtactggacagattagcaagcaatgtggcaaaacgaaaaagctcaatgcctcagaaattcattggtgagaagcgccactgctttgatgtcaactataattcaagttacatgtatgagaaagagagtgagctcatacagacccgcatgatggaccaagccatcaataacgccatcagctatcttggcgccgaagccctgcgccccttggtccagacaccgcctgctcccacctcggagatggttccagttatcagcagcatgtatcccatagccctcacccgggctgagatgtcaaacggtgcccctcaagagctggaaaagaaaagcatccaccttccagagaagagcgtgccttctgagagaggcctctctcccaacaatagtggccacgactccacggacactgacagcaaccatgaagaacgccagaatcacatctatcagcaaaatcacatggtcctgtctcgggcccgcaatgggatgccacttctgaaggaggttccccgctcttacgaactcctcaagcccccgcccatctgcccaagagactccgtcaaagtgatcaacaaggaaggggaggtgatggatgtgtatcggtgtgaccactgccgcgtcctcttcctggactatgtgatgttcacgattcacatgggctgccacggcttccgtgaccctttcgagtgtaacatgtgtggatatcgaagccatgatcggtatgagttctcgtctcacatagccagaggagaacacagagccctgctgaagtgaatatctggtctcagggattgctcctatgtattcagcatcgtttctaaaaaccaatgacctcgcctaacagattgctctcaaaacatactcagttccaaacttcttttcataccatttttagctgtgttcacaggggtagccagggaaacactgtcttccttcagaaattattcgcaggtctagcatattattacttttgtgaaacctttgttttcccatcagggacttgaattttatggaatttaaaagccaaaaaggtatttggtcattatcttctacagcagtggaatgagtggtcccggagatgtgctatatgaaacattctttctgagatatatcaaccacacgtggaaaagcctttcagtcatacatgcaaatccacaaagaggaagagctgaccagctgaccttgctgggaagcctcacccttctgcccttcacaggctgaagggttaagatctaatctccctaatctaaatgacagtctaagagtaagtaaaagaacag

SEQ ID NO: 92222 - DNA, 1275 bp, Artificial Sequence
  derived and/or modified sequence
tgacaggagcagagcgtgcccgccgacgacagcatgaaggtgaaggacgagtattctgaaagggacgagaacgtgctgaagagtgagcctatggggaatgcagaagaacctgagatcccttactcatactccagggagtacaatgaatacgaaaacatcaagttggaacgccacgtcgttagttttgattcaagcaggcctacttcaggaaagatgaattgtgacgtttgcgggctcagctgtatatcattcaacgtgcttatggtacacaagagatcccacactggtgaaaggccattccagtgcaaccaatgtggggctagcttcacccagaaggggaacctcctacgccacatcaaactgcacaccggtgaaaaacctttcaaatgtcacctgtgcaattacgcatgtcagcgccgagatgccctcaccggtcacttaagaacacacagtgcctctgctgaagcgagacatatcaaagccgagatggggtctgaaagagcactcgttctagaccgactggctagcaacgtggcgaagcggaaatccagtatgccacagaagttcattggagaaaagcggcattgttttgatgtcaattataatagctcatacatgtacgagaaggaatcggagttgatccagacgcgcatgatggatcaagctatcaacaacgccatcagctacctgggtgccgaagcactccggcccctggtacagaccccccctgccccaaccagcgaaatggtaccagtaatctccagcatgtatccaatagcgttaactagagccgaaatgtcaaacggtgcaccacaggagcttgagaaaaaaagcattcacctgcccgaaaagtccgtcccatctgagcgaggcttatctcccaacaactcgggacacgactccaccgatacggacagcaaccacgaagagaggcagaatcacatttatcaacagaatcatatggtgttaagtagggcccgaaatggaatgcctctcctgaaggaggtcccccgcagctacgaactactgaagccccccccaatttgtccccgcgactccgtgaaggtgatcaataaagagggcgaagtgatggatgtgtaccggtgtgaccactgccgcgtgcttttcttggattatgttatgttcactatccacatgggatgtcatgggttccgagatcctttcgagtgtaacatgtgcggttaccgttcccacgacagatatgagtttagctctcatattgctagaggcgagcacagggctctgcttaagtag

SEQ ID NO: 92223 - DNA, 1275 bp, Artificial Sequence
  derived and/or modified sequence
tgacaggagcaaagcgtaccagccgatgacagtatgaaggtgaaagacgagtatagcgagcgggatgaaaacgtgctaaaatccgaaccaatgggaaacgccgaggagccagagatcccctatagctatagtcgtgagtacaacgagtatgagaacataaagctggaaaggcacgtggtttcattcgactccagcaggcctacctctggaaagatgaattgcgacgtctgcggcctctcgtgtatcagtttcaacgtcctgatggtacataaaagatctcacaccggcgaacgtcctttccagtgtaatcagtgtggagcgtcattcacacaaaagggaaatctcctccgccacattaaacttcacactggcgagaaaccattcaagtgccatctgtgtaattatgcctgccagcgcagagatgccctgaccggccacctgcgcacccactcagcttccgccgaggcacgacatatcaaggctgaaatgggatcagagcgagcgctggtcctggaccgactcgcctctaacgtggctaagaggaaatcatcgatgcctcagaaattcattggcgaaaaaaggcactgcttcgatgtgaattataactccagttacatgtacgaaaaggaatccgagcttattcagacacgcatgatggaccaagcaattaacaatgcaatatcttatttgggggcagaggcacttcgcccactagtgcagacaccaccggcacctaccagcgaaatggttcctgtaatcagctcaatgtatcctattgcccttacccgggcagagatgtccaatggtgccccacaggaactggagaaaaagtccatccatcttccagaaaaatcagtgccatctgaacgaggtctctcccccaataattccggacatgacagtacagacacggattctaaccacgaagagaggcagaatcacatttatcagcagaatcatatggtgctgtcccgggcaagaaatggcatgcctctccttaaggaagtacctcggagctatgaacttctgaagcccccacctatttgtcccagagattcagtcaaggtaatcaataaggagggagaggtgatggacgtctaccgctgcgaccattgccgcgtcctgtttctggattacgtaatgttcacaattcacatgggctgccacggcttccgcgacccgttcgaatgcaacatgtgcggctacagaagtcacgaccggtacgagttttccagtcatatcgcaagaggggaacatagagccctcttaaagtag

SEQ ID NO: 92224 - protein, 422 aa, Artificial Sequence
  derived and/or modified sequence
MEDIQTNAELKSTQEQSVPAESAAVLNDYSLTKSHEMENVDSGEGPANEDEDIGGERPFQCNQCGASFTQKGNLLRHIKLHTGEKPFKCHLCNYACQRRDALTGHLRTHSVEKPYKCEFCGRSYKQRSSLEEHKERCRTFLQSTDPGDTASAEARHIKAEMGSERALVLDRLASNVAKRKSSMPQKFIGEKRHCFDVNYNSSYMYEKESELIQTRMMDQAINNAISYLGAEALRPLVQTPPAPTSEMVPVISSMYPIALTRAEMSNGAPQELEKKSIHLPEKSVPSERGLSPNNSGHDSTDTDSNHEERQNHIYQQNHMVLSRARNGMPLLKEVPRSYELLKPPPICPRDSVKVINKEGEVMDVYRCDHCRVLFLDYVMFTIHMGCHGFRDPFECNMCGYRSHDRYEFSSHIARGEHRALLK

SEQ ID NO: 92225 - DNA, 1269 bp, Artificial Sequence
  derived and/or modified sequence
atggaggacatccagaccaacgccgagctgaagagcacccaggagcagagcgtgcccgccgagagcgccgccgtgctgaacgactacagcctgaccaagagccacgagatggagaacgtggacagcggcgagggccccgccaacgaggacgaggacatcggcggcgagagacccttccagtgcaaccagtgcggcgccagcttcacccagaagggcaacctgctgagacacatcaagctgcacaccggcgagaagcccttcaagtgccacctgtgcaactacgcctgccagagaagagacgccctgaccggccacctgagaacccacagcgtggagaagccctacaagtgcgagttctgcggcagaagctacaagcagagaagcagcctggaggagcacaaggagagatgcagaaccttcctgcagagcaccgaccccggcgacaccgccagcgccgaggccagacacatcaaggccgagatgggcagcgagagagccctggtgctggacagactggccagcaacgtggccaagagaaagagcagcatgccccagaagttcatcggcgagaagagacactgcttcgacgtgaactacaacagcagctacatgtacgagaaggagagcgagctgatccagaccagaatgatggaccaggccatcaacaacgccatcagctacctgggcgccgaggccctgagacccctggtgcagaccccccccgcccccaccagcgagatggtgcccgtgatcagcagcatgtaccccatcgccctgaccagagccgagatgagcaacggcgccccccaggagctggagaagaagagcatccacctgcccgagaagagcgtgcccagcgagagaggcctgagccccaacaacagcggccacgacagcaccgacaccgacagcaaccacgaggagagacagaaccacatctaccagcagaaccacatggtgctgagcagagccagaaacggcatgcccctgctgaaggaggtgcccagaagctacgagctgctgaagcccccccccatctgccccagagacagcgtgaaggtgatcaacaaggagggcgaggtgatggacgtgtacagatgcgaccactgcagagtgctgttcctggactacgtgatgttcaccatccacatgggctgccacggcttcagagaccccttcgagtgcaacatgtgcggctacagaagccacgacagatacgagttcagcagccacatcgccagaggcgagcacagagccctgctgaagtag

SEQ ID NO: 92226 - DNA, 1269 bp, Artificial Sequence
  derived and/or modified sequence
atggaagatattcaaacaaacgcagaactgaagtctacccaagaacagtccgtgcctgctgaaagtgcggcagtgctaaacgactactctttaactaaatcacatgaaatggaaaacgtagatagcggggaggggccagccaacgaagacgaagatataggtggggaacgacctttccagtgcaatcagtgcggcgcgtccttcactcaaaaagggaacctcctgaggcatattaagctgcacaccggcgagaaaccctttaaatgtcatctgtgtaactatgcatgccagcggagggatgctctgaccgggcacctgcgcacacactctgttgaaaaaccttacaagtgcgagttctgtggccggtcctacaagcagcggagctccttggaggagcacaaagaaaggtgcaggactttcctgcaaagtacggatcccggcgatacagcatcagctgaggcgcgccacataaaggccgagatgggctcagagcgggcgctggtactggaccggttggcgagcaatgtggcaaaaagaaagagttcaatgccacagaaattcattggggagaaaagacactgtttcgatgtgaactacaattctagctatatgtacgaaaaggagagcgagttgatccagacgcgcatgatggatcaagccatcaacaacgccatatcctatctgggcgctgaggcgctgcgacctctggtgcagactcctccggccccgacttcagaaatggtacctgtgataagttctatgtaccctatcgcactgacccgcgcagagatgtctaatggtgccccccaggagctggagaaaaagagtatccatctgccagagaaaagtgtgccatccgagaggggcttatcaccaaataattctggacacgattccaccgacaccgactctaatcacgaagaaagacaaaatcacatctaccagcaaaaccacatggtgctttcacgagctagaaatgggatgcccctcttgaaagaagtgcccaggtcgtatgagttgctgaaacccccgcctatctgccctcgcgattccgtgaaggttataaataaggagggggaagtgatggatgtctaccgctgcgaccattgcagggtactctttcttgattacgttatgtttacaattcacatgggttgtcacgggttcagggaccccttcgaatgcaacatgtgcggctatcgcagtcacgataggtatgaatttagttcccacatcgccaggggcgagcacagagcacttctgaaatag

SEQ ID NO: 92227 - DNA, 1269 bp, Artificial Sequence
  derived and/or modified sequence
atggaggacatccagaccaatgctgagctgaagagcacccaggagcagagcgtgcctgctgagagcgctgctgtgctgaatgactacagcctgaccaagagccatgagatggagaatgtggacagcggggagggccctgccaatgaagatgaagatattggaggagagcggcccttccagtgcaaccagtgtggggccagcttcacccagaagggcaacctgctgcggcacatcaagctgcacactggagagaagcccttcaagtgccacctgtgcaactatgcctgccagaggagagatgccctgaccggccacctgcggacccacagcgtggagaagccctacaagtgtgagttctgtggccgcagctacaagcagaggagcagcctggaggagcacaaggagcgctgcaggaccttcctgcagagcacagaccccggggacacagccagcgctgaggcccggcacatcaaggccgagatgggcagcgagcgggccctggtgctggaccggctggccagcaatgtggccaagaggaagagctccatgccccagaagttcatcggggagaagaggcactgctttgatgtgaactacaacagcagctacatgtatgagaaggagagcgagctgatccagaccaggatgatggaccaggccatcaacaatgccatctcctacctgggcgctgaggccctgcggcccctggtgcagaccccaccagcccccaccagcgagatggtgcctgtgatcagctccatgtaccccatcgccctgaccagggctgagatgagcaatggagccccccaggagctggagaagaagagcatccacctgcctgagaagtctgtgcccagcgagcggggcctgagccccaacaacagcggccatgacagcacagacacagacagcaaccacgaggagcggcagaaccacatctaccagcagaaccacatggtgctgagccgggccagaaatggcatgcccctgctgaaggaggtgcccaggagctatgagctgctgaagcccccacccatctgcccccgggacagcgtgaaggtgatcaacaaggagggggaggtgatggatgtgtaccgctgtgaccactgccgggtgctcttcctggactatgtgatgttcaccatccacatgggctgccacggcttccgggacccctttgagtgcaacatgtgtggctaccgcagccatgacagatatgagttcagcagccacatcgcccggggggagcaccgggccctgctgaagtag

SEQ ID NO: 92228 - DNA, 1837 bp, Artificial Sequence
  derived and/or modified sequence
gcaggagcacgtggagaggccgagtagccacagcggcagctccagcccggcccggcagcgacatggaagatatacaaacaaatgcggaactgaaaagcactcaggagcagtctgtgcccgcagaaagtgcagcggttttgaatgactacagtttaaccaaatctcatgaaatggaaaatgtggacagtggagaaggcccagccaatgaagatgaagacataggaggtgaacgcccattccagtgtaatcagtgtggggcatcttttactcagaaaggtaacctcctccgccacattaaactgcacacaggggaaaaaccttttaagtgtcacctctgcaactatgcatgccaaagaagagatgcgctcacggggcatcttaggacacattctgtggagaaaccctacaaatgtgagttttgtggaaggagttacaagcagagaagttcccttgaggagcacaaggagcgctgccgtacatttcttcagagcactgacccaggggacactgcaagtgcggaggcaagacacatcaaagcagagatgggaagtgaaagagctctcgtactggacagattagcaagcaatgtggcaaaacgaaaaagctcaatgcctcagaaattcattggtgagaagcgccactgctttgatgtcaactataattcaagttacatgtatgagaaagagagtgagctcatacagacccgcatgatggaccaagccatcaataacgccatcagctatcttggcgccgaagccctgcgccccttggtccagacaccgcctgctcccacctcggagatggttccagttatcagcagcatgtatcccatagccctcacccgggctgagatgtcaaacggtgcccctcaagagctggaaaagaaaagcatccaccttccagagaagagcgtgccttctgagagaggcctctctcccaacaatagtggccacgactccacggacactgacagcaaccatgaagaacgccagaatcacatctatcagcaaaatcacatggtcctgtctcgggcccgcaatgggatgccacttctgaaggaggttccccgctcttacgaactcctcaagcccccgcccatctgcccaagagactccgtcaaagtgatcaacaaggaaggggaggtgatggatgtgtatcggtgtgaccactgccgcgtcctcttcctggactatgtgatgttcacgattcacatgggctgccacggcttccgtgaccctttcgagtgtaacatgtgtggatatcgaagccatgatcggtatgagttctcgtctcacatagccagaggagaacacagagccctgctgaagtgaatatctggtctcagggattgctcctatgtattcagcatcgtttctaaaaaccaatgacctcgcctaacagattgctctcaaaacatactcagttccaaacttcttttcataccatttttagctgtgttcacaggggtagccagggaaacactgtcttccttcagaaattattcgcaggtctagcatattattacttttgtgaaacctttgttttcccatcagggacttgaattttatggaatttaaaagccaaaaaggtatttggtcattatcttctacagcagtggaatgagtggtcccggagatgtgctatatgaaacattctttctgagatatatcaaccacacgtggaaaagcctttcagtcatacatgcaaatccacaaagaggaagagctgaccagctgaccttgctgggaagcctcacccttctgcccttcacaggctgaagggttaagatctaatctccctaatctaaatgacagtctaagagtaagtaaaagaacag

SEQ ID NO: 92229 - DNA, 1269 bp, Artificial Sequence
  derived and/or modified sequence
atggaggacatccagaccaacgccgagctgaagagcacccaggagcagtctgtccccgccgaatcagctgcagttctcaatgactacagtcttacgaagagccacgaaatggagaatgtcgattccggagagggacctgctaatgaggatgaggatatagggggagaacgacccttccagtgcaatcaatgtggggccagttttacacagaagggcaacctgctgcgacacattaaactgcacaccggcgaaaaaccttttaaatgccatctgtgcaactacgcttgccagcggcgagacgccttgactggacatttgcgtactcactctgtcgaaaagccttataagtgtgaattttgtggcagatcctataagcagcgaagcagtttagaagagcacaaggagcgatgcaggaccttcctccagtccacagatccaggtgacaccgcatctgcagaagccagacacataaaagcagagatgggatcggagcgcgctttggtcctggatcggctggcttctaacgtcgctaaacgcaaatctagcatgccacagaagtttatcggcgaaaaaaggcactgttttgacgtcaactacaactcttcatacatgtacgaaaaagagagcgaactgatacagacaaggatgatggaccaggcgatcaataatgccatctcctatctgggagctgaggcgctgcgcccactcgtccagactccgccggcccccaccagtgaaatggtcccagtaatctcttccatgtatccgatagccttgacaagggctgagatgtctaatggcgctccacaggagctggagaaaaaaagcattcatttgccagagaaaagtgtgcccagcgagcgtggtctgagcccaaataactcaggacatgatagcaccgatactgattccaaccatgaggaacggcaaaatcacatttaccagcagaatcacatggtcctgagcagagctcgcaacggcatgccactgctcaaggaagtcccccgatcgtatgaactcctgaaacccccccctatttgcccccgggactcagtgaaggtgattaacaaggagggcgaggtcatggacgtttacaggtgcgatcattgccgagtgctgttcttggactacgtaatgttcaccatccatatgggctgtcacggatttagagacccatttgagtgtaacatgtgcgggtatagatcccacgatcggtatgaattcagctctcacatcgcacgaggcgagcaccgagccctgttgaaatag

SEQ ID NO: 92230 - DNA, 1269 bp, Artificial Sequence
  derived and/or modified sequence
atggaggatatccagacgaatgccgaactgaagagcacacaagagcagagtgtgccagctgaatccgccgctgtgttgaacgattattctttgacaaaaagccacgagatggaaaacgtggactcaggcgagggacctgctaatgaagatgaggatatagggggagagcgtcccttccagtgtaaccaatgcggcgctagcttcacacagaaagggaatctgctgaggcatattaagctccacacgggggagaaaccttttaaatgtcacctgtgtaattacgcatgtcaacgacgcgacgcactgaccggtcacctcaggactcacagcgtggaaaagccctacaaatgcgagttctgtggcagatcatacaagcaaagatctagtctcgaggaacacaaagagcgctgtagaactttcttgcagtcgaccgacccgggtgatacagcctcagctgaagccagacacataaaagctgagatgggctcagagcgtgctctggttcttgatcggctggctagcaacgtggcgaagcgcaaatccagtatgccgcagaaatttattggggaaaaaaggcactgtttcgacgttaactacaacagcagctacatgtatgaaaaggagtcggaattaatccagacccggatgatggaccaggctatcaacaatgccatcagttacttgggggctgaagctctgcggcctttggttcagactcccccagcgccaacctccgagatggtgcccgtgatatcctcgatgtaccccattgctctgacgcgagcagagatgagtaacggggctccccaggagctggaaaaaaaaagcatccatttacccgaaaaaagcgtgccatcggaaagaggattaagcccaaacaactcaggacacgatagcaccgacaccgatagtaaccatgaggagaggcagaatcatatttaccagcagaaccacatggtgttgtcccgcgctagaaatgggatgccccttctcaaggaagtacctcggtcttacgaattattaaaaccaccccctatttgtccacgagatagcgttaaggtaatcaataaagagggagaggtcatggacgtgtatcggtgtgatcactgtagggttctgttcctggactatgtgatgtttacgattcacatgggctgtcacggcttccgggacccttttgagtgcaacatgtgtgggtatcgcagtcatgacaggtacgagttttcatcacatatagctagaggggaacacagagccctactgaagtag

SEQ ID NO: 92231 - protein, 366 aa, Artificial Sequence
  derived and/or modified sequence
MEDIQTNAELKSTQEQSVPAESAAVLNDYSLTKSHEMENVDSGEGPANEDEDIGVEKPYKCEFCGRSYKQRSSLEEHKERCRTFLQSTDPGDTASAEARHIKAEMGSERALVLDRLASNVAKRKSSMPQKFIGEKRHCFDVNYNSSYMYEKESELIQTRMMDQAINNAISYLGAEALRPLVQTPPAPTSEMVPVISSMYPIALTRAEMSNGAPQELEKKSIHLPEKSVPSERGLSPNNSGHDSTDTDSNHEERQNHIYQQNHMVLSRARNGMPLLKEVPRSYELLKPPPICPRDSVKVINKEGEVMDVYRCDHCRVLFLDYVMFTIHMGCHGFRDPFECNMCGYRSHDRYEFSSHIARGEHRALLK

SEQ ID NO: 92232 - DNA, 1101 bp, Artificial Sequence
  derived and/or modified sequence
atggaggacatccagaccaacgccgagctgaagagcacccaggagcagagcgtgcccgccgagagcgccgccgtgctgaacgactacagcctgaccaagagccacgagatggagaacgtggacagcggcgagggccccgccaacgaggacgaggacatcggcgtggagaagccctacaagtgcgagttctgcggcagaagctacaagcagagaagcagcctggaggagcacaaggagagatgcagaaccttcctgcagagcaccgaccccggcgacaccgccagcgccgaggccagacacatcaaggccgagatgggcagcgagagagccctggtgctggacagactggccagcaacgtggccaagagaaagagcagcatgccccagaagttcatcggcgagaagagacactgcttcgacgtgaactacaacagcagctacatgtacgagaaggagagcgagctgatccagaccagaatgatggaccaggccatcaacaacgccatcagctacctgggcgccgaggccctgagacccctggtgcagaccccccccgcccccaccagcgagatggtgcccgtgatcagcagcatgtaccccatcgccctgaccagagccgagatgagcaacggcgccccccaggagctggagaagaagagcatccacctgcccgagaagagcgtgcccagcgagagaggcctgagccccaacaacagcggccacgacagcaccgacaccgacagcaaccacgaggagagacagaaccacatctaccagcagaaccacatggtgctgagcagagccagaaacggcatgcccctgctgaaggaggtgcccagaagctacgagctgctgaagcccccccccatctgccccagagacagcgtgaaggtgatcaacaaggagggcgaggtgatggacgtgtacagatgcgaccactgcagagtgctgttcctggactacgtgatgttcaccatccacatgggctgccacggcttcagagaccccttcgagtgcaacatgtgcggctacagaagccacgacagatacgagttcagcagccacatcgccagaggcgagcacagagccctgctgaagtag

SEQ ID NO: 92233 - DNA, 1101 bp, Artificial Sequence
  derived and/or modified sequence
atggaggacatccaaacgaatgccgaactcaaatctactcaggaacaaagcgttcccgccgagtccgctgcagtacttaatgactattctttgactaaatcacatgagatggagaacgtggactcaggagaggggccggccaacgaagacgaggacattggcgtggagaagccctacaaatgtgagttttgcggtaggtcatataagcagagatcatctctcgaggagcacaaggaacggtgtcgaacctttctccagtccacggatccaggggatacggcctccgcagaggcccgtcatattaaggccgaaatgggttccgaaagggcgttagtattggacaggctggcttccaatgtcgccaagagaaagtcctccatgccccagaagtttatcggagagaagaggcactgcttcgatgtgaactataacagttcatacatgtatgaaaaggagtccgaactgatccagacaagaatgatggatcaagcaatcaataatgccattagctacctgggcgccgaagcactgcgcccgttggtgcaaactccacccgcacctacttccgagatggttcccgtgatatcctcaatgtatcctattgcattgacgagggcagaaatgagtaacggcgccccgcaggaactggaaaaaaagagcattcacctgccagagaagagtgtgcccagcgagcgagggctatctccgaacaacagcggccacgacagcacggacacagactctaaccacgaggaacggcagaatcacatatatcagcagaatcatatggtcctgtccagggccaggaacggaatgccgttacttaaggaggttcctagaagctacgaacttctgaaaccccctccaatttgcccgcgggattctgtcaaggtgattaacaaggaaggggaagtcatggatgtgtaccgctgcgaccactgtcgcgttctgtttctcgattatgtgatgttcactatccatatgggctgtcacgggtttcgggatccttttgagtgcaacatgtgtggataccgctcccacgaccgatatgaattctcaagccacatcgcgcggggggaacacagggccctgctgaagtag

SEQ ID NO: 92234 - DNA, 1669 bp, Artificial Sequence
  derived and/or modified sequence
gcaggagcacgtggagaggccgagtagccacagcggcagctccagcccggcccggcagcgacatggaagatatacaaacaaatgcggaactgaaaagcactcaggagcagtctgtgcccgcagaaagtgcagcggttttgaatgactacagtttaaccaaatctcatgaaatggaaaatgtggacagtggagaaggcccagccaatgaagatgaagacataggagtggagaaaccctacaaatgtgagttttgtggaaggagttacaagcagagaagttcccttgaggagcacaaggagcgctgccgtacatttcttcagagcactgacccaggggacactgcaagtgcggaggcaagacacatcaaagcagagatgggaagtgaaagagctctcgtactggacagattagcaagcaatgtggcaaaacgaaaaagctcaatgcctcagaaattcattggtgagaagcgccactgctttgatgtcaactataattcaagttacatgtatgagaaagagagtgagctcatacagacccgcatgatggaccaagccatcaataacgccatcagctatcttggcgccgaagccctgcgccccttggtccagacaccgcctgctcccacctcggagatggttccagttatcagcagcatgtatcccatagccctcacccgggctgagatgtcaaacggtgcccctcaagagctggaaaagaaaagcatccaccttccagagaagagcgtgccttctgagagaggcctctctcccaacaatagtggccacgactccacggacactgacagcaaccatgaagaacgccagaatcacatctatcagcaaaatcacatggtcctgtctcgggcccgcaatgggatgccacttctgaaggaggttccccgctcttacgaactcctcaagcccccgcccatctgcccaagagactccgtcaaagtgatcaacaaggaaggggaggtgatggatgtgtatcggtgtgaccactgccgcgtcctcttcctggactatgtgatgttcacgattcacatgggctgccacggcttccgtgaccctttcgagtgtaacatgtgtggatatcgaagccatgatcggtatgagttctcgtctcacatagccagaggagaacacagagccctgctgaagtgaatatctggtctcagggattgctcctatgtattcagcatcgtttctaaaaaccaatgacctcgcctaacagattgctctcaaaacatactcagttccaaacttcttttcataccatttttagctgtgttcacaggggtagccagggaaacactgtcttccttcagaaattattcgcaggtctagcatattattacttttgtgaaacctttgttttcccatcagggacttgaattttatggaatttaaaagccaaaaaggtatttggtcattatcttctacagcagtggaatgagtggtcccggagatgtgctatatgaaacattctttctgagatatatcaaccacacgtggaaaagcctttcagtcatacatgcaaatccacaaagaggaagagctgaccagctgaccttgctgggaagcctcacccttctgcccttcacaggctgaagggttaagatctaatctccctaatctaaatgacagtctaagagtaagtaaaagaacag

SEQ ID NO: 92235 - DNA, 1101 bp, Artificial Sequence
  derived and/or modified sequence
atggaggacatccagaccaatgctgagctgaagagcacccaggagcagagcgtgcctgctgagagcgctgctgtgctgaatgactacagcctgaccaagagccatgagatggagaatgtggacagcggggagggccctgccaatgaagatgaagatattggagtggagaagccctacaagtgtgagttctgtggccgcagctacaagcagaggagcagcctggaggagcacaaggagcgctgcaggaccttcctgcagagcacagaccccggggacacagccagcgctgaggcccggcacatcaaggccgagatgggcagcgagcgggccctggtgctggaccggctggccagcaatgtggccaagaggaagagctccatgccccagaagttcatcggggagaagaggcactgctttgatgtgaactacaacagcagctacatgtatgagaaggagagcgagctgatccagaccaggatgatggaccaggccatcaacaatgccatctcctacctgggcgctgaggccctgcggcccctggtgcagaccccaccagcccccaccagcgagatggtgcctgtgatcagctccatgtaccccatcgccctgaccagggctgagatgagcaatggagccccccaggagctggagaagaagagcatccacctgcctgagaagtctgtgcccagcgagcggggcctgagccccaacaacagcggccatgacagcacagacacagacagcaaccacgaggagcggcagaaccacatctaccagcagaaccacatggtgctgagccgggccagaaatggcatgcccctgctgaaggaggtgcccaggagctatgagctgctgaagcccccacccatctgcccccgggacagcgtgaaggtgatcaacaaggagggggaggtgatggatgtgtaccgctgtgaccactgccgggtgctcttcctggactatgtgatgttcaccatccacatgggctgccacggcttccgggacccctttgagtgcaacatgtgtggctaccgcagccatgacagatatgagttcagcagccacatcgcccggggggagcaccgggccctgctgaagtag

SEQ ID NO: 92236 - DNA, 1101 bp, Artificial Sequence
  derived and/or modified sequence
atggaggacatccagaccaacgccgagctgaagagcacccaggagcagagcgtcccagcggaaagcgccgcagtccttaacgactattcgctcacaaagtctcacgaaatggagaatgtggacagtggagagggacccgctaatgaggacgaggacataggggttgagaagccctacaagtgcgaattttgtggccgctcgtacaaacaaaggtccagtttggaggagcacaaggagcgatgccgtaccttcctccaaagcacagaccccggggacacagctagtgccgaggccagacatataaaggccgagatggggtcagagcgcgcactagttctggaccgcttggcctcaaacgttgccaagcggaagagttcaatgccgcagaaatttattggagagaagaggcattgttttgacgtaaattacaactcttcctacatgtacgaaaaagaatccgaactgatccagaccagaatgatggaccaggccataaacaatgctatcagctaccttggtgctgaagcgttaaggcctcttgtacaaactccgccagcaccaacatctgaaatggtccctgttatcagctccatgtaccctattgctctcacaagggccgaaatgtcaaatggcgcccctcaagagctggaaaaaaagagcattcacctacccgagaaatcagtacccagcgagaggggcctctctcccaacaactcaggacacgatagtaccgacactgattcgaatcacgaggagcgccagaaccatatttatcagcagaaccatatggtcctttctcgcgcccggaatggaatgccactactcaaggaggtgccacggtcttacgaattactgaaacctcctcccatttgccctcgagactcggtaaaagttataaataaggaaggagaggtgatggatgtgtaccgatgtgaccactgccgagtgttgtttctggattatgtaatgttcacaatccacatgggctgccatgggttccgtgatccattcgagtgcaatatgtgcggttatcggtcccacgaccgttatgaattttctagccatattgccaggggggaacatagggccctgttaaagtag

SEQ ID NO: 92237 - DNA, 1101 bp, Artificial Sequence
  derived and/or modified sequence
atggaagacatccagacaaatgccgaacttaagagcactcaggagcaatccgtaccggctgagtcagcagcagtcttgaatgactacagtctcaccaaaagtcatgagatggagaacgtcgatagcggagaaggtcctgcgaatgaagacgaggacataggcgttgagaagccttataagtgtgagttctgcggccgatcctacaagcagcgcagttcccttgaggagcataaggagcgctgtagaacttttctgcagagcacggacccaggcgatactgcttcggccgaggccagacacataaaagccgaaatgggcagcgagagggccctggtcctcgatagactggcaagtaatgtcgcaaagcgcaaaagtagcatgccccaaaaatttatcggtgagaaaagacactgtttcgatgtgaactacaattctagttacatgtatgaaaaggagtccgagttgatccagactagaatgatggatcaggccataaacaatgcaattagttatctaggagccgaggcgctccgcccactggtccagaccccaccggctcctaccagcgagatggtccccgtgatctcctctatgtatcccatcgctctgacacgcgctgagatgagcaatggtgccccacaggagttagaaaagaagtccattcacttgcctgaaaagagtgtgccaagcgagagggggctgagcccaaataactccggtcacgactccactgatacagatagtaaccacgaggagcgccagaaccacatatatcaacaaaaccatatggtgctatcacgcgctaggaatggcatgcccttactgaaagaagtgcccagaagctacgagctgctgaagcctccacctatttgccctcgtgactctgtcaaggtgattaacaaagagggagaagttatggatgtctacaggtgtgaccattgccgcgtgctttttctagattatgtgatgtttaccatccacatgggctgtcacggcttccgggaccccttcgaatgcaacatgtgtggatatcggagccacgaccggtatgagttttcttcacatattgccaggggagaacaccgcgctctgttgaaatag

SEQ ID NO: 92238 - protein, 327 aa, Artificial Sequence
  derived and/or modified sequence
MEDIQTNAELKSTQEQSVPAESAAVLNDYSLTKSHEMENVDSGEGPANEDEDIGASAEARHIKAEMGSERALVLDRLASNVAKRKSSMPQKFIGEKRHCFDVNYNSSYMYEKESELIQTRMMDQAINNAISYLGAEALRPLVQTPPAPTSEMVPVISSMYPIALTRAEMSNGAPQELEKKSIHLPEKSVPSERGLSPNNSGHDSTDTDSNHEERQNHIYQQNHMVLSRARNGMPLLKEVPRSYELLKPPPICPRDSVKVINKEGEVMDVYRCDHCRVLFLDYVMFTIHMGCHGFRDPFECNMCGYRSHDRYEFSSHIARGEHRALLK

SEQ ID NO: 92239 - DNA, 984 bp, Artificial Sequence
  derived and/or modified sequence
atggaggacatccagaccaacgccgagctgaagagcacccaggagcagagcgtgcccgccgagagcgccgccgtgctgaacgactacagcctgaccaagagccacgagatggagaacgtggacagcggcgagggccccgccaacgaggacgaggacatcggcgccagcgccgaggccagacacatcaaggccgagatgggcagcgagagagccctggtgctggacagactggccagcaacgtggccaagagaaagagcagcatgccccagaagttcatcggcgagaagagacactgcttcgacgtgaactacaacagcagctacatgtacgagaaggagagcgagctgatccagaccagaatgatggaccaggccatcaacaacgccatcagctacctgggcgccgaggccctgagacccctggtgcagaccccccccgcccccaccagcgagatggtgcccgtgatcagcagcatgtaccccatcgccctgaccagagccgagatgagcaacggcgccccccaggagctggagaagaagagcatccacctgcccgagaagagcgtgcccagcgagagaggcctgagccccaacaacagcggccacgacagcaccgacaccgacagcaaccacgaggagagacagaaccacatctaccagcagaaccacatggtgctgagcagagccagaaacggcatgcccctgctgaaggaggtgcccagaagctacgagctgctgaagcccccccccatctgccccagagacagcgtgaaggtgatcaacaaggagggcgaggtgatggacgtgtacagatgcgaccactgcagagtgctgttcctggactacgtgatgttcaccatccacatgggctgccacggcttcagagaccccttcgagtgcaacatgtgcggctacagaagccacgacagatacgagttcagcagccacatcgccagaggcgagcacagagccctgctgaagtag

SEQ ID NO: 92240 - DNA, 984 bp, Artificial Sequence
  derived and/or modified sequence
atggaagacattcaaaccaacgccgaacttaagtcgacacaggaacagtccgtacccgctgagagcgccgctgtccttaatgattactcccttacaaagtcccatgagatggaaaacgtcgactcgggggaagggcctgccaatgaggacgaggacatcggggccagcgccgaagccaggcatatcaaagcagaaatgggatctgaaagagctttggtgttagacaggttggctagcaacgttgcaaaacgcaaatcctctatgccccagaaattcatcggggagaagcggcattgtttcgacgtgaattataatagcagctatatgtatgaaaaggaaagcgaactcatccagactcggatgatggaccaggcaattaataatgcgatttcctatttaggtgctgaggctctcaggcctctcgttcaaacacctccggcgcccacaagtgaaatggtgcccgtgatttcatccatgtatcctattgcacttacccgcgccgagatgtctaatggagcacctcaagagctggaaaaaaaatccatccatctccctgaaaagtctgtgcctagtgagcgcggactctcacctaataattccggccacgacagtacagacaccgattctaaccatgaagaaagacagaatcatatatatcaacagaaccatatggtgctcagccgggccaggaatgggatgccactgcttaaggaagtgcccagaagctatgagctgctcaagcccccaccaatctgccctcgcgactcagtcaaagtgatcaacaaagagggcgaggtgatggacgtttaccggtgtgaccactgtcgggtactgttcctggactatgtgatgttcactatccatatgggatgccatgggttcagagacccattcgaatgcaacatgtgcggatatcgtagccacgacaggtatgaattttccagtcacattgcccgaggggagcaccgggctctgctgaaatag

SEQ ID NO: 92241 - DNA, 984 bp, Artificial Sequence
  derived and/or modified sequence
atggaggacatccagaccaatgctgagctgaagagcacccaggagcagagcgtgcctgctgagagcgctgctgtgctgaatgactacagcctgaccaagagccatgagatggagaatgtggacagcggggagggccctgccaatgaagatgaagatattggagccagcgctgaggcccggcacatcaaggccgagatgggcagcgagcgggccctggtgctggaccggctggccagcaatgtggccaagaggaagagctccatgccccagaagttcatcggggagaagaggcactgctttgatgtgaactacaacagcagctacatgtatgagaaggagagcgagctgatccagaccaggatgatggaccaggccatcaacaatgccatctcctacctgggcgctgaggccctgcggcccctggtgcagaccccaccagcccccaccagcgagatggtgcctgtgatcagctccatgtaccccatcgccctgaccagggctgagatgagcaatggagccccccaggagctggagaagaagagcatccacctgcctgagaagtctgtgcccagcgagcggggcctgagccccaacaacagcggccatgacagcacagacacagacagcaaccacgaggagcggcagaaccacatctaccagcagaaccacatggtgctgagccgggccagaaatggcatgcccctgctgaaggaggtgcccaggagctatgagctgctgaagcccccacccatctgcccccgggacagcgtgaaggtgatcaacaaggagggggaggtgatggatgtgtaccgctgtgaccactgccgggtgctcttcctggactatgtgatgttcaccatccacatgggctgccacggcttccgggacccctttgagtgcaacatgtgtggctaccgcagccatgacagatatgagttcagcagccacatcgcccggggggagcaccgggccctgctgaagtag

SEQ ID NO: 92242 - DNA, 1552 bp, Artificial Sequence
  derived and/or modified sequence
gcaggagcacgtggagaggccgagtagccacagcggcagctccagcccggcccggcagcgacatggaagatatacaaacaaatgcggaactgaaaagcactcaggagcagtctgtgcccgcagaaagtgcagcggttttgaatgactacagtttaaccaaatctcatgaaatggaaaatgtggacagtggagaaggcccagccaatgaagatgaagacataggagcaagtgcggaggcaagacacatcaaagcagagatgggaagtgaaagagctctcgtactggacagattagcaagcaatgtggcaaaacgaaaaagctcaatgcctcagaaattcattggtgagaagcgccactgctttgatgtcaactataattcaagttacatgtatgagaaagagagtgagctcatacagacccgcatgatggaccaagccatcaataacgccatcagctatcttggcgccgaagccctgcgccccttggtccagacaccgcctgctcccacctcggagatggttccagttatcagcagcatgtatcccatagccctcacccgggctgagatgtcaaacggtgcccctcaagagctggaaaagaaaagcatccaccttccagagaagagcgtgccttctgagagaggcctctctcccaacaatagtggccacgactccacggacactgacagcaaccatgaagaacgccagaatcacatctatcagcaaaatcacatggtcctgtctcgggcccgcaatgggatgccacttctgaaggaggttccccgctcttacgaactcctcaagcccccgcccatctgcccaagagactccgtcaaagtgatcaacaaggaaggggaggtgatggatgtgtatcggtgtgaccactgccgcgtcctcttcctggactatgtgatgttcacgattcacatgggctgccacggcttccgtgaccctttcgagtgtaacatgtgtggatatcgaagccatgatcggtatgagttctcgtctcacatagccagaggagaacacagagccctgctgaagtgaatatctggtctcagggattgctcctatgtattcagcatcgtttctaaaaaccaatgacctcgcctaacagattgctctcaaaacatactcagttccaaacttcttttcataccatttttagctgtgttcacaggggtagccagggaaacactgtcttccttcagaaattattcgcaggtctagcatattattacttttgtgaaacctttgttttcccatcagggacttgaattttatggaatttaaaagccaaaaaggtatttggtcattatcttctacagcagtggaatgagtggtcccggagatgtgctatatgaaacattctttctgagatatatcaaccacacgtggaaaagcctttcagtcatacatgcaaatccacaaagaggaagagctgaccagctgaccttgctgggaagcctcacccttctgcccttcacaggctgaagggttaagatctaatctccctaatctaaatgacagtctaagagtaagtaaaagaacag

SEQ ID NO: 92243 - DNA, 984 bp, Artificial Sequence
  derived and/or modified sequence
atggaggacatccagaccaacgccgagctgaagagcacccaggagcagagtgttcccgcagagtccgccgctgtgctaaatgactactcactcaccaagtcccacgagatggagaatgtcgactccggcgagggacctgccaacgaggacgaggacataggcgcatctgccgaggccaggcacattaaagcagagatgggtagcgagcgggcgctcgtgttagatagactggcaagcaatgtggccaaacgcaaatccagcatgccgcagaaatttataggggaaaaacgccactgttttgacgtcaattataactccagctacatgtacgaaaaagaatccgagttaattcagacgagaatgatggaccaagctattaacaacgctatcagctatctgggggccgaagctctacgacccctggtccagactcctccggcccctacatccgaaatggttcccgtgatctcctcaatgtaccccattgccttgacccgagcagagatgagtaatggcgctcctcaggaactggaaaaaaagagcattcatcttcctgaaaagtccgtgccatctgaaaggggactgtctccgaacaacagcggtcatgactctacagacactgactctaatcatgaggaacgccaaaaccatatataccagcagaaccatatggtgttgagtagggctcgcaatggaatgcccttactcaaagaggtgcctcgcagctatgagctcctgaaacccccgcccatctgtccaagagattctgtgaaagtaattaataaggagggagaggtaatggacgtgtacagatgcgatcattgtcgggtactttttctggactatgtcatgtttacaattcatatgggttgccacggattcagggaccccttcgagtgtaacatgtgcggatatagaagccatgaccgatatgaattttcctctcatatcgcgaggggagagcaccgagcacttctgaaatag

SEQ ID NO: 92244 - DNA, 984 bp, Artificial Sequence
  derived and/or modified sequence
atggaagatatacagacaaacgcagaactaaaatcaacacaagagcagtccgtgcccgctgaatccgcagccgttctgaatgattattccctgactaagtctcacgagatggagaacgtcgattccggggagggtccggctaacgaagacgaggatataggggcttccgccgaggctagacacattaaagccgaaatggggagcgagcgcgctctggtcttggaccgcttggctagcaatgttgccaagagaaagtctagcatgccgcagaagtttattggagaaaagcggcattgctttgacgttaattataacagctcatacatgtacgagaaagagtcagaactcatacagacaagaatgatggaccaagcaattaataatgcaatcagttatctaggagccgaggctttacggccattggttcagaccccccctgcacccacttcagagatggttcccgtgataagctcgatgtatccaatcgctctgacccgggcagagatgtcaaatggcgctccccaggaactggagaagaagtccattcacctccccgaaaaatctgtgccgagtgagcgcggactgagtcccaacaattcaggccacgattccactgataccgatagtaaccatgaggagcggcagaaccatatttatcaacagaatcatatggtgctatctagggcacgcaatgggatgcccctgctgaaggaggtaccccgtagttacgagttactgaaacctcctcctatctgcccacgagattccgttaaagtgatcaataaggagggagaagtaatggatgtgtaccggtgcgaccactgcagggtcctgttcctggattacgtaatgtttacgattcacatgggctgccacggttttcgtgaccctttcgaatgtaacatgtgcgggtaccgctcccatgatcgttacgagtttagcagccacattgccaggggagaacacagggctctcctgaaatag

SEQ ID NO: 92245 - protein, 288 aa, Artificial Sequence
  derived and/or modified sequence
MEDIQTNAELKSTQEQSVPAESAAVLNDYSLTKSHEMENVDSGEGPANEDEDIGGEKRHCFDVNYNSSYMYEKESELIQTRMMDQAINNAISYLGAEALRPLVQTPPAPTSEMVPVISSMYPIALTRAEMSNGAPQELEKKSIHLPEKSVPSERGLSPNNSGHDSTDTDSNHEERQNHIYQQNHMVLSRARNGMPLLKEVPRSYELLKPPPICPRDSVKVINKEGEVMDVYRCDHCRVLFLDYVMFTIHMGCHGFRDPFECNMCGYRSHDRYEFSSHIARGEHRALLK

SEQ ID NO: 92246 - DNA, 867 bp, Artificial Sequence
  derived and/or modified sequence
atggaggacatccagaccaacgccgagctgaagagcacccaggagcagagcgtgcccgccgagagcgccgccgtgctgaacgactacagcctgaccaagagccacgagatggagaacgtggacagcggcgagggccccgccaacgaggacgaggacatcggcggcgagaagagacactgcttcgacgtgaactacaacagcagctacatgtacgagaaggagagcgagctgatccagaccagaatgatggaccaggccatcaacaacgccatcagctacctgggcgccgaggccctgagacccctggtgcagaccccccccgcccccaccagcgagatggtgcccgtgatcagcagcatgtaccccatcgccctgaccagagccgagatgagcaacggcgccccccaggagctggagaagaagagcatccacctgcccgagaagagcgtgcccagcgagagaggcctgagccccaacaacagcggccacgacagcaccgacaccgacagcaaccacgaggagagacagaaccacatctaccagcagaaccacatggtgctgagcagagccagaaacggcatgcccctgctgaaggaggtgcccagaagctacgagctgctgaagcccccccccatctgccccagagacagcgtgaaggtgatcaacaaggagggcgaggtgatggacgtgtacagatgcgaccactgcagagtgctgttcctggactacgtgatgttcaccatccacatgggctgccacggcttcagagaccccttcgagtgcaacatgtgcggctacagaagccacgacagatacgagttcagcagccacatcgccagaggcgagcacagagccctgctgaagtag

SEQ ID NO: 92247 - DNA, 867 bp, Artificial Sequence
  derived and/or modified sequence
atggaagacattcagaccaatgctgaattaaagtctacgcaggaacagagcgttcctgccgaatccgctgcggttctgaatgactattctttaaccaaatcccatgagatggagaacgtggattccggggagggccctgccaacgaagatgaggatattgggggagagaagagacactgtttcgacgtgaattataattcatcttacatgtacgagaaggaaagcgagctcatacagacacggatgatggatcaggctatcaataacgcaataagttacttgggcgccgaagcgctgaggcctctcgtccagaccccaccagcaccgacgtccgaaatggtgcccgtcattagtagcatgtatcctatagccctcaccagggctgaaatgagcaacggcgcaccgcaggagcttgagaaaaagagcatccatctgcctgagaaatccgttccatcagagcggggtctgtcaccaaacaacagcggccatgactccaccgacactgactcaaatcatgaagagcgccagaaccatatctaccagcaaaaccatatggtgctgagccgggctagaaacgggatgcccctgctgaaggaggttcctcgctcatacgagctgttaaagcctcctcctatttgccctagggattccgtaaaagtcattaacaaagagggcgaggtgatggacgtctatcgatgcgatcattgcagagtgctattcctggattatgttatgttcactatccacatgggctgtcatggatttagggacccgttcgagtgcaacatgtgtgggtaccggagccatgaccggtatgagttttctagccatatcgccagaggcgagcatcgggcactgctcaagtag

SEQ ID NO: 92248 - DNA, 867 bp, Artificial Sequence
  derived and/or modified sequence
atggaggacatccagaccaatgctgagctgaagagcacccaggagcagagcgtgcctgctgagagcgctgctgtgctgaatgactacagcctgaccaagagccatgagatggagaatgtggacagcggggagggccctgccaatgaagatgaagatattggaggagagaagaggcactgctttgatgtgaactacaacagcagctacatgtatgagaaggagagcgagctgatccagaccaggatgatggaccaggccatcaacaatgccatctcctacctgggcgctgaggccctgcggcccctggtgcagaccccaccagcccccaccagcgagatggtgcctgtgatcagctccatgtaccccatcgccctgaccagggctgagatgagcaatggagccccccaggagctggagaagaagagcatccacctgcctgagaagtctgtgcccagcgagcggggcctgagccccaacaacagcggccatgacagcacagacacagacagcaaccacgaggagcggcagaaccacatctaccagcagaaccacatggtgctgagccgggccagaaatggcatgcccctgctgaaggaggtgcccaggagctatgagctgctgaagcccccacccatctgcccccgggacagcgtgaaggtgatcaacaaggagggggaggtgatggatgtgtaccgctgtgaccactgccgggtgctcttcctggactatgtgatgttcaccatccacatgggctgccacggcttccgggacccctttgagtgcaacatgtgtggctaccgcagccatgacagatatgagttcagcagccacatcgcccggggggagcaccgggccctgctgaagtag

SEQ ID NO: 92249 - DNA, 1435 bp, Artificial Sequence
  derived and/or modified sequence
gcaggagcacgtggagaggccgagtagccacagcggcagctccagcccggcccggcagcgacatggaagatatacaaacaaatgcggaactgaaaagcactcaggagcagtctgtgcccgcagaaagtgcagcggttttgaatgactacagtttaaccaaatctcatgaaatggaaaatgtggacagtggagaaggcccagccaatgaagatgaagacataggaggtgagaagcgccactgctttgatgtcaactataattcaagttacatgtatgagaaagagagtgagctcatacagacccgcatgatggaccaagccatcaataacgccatcagctatcttggcgccgaagccctgcgccccttggtccagacaccgcctgctcccacctcggagatggttccagttatcagcagcatgtatcccatagccctcacccgggctgagatgtcaaacggtgcccctcaagagctggaaaagaaaagcatccaccttccagagaagagcgtgccttctgagagaggcctctctcccaacaatagtggccacgactccacggacactgacagcaaccatgaagaacgccagaatcacatctatcagcaaaatcacatggtcctgtctcgggcccgcaatgggatgccacttctgaaggaggttccccgctcttacgaactcctcaagcccccgcccatctgcccaagagactccgtcaaagtgatcaacaaggaaggggaggtgatggatgtgtatcggtgtgaccactgccgcgtcctcttcctggactatgtgatgttcacgattcacatgggctgccacggcttccgtgaccctttcgagtgtaacatgtgtggatatcgaagccatgatcggtatgagttctcgtctcacatagccagaggagaacacagagccctgctgaagtgaatatctggtctcagggattgctcctatgtattcagcatcgtttctaaaaaccaatgacctcgcctaacagattgctctcaaaacatactcagttccaaacttcttttcataccatttttagctgtgttcacaggggtagccagggaaacactgtcttccttcagaaattattcgcaggtctagcatattattacttttgtgaaacctttgttttcccatcagggacttgaattttatggaatttaaaagccaaaaaggtatttggtcattatcttctacagcagtggaatgagtggtcccggagatgtgctatatgaaacattctttctgagatatatcaaccacacgtggaaaagcctttcagtcatacatgcaaatccacaaagaggaagagctgaccagctgaccttgctgggaagcctcacccttctgcccttcacaggctgaagggttaagatctaatctccctaatctaaatgacagtctaagagtaagtaaaagaacag

SEQ ID NO: 92250 - DNA, 867 bp, Artificial Sequence
  derived and/or modified sequence
atggaggacatccagaccaacgccgagctgaagagcacccaggagcagagtgtgcccgccgagtctgcagctgtcctaaatgattattcgctcacaaaaagccacgagatggaaaacgttgatagcggcgagggcccggcaaacgaggacgaagacatcgggggagagaagcgacattgcttcgatgtaaattataacagctcatacatgtacgagaaagagtccgagctgatccagactagaatgatggaccaggcaattaataacgctatcagctacctgggagcagaggctttacgacccctggtccaaacaccacctgccccgacttcagaaatggtgcccgtgattagctccatgtatccgatcgccctgacgcgtgccgaaatgtcaaatggagctcctcaagagcttgagaagaagagtattcatttaccagaaaagagcgtgcctagtgagagagggctgtcacctaataatagcggacatgacagcacagacactgactcaaaccacgaggagcggcagaatcacatctaccagcaaaatcacatggttctgtcacgtgctaggaacggtatgcctctcctgaaagaagtcccccgttcctacgaattgttaaaaccacctcctatctgtccgcgggatagtgtgaaagtgatcaacaaagagggcgaagttatggacgtgtataggtgcgaccattgccgtgtgctgtttctcgactacgtgatgttcacaatacacatgggttgccatggatttagggatcctttcgagtgtaatatgtgtggttatagatcccacgacagatacgagtttagctcccacatcgctcgaggcgagcatcgagccctgttgaagtag

SEQ ID NO: 92251 - DNA, 867 bp, Artificial Sequence
  derived and/or modified sequence
atggaggacattcagaccaatgccgagttaaaaagtacacaagaacagtctgtgcccgcagaatctgctgctgttttaaacgactactctctgaccaaaagccatgagatggagaacgtggacagcggagaagggccagcaaacgaagacgaagacattggtggcgaaaagaggcactgcttcgacgtgaattacaactccagttatatgtacgagaaagaatctgagctcatccagacaaggatgatggaccaggccataaacaatgccatctcttacttgggcgcagaggctcttaggcccttggttcagaccccgcctgcccctacttctgaaatggtcccagtgatttctagcatgtatccaattgccctgacaagggccgaaatgtccaatggcgcaccccaagaattagaaaagaagagtattcatctgcctgagaagagcgtgcccagcgagcgaggactctctccgaacaactcgggccacgatagtaccgacaccgactccaaccacgaggaacgacagaatcatatttaccagcagaatcatatggttctgagtcgggcacggaacggaatgcccctcctgaaggaagtccccagaagctacgagctcctgaagcctcctccaatctgtcctcgagatagtgtaaaggttatcaataaagagggagaggtcatggacgtttatcgctgcgatcactgccgggttctatttctcgactacgtaatgttcaccatacatatgggctgtcatgggttccgggatcctttcgagtgtaacatgtgcgggtacagatcccacgataggtacgagttttcctcacatatcgcgcgaggcgagcaccgagccctgctcaaatag

SEQ ID NO: 92252 - protein, 375 aa, Artificial Sequence
  derived and/or modified sequence
MEDIQTNAELKSTQEQSVPAESAAVLNDYSLTKSHEMENVDSGEGPANEDEDIGDDSMKVKDEYSERDENVLKSEPMGNAEEPEIPYSYSREYNEYENIKLERHVVSFDSSRPTSGKMNCDVCGLSCISFNVLMVHKRSHTGEKRHCFDVNYNSSYMYEKESELIQTRMMDQAINNAISYLGAEALRPLVQTPPAPTSEMVPVISSMYPIALTRAEMSNGAPQELEKKSIHLPEKSVPSERGLSPNNSGHDSTDTDSNHEERQNHIYQQNHMVLSRARNGMPLLKEVPRSYELLKPPPICPRDSVKVINKEGEVMDVYRCDHCRVLFLDYVMFTIHMGCHGFRDPFECNMCGYRSHDRYEFSSHIARGEHRALLK

SEQ ID NO: 92253 - DNA, 1128 bp, Artificial Sequence
  derived and/or modified sequence
atggaggacatccagaccaacgccgagctgaagagcacccaggagcagagcgtgcccgccgagagcgccgccgtgctgaacgactacagcctgaccaagagccacgagatggagaacgtggacagcggcgagggccccgccaacgaggacgaggacatcggcgacgacagcatgaaggtgaaggacgagtacagcgagagagacgagaacgtgctgaagagcgagcccatgggcaacgccgaggagcccgagatcccctacagctacagcagagagtacaacgagtacgagaacatcaagctggagagacacgtggtgagcttcgacagcagcagacccaccagcggcaagatgaactgcgacgtgtgcggcctgagctgcatcagcttcaacgtgctgatggtgcacaagagaagccacaccggcgagaagagacactgcttcgacgtgaactacaacagcagctacatgtacgagaaggagagcgagctgatccagaccagaatgatggaccaggccatcaacaacgccatcagctacctgggcgccgaggccctgagacccctggtgcagaccccccccgcccccaccagcgagatggtgcccgtgatcagcagcatgtaccccatcgccctgaccagagccgagatgagcaacggcgccccccaggagctggagaagaagagcatccacctgcccgagaagagcgtgcccagcgagagaggcctgagccccaacaacagcggccacgacagcaccgacaccgacagcaaccacgaggagagacagaaccacatctaccagcagaaccacatggtgctgagcagagccagaaacggcatgcccctgctgaaggaggtgcccagaagctacgagctgctgaagcccccccccatctgccccagagacagcgtgaaggtgatcaacaaggagggcgaggtgatggacgtgtacagatgcgaccactgcagagtgctgttcctggactacgtgatgttcaccatccacatgggctgccacggcttcagagaccccttcgagtgcaacatgtgcggctacagaagccacgacagatacgagttcagcagccacatcgccagaggcgagcacagagccctgctgaagtag

SEQ ID NO: 92254 - DNA, 1128 bp, Artificial Sequence
  derived and/or modified sequence
atggaggacatccagacgaatgctgagctgaagtcaacacaggagcagtctgtgccagcagaatcagccgctgtactgaatgactacagtctgaccaagtctcatgaaatggagaatgtcgattccggcgaggggcccgcgaatgaggatgaagacattggggatgattccatgaaggtcaaagatgagtactcagaacgcgacgagaacgtcctgaagagcgagcctatgggtaacgccgaagaaccagagattccatatagctactcacgcgaatacaatgagtacgagaatataaaattggaaagacacgttgtgagctttgattcctccagacccacatcaggaaaaatgaactgcgatgtatgtggactgagttgcatcagttttaatgtgctgatggtgcataaaaggtctcataccggtgagaagagacactgcttcgacgtcaactataactccagctacatgtatgagaaagaaagcgagctcatccagacacggatgatggatcaggcaattaacaacgctatcagctacctgggtgccgaggccctgcgaccacttgtgcagacccctcccgcaccgacatcggaaatggtacctgtgatcagttcaatgtatccaatcgctctgacgcgtgctgaaatgtccaatggggctccccaggagttagagaagaaaagcattcacttacctgagaagtctgtcccctctgagaggggcctttcaccaaataacagcggccacgatagcaccgatacagactccaaccacgaggagcggcagaaccacatataccaacagaatcatatggttctcagccgggcaagaaacggtatgcccctgctgaaggaggtgccccgatcatacgaattgctgaagccaccccccatttgtcctcgagactccgtcaaagtcattaataaagagggcgaagtcatggacgtctaccgatgtgatcattgccgcgtgctgttcctcgattacgtgatgtttacaatccacatgggatgtcacggtttcagggatccttttgagtgtaatatgtgcgggtaccgctcccacgacaggtacgaattcagttcacacattgcccgaggggagcacagagccttgttgaaatag

SEQ ID NO: 92255 - DNA, 1128 bp, Artificial Sequence
  derived and/or modified sequence
atggaggacatccagaccaatgctgagctgaagagcacccaggagcagagcgtgcctgctgagagcgctgctgtgctgaatgactacagcctgaccaagagccatgagatggagaatgtggacagcggggagggccctgccaatgaagatgaagatattggagatgacagcatgaaggtgaaggatgagtacagcgagagagatgaaaatgtgctgaagtctgagcccatgggaaatgctgaggagcctgagatcccctacagctacagccgggagtacaatgaatatgagaacatcaagctggagcggcacgtggtgtcctttgacagcagccggcccaccagcggcaagatgaactgtgatgtgtgtggcctgagctgcatctccttcaacgtgctgatggtgcacaagaggagccacactggagagaagaggcactgctttgatgtgaactacaacagcagctacatgtatgagaaggagagcgagctgatccagaccaggatgatggaccaggccatcaacaatgccatctcctacctgggcgctgaggccctgcggcccctggtgcagaccccaccagcccccaccagcgagatggtgcctgtgatcagctccatgtaccccatcgccctgaccagggctgagatgagcaatggagccccccaggagctggagaagaagagcatccacctgcctgagaagtctgtgcccagcgagcggggcctgagccccaacaacagcggccatgacagcacagacacagacagcaaccacgaggagcggcagaaccacatctaccagcagaaccacatggtgctgagccgggccagaaatggcatgcccctgctgaaggaggtgcccaggagctatgagctgctgaagcccccacccatctgcccccgggacagcgtgaaggtgatcaacaaggagggggaggtgatggatgtgtaccgctgtgaccactgccgggtgctcttcctggactatgtgatgttcaccatccacatgggctgccacggcttccgggacccctttgagtgcaacatgtgtggctaccgcagccatgacagatatgagttcagcagccacatcgcccggggggagcaccgggccctgctgaagtag

SEQ ID NO: 92256 - DNA, 1696 bp, Artificial Sequence
  derived and/or modified sequence
gcaggagcacgtggagaggccgagtagccacagcggcagctccagcccggcccggcagcgacatggaagatatacaaacaaatgcggaactgaaaagcactcaggagcagtctgtgcccgcagaaagtgcagcggttttgaatgactacagtttaaccaaatctcatgaaatggaaaatgtggacagtggagaaggcccagccaatgaagatgaagacataggagatgattcaatgaaagtgaaagatgaatacagtgaaagagatgagaatgttttaaagtcagaacccatgggaaatgcagaagagcctgaaatcccttacagctattcaagagaatataatgaatatgaaaacattaagttggagagacatgttgtctcattcgatagtagcaggccaaccagtggaaagatgaactgcgatgtgtgtggattatcctgcatcagcttcaatgtcttaatggttcataagcgaagccatactggtgagaagcgccactgctttgatgtcaactataattcaagttacatgtatgagaaagagagtgagctcatacagacccgcatgatggaccaagccatcaataacgccatcagctatcttggcgccgaagccctgcgccccttggtccagacaccgcctgctcccacctcggagatggttccagttatcagcagcatgtatcccatagccctcacccgggctgagatgtcaaacggtgcccctcaagagctggaaaagaaaagcatccaccttccagagaagagcgtgccttctgagagaggcctctctcccaacaatagtggccacgactccacggacactgacagcaaccatgaagaacgccagaatcacatctatcagcaaaatcacatggtcctgtctcgggcccgcaatgggatgccacttctgaaggaggttccccgctcttacgaactcctcaagcccccgcccatctgcccaagagactccgtcaaagtgatcaacaaggaaggggaggtgatggatgtgtatcggtgtgaccactgccgcgtcctcttcctggactatgtgatgttcacgattcacatgggctgccacggcttccgtgaccctttcgagtgtaacatgtgtggatatcgaagccatgatcggtatgagttctcgtctcacatagccagaggagaacacagagccctgctgaagtgaatatctggtctcagggattgctcctatgtattcagcatcgtttctaaaaaccaatgacctcgcctaacagattgctctcaaaacatactcagttccaaacttcttttcataccatttttagctgtgttcacaggggtagccagggaaacactgtcttccttcagaaattattcgcaggtctagcatattattacttttgtgaaacctttgttttcccatcagggacttgaattttatggaatttaaaagccaaaaaggtatttggtcattatcttctacagcagtggaatgagtggtcccggagatgtgctatatgaaacattctttctgagatatatcaaccacacgtggaaaagcctttcagtcatacatgcaaatccacaaagaggaagagctgaccagctgaccttgctgggaagcctcacccttctgcccttcacaggctgaagggttaagatctaatctccctaatctaaatgacagtctaagagtaagtaaaagaacag

SEQ ID NO: 92257 - DNA, 1128 bp, Artificial Sequence
  derived and/or modified sequence
atggaggacatccagaccaacgccgagctgaagagcacccaggagcagtccgttcccgcagaatccgcggcagttctaaatgactactcactgactaagtctcatgaaatggagaatgtggactcaggggaggggccagctaatgaggatgaagatatcggagatgactccatgaaagtcaaggatgaatattctgagcgagacgaaaatgtgttgaaatcagagccaatgggtaatgccgaagaaccggagattccgtatagctattcgcgcgagtacaatgagtacgagaatattaagcttgagagacatgtcgtctctttcgattctagccgtccaactagtggcaaaatgaattgtgacgtgtgcgggcttagttgtatttcattcaatgtgctgatggtgcacaaaaggagccataccggtgagaagcgccattgcttcgatgtgaactacaacagctcttacatgtacgaaaaagagagcgagttaatccaaacacgaatgatggaccaagccattaacaacgctatcagctacctgggcgcggaggctctaaggcctctcgtccagacaccccccgcccctaccagcgaaatggtgccagtgatctcatctatgtatcccatcgccctcactagggccgagatgtcgaacggggctccccaagagctagagaaaaagagcatacacctccccgaaaagtccgtaccaagcgagaggggtctgagccccaacaactctggccacgattctaccgatacagactccaatcatgaagagagacagaatcacatttatcagcagaatcatatggtgctgagccgagcacggaacggaatgccgctgctcaaggaagtcccgcggtcctacgagcttctcaagcccccgccaatttgcccccgggactccgttaaggtaattaacaaagagggcgaagtgatggacgtgtaccgttgcgaccactgccgggtgctgtttcttgactatgtgatgtttaccatccatatgggttgccacggattccgggacccgtttgagtgcaatatgtgcgggtataggtctcacgacaggtatgaattttccagtcacattgcacgtggcgagcatagagcacttttgaaatag

SEQ ID NO: 92258 - DNA, 1128 bp, Artificial Sequence
  derived and/or modified sequence
atggaagacatccagactaacgctgagttgaaaagtacacaagaacagagtgtgccggcagagagcgccgcagtgctgaacgattacagcttgacaaagagccacgaaatggaaaacgtggactccggcgaaggcccagccaacgaggatgaggatataggcgacgattctatgaaagtcaaagacgaatacagtgagcgcgacgagaacgtcctcaagtcggagcccatggggaacgcagaggagcccgagattccttattcttatagccgagagtataacgagtacgaaaatatcaaattagagcggcacgtcgtgagcttcgacagcagtaggccaacctcaggaaagatgaattgtgatgtctgcggtctgtcctgtattagtttcaacgttctgatggttcacaaacggagtcataccggcgagaagagacactgcttcgacgtgaattacaatagtagttacatgtacgagaaagagtccgaactcatacagaccagaatgatggaccaggcaattaacaatgctatcagctatcttggcgctgaggcactaagaccactggtccagactccccctgccccaacatctgaaatggtgcccgtcattagttccatgtacccaattgcacttacccgggctgagatgtccaacggggctcctcaggagctggaaaaaaaaagcatccacctcccggaaaaatccgttccctctgaacgcggactctctcctaataatagtggtcacgacagcactgacacggactccaatcacgaggaacgtcagaaccatatttaccaacagaaccacatggtgctctccagggcaagaaacggaatgccacttcttaaagaagtccccagaagctacgaactgctgaagccgccaccgatttgccctagggatagcgtgaaggtcattaataaggaaggagaggtaatggacgtatacaggtgcgatcattgcagggtgctttttctcgattacgtgatgtttacaatacacatggggtgtcacggcttccgcgatccattcgaatgtaacatgtgcggttacagatctcacgataggtacgaattcagttcccacattgctcgcggagaacatcgcgcacttcttaagtag

SEQ ID NO: 92259 - protein, 144 aa, Artificial Sequence
  derived and/or modified sequence
MADGGGGGSGGAGPASTRASRGLFDSFRRDCKADVDTKPAYQNLSQKADNFVSTHLDKQEWNPPANDNQLHDGLRQSVVQSGRSEAGVDRISSQVVDPKLNHIFRPQIEQIIHEFLVAQKEAAVPALPPEPEGQDPPAPSQDTS

SEQ ID NO: 92260 - protein, 172 aa, Artificial Sequence
  derived and/or modified sequence
MADGGGGGSGGAGPASTRASGGGGPINPASLPPGDPQLIAIIVGQLKSRGLFDSFRRDCKADVDTKPAYQNLSQKADNFVSTHLDKQEWNPPANDNQLHDGLRQSVVQSGRSEAGVDRISSQVVDPKLNHIFRPQIEQIIHEFLVAQKEAAVPALPPEPEGQDPPAPSQDTS

SEQ ID NO: 92261 - DNA, 519 bp, Artificial Sequence
  derived and/or modified sequence
atggccgacggcggcggcggcggcagcggcggcgccggccccgccagcaccagagccagcggcggcggcggccccatcaaccccgccagcctgccccccggcgacccccagctgatcgccatcatcgtgggccagctgaagagcagaggcctgttcgacagcttcagaagagactgcaaggccgacgtggacaccaagcccgcctaccagaacctgagccagaaggccgacaacttcgtgagcacccacctggacaagcaggagtggaacccccccgccaacgacaaccagctgcacgacggcctgagacagagcgtggtgcagagcggcagaagcgaggccggcgtggacagaatcagcagccaggtggtggaccccaagctgaaccacatcttcagaccccagatcgagcagatcatccacgagttcctggtggcccagaaggaggccgccgtgcccgccctgccccccgagcccgagggccaggacccccccgcccccagccaggacaccagctag

SEQ ID NO: 92262 - DNA, 435 bp, Artificial Sequence
  derived and/or modified sequence
atggccgacggcggcggcggcggcagcggcggcgccggccccgccagcaccagagccagcagaggcctgttcgacagcttcagaagagactgcaaggccgacgtggacaccaagcccgcctaccagaacctgagccagaaggccgacaacttcgtgagcacccacctggacaagcaggagtggaacccccccgccaacgacaaccagctgcacgacggcctgagacagagcgtggtgcagagcggcagaagcgaggccggcgtggacagaatcagcagccaggtggtggaccccaagctgaaccacatcttcagaccccagatcgagcagatcatccacgagttcctggtggcccagaaggaggccgccgtgcccgccctgccccccgagcccgagggccaggacccccccgcccccagccaggacaccagctag

SEQ ID NO: 92263 - DNA, 519 bp, Artificial Sequence
  derived and/or modified sequence
atggctgatggcggcgggggcggatccggcggtgcaggacccgcttctaccagagcatctggcgggggggggccaattaacccagcttctctaccccccggtgatccacaactgatcgccataattgtaggacaactgaagtcaagagggttgtttgatagttttcggagggattgcaaggccgacgtggacaccaaaccagcttatcagaacctctcccagaaggcggataactttgtcagcacccatttggacaagcaggagtggaatcctccggctaacgataatcagctgcatgacggactccgacagtcagtggtccagtccggaaggagcgaggcaggagtagaccgtatctctagccaggtcgtggacccaaaacttaatcacattttccggccacaaatagaacagatcattcatgagttcctggtggctcagaaggaagctgccgtcccggcacttcctccagaacctgagggacaggaccctcctgctccgtcccaggatacaagttag

SEQ ID NO: 92264 - DNA, 435 bp, Artificial Sequence
  derived and/or modified sequence
atggccgatggcgggggtggaggcagtggtggcgccggaccggcttctacacgcgcctcacggggcctcttcgatagctttaggagagattgtaaggcagatgtggatacaaaaccagcttaccagaatttgtcacaaaaggccgataactttgtgtctacccatctggacaaacaagaatggaacccacccgccaacgataatcagctccatgacgggctccggcaatcagtggtccagagtgggagaagcgaggccggggtggatcgcatctctagccaggtcgtggaccccaagctcaaccacatttttcggccacagattgagcaaataatccatgagtttctggtcgcccagaaggaggcagccgttccagcactgccaccagagcccgaaggccaggaccctcccgctccctcacaggacacatcgtag

SEQ ID NO: 92265 - DNA, 519 bp, Artificial Sequence
  derived and/or modified sequence
atggctgatggcggcggcggcggcagcggcggggccggccctgccagcacccgggccagcggcggcggcggccccatcaacccagccagcctgcccccaggggacccccagctgattgccatcatcgtgggccagctgaagagccggggcctgtttgacagcttccggcgggactgcaaggcagatgtggacaccaagccagcctaccagaacctgagccagaaggctgacaactttgtgtccacccacctggacaagcaggagtggaaccccccagccaatgacaaccagctgcatgatggcctgcggcagagcgtggtgcagagcggccgctctgaggccggcgtggaccgcatcagcagccaggtggtggaccccaagctgaaccacatcttccggccccagatcgagcagatcatccacgagttcctggtggcccagaaggaggccgctgtgcctgccctgcccccagagcctgagggccaggaccccccagcccccagccaggacaccagctag

SEQ ID NO: 92266 - DNA, 435 bp, Artificial Sequence
  derived and/or modified sequence
atggctgatggcggcggcggcggcagcggcggggccggccctgccagcacccgggccagccggggcctgtttgacagcttccggcgggactgcaaggcagatgtggacaccaagccagcctaccagaacctgagccagaaggctgacaactttgtgtccacccacctggacaagcaggagtggaaccccccagccaatgacaaccagctgcatgatggcctgcggcagagcgtggtgcagagcggccgctctgaggccggcgtggaccgcatcagcagccaggtggtggaccccaagctgaaccacatcttccggccccagatcgagcagatcatccacgagttcctggtggcccagaaggaggccgctgtgcctgccctgcccccagagcctgagggccaggaccccccagcccccagccaggacaccagctag

SEQ ID NO: 92267 - DNA, 519 bp, Artificial Sequence
  derived and/or modified sequence
atggccgacggcggcggcggcggcagcggcggcgccggccccgcctctactcgagcttctggtggcgggggaccgatcaatccagcatctcttccacctggagatccacaattgatcgcaataatagtgggccagctgaagtctcggggactatttgactctttcaggcgggactgcaaggctgatgtcgatacaaaaccagcatatcagaatttgtcacagaaagccgataactttgtatccacacatctcgacaagcaggagtggaatccaccagcaaatgacaaccagctacatgatggtctgcggcagagcgtagttcagtccgggaggtccgaggcaggagtggacagaatatcttcacaggtcgtggatcctaagctgaaccacatcttcagaccgcagattgaacagatcatacacgaatttctcgttgcccagaaagaggcggctgttccagctttaccccccgaaccagaagggcaggatccccccgcgcctagccaggataccagttag

SEQ ID NO: 92268 - DNA, 435 bp, Artificial Sequence
  derived and/or modified sequence
atggccgacggcggcggcggcggcagcggcggcgccggccccgcctctacacgggcgtcaagaggattgtttgactctttcaggagagattgcaaggcagacgtggataccaagcctgcatatcaaaacctgtcacagaaggccgacaatttcgtctcgacgcacctggataagcaggagtggaatcctcccgccaatgataaccagttgcacgacgggctccgacagtcagttgtgcagagcggacgttcggaagcgggggtggaccgaattagctcccaggtggtcgaccccaagctcaaccacattttccggccccaaattgaacagatcatccacgagttcttggtagcgcaaaaagaggcagcagtcccagccctccccccagagccagaaggacaggacccaccagcaccaagccaggatacaagttag

SEQ ID NO: 92269 - DNA, 519 bp, Artificial Sequence
  derived and/or modified sequence
atggccgatggcggaggtggtggctcagggggagcgggtcctgctagtaccagagctagtgggggaggagggcctataaacccggcttcactgcccccaggggacccccagctgatcgcaatcattgtgggacaacttaagtcaaggggcctgttcgactcgtttagaagggactgtaaggccgatgttgacactaagcctgcttaccagaatttgtctcagaaagctgacaatttcgtgagtactcatctggataaacaagaatggaatccccctgccaacgataatcagctgcatgatgggctccggcagagtgtcgttcaaagtggtcgctccgaagcaggagttgaccgtatctctagccaggtggttgaccctaagctgaaccacatttttaggccccagatcgagcagatcatccacgaatttctcgttgctcagaaggaggcagccgttcccgctctcccaccagagccggagggacaggacccgcctgccccttctcaggatacttcctag

SEQ ID NO: 92270 - DNA, 435 bp, Artificial Sequence
  derived and/or modified sequence
atggcggatggcggaggaggcggttctgggggtgcgggaccagcgtccacaagggcgtcccgcggactgttcgactccttcagaagagactgcaaagcggatgtggacacaaaacccgcttaccaaaacctatctcagaaagccgataatttcgtgtcaacacaccttgataaacaggaatggaatccacctgcaaatgacaatcagcttcatgacgggctgaggcagtctgtggtacagtcaggacggtctgaagccggtgtagatcgcatcagctcccaggtagtcgacccgaagctgaaccacatcttcagacctcaaatagagcagattatacacgagtttctggtggcgcagaaggaagccgcagttccagcgttacctcccgagccagagggccaggacccacccgctccatcccaagatactagttag

SEQ ID NO: 92271 - DNA, 3239 bp, Artificial Sequence
  derived and/or modified sequence
atctggagcgcgcttggaatccagcaggcggttgctgccgcgtcttccacaacctccgcggtctggagctggcctcccccaccgccgccccaaccaccggccccgccgccatcaccaccaccgtcacctccgccgctgcctccttggggccctcctccttcaccgcccccttagccacctctacacattctaggctttctgtcctggagaagaagctataatcggtttccttgtgggcccggtgcgcagccatggcggacggtggcggcggcggcagcggcggtgcgggcccggcctcgacccgggccagcgggggcggcggccccatcaacccggcctcgttgccccctggcgaccctcagctcatcgctatcatcgtggggcagctcaagagcaggggcctttttgacagcttccgccgggactgcaaggctgacgtggacaccaagccagcttaccaaaacctgagccagaaagcggataattttgtgtcgacacatctggacaagcaggaatggaatcctccagcaaacgacaaccaactgcacgatggtctgaggcagagtgtggttcagtcagggaggtcagaagctggagtggacaggattagttctcaggtggtggatccaaaactaaaccacatcttcaggccacaaatagaacaaataattcatgaattcctggtggcccagaaagaagcagctgtgccagcactccctccagagccagaaggccaggaccctccagctccgtctcaggacacttcctaagaatatgcctgacagcttttgaaagcgctatttaatttttggtgaagaaatggattcggttacataagagtgcagtttcagattgaagataagccaagttcatcactgagctcaagatttccacctcgaccatgagcagtgaccagattgaaagggaagcaagttcgccagagagaaagttgaccgtggcaccctcctgcattgcgctgccatttggccagcctttccaagggcatgacaccaaacacacactacagagagggaaacactaccgcgacccaggattgtcctgaaacagacatctatacttgaacatggagactgcacatggattttagggtttgtgctctgagataaacgaaagctacagcgagagaacataaccaatcccaaagacaatttcaaagaacaatgacagtaaaggttaactgggaggaatatttgacagtacttatttgatattgtctctcagagttgcaaactagattgtacacaacattagtgtcagatagctttgaagttgtgaccttcttgtacatgaatcttctagccagtttcctttcctttgtaagagataacaaagcatgaaaccctagaatgagtgagaagttcagacattaggtataaggaaactcatttgcagactctctgtccaagaatgcttcctgtcttgcaggggctagtgagtcttgggtgtgtttatgttatgctcacatttgtgttttatttgaaaagtggatggtcaataaatggcttatctttcaactgcaacaacaaaaaagaaatgcagatttacatccttttcctctttaagctccgtcagttttctgatatttctagaaggtcagacacctggcatggtttatgaggcccgtgataatggggcccctggtcacctctgctgccccgtacactgtcatttctcatatgacaaccatgcccatgactatcctggacaccctgtgttccctctgctcactgtgaagggaatgccctcaaccactcctaccctcctttaagactcagctcctgaggagccacacatcgtctaagcaggagtgacagactccttcctctgtgctcccatagatctcataagggatgaccacacttactatagtagctaggtctgacgaagcacttgctctattgctctacagctggcagtgtactaaacgcttaacttcgcttaccgtagtaagtcctcatgatctaattgaagaaatcgtatctttattcccatttttattcccatttataaatgtagaaaccaaagctcagacactgcctaagtggtggggctggggctgagcctgtattgagcacagagccctcacttttaacccttttaaccatgcttttagccacaccacctcaccacagtgaactgtctttgcttacagatctgtcatccccacttaaatgtgagcttcctccagggcagggatttgctttgttcatttcttttccttaaccccaggacctagcacatcacaggagctcagcaatttgtagaaagaaaccagttctggatttgtcttttccaacatttaatttctcagatggcagtatttatcatctaaaaagtgaacaaaaattaattttgcatctagtgtctacatgtctaagcaagaaagagctttcttatccctggaggtattttatctgtaatgtttacctatgagctattttaaatgattcttcaaaatttagagtccagaaggtagaagaccatgtcctttctgaaaatgtcccttcctttcccaggtaccaggctctttttaaaattagcttctgaatatgaacaacccagctctttaaagtttaatgtcccagccattttaattgtttctttcgaagtacaaaagagcagctgggccacatcggcactaatcacttgccaactttcctttttacaaaaacagctaagctctttctgagatttaaaatcactccatctgagaccccagcttggcacctatctttgcactaacataaaaggaacctaatttctgcttttaagaaatgtgttgcggaagtgatttttggtttggggtttgttctccttcttctttttaaaaataacgtaataaagtgtaatacaacttttaaagttttttttttcctttaccagttctctattctccttttctacttgaattgtcctgagacaggttgccagataaaatacaggttgctcagcaaatgtgaatttcagagaaacaacagatactctcctagggcatggaccgtgcaatatttgaaacatacttgtattaaaaagttatttgttgtttatttgaaattcaaatttactggggccccatgctttagtttgccaaatctgccaaccatagcctgaatgcttcccgttcccaccatgagtttggcaaatggaaaatgctaacctatgcgatggacactgctgtattctgaaaatgaatatgtaaataaatcaaactaccgtga

SEQ ID NO: 92272 - DNA, 1199 bp, Artificial Sequence
  derived and/or modified sequence
caccggccccgccgccatcaccaccaccgtcacctccgccgctgcctccttggggccctcctccttcaccgcccccttagccacctctacacattctaggctttctgtcctggagaagaagctataatcggtttccttgtgggcccggtgcgcagccatggcggacggtggcggcggcggcagcggcggtgcgggcccggcctcgacccgggccagcaggggcctttttgacagcttccgccgggactgcaaggctgacgtggacaccaagccagcttaccaaaacctgagccagaaagcggataattttgtgtcgacacatctggacaagcaggaatggaatcctccagcaaacgacaaccaactgcacgatggtctgaggcagagtgtggttcagtcagggaggtcagaagctggagtggacaggattagttctcaggtggtggatccaaaactaaaccacatcttcaggccacaaatagaacaaataattcatgaattcctggtggcccagaaagaagcagctgtgccagcactccctccagagccagaaggccaggaccctccagctccgtctcaggacacttcctaagaatatgcctgacagcttttgaaagcgctatttaatttttggtgaagaaatggattcggttacataagagtgcagtttcagattgaagataagccaagttcatcactgagctcaagatttccacctcgaccatgagcagtgaccagattgaaagggaagcaagttcgccagagagaaagttgaccgtggcaccctcctgcattgcgctgccatttggccagcctttccaagggcatgacaccaaacacacactacagagagggaaacactaccgcgacccaggattgtcctgaaacagacatctatacttgaacatggagactgcacatggattttagggtttgtgctctgagataaacgaaagctacagcgagagaacataaccaatcccaaagacaatttcaaagaacaatgacagtaaaggttaactgggaggaatatttgacagtacttatttgatattgtctctcagagttgcaaactagattgtacacaacattagtgtcagatagctttgaagttgtgaccttcttgtacatgaatcttctagccagtttcctttcctttgtaagagataacaaagcatgaaaccctagaatgagtgaga

SEQ ID NO: 92273 - protein, 1382 aa, Artificial Sequence
  derived and/or modified sequence
MKDPCFSNPCQGSATCVNTPGERSFLCKCPPGYSGTICETTIGSCGKNSCQHGGICHQDPIYPVCICPAGYAGRFCEIDHDECASSPCQNGAVCQDGIDGYSCFCVPGYQGRHCDLEVDECASDPCKNEATCLNEIGRYTCICPHNYSGVNCELEIDECWSQPCLNGATCQDALGAYFCDCAPGFLGDHCELNTDECASQPCLHGGLCVDGENRYSCNCTGSGFTGTHCETLMPLCWSKPCHNNATCEDSVDNYTCHCWPGYTGAQCEIDLNECNSNPCQSNGECVELSSEKQYGRITGLPSSFSYHEASGYVCICQPGFTGIHCEEDVNECSSNPCQNGGTCENLPGNYTCHCPFDNLSRTFYGGRDCSDILLGCTHQQCLNNGTCIPHFQDGQHGFSCLCPSGYTGSLCEIATTLSFEGDGFLWVKSGSVTTKGSVCNIALRFQTVQPMALLLFRSNRDVFVKLELLSGYIHLSIQVNNQSKVLLFISHNTSDGEWHFVEVIFAEAVTLTLIDDSCKEKCIAKAPTPLESDQSICAFQNSFLGGLPVGMTSNGVALLNFYNMPSTPSFVGCLQDIKIDWNHITLENISSGSSLNVKAGCVRKDWCESQPCQSRGRCINLWLSYQCDCHRPYEGPNCLREYVAGRFGQDDSTGYVIFTLDESYGDTISLSMFVRTLQPSGLLLALENSTYQYIRVWLERGRLAMLTPNSPKLVVKFVLNDGNVHLISLKIKPYKIELYQSSQNLGFISASTWKIEKGDVIYIGGLPDKQETELNGGFFKGCIQDVRLNNQNLEFFPNPTNNASLNPVLVNVTQGCAGDNSCKRQTNVGRALTELGSRGPKYQVSLFRFCVGSWATGNTFFLSSIKPGSNPCHNGGVCHSRWDDFSCSCPALTSGKACEEVQWCGFSPCPHGAQCQPVLQGFECIANAVFNGQSGQILFRSNGNITRELTNITFGFRTRDANVIILHAEKEPEFLNISIQDSRLFFQLQSGNSFYMLSLTSLQSVNDGTWHEVTLSMTDPLSQTSRWQMEVDNETPFVTSTIATGSLNFLKDNTDIYVGDRAIDNIKGLQGCLSTIEIGGIYLSYFENVHGFINKPQEEQFLKISTNSVVTGCLQLNVCNSNPCLHGGNCEDIYSSYHCSCPLGWSGKHCELNIDECFSNPCIHGNCSDRVAAYHCTCEPGYTGVNCEVDIDNCQSHQCANGATCISHTNGYSCLCFGNFTGKFCRQSRLPSTVCGNEKTNLTCYNGGNCTEFQTELKCMCRPGFTGEWCEKDIDECASDPCVNGGLCQDLLNKFQCLCDVAFAGERCEVDLADDLISDIFTTIGSVTVALLLILLLAIVASVVTSNKRATQGTYSPSRQEKEGSRVEMWNLMPPPAMERLI

SEQ ID NO: 92274 - DNA, 4149 bp, Artificial Sequence
  derived and/or modified sequence
atgaaagatccctgcttttccaacccttgtcagggctctgctacctgtgtgaataccccgggagaacggagcttcctgtgtaaatgtccacctggctacagcggcacaatttgcgaaacaacaattggcagttgtggaaaaaattcgtgccagcatggaggaatttgccaccaggaccccatttaccccgtctgcatctgccctgccggctatgctggtcggttctgcgaaatcgaccacgatgagtgcgccagtagcccatgtcaaaacggagctgtgtgtcaggacggcatcgatggatattcatgcttttgcgtgccaggttatcagggccgccactgcgacctggaggttgacgagtgtgcaagtgatccctgtaaaaatgaagctacatgtcttaacgagatcggtcggtacacatgtatatgcccgcacaactacagtggggtgaattgtgagctggaaatcgatgagtgttggagtcagccttgcctgaacggagctacctgccaagatgctctgggagcatacttttgtgattgtgcaccaggcttcctgggagatcattgtgagctgaacacagacgagtgcgcctcccagccgtgcctgcatggcgggttgtgcgtcgatggggagaaccggtactcttgcaactgcacagggtccgggtttacaggaacccactgcgagactctgatgcccctttgttggtcgaagccctgtcataacaatgcgacatgtgaggactcagtcgataattatacatgtcattgctggcctggatataccggagcccagtgcgagatcgacctcaatgagtgtaatagtaatccctgccaaagcaacggcgagtgtgtggaactctcatcggaaaagcaatatggaaggatcactggcctcccatccagcttctcctaccacgaagctagcgggtacgtatgtatttgccagccagggtttaccgggattcattgtgaggaagacgtgaatgagtgcagcagcaatccttgtcagaatgggggtacatgcgagaatcttcccgggaattatacatgccactgcccttttgacaacctgtcccggaccttttacggaggtcgggactgttctgacattctgttggggtgcactcatcaacaatgtttgaacaacggaacatgcattccgcacttccaggacgggcagcacggtttctcctgtttgtgtccttctgggtacactggcagcctgtgcgaaatcgccacaactctcagcttcgagggagacggttttctatgggtcaaaagcggaagcgtgaccaccaagggctctgtgtgcaacatcgctctcagattccaaaccgtgcaacctatggcactgctcctgttccggagtaatcgagatgtgttcgtgaaactcgaattactgagcggctatattcatctgagcatccaggttaacaatcaatcaaaggtgttacttttcattagccacaacacatcggatggagagtggcatttcgtggaggtgatctttgcagaggcggtgacccttacgctcatagacgattcctgcaaggagaagtgcattgccaaagctcctacaccattggagtccgaccagagtatctgcgcctttcagaatagctttctgggtgggctgcccgtggggatgacctcgaacggcgtagctctattgaacttttataacatgccttcaactccttcttttgtgggatgcctccaagacattaaaattgactggaaccacattacactcgagaacatcagttccggctcatctctcaatgttaaagcaggatgtgtccggaaagactggtgcgaatcacagccgtgccagagccgcggaagatgcataaacctgtggctgtcatatcagtgcgactgccaccgtccatatgagggtccgaactgcttgagggagtacgtggccggcaggttcggtcaggatgattccacaggctatgtcatttttaccctcgacgagagttatggggataccataagtctgtccatgttcgttcggaccctgcagccgtctgggcttttattggctctcgaaaacagcacataccagtacattagggtgtggctggaacgagggcgactcgcaatgctaacacccaacagccccaaactcgtggtaaagttcgtgcttaatgacgggaatgtgcacctgatctcattgaagataaaaccctacaaaattgaactgtatcagtcttcccagaatttgggcttcatcagtgcctctacttggaaaatagagaaaggagacgtgatttacattggtggcctccccgataagcaggaaacagaacttaacggaggcttcttcaagggatgtatacaagacgttaggttaaacaatcaaaatctagagtttttccctaatccaaccaataacgcaagtctcaatccggtgctagttaatgttacccaagggtgcgccggcgataatagttgtaagcgccagaccaacgttggccgcgcccttactgaactcggaagccgcggtccgaaataccaggtctcactgttccggttttgtgtaggaagctgggcaaccggcaacaccttcttcctctctagcataaagcctggatccaatccttgccataatggcggagtgtgccattcaagatgggacgatttctcctgcagctgtccagctcttacttccgggaaggcatgcgaggaggtccaatggtgtggcttttcaccttgcccgcatggggcccagtgtcagcctgtccttcagggttttgagtgcatcgcaaacgccgtctttaatggccagtccgggcagatcctgttcaggagcaacggtaacataactcgggaactcacgaacatcactttcggcttcagaaccagagacgcaaacgttattattctgcacgctgagaaggagccagaatttttaaacattagtatccaggatagtcgacttttcttccaactgcagtctggcaattcattctacatgttatctttgacctccctgcagtctgtcaatgacggcacttggcatgaggtgaccctgagcatgaccgacccgttatcacagacttctaggtggcaaatggaagtcgataatgagacaccatttgtgaccagcaccatagcaaccgggagtcttaacttccttaaggataatacagacatctacgtgggggaccgagccattgataatatcaagggtcttcagggatgcctcagtacaatcgagataggaggtatctacctctcttatttcgagaacgtgcacggtttcataaataagccacaagaggagcaatttctgaaaattagcaccaattctgttgtcaccggctgtctgcagcttaacgtttgcaattctaacccttgtttacacggaggtaattgcgaggatatttattctagctaccactgctcttgtcccctcggatggagtggaaagcactgtgaactgaatatcgacgaatgttttagcaatccatgcatccacgggaactgtagcgatcgcgtggcggcctatcactgcacatgtgagcccgggtatactggggtgaattgcgaggtggacattgataattgtcaatcccaccaatgtgcgaatggggcgacctgcatttcgcatactaatggctattcatgcttgtgcttcgggaacttcaccggaaaattctgccggcaatccagactaccttctactgtttgcgggaatgaaaaaacaaacctgacttgctacaatggaggaaattgtaccgaattccaaactgaactcaagtgcatgtgccggccgggattcaccggcgagtggtgtgaaaaagatatcgacgagtgcgcttcagacccttgtgtaaacgggggactgtgtcaggaccttttgaataagttccagtgcttgtgtgacgtggcttttgccggggagcgatgtgaggtagatctcgctgatgatctgattagcgacatatttactaccattgggagcgtgactgtcgcactcctacttatactcttgctcgcaatcgtagccagtgtggtgacttctaataagcgggcgacgcagggtacctatagcccttcccgccaggagaaggaagggtctagggtcgagatgtggaatctcatgccgcctcctgccatggagcggctcatctag

SEQ ID NO: 92275 - DNA, 4149 bp, Artificial Sequence
  derived and/or modified sequence
atgaaggacccctgcttcagcaacccctgccagggcagcgccacctgtgtgaacaccccaggagagaggagcttcctgtgcaagtgccccccaggctacagcggcaccatctgtgagaccaccatcggcagctgtgggaagaacagctgccagcacggcggcatctgccaccaggaccccatctaccctgtgtgcatctgcccagctggctacgccggccgcttctgtgaaattgaccatgatgaatgtgccagcagcccctgccagaatggagctgtgtgccaggacggcattgatggctacagctgcttctgtgtgcccggctaccagggccgccactgtgacctggaggtggatgaatgtgccagtgacccctgcaagaatgaggccacctgcctgaatgagatcggccgctacacctgcatctgcccccacaactacagcggcgtgaactgtgagctggagattgatgagtgctggagccagccctgcctgaatggagccacctgccaggatgccctgggcgcctacttctgtgactgtgcccctggcttcctgggggaccactgtgagctgaacacagatgaatgtgccagccagccctgcctgcacggcggcctgtgtgtggatggagagaaccgctacagctgcaactgcaccggcagcggcttcaccggcacccactgtgagaccctgatgcccctgtgctggagcaagccctgccacaacaatgccacctgtgaggacagcgtggacaactacacctgccactgctggccaggctacacaggagcccagtgtgaaattgacctgaatgaatgcaacagcaacccctgccagagcaatggagaatgtgtggagctgagcagcgagaagcagtatggccgcatcaccggcctgcccagcagcttctcctaccacgaggccagcggctacgtgtgcatctgccagcccggcttcaccggcatccactgtgaagaagatgtgaatgaatgtagcagcaacccctgccagaatggaggcacctgtgagaacctgcccggcaactacacctgccactgcccctttgacaacctgagcaggaccttctacggcggccgggactgcagcgacatcctgctgggctgcacccaccagcagtgcctgaacaacggcacctgcatcccccacttccaggacggccagcacggcttcagctgcctgtgccccagcggctacacaggcagcctgtgtgaaattgccaccaccctgagctttgaaggagatggcttcctgtgggtgaagagcggctctgtgaccaccaagggctctgtgtgcaacatcgccctgcgcttccagacagtgcagcccatggccctgctgctcttccgcagcaacagagatgtgtttgtgaagctggagctgctgagcggctacatccacctgagcatccaggtgaacaaccagagcaaggtgctgctcttcatcagccacaacaccagtgatggagagtggcactttgtggaggtgatctttgctgaggccgtgaccctgaccctgattgatgacagctgcaaggagaagtgcatcgccaaggcccccacccccctggagagtgaccagagcatctgtgccttccagaacagcttcctgggcggcctgcctgtgggcatgaccagcaatggagtggccctgctgaacttctacaacatgcccagcacccccagctttgtgggctgcctgcaggacatcaagattgactggaaccacatcaccctggagaacatcagcagcggcagcagcctgaatgtgaaggccggctgtgtgaggaaggactggtgtgagagccagccctgccagagccggggccgctgcatcaacctgtggctgagctaccagtgtgactgccaccggccctatgagggccccaactgcctgcgggagtatgtggccggccgcttcggccaggatgacagcacaggctacgtgatcttcaccctggatgagagctatggagacaccatcagcctgtccatgtttgtgaggaccctgcagcccagcggcctgctgctggccctggagaacagcacctaccagtacatccgggtgtggctggagcggggccgcctggccatgctgacccccaacagccccaagctggtggtgaagtttgtgctgaatgatggaaatgtgcacctgatcagcctgaagatcaagccctacaagattgagctgtaccagagcagccagaacctgggcttcatcagcgccagcacctggaagattgaaaaaggagatgtgatctacatcggcggcctgcctgacaagcaggagacagagctgaatggaggcttcttcaagggctgcatccaggatgtgcggctgaacaaccagaacctggagttcttccccaaccccaccaacaatgccagcctgaaccctgtgctggtgaatgtgacccagggctgtgccggggacaacagctgcaagaggcagaccaacgtgggccgggccctgacagagctgggcagccggggccccaagtaccaggtgtccctcttccgcttctgtgtgggctcctgggccaccggcaacaccttcttcctgagcagcatcaagccaggcagcaacccctgccacaacggcggcgtgtgccacagccgctgggatgacttcagctgcagctgcccagccctgaccagcggcaaggcctgtgaggaggtgcagtggtgtggcttcagcccctgcccccatggagcccagtgccagcctgtgctgcagggctttgaatgtattgccaatgctgtgttcaacggccagagcggccagatcctcttccgcagcaatggaaacatcacccgggagctgaccaacatcaccttcggcttccgcaccagagatgccaacgtcatcatcctgcacgccgagaaggagcctgagttcctgaacatcagcatccaggacagccgcctcttcttccagctgcagagcggcaacagcttctacatgctgagcctgaccagcctgcagagcgtgaatgatggcacctggcatgaggtgaccctgtccatgacagaccccctgagccagaccagccgctggcagatggaggtggacaatgagaccccatttgtgaccagcaccatcgccaccggcagcctgaacttcctgaaggacaacacagacatctacgtgggggaccgggccatcgacaacatcaagggcctgcagggctgcctgagcaccatcgagatcggcggcatctacctgagctactttgaaaatgtgcacggcttcatcaacaagccccaggaggagcagttcctgaagatcagcaccaacagcgtggtgacaggctgcctgcagctgaatgtgtgcaacagcaacccctgcctgcacggcggcaactgtgaggacatctacagcagctaccactgcagctgccccctgggctggagcggcaagcactgtgagctgaacattgatgagtgcttcagcaacccctgcatccacggcaactgcagcgacagagtggccgcctaccactgcacctgtgagcccggctacacaggagtgaactgtgaggtggacatcgacaactgccagagccaccagtgtgccaatggagccacctgcatcagccacaccaacggctacagctgcctgtgctttggaaacttcaccgggaagttctgccggcagagccggctgcccagcacagtgtgtggaaatgagaagaccaacctgacctgctacaacggcggcaactgcacagagttccagacagagctgaagtgcatgtgcaggcctggcttcaccggggagtggtgtgagaaggacattgatgaatgtgccagtgacccctgtgtgaatggaggcctgtgccaggacctgctgaacaagttccagtgcctgtgtgatgtggcctttgctggggagcgctgtgaggtggacctggctgatgacctgatcagtgacatcttcaccaccatcggctctgtgacagtggccctgctgctgatcctgctgctggccatcgtggcctctgtggtgaccagcaacaagagggccacccagggcacctacagccccagccggcaggagaaggagggcagccgggtggagatgtggaacctgatgcctcctccagccatggagcggctcatctag

SEQ ID NO: 92276 - DNA, 4149 bp, Artificial Sequence
  derived and/or modified sequence
atgaaggacccctgcttcagcaacccctgccagggcagcgccacctgtgtgaacacccctggtgaaaggtcatttctttgtaagtgccccccagggtacagcggtacgatttgtgaaactactatcggctcctgtggcaagaacagctgtcagcacggcggtatttgtcatcaggatccaatctatccggtgtgtatttgccccgcaggctacgccggaagattctgcgaaattgatcatgatgagtgcgcgtcatcaccatgccagaacggtgccgtgtgccaggatggcatcgacggttattcttgtttctgtgtgcctggctaccaaggacggcattgtgacctggaggtggacgaatgtgctagtgacccctgtaagaacgaagcaacatgcctgaatgaaatcggcaggtatacttgcatttgtccccacaattactccggagtaaactgcgaattggagattgacgagtgctggtcccagccttgcctcaacggtgccacgtgtcaggatgcgctgggcgcgtatttctgtgactgcgcgcctggctttctgggtgatcactgtgaattaaacacggatgaatgcgccagccagccttgccttcacgggggtttgtgcgtggacggtgaaaatcgatactcttgcaattgcacaggttccggtttcactggcacacattgtgagaccctaatgcccctgtgctggagcaagccctgccataacaacgctacgtgtgaggacagtgttgataactatacctgtcactgctggccagggtacactggggcccaatgtgaaatcgatctcaatgaatgtaattccaacccgtgccaaagtaacggggagtgtgtcgaactgtcttccgagaagcagtacggtcggattactggactgccatcaagctttagctatcacgaggcatccggatatgtgtgtatttgccaacctggatttactggaattcattgtgaggaagacgtgaacgaatgttcctccaatccatgccagaatgggggaacctgcgagaacctgcccggcaattacacatgccactgcccattcgataacctcagcagaaccttttacggcggtcgggactgttctgatattctgctgggctgcacacaccagcagtgtctgaacaacggcacctgcatccctcattttcaggacggccagcatggatttagctgtctatgtccgtccggttacacagggtccctgtgcgaaatcgccacaactctcagtttcgagggggatggctttttatgggtcaaatctgggtctgtgacaaccaaaggaagcgtgtgcaacatcgcactgcgctttcagactgtccagcccatggcccttctgctgttcaggtctaaccgcgacgtgttcgtgaaactggagctgctgtccggttacattcacctgtcgatccaggtcaacaatcaaagtaaggtactgctttttattagccacaatacctccgatggggagtggcacttcgtcgaagtgatcttcgccgaggccgtgaccctcactcttattgacgactcttgcaaggaaaaatgcatcgccaaggccccaaccccccttgagagtgaccaaagcatctgtgcatttcagaacagcttcctagggggtttgcccgtggggatgaccagcaatggcgtcgccctgttaaatttttacaacatgccttccacaccctcctttgtggggtgcctgcaggatattaaaatcgactggaatcatattaccctggaaaacatcagttctgggtcctcattaaacgttaaagctggctgcgtgcgcaaggactggtgtgaaagtcagccgtgccagtctcgggggaggtgtatcaatctctggctttcgtaccagtgcgattgccatagaccttacgagggtccaaactgcctacgggagtatgtggccggaagattcgggcaggacgatagtactggctacgtgatctttacattggacgaatcttatggcgacacgattagtctgtctatgttcgtcaggactttgcagccttccgggcttctcctcgcattggagaacagtacataccagtatatcagggtctggcttgagaggggacgcctggcaatgctcacaccaaattcaccaaaactggtggtgaaatttgtgttgaacgacggaaatgtgcatctcatttcactgaagattaaaccttataagatcgaactatatcagtcttcccagaacctgggcttcatcagtgctagtacttggaagatcgaaaagggggacgtgatttatattggaggactcccagacaagcaggaaaccgagctcaacggcggttttttcaagggctgcattcaggacgttcgactgaataatcagaatctagaattctttcctaaccctactaataacgcatcacttaatccggtcttagtaaacgtgactcaaggttgcgctggcgataactcgtgcaagagacagaccaatgtgggtcgggcgctgacggaactagggtctaggggcccgaaatatcaggttagcctgttccgtttctgcgtgggctcctgggccacaggcaacacgttttttctgagcagtataaaacctggctctaacccttgccacaacggaggagtctgccactctcgatgggacgactttagctgtagctgccccgcgctgacatcgggaaaagcttgcgaggaagtgcagtggtgtggcttctccccctgcccacatggggcgcagtgtcaaccagtcctccagggattcgagtgcatcgcgaacgctgttttcaacggtcagtcaggccagatcctttttcgttcaaatgggaacatcaccagggagctcaccaatatcacctttggattcaggacccgagacgcaaacgtcatcatactgcatgcagaaaaagagcctgaattcctgaacatttcgatacaggattctcggctgtttttccagctgcagtctggcaactccttctacatgctctcattaacgagcttgcagagcgtgaatgatggcacgtggcacgaggtgaccttgagcatgacagacccactctcgcagacatctcgttggcagatggaggtggataacgaaactcccttcgtaacgagcacaattgccactggctccttgaattttcttaaggacaacacggatatctatgtcggcgatcgcgccatcgacaatattaaagggctacagggctgtctgagcaccattgagatcggtggaatctacttgagctacttcgaaaatgtgcatggtttcatcaacaaacctcaggaagaacagttcctcaaaatctccacgaacagcgtagtcaccggttgcctccagttgaacgtatgtaactccaatccttgtttacatggtggcaattgtgaggatatatactcctcataccactgctcctgccccttggggtggagcgggaaacattgtgaactcaacatagatgagtgtttctctaacccttgtattcatggaaactgctcggatcgggtggccgcatatcactgcacctgtgaacctggctatacaggcgttaactgtgaggtggacattgataattgtcagtcacatcagtgtgccaacggtgccacatgcatcagccacaccaatggctattcgtgcctgtgtttcggcaattttactggtaagttttgtcgtcagtccagattaccctccacagtgtgtggcaatgaaaagacaaacttgacgtgctataacggtggcaactgcaccgagtttcagaccgagttaaagtgtatgtgtcggccaggcttcacaggcgaatggtgtgagaaggatattgacgaatgtgccagcgacccatgcgttaatggcggcctttgccaggacctgttaaacaagttccagtgtctgtgtgatgtggctttcgccggagagcgatgtgaagtagacctggcagatgacctaatcagtgacatcttcacaactatcgggtccgtgactgtcgcgttattgctcatcttgcttctcgccatcgtggcctctgtggttacctccaataagcgggcgacacagggtacttattcgccgagccgacaggagaaggaaggcagccgcgtagagatgtggaaccttatgccacccccagccatggagcgattaatctag

SEQ ID NO: 92277 - DNA, 4149 bp, Artificial Sequence
  derived and/or modified sequence
atgaaagatccatgctttagcaacccttgccagggaagtgccacatgtgtaaatacccccggagagaggagtttcctgtgcaagtgtccgccaggctactcgggaacaatctgtgaaactacaattggcagctgcgggaaaaattcctgccagcacggtgggatatgtcaccaagaccctatctatcccgtgtgcatttgccccgctgggtacgctggcagattttgcgaaatcgaccacgacgagtgcgcgagtagcccctgccaaaacggggcagtgtgccaggatggaattgacggttattcatgtttctgtgtgcccggatatcagggcagacactgtgatctcgaggtcgacgagtgcgcctctgacccctgcaagaatgaagccacctgtcttaacgagataggaagatacacctgcatctgccctcataactactctggcgtgaattgtgaacttgagattgacgagtgctggtcacagccatgtcttaacggagcaacatgtcaggatgccctcggggcatacttttgcgattgtgctcccggtttcctcggcgatcactgtgaactgaatacagatgagtgtgcctcccagccatgtctgcacggtggcctgtgcgtggacggcgagaacagatatagctgcaattgcacagggtccggcttcacaggcacacattgcgaaaccctcatgccactgtgttggtccaaaccctgtcataacaacgcaacttgcgaggacagtgtggacaactacacctgccattgttggcctggctacacaggcgcacagtgcgagatagacctcaatgaatgcaactctaacccctgtcagagtaacggagagtgtgtcgagcttagctcagagaagcagtacgggaggatcacaggcttgccgagcagtttttcttaccacgaggcctctggatacgtctgtatctgtcagccagggtttacagggatccactgcgaggaggacgttaacgagtgctcttcgaacccatgccagaacggaggcacctgcgaaaatctgccgggaaattatacctgtcactgcccttttgacaatctttcgcggaccttttatggtgggagggattgttccgatattctccttggctgcacacaccaacagtgcctgaacaacggcacctgcatccctcatttccaggatgggcagcacggattttcttgcttatgcccgagcggatatactggatcactgtgtgaaatagccacaacactgtctttcgaaggagacggcttcctttgggtgaagtccggaagtgttacaaccaaaggcagtgtttgtaacatcgcattgagattccagacggttcagccaatggccttgctgctgtttcgtagcaatcgggacgtattcgtgaagctggaactgctgtctgggtacattcacctctcaatccaggtcaataaccagtctaaggtgttgctgttcatctcccacaacacttctgacggggagtggcacttcgtggaagttatattcgccgaggcagttaccctgaccctgatagacgatagctgcaaagaaaaatgtatcgcgaaggcccctacacccctggagtcagatcaatccatttgtgcgtttcagaacagctttctcgggggtttacccgtagggatgacttccaatggggtcgctctgttaaacttctacaacatgcccagcactccaagttttgttgggtgcctgcaggacattaaaattgattggaatcacatcacattagagaacatttctagcgggagctcactgaatgtcaaggcagggtgcgtaaggaaagattggtgcgagtcgcagccatgtcagagtcggggtcgttgcatcaacctttggctgtcctaccagtgtgactgccaccgaccttatgaaggcccaaattgcctgcgtgagtatgtggcagggaggttcggccaggacgactctaccggctacgtgatttttaccttagatgagtcttacggggacaccatttctctcagcatgtttgtgcggaccctccaaccatccggcttgctgcttgcactcgaaaatagcacctaccagtatatcagggtgtggcttgaacgcggaaggctcgccatgctcactcccaactctcctaaacttgttgtaaaatttgtgctgaatgacgggaacgttcacctgatatctttgaagataaagccctataaaatcgagctgtaccaatcttctcagaatttgggattcatctctgcttccacatggaagatcgagaaaggagatgtcatttacatcggaggtctccctgataagcaagaaactgagcttaacggaggctttttcaagggctgcattcaggatgtgcggttgaacaatcagaacttagaattctttcccaatccaaccaacaacgccagtttgaaccccgttttggtcaatgttacccagggctgcgccggtgataatagttgcaaaaggcaaacaaatgtggggagagctctgaccgagctagggagtcggggtccgaaatatcaggttagcctctttcggttttgcgtaggcagctgggctacaggcaacacttttttcctttccagcatcaaacctggatccaacccttgtcacaatgggggagtgtgccattccaggtgggacgactttagctgctcctgccccgcattaacgtctggcaaggcgtgtgaggaagtgcagtggtgcggcttctctccatgcccacacggcgcacaatgtcagcctgttctgcaaggatttgaatgcattgccaatgcggtcttcaatggccagagtggtcagatcttatttagatcgaatggtaacatcaccagagagctgacaaacattacatttgggtttagaacgcgcgacgcaaacgtcattatactccacgcagaaaaggaacccgaatttctaaatatatctatccaggatagtagactgttttttcaactacagtccggcaattcattctacatgttatctctgaccagcctccagagcgtgaacgatgggacgtggcatgaagtaaccttatcaatgaccgatcccctgtcccaaacctcaagatggcagatggaggtcgacaacgagaccccctttgtcaccagcaccatcgccacagggtccctgaatttcctaaaggacaataccgacatctatgtgggcgaccgcgctattgataatatcaaagggttgcaaggatgtctttccacaatcgagatcggaggaatatatctgtcatatttcgagaacgtgcatgggttcatcaataagccccaggaggaacaattcctcaaaatttcaaccaactctgtagtgaccggttgtctccaattaaatgtatgtaactctaatccatgccttcatggcggaaactgtgaagacatatattcctcctaccactgcagctgtccactgggatggtcaggaaaacattgcgaactgaatatcgacgaatgtttcagtaatccatgcattcacggaaactgctctgatagagttgctgcttaccattgcacctgcgagcccggatataccggcgtgaattgtgaagtcgatattgacaactgtcagtcccaccagtgcgccaacggcgcaacatgtattagccacacaaatggctatagttgcctatgtttcgggaattttactggtaaattctgccgccagtctagactaccatccaccgtttgcggaaatgagaaaacaaatctcacttgctacaacggaggaaactgcacagaatttcagaccgaactgaaatgtatgtgcagacccggtttcacaggggaatggtgcgaaaaggatatcgatgagtgtgccagtgacccttgtgtgaacggagggctatgccaggacctgctgaataagttccagtgcctgtgtgacgtggcctttgccggtgagaggtgcgaggttgatctggcagatgacctgatttcggatatcttcacaactattggaagcgtcactgtggctctactgctgatcctattgctagctatagtggcctctgtcgtaacaagtaacaagcgcgctacccagggtacttacagtccatctcggcaagagaaagaaggatccagagtggagatgtggaacctaatgccacctcccgcaatggagagactcatatag

SEQ ID NO: 92278 - DNA, 4691 bp, Artificial Sequence
  derived and/or modified sequence
atgtgcgcgcacgccgctttacgcatgctccttaagttccccgtactccctcggagaccctagctacacgccgaatccgttactccgggttttcgcagtggctcggtggcctaccccgatcgaaacctagtctggaactgaacctacaatatctctgagggaggacacatctatgactagcagtggcatgtgctcaggaaagattccttttgcaataaaaacaacaccaggtgcctctcaaattcttgccaaaacaattctacatgcaaagatttttcaaaagacaatgattgttcttgttcagacacagccaataatttggacaaagactgtgacaacatgaaagacccttgcttctccaatccctgtcaaggaagtgccacttgtgtgaacaccccaggagaaaggagctttctgtgcaaatgtcctcctgggtacagtgggacaatctgtgaaactaccattggttcctgtggcaagaactcctgccaacatggaggtatttgccatcaggaccctatttatcctgtctgcatctgccctgctggatatgctggaagattctgtgagatagatcacgatgagtgtgcttccagcccttgccaaaatggggccgtgtgccaggatggaattgatggttactcctgcttctgtgtcccaggatatcaaggcagacactgcgacttggaagtggatgaatgtgcttcagatccctgcaagaacgaggctacatgcctcaatgaaataggaagatatacttgtatctgtccccacaattattctggtgtaaactgtgaattggaaattgacgaatgttggtcccagccttgtttaaatggtgcaacttgtcaggatgctctgggggcctatttctgcgactgtgcccctggattcctgggggatcactgtgaactcaacactgatgagtgtgccagtcaaccttgtctccatggagggctgtgtgtggatggagaaaacagatatagctgtaactgcacgggtagtggattcacagggacacactgtgagaccttgatgcctctttgttggtcaaaaccttgtcacaataatgctacatgtgaggacagtgttgacaattacacttgtcactgctggcctggatacacaggtgcccagtgtgagatcgacctcaatgaatgcaatagtaacccctgccagtccaatggggaatgtgtggagctgtcctcagagaaacaatatggacgcatcactggactgccttcttctttcagctaccatgaagcctcaggttatgtctgtatctgtcagcctggattcacaggaatccactgcgaagaagacgtcaatgaatgttcttcaaacccttgccaaaatggtggtacttgtgagaacttgcctgggaattatacttgccattgcccatttgataacctttctagaactttttatggaggaagggactgttctgatattctcctgggctgtacccatcagcaatgtctaaataatggaacatgcatccctcacttccaagatggccagcatggattcagctgcctatgtccatctggctacaccgggtccctgtgtgaaatcgcaaccacactttcatttgagggcgatggcttcctgtgggtcaaaagtggctcagtgacaaccaagggctcagtttgtaacatagccctcaggtttcagactgttcagccaatggctcttctacttttccgaagcaacagggatgtgtttgtgaagctggagctgctaagtggctacattcacttatcaattcaggtcaataatcagtcaaaggtgcttctgttcatttcccacaacaccagcgatggagagtggcatttcgtggaggtaatatttgcagaggctgtgacccttaccttaatcgacgactcctgtaaggagaaatgcatcgcgaaagctcctactccacttgaaagtgatcaatcaatatgtgcttttcagaactcctttttgggtggtttaccagtgggaatgaccagcaatggtgttgctctgcttaacttctataatatgccatccacaccttcgtttgtaggctgtctccaagacattaaaattgattggaatcacattaccctggagaacatctcgtctggctcatcattaaatgtcaaggcaggctgtgtgagaaaggattggtgtgaaagccaaccttgtcaaagcagaggacgctgcatcaacttgtggctgagttaccagtgtgactgccacaggccctatgaaggccccaactgtctgagagagtatgtggcaggcagatttggccaggatgactccactggttatgtcatctttactcttgatgagagctatggagacaccatcagcctctccatgtttgtccgaacgcttcaaccatcaggcttacttctagctttggaaaacagcacttatcaatatatccgtgtctggctagagcgcggcagactagcaatgctgactccaaactctcccaaattagtagtaaaatttgttcttaatgatggaaatgtccacttgatatctttgaaaatcaagccatataaaattgaactgtatcagtcttcacaaaacctaggatttatttctgcttctacgtggaaaatcgaaaagggagatgtcatctacattggtggcctacctgacaagcaagagactgaacttaatggtggattcttcaaaggctgtatccaagatgtaagactaaacaaccaaaatctggaattctttccaaatccaacaaacaatgcatctctcaatccagttcttgtcaatgtaacccaaggctgtgctggagacaacagctgcaagaggcagaccaatgtgggaagggcactcactgagttgggatccagaggacctaagtaccaagtttcactgtttcgcttctgtgtaggatcttgggcaactggaaacaccttctttttatcatctataaaaccaggatccaacccctgtcacaatggaggtgtttgccattcccggtgggatgacttctcctgttcctgtcctgccctcacaagtgggaaagcctgtgaggaggttcagtggtgtggattcagcccgtgtcctcacggagcccagtgccagccggtgcttcaaggatttgaatgtattgcaaatgctgtttttaatggacaaagcggtcaaatattattcagaagcaatgggaatattaccagagaactcaccaatatcacatttggtttcagaacaagggatgcaaatgtaataatattgcatgcagaaaaagagcctgaatttcttaatattagcattcaagattccagattattctttcaattgcaaagtggcaacagcttttatatgctaagtctgacaagtttgcagtcagtgaatgatggcacatggcacgaagtgaccctttccatgacagacccactgtcccagacctccaggtggcaaatggaagtggacaacgaaacaccttttgtgaccagcacaattgctactggaagcctcaactttttgaaggataatacagatatttatgtgggagacagagctattgacaatataaagggcctgcaagggtgtctaagtacaatagaaatcggaggcatttatctctcttactttgaaaatgttcatggtttcattaataaacctcaggaagagcaatttctcaaaatctctaccaattcagtggtcactggctgtttgcagttaaatgtctgcaactccaacccctgtttgcatggaggaaactgtgaagacatctatagctcttatcattgctcctgtcccttgggatggtcagggaaacactgtgaactcaacatcgatgaatgcttttcaaacccctgtatccatggcaactgctctgacagagttgcagcctaccactgcacatgtgagcctggatacactggtgtgaactgtgaagtggatatagacaactgccagagtcaccagtgtgcaaatggagccacctgcattagtcatactaatggctattcttgcctctgttttggaaattttacaggaaaattttgcagacagagcagattaccctcaacagtctgtgggaatgagaagacaaatctcacttgctacaatggaggcaactgcacagagttccagactgaattaaaatgtatgtgccggccaggttttactggagaatggtgtgaaaaggacattgatgagtgtgcctctgatccgtgtgtcaatggaggtctgtgccaggacttactcaacaaattccagtgcctctgtgatgttgcctttgctggcgagcgctgcgaggtggacttggcagatgacttgatctccgacattttcaccactattggctcagtgactgtcgccttgttactgatcctcttgctggccattgttgcttctgttgtcacctccaacaaaagggcaactcagggaacctacagccccagccgtcaggagaaggagggctcccgagtggaaatgtggaacttgatgccaccccctgcaatggagagactgatttaggagcattgtgtcccttcgagatggggatccacacactgtgaatgtgatgactgtacttcaggtatctctgacatacctgacaatgttaatctgcaactgggattacactggaactacaggaatgattcctttgaccaccttaaaaactttcacagtggttccgctcgacaccattgttttattatattatatcagccaattgc

SEQ ID NO: 92279 - DNA, 4149 bp, Artificial Sequence
  derived and/or modified sequence
atgaaggacccctgcttcagcaacccctgccagggcagcgccacctgcgtgaacacccccggcgagagaagcttcctgtgcaagtgcccccccggctacagcggcaccatctgcgagaccaccatcggcagctgcggcaagaacagctgccagcacggcggcatctgccaccaggaccccatctaccccgtgtgcatctgccccgccggctacgccggcagattctgcgagatcgaccacgacgagtgcgccagcagcccctgccagaacggcgccgtgtgccaggacggcatcgacggctacagctgcttctgcgtgcccggctaccagggcagacactgcgacctggaggtggacgagtgcgccagcgacccctgcaagaacgaggccacctgcctgaacgagatcggcagatacacctgcatctgcccccacaactacagcggcgtgaactgcgagctggagatcgacgagtgctggagccagccctgcctgaacggcgccacctgccaggacgccctgggcgcctacttctgcgactgcgcccccggcttcctgggcgaccactgcgagctgaacaccgacgagtgcgccagccagccctgcctgcacggcggcctgtgcgtggacggcgagaacagatacagctgcaactgcaccggcagcggcttcaccggcacccactgcgagaccctgatgcccctgtgctggagcaagccctgccacaacaacgccacctgcgaggacagcgtggacaactacacctgccactgctggcccggctacaccggcgcccagtgcgagatcgacctgaacgagtgcaacagcaacccctgccagagcaacggcgagtgcgtggagctgagcagcgagaagcagtacggcagaatcaccggcctgcccagcagcttcagctaccacgaggccagcggctacgtgtgcatctgccagcccggcttcaccggcatccactgcgaggaggacgtgaacgagtgcagcagcaacccctgccagaacggcggcacctgcgagaacctgcccggcaactacacctgccactgccccttcgacaacctgagcagaaccttctacggcggcagagactgcagcgacatcctgctgggctgcacccaccagcagtgcctgaacaacggcacctgcatcccccacttccaggacggccagcacggcttcagctgcctgtgccccagcggctacaccggcagcctgtgcgagatcgccaccaccctgagcttcgagggcgacggcttcctgtgggtgaagagcggcagcgtgaccaccaagggcagcgtgtgcaacatcgccctgagattccagaccgtgcagcccatggccctgctgctgttcagaagcaacagagacgtgttcgtgaagctggagctgctgagcggctacatccacctgagcatccaggtgaacaaccagagcaaggtgctgctgttcatcagccacaacaccagcgacggcgagtggcacttcgtggaggtgatcttcgccgaggccgtgaccctgaccctgatcgacgacagctgcaaggagaagtgcatcgccaaggcccccacccccctggagagcgaccagagcatctgcgccttccagaacagcttcctgggcggcctgcccgtgggcatgaccagcaacggcgtggccctgctgaacttctacaacatgcccagcacccccagcttcgtgggctgcctgcaggacatcaagatcgactggaaccacatcaccctggagaacatcagcagcggcagcagcctgaacgtgaaggccggctgcgtgagaaaggactggtgcgagagccagccctgccagagcagaggcagatgcatcaacctgtggctgagctaccagtgcgactgccacagaccctacgagggccccaactgcctgagagagtacgtggccggcagattcggccaggacgacagcaccggctacgtgatcttcaccctggacgagagctacggcgacaccatcagcctgagcatgttcgtgagaaccctgcagcccagcggcctgctgctggccctggagaacagcacctaccagtacatcagagtgtggctggagagaggcagactggccatgctgacccccaacagccccaagctggtggtgaagttcgtgctgaacgacggcaacgtgcacctgatcagcctgaagatcaagccctacaagatcgagctgtaccagagcagccagaacctgggcttcatcagcgccagcacctggaagatcgagaagggcgacgtgatctacatcggcggcctgcccgacaagcaggagaccgagctgaacggcggcttcttcaagggctgcatccaggacgtgagactgaacaaccagaacctggagttcttccccaaccccaccaacaacgccagcctgaaccccgtgctggtgaacgtgacccagggctgcgccggcgacaacagctgcaagagacagaccaacgtgggcagagccctgaccgagctgggcagcagaggccccaagtaccaggtgagcctgttcagattctgcgtgggcagctgggccaccggcaacaccttcttcctgagcagcatcaagcccggcagcaacccctgccacaacggcggcgtgtgccacagcagatgggacgacttcagctgcagctgccccgccctgaccagcggcaaggcctgcgaggaggtgcagtggtgcggcttcagcccctgcccccacggcgcccagtgccagcccgtgctgcagggcttcgagtgcatcgccaacgccgtgttcaacggccagagcggccagatcctgttcagaagcaacggcaacatcaccagagagctgaccaacatcaccttcggcttcagaaccagagacgccaacgtgatcatcctgcacgccgagaaggagcccgagttcctgaacatcagcatccaggacagcagactgttcttccagctgcagagcggcaacagcttctacatgctgagcctgaccagcctgcagagcgtgaacgacggcacctggcacgaggtgaccctgagcatgaccgaccccctgagccagaccagcagatggcagatggaggtggacaacgagacccccttcgtgaccagcaccatcgccaccggcagcctgaacttcctgaaggacaacaccgacatctacgtgggcgacagagccatcgacaacatcaagggcctgcagggctgcctgagcaccatcgagatcggcggcatctacctgagctacttcgagaacgtgcacggcttcatcaacaagccccaggaggagcagttcctgaagatcagcaccaacagcgtggtgaccggctgcctgcagctgaacgtgtgcaacagcaacccctgcctgcacggcggcaactgcgaggacatctacagcagctaccactgcagctgccccctgggctggagcggcaagcactgcgagctgaacatcgacgagtgcttcagcaacccctgcatccacggcaactgcagcgacagagtggccgcctaccactgcacctgcgagcccggctacaccggcgtgaactgcgaggtggacatcgacaactgccagagccaccagtgcgccaacggcgccacctgcatcagccacaccaacggctacagctgcctgtgcttcggcaacttcaccggcaagttctgcagacagagcagactgcccagcaccgtgtgcggcaacgagaagaccaacctgacctgctacaacggcggcaactgcaccgagttccagaccgagctgaagtgcatgtgcagacccggcttcaccggcgagtggtgcgagaaggacatcgacgagtgcgccagcgacccctgcgtgaacggcggcctgtgccaggacctgctgaacaagttccagtgcctgtgcgacgtggccttcgccggcgagagatgcgaggtggacctggccgacgacctgatcagcgacatcttcaccaccatcggcagcgtgaccgtggccctgctgctgatcctgctgctggccatcgtggccagcgtggtgaccagcaacaagagagccacccagggcacctacagccccagcagacaggagaaggagggcagcagagtggagatgtggaacctgatgcccccccccgccatggagagactgatctag

SEQ ID NO: 92280 - protein, 870 aa, Artificial Sequence
  derived and/or modified sequence
MALKNINYLLIFYLSFSLLIYIKNSFCNKNNTRCLSNSCQNNSTCKDFSKDNDCSCSDTANNLDKDCDNMKDPCFSNPCQGSATCVNTPGERSFLCKCPPGYSGTICETTIGSCGKNSCQHGGICHQDPIYPVCICPAGYAGRFCEIDHDECASSPCQNGAVCQDGIDGYSCFCVPGYQGRHCDLEVDECASDPCKNEATCLNEIGRYTCICPHNYSGVNCELEIDECWSQPCLNGATCQDALGAYFCDCAPGFLGDHCELNTDECASQPCLHGGLCVDGENRYSCNCTGSGFTGTHCETLMPLCWSKPCHNNATCEDSVDNYTCHCWPGYTGAQCEIDLNECNSNPCQSNGECVELSSEKQYGRITGLPSSFSYHEASGYVCICQPGFTGIHCEEDVNECSSNPCQNGGTCENLPGNYTCHCPFDNLSRTFYGGRDCSDILLGCTHQQCLNNGTCIPHFQDGQHGFSCLCPSGYTGSLCEIATTLSFEGDGFLWVKSGSVTTKGSVCNIALRFQTVQPMALLLFRSNRDVFVKLELLSGYIHLSIQVNNQSKVLLFISHNTSDGEWHFVEVIFAEAVTLTLIDDSCKEKCIAKAPTPLESDQSICAFQNSFLGGLPVGMTSNGVALLNFYNMPSTPSFVGCLQDIKIDWNHITLENISSGSSLNVKAGCVRKDWCESQPCQSRGRCINLWLSYQCDCHRPYEGPNCLRGKFCRQSRLPSTVCGNEKTNLTCYNGGNCTEFQTELKCMCRPGFTGEWCEKDIDECASDPCVNGGLCQDLLNKFQCLCDVAFAGERCEVDLADDLISDIFTTIGSVTVALLLILLLAIVASVVTSNKRATQGTYSPSRQEKEGSRVEMWNLMPPPAMERLI

SEQ ID NO: 92281 - DNA, 2613 bp, Artificial Sequence
  derived and/or modified sequence
atggctctgaagaatatcaactatttactcattttttacctgtcgttttctctgctgatttatattaagaatagtttttgtaataagaacaacaccaggtgcttgtcaaattcttgccagaacaactctacctgtaaggattttagtaaagacaacgactgtagttgttccgatactgcaaacaatctagacaaagattgtgacaatatgaaggatccatgctttagcaacccttgtcagggatcagctacttgcgttaacacgcccggagaacgcagtttcctttgcaagtgtccccccggatattctggaaccatttgtgaaacaacgattggcagctgtggtaagaacagctgtcagcacggcggcatatgtcaccaggatcccatatacccagtgtgtatttgtccagctggatacgccggcagattttgtgagatcgatcacgacgagtgtgcatcaagcccatgtcagaatggagccgtctgtcaggacggcattgatggctatagctgtttttgcgtcccaggctatcagggcaggcactgcgatttggaggttgatgagtgtgcatccgatccatgcaagaatgaagctacatgtctcaatgaaatcggccgttacacctgtatctgcccacataattactctggggtgaactgtgagcttgagattgacgagtgctggtctcaaccctgcctgaatggagcaacatgccaggacgcactcggagcatacttttgcgactgcgctcctggattccttggggaccactgtgagttgaatactgatgaatgcgccagccagccctgtcttcacggggggctgtgcgtggacggagagaatcggtactcttgtaactgtacgggaagtggttttaccgggacccattgcgaaaccttgatgccactgtgctggtctaaaccttgccataataacgccacatgcgaggacagcgtggataattatacttgccactgttggcccgggtatacgggcgcccagtgtgagatagaccttaatgagtgcaattctaatccctgccagagcaacggggagtgtgtggagttgtcatccgagaagcagtacggcaggattacaggcctaccaagctctttctcttatcacgaggcaagtggttacgtctgcatttgtcaacccggctttacaggtattcactgcgaggaggatgtgaatgagtgttcaagcaacccctgccagaacggggggacttgcgaaaatctgcccggtaactatacatgccactgtccgttcgacaacctctcccgcaccttctacggcggaagggactgcagtgacatcctgcttgggtgcacacaccagcagtgcctgaataacggaacatgcattccccatttccaagatggacaacatggattcagctgtctgtgcccatccggatacacagggtccctatgtgaaatagccacaacactgagtttcgagggagatggattcctctgggttaaatcgggaagcgttactacgaagggatcagtctgcaatatagccctgcgttttcaaacagtccagcctatggccctgctgctgtttcggtccaaccgtgacgtgtttgtcaagttagaactcttgtcgggctacatccatctgagtattcaggtgaataaccagtccaaagtgctactctttatcagccataatacaagcgacggggagtggcacttcgttgaagtcatctttgcggaggctgttacccttacactcattgatgattcgtgtaaggaaaagtgtatcgccaaagctcctaccccgctggagtccgaccagagcatctgcgcgttccagaatagctttctaggtgggctacctgtggggatgacgtcaaatggtgtggctttgttgaatttctacaacatgccttctactccaagcttcgtgggatgcctgcaggacataaagattgattggaaccatattacgcttgaaaatatctcttctggctccagtctaaacgtgaaggccggatgcgtgcgtaaagattggtgcgagtcccagccttgtcaatcccgtgggagatgcattaatttgtggttatcctaccaatgtgattgccacagaccctatgagggccccaactgcctgagggggaaattttgtcggcagtctagattgccttcaaccgtgtgcggtaacgagaaaacgaatttgacctgttataacggcggcaactgcaccgagttccagactgaactcaaatgcatgtgccggccaggctttactggggaatggtgtgagaaagatatcgacgaatgtgctagtgacccttgtgtgaatggtggtctctgtcaggacctcctgaataaatttcagtgtctctgcgatgtagcttttgctggtgaaagatgcgaggttgatttggccgatgacctgatatcagacatcttcacgaccattggctccgtgaccgtcgccttactgctaattctcttgttggctatcgtcgccagcgtggtgactagcaacaagcgcgccacccaaggtacctattcaccttcgaggcaggagaaagagggtagcagggttgagatgtggaatctcatgccgccccccgccatggagcgtttgatctag

SEQ ID NO: 92282 - DNA, 882 bp, Artificial Sequence
  derived and/or modified sequence
atgccattatgctggtctaaaccctgtcacaataatgcaacatgcgaagacagtgttgataactatacttgccactgttggcccgggtatacaggagctcagtgtgagatagacctaaatgaatgcaattctaatccgtgccagtcaaatggcgagtgcgtcgaactgtcttcagaaaaacaatatggaagaattacgggcctgccaagcagcttctcttaccacgaggcaagtggttacgtgtgtatctgtcagccgggcttcacgggcatacattgtgaggaagatgtgaatgagtgctctagcaacccttgccagaatggcggcacatgcgagaacctgccagggaattatacgtgccactgtccattcgacaacttaagcaggacgttctatggggggcgagactgtagcgacattctgctgggctgtacccatcaacagtgcctcaacaacgggacctgcattccccatttccaagacgggcagcacggttttagttgtctttgtccttctggctatacgggtagtctctgtgaaattgctacaacactgagcttcgagggggacgggttcctgtgggtcaagagcgggtccgtcaccaccaaaggctccgtatgcaacatagctctgcgcttccagaccgtgcagccaatggccctcctgttatttcgttccaatcgcgacgttttcgtgaagcttgagctcctgagcggctacatccatttatctatccaagttaacaaccaatcaaaggtgctcttgtttatctcacacaacacctctgacggtgagtggcattttgttgaggcagtttctaaaacactgaagctgatcggtattacgttaccgtggcgcacatctagactggcccaccactag

SEQ ID NO: 92283 - DNA, 2613 bp, Artificial Sequence
  derived and/or modified sequence
atggccctgaagaacatcaactacctgctgatcttctacctgtccttcagcctgctgatctacatcaagaacagcttctgcaacaagaacaacacccgctgcctgagcaacagctgccagaacaacagcacctgcaaggacttcagcaaggacaatgactgcagctgcagcgacacagccaacaacctggacaaggactgtgacaacatgaaggacccctgcttcagcaacccctgccagggcagcgccacctgtgtgaacaccccaggagagaggagcttcctgtgcaagtgccccccaggctacagcggcaccatctgtgagaccaccatcggcagctgtgggaagaacagctgccagcacggcggcatctgccaccaggaccccatctaccctgtgtgcatctgcccagctggctacgccggccgcttctgtgaaattgaccatgatgaatgtgccagcagcccctgccagaatggagctgtgtgccaggacggcattgatggctacagctgcttctgtgtgcccggctaccagggccgccactgtgacctggaggtggatgaatgtgccagtgacccctgcaagaatgaggccacctgcctgaatgaaattggccgctacacctgcatctgcccccacaactacagcggcgtgaactgtgagctggagattgatgagtgctggagccagccctgcctgaatggagccacctgccaggatgccctgggcgcctacttctgtgactgtgcccctggcttcctgggggaccactgtgagctgaacacagatgaatgtgccagccagccctgcctgcatggaggcctgtgtgtggatggagaaaatcgctacagctgcaactgcaccggcagcggcttcaccggcacccactgtgagaccctgatgcccctgtgctggagcaagccctgccacaacaatgccacctgtgaagattctgtggacaactacacctgccactgctggccaggctacaccggggcccagtgtgaaattgacctgaatgaatgcaacagcaacccctgccagagcaatggagaatgtgtggagctgagcagcgagaagcagtatggccgcatcaccggcctgcccagcagcttctcctaccacgaggccagcggctacgtgtgcatctgccagcccggcttcaccggcatccactgtgaggaggatgtgaatgaatgtagcagcaacccctgccagaatggaggcacctgtgagaacctgcccggcaactacacctgccactgcccctttgacaacctgagcaggaccttctatggaggccgggactgcagcgacatcctgctgggctgcacccaccagcagtgcctgaacaacggcacctgcatcccccacttccaggacggccagcacggcttcagctgcctgtgccccagcggctacacaggcagcctgtgtgagatcgccaccaccctgagctttgaaggagatggcttcctgtgggtgaagagcggctctgtgaccaccaagggctctgtgtgcaacatcgccctgcgcttccagacagtgcagcccatggccctgctgctcttccgcagcaacagagatgtgtttgtgaagctggagctgctgagcggctacatccacctgagcatccaggtgaacaaccagagcaaggtgctgctcttcatcagccacaacaccagtgatggagagtggcactttgtggaggtgatctttgctgaggccgtgaccctgaccctgattgatgacagctgcaaggagaagtgcatcgccaaggcccccacccccctggagagtgaccagagcatctgtgccttccagaacagcttcctgggcggcctgcctgtgggcatgaccagcaatggagtggccctgctgaacttctacaacatgcccagcacccccagctttgtgggctgcctgcaggacatcaagattgactggaaccacatcaccctggagaacatcagcagcggcagcagcctgaatgtgaaggccggctgtgtgaggaaggactggtgtgagagccagccctgccagagccggggccgctgcatcaacctgtggctgagctaccagtgtgactgccaccggccctatgagggccccaactgcctgcggggcaagttctgccggcagagccggctgcccagcacagtgtgtggaaatgagaagaccaacctgacctgctacaacggcggcaactgcacagagttccagacagagctgaagtgcatgtgcaggcctggcttcaccggggagtggtgtgagaaggacattgatgaatgtgccagtgacccctgtgtgaatggaggcctgtgccaggacctgctgaacaagttccagtgcctgtgtgatgtggcctttgctggggagcgctgtgaggtggacctggctgatgacctgatcagtgacatcttcaccaccatcggctctgtgacagtggccctgctgctgatcctgctgctggccatcgtggcctctgtggtgaccagcaacaagagggccacccagggcacctacagccccagccggcaggagaaggagggcagccgggtggagatgtggaacctgatgcctcctccagccatggagcggctcatctag

SEQ ID NO: 92284 - DNA, 882 bp, Artificial Sequence
  derived and/or modified sequence
atgcccctgtgctggagcaagccctgccacaacaatgccacctgtgaggacagcgtggacaactacacctgccactgctggccaggctacacaggagcccagtgtgaaattgacctgaatgaatgcaacagcaacccctgccagagcaatggagaatgtgtggagctgagcagcgagaagcagtatggccgcatcaccggcctgcccagcagcttctcctaccacgaggccagcggctacgtgtgcatctgccagcccggcttcaccggcatccactgtgaagaagatgtgaatgaatgtagcagcaacccctgccagaatggaggcacctgtgagaacctgcccggcaactacacctgccactgcccctttgacaacctgagcaggaccttctacggcggccgggactgcagcgacatcctgctgggctgcacccaccagcagtgcctgaacaacggcacctgcatcccccacttccaggacggccagcacggcttcagctgcctgtgccccagcggctacacaggcagcctgtgtgaaattgccaccaccctgagctttgaaggagatggcttcctgtgggtgaagagcggctctgtgaccaccaagggctctgtgtgcaacatcgccctgcgcttccagacagtgcagcccatggccctgctgctcttccgcagcaacagagatgtgtttgtgaagctggagctgctgagcggctacatccacctgagcatccaggtgaacaaccagagcaaggtgctgctcttcatcagccacaacaccagtgatggagagtggcactttgtggaggccgtgtccaagaccctgaagctgattggcatcaccctgccctggaggaccagccggctggcccaccactag

SEQ ID NO: 92285 - DNA, 2613 bp, Artificial Sequence
  derived and/or modified sequence
atggccctgaagaacatcaactacctgctgatcttctacctgagcttttcactgttgatctacatcaagaactccttctgtaacaaaaacaatacaagatgcctcagcaacagttgtcagaacaattctacttgtaaggacttctcaaaggacaacgactgctcctgctccgacactgccaacaacttagacaaggactgcgataacatgaaagacccatgctttagcaacccgtgccagggatcagccacttgtgtcaataccccaggagagaggagctttctttgcaaatgtcccccggggtactcagggaccatttgtgaaaccactatcggtagttgtggaaagaattcatgtcagcatggcggaatctgccatcaggatccaatttaccctgtctgtatttgcccggccggctatgccggacgcttctgtgagatcgaccacgatgagtgcgcctctagtccctgtcagaacggggccgtctgtcaggacgggatagacggttattcttgtttttgcgtgcccgggtatcagggccgccactgtgaccttgaggttgacgagtgtgctagcgacccctgcaaaaacgaggccacttgcctcaatgaaattggcaggtatacatgcatctgccctcataattatagcggtgtaaactgtgagctggagatagacgaatgctggagccagccttgcctaaacggagctacatgccaggatgcgttaggggcttatttttgcgattgtgcccctgggtttctcggggatcattgtgagctcaatacagacgagtgcgcctcacagccctgcctgcatggcggactctgtgtagatggggagaatagatactcttgcaattgtacagggagtggttttacaggtacccattgcgagacgttaatgcctctgtgttggagtaagccctgtcacaataatgcgacttgtgaagattccgtcgacaactatacctgccactgctggcccgggtataccggggcacaatgcgaaatcgatctgaacgagtgtaattccaatccatgtcagtccaacggcgaatgtgtagagctcagcagtgagaagcagtatggaagaataaccggattgcccagcagcttctcttaccatgaagcgagcggatacgtgtgcatttgtcagcccggatttacaggaattcattgcgaggaggacgtgaatgagtgctctagcaatccatgccaaaatggggggacatgtgagaatctccctggtaattatacatgtcactgtcccttcgataacctgtcacgcacattctacggtgggcgcgactgttcagatatccttttagggtgtactcaccagcagtgtctgaacaacgggacttgcataccccactttcaggatggacagcatggcttctcttgcctctgtccttccggatacaccggcagcctgtgcgaaatagcaacaacattatcctttgaaggggatgggttcctctgggtgaaaagcggttctgttaccactaaagggtcagtctgcaacatcgcactgaggtttcagaccgtccagccgatggcactgttactgttcagaagtaacagggacgtctttgtgaaacttgagctcctatctggctatattcacctgagcatccaggtcaacaatcagtcaaaggtcttgctgtttattagtcacaacacctcggatggcgagtggcacttcgtcgaagtgattttcgctgaggccgtcaccctcaccttgattgatgatagttgcaaagaaaaatgtatcgccaaggcccccacacccctcgagtcggatcagtccatttgcgcctttcagaatagcttccttgggggactaccagtcggcatgacgagcaatggagtggcactgctgaatttttataacatgcctagcaccccttcgtttgtcggctgcctccaggatatcaagattgactggaatcatattacgctagagaacatctcaagcggaagcagcctcaacgtcaaggctggctgcgtgcgcaaggactggtgcgagagtcaaccatgccagtcgaggggacgctgcattaatctgtggctgtcctaccagtgtgactgccatcgcccttacgaggggccaaattgcctaagaggaaagttctgccggcagtcccgactgccttccacagtatgtggaaatgaaaagacaaacctgacgtgctataacggcggtaactgcaccgaatttcaaaccgaactcaaatgtatgtgtagacctggatttactggtgagtggtgcgagaaggacatagatgaatgcgcttcagacccatgcgtgaatggtggcttgtgtcaggatctactgaataaattccagtgtctatgtgacgtcgctttcgcgggagagcggtgtgaggtcgatctggcagatgacttaatcagtgatatatttaccacaatcggttcagtgactgtagcactcctcctcatcctgctgctggccatcgtggcttctgtggttacctccaacaagagagccacccagggaacttacagtccatcccgccaggagaaagaggggagtcgcgttgaaatgtggaacctgatgcctcctccagcaatggagcgtctgatatag

SEQ ID NO: 92286 - DNA, 882 bp, Artificial Sequence
  derived and/or modified sequence
atgcccctgtgctggagcaagccctgccacaacaacgccacctgcgaagattcagtggataactatacgtgtcattgttggcccggctacacgggcgcacagtgtgagattgacttaaacgaatgtaattccaatccctgccagtcaaacggcgagtgcgtggagctgagctctgagaaacagtatggccggataacgggcttaccctcgtccttctcctaccacgaggccagcggttacgtgtgtatctgtcagccaggtttcacgggaatacactgcgaagaagacgtcaacgaatgttctagtaacccttgccagaatggtggaacgtgcgagaacttgccaggcaactatacctgccattgtccattcgataacttgtctcgcactttttacggaggcagagactgctctgacattctattgggatgtacgcatcagcagtgtcttaacaacggaacatgcatcccccatttccaggacggccaacatggttttagttgtttgtgtccaagtggttacacaggctctttgtgtgagatcgcaacgactctctcattcgaaggcgatgggtttctgtgggtaaaaagtggaagcgtgaccaccaaggggtctgtgtgcaacatagccttgcgttttcagactgtacagcctatggccctgctcctgtttcggagcaaccgggacgtgtttgtgaagcttgagctcctttccggttatatccacctctcgatccaggtaaataatcaatctaaggtcctgctgtttatctcccacaacacatccgacggagagtggcactttgtagaagcagtgagcaagactcttaaattgattgggattacacttccttggagaacaagccgactggcacaccactag

SEQ ID NO: 92287 - DNA, 2613 bp, Artificial Sequence
  derived and/or modified sequence
atggctcttaagaacattaattatctgctaattttttatttatccttctcgctcttgatctacattaagaacagtttctgcaataagaataatactaggtgcctgagcaattcttgtcagaataactcaacctgtaaagactttagcaaagacaacgattgtagttgtagcgatactgctaataatctcgacaaggattgcgataatatgaaggacccctgtttctccaacccttgtcaggggagcgccacttgtgtgaatacacccggagaacgctcctttctgtgtaaatgccccccagggtacagtggtacaatttgtgagaccaccattggttcctgcggtaagaattcctgccaacatggtggtatctgccatcaggacccaatatatcctgtctgcatttgccccgcaggatacgccggtcggttctgtgagattgatcacgacgagtgcgccagctctccatgccagaatggcgcagtgtgtcaggacgggatcgacgggtacagctgtttttgtgtgcctgggtatcagggtcggcactgcgacctcgaggtggacgagtgcgctagcgatccctgtaagaatgaggccacatgcctgaatgagattggcaggtatacctgcatctgcccccataactactccggggtcaattgcgagctggaaatcgatgagtgttggagccaaccatgcttgaacggagcgacatgtcaagatgctttgggcgcttacttttgcgactgcgctccgggattcctgggcgatcactgtgagctcaacactgacgaatgcgcctcccagccttgtctccacgggggattgtgcgttgatggcgaaaacagatacagctgcaactgtaccggctccggattcacggggacacactgtgaaaccctaatgcccctgtgctggtctaaaccgtgtcacaataatgctacatgtgaagacagcgtggataattatacctgccattgttggccaggctacaccggagcccagtgcgagatcgacctcaacgaatgcaactcgaatccttgccaaagcaatggcgaatgcgtggaactgtcctctgaaaaacagtacggacgcatcactggattaccatcttcttttagctaccatgaagccagtggctatgtatgtatttgccagccgggattcactggcatccactgcgaagaggacgtgaatgagtgctcatctaatccgtgtcaaaatgggggtacctgtgaaaatttgccaggtaactatacatgccattgtccctttgataatttgagtagaactttctacggagggagagactgttctgatatcctattaggatgcactcaccaacagtgtcttaacaatggaacttgcatccctcacttccaggacgggcagcacggtttctcctgtctttgccctagcggatacacagggagcctgtgcgaaatcgctaccacactctccttcgaaggggatggctttttgtgggtgaaaagcgggagcgtcaccaccaagggctcagtctgcaacatagcgctgcgatttcagacggttcagccaatggcgctgttgctatttcggagtaatagagatgtattcgttaagctggaactcctttctggttatatccacttgtctatccaagtaaataatcagagtaaggtgcttctcttcatatctcataatacatcagacggtgaatggcactttgtcgaagtgatctttgcagaggccgtgacacttaccctgatagatgattcctgcaaggagaaatgcatcgccaaagcccctacccctctcgagtcggaccaatcaatttgtgcctttcaaaatagcttccttggcggtctccccgtggggatgacttcaaacggagtggctctgctcaacttctataatatgccatccaccccctctttcgtagggtgccttcaggatattaaaattgattggaatcatattacattggagaatatttcttctggctccagcttgaacgtcaaagccggatgtgttcgaaaggattggtgcgaaagtcaaccatgccagtcacggggaaggtgtattaatttatggcttagttatcagtgtgattgccaccgaccctacgagggccctaactgtctgagaggaaagttttgtagacagtcaaggctgcctagcacggtctgtggaaatgaaaagaccaacttaacctgttacaacggaggcaactgtacggagtttcaaacagagcttaaatgcatgtgcaggcccggttttacaggagagtggtgcgaaaaggacattgacgaatgtgctagcgacccatgtgttaatggcggactctgccaggatctgttgaataaattccaatgtctctgtgatgtggcgtttgccggagaaaggtgcgaagtggacctggccgacgatctgatttcggatatttttacgaccattgggtccgttaccgttgcccttttgttaattttactactcgcaattgttgcttctgttgtaacctcgaataagagagccacacagggaacttattccccgtcgcggcaggagaaagaaggcagtagagtggaaatgtggaaccttatgccaccccctgccatggaaagactgatatag

SEQ ID NO: 92288 - DNA, 882 bp, Artificial Sequence
  derived and/or modified sequence
atgcctctgtgttggagcaagccttgtcataacaacgctacctgtgaggactccgtggataattacacatgccactgctggcccggttacactggtgcgcagtgtgagatcgacctgaacgagtgcaactccaacccctgtcagtcgaacggggagtgtgttgaactgagttccgaaaaacaatacggaagaataaccggcctcccaagtagctttagctatcatgaggccagcgggtacgtttgcatttgccagccagggtttactggcattcattgtgaagaggatgtgaatgaatgttcttctaacccatgccagaatggcggtacttgtgagaacttgcctgggaattacacttgccactgcccattcgacaacctttcacggaccttctacggtggacgggattgctccgacatcctccttgggtgcactcaccaacaatgccttaataacggcacttgtatccctcacttccaggatggacaacacgggttcagttgtctctgtccatctggatacactggttcactgtgcgagattgccaccactctttcgtttgaaggggacggcttcctgtgggttaaaagtggctcagtcaccaccaagggctctgtatgcaacatcgcccttagattccaaactgtacagcccatggcgctgttactctttcgttcgaatcgggacgtctttgtgaagctcgaactcctgtccggatatatccatctgtccatacaggtaaacaaccaaagcaaagttctgctcttcatctcccataacacaagcgatggcgaatggcatttcgtggaggccgtgagcaaaaccctgaaactgataggtatcactctgccatggcgtaccagccggttggctcatcactag

SEQ ID NO: 92289 - DNA, 2942 bp, Artificial Sequence
  derived and/or modified sequence
attttgaatctaagtccctgtattttctgtgaaggagctgtaagtagggtgggacagagatggcacctgggggttctgaggcacccgctcctctctgagacagacagggatcaggagccggactgggaccagaccaccagcaacacaccagaggatgttctctaaataagaccatggcacttaagaacattaactaccttctcatcttctacctcagtttctcactgcttatctacataaaaaattccttttgcaataaaaacaacaccaggtgcctctcaaattcttgccaaaacaattctacatgcaaagatttttcaaaagacaatgattgttcttgttcagacacagccaataatttggacaaagactgtgacaacatgaaagacccttgcttctccaatccctgtcaaggaagtgccacttgtgtgaacaccccaggagaaaggagctttctgtgcaaatgtcctcctgggtacagtgggacaatctgtgaaactaccattggttcctgtggcaagaactcctgccaacatggaggtatttgccatcaggaccctatttatcctgtctgcatctgccctgctggatatgctggaagattctgtgagatagatcacgatgagtgtgcttccagcccttgccaaaatggggccgtgtgccaggatggaattgatggttactcctgcttctgtgtcccaggatatcaaggcagacactgcgacttggaagtggatgaatgtgcttcagatccctgcaagaacgaggctacatgcctcaatgaaataggaagatatacttgtatctgtccccacaattattctggtgtaaactgtgaattggaaattgacgaatgttggtcccagccttgtttaaatggtgcaacttgtcaggatgctctgggggcctatttctgcgactgtgcccctggattcctgggggatcactgtgaactcaacactgatgagtgtgccagtcaaccttgtctccatggagggctgtgtgtggatggagaaaacagatatagctgtaactgcacgggtagtggattcacagggacacactgtgagaccttgatgcctctttgttggtcaaaaccttgtcacaataatgctacatgtgaggacagtgttgacaattacacttgtcactgctggcctggatacacaggtgcccagtgtgagatcgacctcaatgaatgcaatagtaacccctgccagtccaatggggaatgtgtggagctgtcctcagagaaacaatatggacgcatcactggactgccttcttctttcagctaccatgaagcctcaggttatgtctgtatctgtcagcctggattcacaggaatccactgcgaagaagacgtcaatgaatgttcttcaaacccttgccaaaatggtggtacttgtgagaacttgcctgggaattatacttgccattgcccatttgataacctttctagaactttttatggaggaagggactgttctgatattctcctgggctgtacccatcagcaatgtctaaataatggaacatgcatccctcacttccaagatggccagcatggattcagctgcctatgtccatctggctacaccgggtccctgtgtgaaatcgcaaccacactttcatttgagggcgatggcttcctgtgggtcaaaagtggctcagtgacaaccaagggctcagtttgtaacatagccctcaggtttcagactgttcagccaatggctcttctacttttccgaagcaacagggatgtgtttgtgaagctggagctgctaagtggctacattcacttatcaattcaggtcaataatcagtcaaaggtgcttctgttcatttcccacaacaccagcgatggagagtggcatttcgtggaggtaatatttgcagaggctgtgacccttaccttaatcgacgactcctgtaaggagaaatgcatcgcgaaagctcctactccacttgaaagtgatcaatcaatatgtgcttttcagaactcctttttgggtggtttaccagtgggaatgaccagcaatggtgttgctctgcttaacttctataatatgccatccacaccttcgtttgtaggctgtctccaagacattaaaattgattggaatcacattaccctggagaacatctcgtctggctcatcattaaatgtcaaggcaggctgtgtgagaaaggattggtgtgaaagccaaccttgtcaaagcagaggacgctgcatcaacttgtggctgagttaccagtgtgactgccacaggccctatgaaggccccaactgtctgagaggaaaattttgcagacagagcagattaccctcaacagtctgtgggaatgagaagacaaatctcacttgctacaatggaggcaactgcacagagttccagactgaattaaaatgtatgtgccggccaggttttactggagaatggtgtgaaaaggacattgatgagtgtgcctctgatccgtgtgtcaatggaggtctgtgccaggacttactcaacaaattccagtgcctctgtgatgttgcctttgctggcgagcgctgcgaggtggacttggcagatgacttgatctccgacattttcaccactattggctcagtgactgtcgccttgttactgatcctcttgctggccattgttgcttctgttgtcacctccaacaaaagggcaactcagggaacctacagccccagccgtcaggagaaggagggctcccgagtggaaatgtggaacttgatgccaccccctgcaatggagagactgatttaggagcattgtgtcccttcgagatggggatccacacactgtgaatgtgatgactgtacttcaggtatctctgacatacctgacaatgttaatctgcaactgggattacactggaactacaggaatgattcctttgaccaccttaaaaactttcacagt

SEQ ID NO: 92290 - DNA, 1671 bp, Artificial Sequence
  derived and/or modified sequence
acactgcgtgaattctcctctgtgcactccattatgcttcatgggcagtgattcatgaactacagaaatggtctcagagagagccactgaagaggctggtgagaatctgctgtgcataagcaaaaactccaattgaagctgaaagtgtaaactgtgaattggaaattgacgaatgttggtcccagccttgtttaaatggtgcaacttgtcaggatgctctgggggcctatttctgcgactgtgcccctggattcctgggggatcactgtgaactcaacactgatgagtgtgccagtcaaccttgtctccatggagggctgtgtgtggatggagaaaacagatatagctgtaactgcacgggtagtggattcacagggacacactgtgagaccttgatgcctctttgttggtcaaaaccttgtcacaataatgctacatgtgaggacagtgttgacaattacacttgtcactgctggcctggatacacaggtgcccagtgtgagatcgacctcaatgaatgcaatagtaacccctgccagtccaatggggaatgtgtggagctgtcctcagagaaacaatatggacgcatcactggactgccttcttctttcagctaccatgaagcctcaggttatgtctgtatctgtcagcctggattcacaggaatccactgcgaagaagacgtcaatgaatgttcttcaaacccttgccaaaatggtggtacttgtgagaacttgcctgggaattatacttgccattgcccatttgataacctttctagaactttttatggaggaagggactgttctgatattctcctgggctgtacccatcagcaatgtctaaataatggaacatgcatccctcacttccaagatggccagcatggattcagctgcctatgtccatctggctacaccgggtccctgtgtgaaatcgcaaccacactttcatttgagggcgatggcttcctgtgggtcaaaagtggctcagtgacaaccaagggctcagtttgtaacatagccctcaggtttcagactgttcagccaatggctcttctacttttccgaagcaacagggatgtgtttgtgaagctggagctgctaagtggctacattcacttatcaattcaggtcaataatcagtcaaaggtgcttctgttcatttcccacaacaccagcgatggagagtggcatttcgtggaggctgtctccaagacattaaaattgattggaatcacattaccctggagaacatctcgtctggctcatcattaaatgtcaaggcaggctgtgtgagaaaggattggtgtgaaagccaaccttgtcaaagcagaggacgctgcatcaacttgtggctgagttaccagtgtgactgccacaggccctatgaaggccccaactgtctgagagagtatgtggcaggcagatttggccaggatgactccactggttatgtcatctttactcttgatgagagctatggagacaccatcagcctctccatgtttgtccgaacgcttcaaccatcaggcttacttctagctttggaaaacagcacttatcaatatatccgtgtctggctagagcgcggcagactagcaatgctgactccaaactctcccaaattagtagtaaaatttgttcttaatgatggaaatgtccacttgat

SEQ ID NO: 92291 - DNA, 2613 bp, Artificial Sequence
  derived and/or modified sequence
atggccctgaagaacatcaactacctgctgatcttctacctgagcttcagcctgctgatctacatcaagaacagcttctgcaacaagaacaacaccagatgcctgagcaacagctgccagaacaacagcacctgcaaggacttcagcaaggacaacgactgcagctgcagcgacaccgccaacaacctggacaaggactgcgacaacatgaaggacccctgcttcagcaacccctgccagggcagcgccacctgcgtgaacacccccggcgagagaagcttcctgtgcaagtgcccccccggctacagcggcaccatctgcgagaccaccatcggcagctgcggcaagaacagctgccagcacggcggcatctgccaccaggaccccatctaccccgtgtgcatctgccccgccggctacgccggcagattctgcgagatcgaccacgacgagtgcgccagcagcccctgccagaacggcgccgtgtgccaggacggcatcgacggctacagctgcttctgcgtgcccggctaccagggcagacactgcgacctggaggtggacgagtgcgccagcgacccctgcaagaacgaggccacctgcctgaacgagatcggcagatacacctgcatctgcccccacaactacagcggcgtgaactgcgagctggagatcgacgagtgctggagccagccctgcctgaacggcgccacctgccaggacgccctgggcgcctacttctgcgactgcgcccccggcttcctgggcgaccactgcgagctgaacaccgacgagtgcgccagccagccctgcctgcacggcggcctgtgcgtggacggcgagaacagatacagctgcaactgcaccggcagcggcttcaccggcacccactgcgagaccctgatgcccctgtgctggagcaagccctgccacaacaacgccacctgcgaggacagcgtggacaactacacctgccactgctggcccggctacaccggcgcccagtgcgagatcgacctgaacgagtgcaacagcaacccctgccagagcaacggcgagtgcgtggagctgagcagcgagaagcagtacggcagaatcaccggcctgcccagcagcttcagctaccacgaggccagcggctacgtgtgcatctgccagcccggcttcaccggcatccactgcgaggaggacgtgaacgagtgcagcagcaacccctgccagaacggcggcacctgcgagaacctgcccggcaactacacctgccactgccccttcgacaacctgagcagaaccttctacggcggcagagactgcagcgacatcctgctgggctgcacccaccagcagtgcctgaacaacggcacctgcatcccccacttccaggacggccagcacggcttcagctgcctgtgccccagcggctacaccggcagcctgtgcgagatcgccaccaccctgagcttcgagggcgacggcttcctgtgggtgaagagcggcagcgtgaccaccaagggcagcgtgtgcaacatcgccctgagattccagaccgtgcagcccatggccctgctgctgttcagaagcaacagagacgtgttcgtgaagctggagctgctgagcggctacatccacctgagcatccaggtgaacaaccagagcaaggtgctgctgttcatcagccacaacaccagcgacggcgagtggcacttcgtggaggtgatcttcgccgaggccgtgaccctgaccctgatcgacgacagctgcaaggagaagtgcatcgccaaggcccccacccccctggagagcgaccagagcatctgcgccttccagaacagcttcctgggcggcctgcccgtgggcatgaccagcaacggcgtggccctgctgaacttctacaacatgcccagcacccccagcttcgtgggctgcctgcaggacatcaagatcgactggaaccacatcaccctggagaacatcagcagcggcagcagcctgaacgtgaaggccggctgcgtgagaaaggactggtgcgagagccagccctgccagagcagaggcagatgcatcaacctgtggctgagctaccagtgcgactgccacagaccctacgagggccccaactgcctgagaggcaagttctgcagacagagcagactgcccagcaccgtgtgcggcaacgagaagaccaacctgacctgctacaacggcggcaactgcaccgagttccagaccgagctgaagtgcatgtgcagacccggcttcaccggcgagtggtgcgagaaggacatcgacgagtgcgccagcgacccctgcgtgaacggcggcctgtgccaggacctgctgaacaagttccagtgcctgtgcgacgtggccttcgccggcgagagatgcgaggtggacctggccgacgacctgatcagcgacatcttcaccaccatcggcagcgtgaccgtggccctgctgctgatcctgctgctggccatcgtggccagcgtggtgaccagcaacaagagagccacccagggcacctacagccccagcagacaggagaaggagggcagcagagtggagatgtggaacctgatgcccccccccgccatggagagactgatctag

SEQ ID NO: 92292 - DNA, 882 bp, Artificial Sequence
  derived and/or modified sequence
atgcccctgtgctggagcaagccctgccacaacaacgccacctgcgaggacagcgtggacaactacacctgccactgctggcccggctacaccggcgcccagtgcgagatcgacctgaacgagtgcaacagcaacccctgccagagcaacggcgagtgcgtggagctgagcagcgagaagcagtacggcagaatcaccggcctgcccagcagcttcagctaccacgaggccagcggctacgtgtgcatctgccagcccggcttcaccggcatccactgcgaggaggacgtgaacgagtgcagcagcaacccctgccagaacggcggcacctgcgagaacctgcccggcaactacacctgccactgccccttcgacaacctgagcagaaccttctacggcggcagagactgcagcgacatcctgctgggctgcacccaccagcagtgcctgaacaacggcacctgcatcccccacttccaggacggccagcacggcttcagctgcctgtgccccagcggctacaccggcagcctgtgcgagatcgccaccaccctgagcttcgagggcgacggcttcctgtgggtgaagagcggcagcgtgaccaccaagggcagcgtgtgcaacatcgccctgagattccagaccgtgcagcccatggccctgctgctgttcagaagcaacagagacgtgttcgtgaagctggagctgctgagcggctacatccacctgagcatccaggtgaacaaccagagcaaggtgctgctgttcatcagccacaacaccagcgacggcgagtggcacttcgtggaggccgtgagcaagaccctgaagctgatcggcatcaccctgccctggagaaccagcagactggcccaccactag

SEQ ID NO: 92293 - protein, 1044 aa, Artificial Sequence
  derived and/or modified sequence
MMAQKSQGSDNLQEGQEKSKREILKCTKSAWAPLDEWLPPDPEEESQSLTIPMLEDSKQESIQQWLDSGFFVSANENFQQVIDRTVSLYEQGMVQMTVKDYMRSLHQFSETPILSRGTSFNSCYSTASVPQSIPEWLEFWEIDPVEILLDLGFGADEPDICMQIPARFLGCGSAARGINIRVFLEAQKQRMDIENPNLYGRFRQLEILDHVTNAFSSLLSDVSILPNRAEEKAGGESVQRTSVSAAKEHRRRMGKLLRRASKQNIRRDCNPEVSESFKVKDEVFVPFTKPWDCGAELAATSINHKQNHLSLSVEHQSLQACDDLLPYPPHGLLSKQWPCSSMPAKQAPPSCVSEGSVKGRTQKENLFQTNKLKSLSHLAGKGPDSFEMEEVQSFEEETGNPLDMTSGTVGARVDRANSCQSDSSGFLEEPLEPLPLQMPSLPNSQSPAENGGRKPRDQSHSLVSSQDCQLESDGPDSKSRASMSFSSQEANALEQRASVSVMEEEFLLEAMEGPPELYIPDMACAKTTTRGECPRKDSHLWQLLPMPHAEYEVTRPTATSKYDHPLGFMVTHVTEMQDSFVRPEGAGKVQSHHNESQRSPGNDHTQDKFLHVDSEAPREEESSGFCPHTNHSLLVPESSSQCIPKHSEITPYATDLAQTSEKLIPHLHKLPGDPAQVKSRSGTLGQILPGTEAEMENLPLNTGSSRSVMTQMSSSLVSAAQRAVALGTGPRGTSLECTVCDPVTATETRLGTKARQLNDASIQTSALSNKTLTHGPQPLTKSVSLDSGFSSICPMGTCHAIPAHCCICCHHHPHCHGERQSPGPEPSVCRHCLCSLTGHQEAQFMTTLKALQDTTVRELCSCTVHEMEAMKTICQSFREYLEEIEQHLMGQQALFSRDMSEEEREEAEQLQTLREALRQQVAELEFQLGDRAQQIREGILLQLEVLTAEPPEHYSNLHQYNWIEESNGQTSCSKIHPGMAPRTVFPPDDGQEAPCSGGTQLAAFTPPTLENSTRMSPSSSAWAKLGPTPLSNCPVGEKDADVFL

SEQ ID NO: 92294 - protein, 1054 aa, Artificial Sequence
  derived and/or modified sequence
MSFSLQNYSPMMAQKSQGSDNLQEGQEKSKREILKCTKSAWAPLDEWLPPDPEEESQSLTIPMLEDSKQESIQQWLDSGFFVSANENFQQVIDRTVSLYEQGMVQMTVKDYMRSLHQFSETPILSRGTSFNSCYSTASVPQSIPEWLEFWEIDPVEILLDLGFGADEPDICMQIPARFLGCGSAARGINIRVFLEAQKQRMDIENPNLYGRFRQLEILDHVTNAFSSLLSDVSILPNRAEEKAGGESVQRTSVSAAKEHRRRMGKLLRRASKQNIRRDCNPEVSESFKVKDEVFVPFTKPWDCGAELAATSINHKQNHLSLSVEHQSLQACDDLLPYPPHGLLSKQWPCSSMPAKQAPPSCVSEGSVKGRTQKENLFQTNKLKSLSHLAGKGPDSFEMEEVQSFEEETGNPLDMTSGTVGARVDRANSCQSDSSGFLEEPLEPLPLQMPSLPNSQSPAENGGRKPRDQSHSLVSSQDCQLESDGPDSKSRASMSFSSQEANALEQRASVSVMEEEFLLEAMEGPPELYIPDMACAKTTTRGECPRKDSHLWQLLPMPHAEYEVTRPTATSKYDHPLGFMVTHVTEMQDSFVRPEGAGKVQSHHNESQRSPGNDHTQDKFLHVDSEAPREEESSGFCPHTNHSLLVPESSSQCIPKHSEITPYATDLAQTSEKLIPHLHKLPGDPAQVKSRSGTLGQILPGTEAEMENLPLNTGSSRSVMTQMSSSLVSAAQRAVALGTGPRGTSLECTVCDPVTATETRLGTKARQLNDASIQTSALSNKTLTHGPQPLTKSVSLDSGFSSICPMGTCHAIPAHCCICCHHHPHCHGERQSPGPEPSVCRHCLCSLTGHQEAQFMTTLKALQDTTVRELCSCTVHEMEAMKTICQSFREYLEEIEQHLMGQQALFSRDMSEEEREEAEQLQTLREALRQQVAELEFQLGDRAQQIREGILLQLEVLTAEPPEHYSNLHQYNWIEESNGQTSCSKIHPGMAPRTVFPPDDGQEAPCSGGTQLAAFTPPTLENSTRMSPSSSAWAKLGPTPLSNCPVGEKDADVFL

SEQ ID NO: 92295 - DNA, 3165 bp, Artificial Sequence
  derived and/or modified sequence
atgagcttcagcctgcagaactacagccccatgatggcccagaagagccagggcagcgacaacctgcaggagggccaggagaagagcaagagagagatcctgaagtgcaccaagagcgcctgggcccccctggacgagtggctgccccccgaccccgaggaggagagccagagcctgaccatccccatgctggaggacagcaagcaggagagcatccagcagtggctggacagcggcttcttcgtgagcgccaacgagaacttccagcaggtgatcgacagaaccgtgagcctgtacgagcagggcatggtgcagatgaccgtgaaggactacatgagaagcctgcaccagttcagcgagacccccatcctgagcagaggcaccagcttcaacagctgctacagcaccgccagcgtgccccagagcatccccgagtggctggagttctgggagatcgaccccgtggagatcctgctggacctgggcttcggcgccgacgagcccgacatctgcatgcagatccccgccagattcctgggctgcggcagcgccgccagaggcatcaacatcagagtgttcctggaggcccagaagcagagaatggacatcgagaaccccaacctgtacggcagattcagacagctggagatcctggaccacgtgaccaacgccttcagcagcctgctgagcgacgtgagcatcctgcccaacagagccgaggagaaggccggcggcgagagcgtgcagagaaccagcgtgagcgccgccaaggagcacagaagaagaatgggcaagctgctgagaagagccagcaagcagaacatcagaagagactgcaaccccgaggtgagcgagagcttcaaggtgaaggacgaggtgttcgtgcccttcaccaagccctgggactgcggcgccgagctggccgccaccagcatcaaccacaagcagaaccacctgagcctgagcgtggagcaccagagcctgcaggcctgcgacgacctgctgccctaccccccccacggcctgctgagcaagcagtggccctgcagcagcatgcccgccaagcaggccccccccagctgcgtgagcgagggcagcgtgaagggcagaacccagaaggagaacctgttccagaccaacaagctgaagagcctgagccacctggccggcaagggccccgacagcttcgagatggaggaggtgcagagcttcgaggaggagaccggcaaccccctggacatgaccagcggcaccgtgggcgccagagtggacagagccaacagctgccagagcgacagcagcggcttcctggaggagcccctggagcccctgcccctgcagatgcccagcctgcccaacagccagagccccgccgagaacggcggcagaaagcccagagaccagagccacagcctggtgagcagccaggactgccagctggagagcgacggccccgacagcaagagcagagccagcatgagcttcagcagccaggaggccaacgccctggagcagagagccagcgtgagcgtgatggaggaggagttcctgctggaggccatggagggcccccccgagctgtacatccccgacatggcctgcgccaagaccaccaccagaggcgagtgccccagaaaggacagccacctgtggcagctgctgcccatgccccacgccgagtacgaggtgaccagacccaccgccaccagcaagtacgaccaccccctgggcttcatggtgacccacgtgaccgagatgcaggacagcttcgtgagacccgagggcgccggcaaggtgcagagccaccacaacgagagccagagaagccccggcaacgaccacacccaggacaagttcctgcacgtggacagcgaggcccccagagaggaggagagcagcggcttctgcccccacaccaaccacagcctgctggtgcccgagagcagcagccagtgcatccccaagcacagcgagatcaccccctacgccaccgacctggcccagaccagcgagaagctgatcccccacctgcacaagctgcccggcgaccccgcccaggtgaagagcagaagcggcaccctgggccagatcctgcccggcaccgaggccgagatggagaacctgcccctgaacaccggcagcagcagaagcgtgatgacccagatgagcagcagcctggtgagcgccgcccagagagccgtggccctgggcaccggccccagaggcaccagcctggagtgcaccgtgtgcgaccccgtgaccgccaccgagaccagactgggcaccaaggccagacagctgaacgacgccagcatccagaccagcgccctgagcaacaagaccctgacccacggcccccagcccctgaccaagagcgtgagcctggacagcggcttcagcagcatctgccccatgggcacctgccacgccatccccgcccactgctgcatctgctgccaccaccacccccactgccacggcgagagacagagccccggccccgagcccagcgtgtgcagacactgcctgtgcagcctgaccggccaccaggaggcccagttcatgaccaccctgaaggccctgcaggacaccaccgtgagagagctgtgcagctgcaccgtgcacgagatggaggccatgaagaccatctgccagagcttcagagagtacctggaggagatcgagcagcacctgatgggccagcaggccctgttcagcagagacatgagcgaggaggagagagaggaggccgagcagctgcagaccctgagagaggccctgagacagcaggtggccgagctggagttccagctgggcgacagagcccagcagatcagagagggcatcctgctgcagctggaggtgctgaccgccgagccccccgagcactacagcaacctgcaccagtacaactggatcgaggagagcaacggccagaccagctgcagcaagatccaccccggcatggcccccagaaccgtgttcccccccgacgacggccaggaggccccctgcagcggcggcacccagctggccgccttcaccccccccaccctggagaacagcaccagaatgagccccagcagcagcgcctgggccaagctgggccccacccccctgagcaactgccccgtgggcgagaaggacgccgacgtgttcctgtag

SEQ ID NO: 92296 - DNA, 3269 bp, Artificial Sequence
  derived and/or modified sequence
tgacttccaggaccgtaagtttgcagaattactctcctatgatggcacagaaatcacaaggatctgacaaccttcaggaaggccaggaaaagagcaagagagagatcctgaagtgcaccaaaagcgcgtgggctccgctggatgagtggctgccccctgaccctgaggaggaaagccagagtctcaccatccccatgctggaagattccaagcaagaaagtattcagcagtggctggactctggattctttgtctctgcaaatgaaaactttcaacaagtcattgaccgcactgtttctttgtatgaacaagggatggttcaaatgactgtgaaagactacatgagatctttgcatcagttttcagaaactcccatcctatccagagggaccagtttcaactcttgctattctactgcaagtgtaccacaaagcattcctgaatggctggaattttgggagatagatccagtggagattctcttggatctggggtttggtgctgatgagccagacatctgcatgcaaatcccagccagattccttggttgtggctcagcagccagaggaatcaacatccgtgtttttcttgaagctcaaaagcagcgaatggacattgagaaccccaacttgtacggtcgtttccgacagctggaaatcctggaccatgtgaccaatgccttctcatctctgctgagtgatgtcagcatcctgccaaacagagctgaagagaaagctggaggagagagtgtgcaaagaacctcagtgagtgccgccaaagagcatcgaagaagaatgggtaaactcttaaggagagcttccaaacagaacatcaggcgggattgtaacccagaggtatcagagtccttcaaggtgaaggatgaagtttttgttccctttacaaaaccatgggattgtggagcagagctagcagcaacctcaatcaaccacaagcaaaatcatttgtctctgtcagtagaacatcagtctctccaagcctgtgatgatttgctaccttatcctcctcatggtcttctgagcaagcagtggccttgctcatctatgccggccaagcaggctcctccttcctgtgtgtctgaggggtcagtcaagggcagaactcagaaggagaacttatttcagactaacaagctcaagagcttgtctcatcttgcaggcaaaggaccagactcatttgaaatggaagaggtccaaagctttgaagaagagactggtaatcctcttgacatgacttcaggaactgtaggtgccagggtggacagagcaaatagctgccagtctgacagcagcgggttcctggaggagccgctggaaccgctgcccctccagatgccttccttgccaaacagccagagtcctgctgagaatggaggtagaaagccaagagatcagagccacagcttagtatcatcccaggactgtcagctagagtcggatgggccagattccaaaagtagggcgagcatgtctttttcaagccaagaagcgaatgccttggaacaaagggcctcagtatctgtgatggaggaagagtttctgcttgaggccatggaggggccaccagagctgtatatcccagacatggcctgtgccaagaccaccacgaggggagaatgcccaaggaaagacagccatctgtggcagcttctgccaatgccccatgctgagtatgaggtcaccagacccacagccacttccaaatatgatcatcctctggggtttatggtaacccacgtcacagaaatgcaggacagttttgtgaggcctgagggagctggcaaagtgcaaagccaccacaatgagtctcaaaggtcacctggaaatgatcatactcaagacaagttccttcatgttgactctgaggccccacgagaagaggaaagcagtggattctgtcctcacaccaaccacagcttactcgtaccagaaagctcatcacagtgtatccccaagcacagtgaaatcacaccttatgcaactgaccttgctcaaacatctgaaaagctcattccccacctccataaactgcctggagatcctgcccaggtgaagtcaaggtctggtactttgggtcagatactacctgggacagaagctgagatggaaaaccttcctctaaatactggcagctccaggtctgtaatgacccagatgtcctccagcctggtgtcggctgctcagagggctgtggccttggggactggtcccagaggaacatctttagaatgcactgtgtgtgatcctgttaccgcaacagaaacaagactggggacaaaagcaagacagttaaatgatgcttccattcagacttcagctctaagcaacaagaccttgacacatgggccccagcccctcaccaaatccgtctctctagactcaggcttctctagtatctgcccaatgggcacctgccatgctatacctgcccactgctgcatctgctgtcatcaccaccctcactgccacggggagaggcaaagccctggccctgaaccctcagtctgtaggcactgcctgtgttcactaactggtcaccaggaagcccagttcatgacgactttgaaagcccttcaggacactacagtgagggagctatgttcctgcacagtccatgagatggaagccatgaagacgatatgccaaagtttccgggagtatttagaagaaattgaacagcaccttatgggacagcaggccctcttttccagggacatgtcagaggaggaaagggaggaggccgagcaactgcaaacgttacgtgaggccctgaggcagcaggtggcagagttggaatttcagttaggagaccgggctcagcaaatcagagaagggattttactgcagctggaggttctcacagcagagccacctgaacactattcaaatctgcatcaatataactggatagaagaaagcaatgggcagacttcatgttctaaaatccacccaggcatggccccgaggactgtgtttcctcccgatgatggccaggaggctccctgttcaggtgggacccagttggctgccttcactccacccaccttggagaacagcaccaggatgtctccttcatcatcagcttgggcaaagttaggtccaacccctttgtcaaattgtcctgttggagaaaaggatgcagatgtcttcctctagatcagagcaggtttgttaaccttcatacaaaatataaaggcccagaacagatgtagcaaggaaatttcaattttccccaaggagaagggtctgcca

SEQ ID NO: 92297 - DNA, 566 bp, Artificial Sequence
  derived and/or modified sequence
agatggctcaggagtggagcttttgtggcaggtgggtagaggctgctggagggggctttcatgatcatctgctttgagggataaacattgcttgtcccctcctccaactaaggaagttagtttgcagaattactctcctatgatggcacagaaatcacaaggatctgacaaccttcaggaaggccaggaaaagagcaagagagagatcctgaagtgcaccaaaagcgcgtgggctccgctggatgagtggctgccccctgaccctgaggaggaaagccagagtctcaccatccccatgctggaagattccaagcaagaaagtattcagcagtggctggactctggattctttgtctctgcaaatgaaaactttcaacaagtcattgaccgcactgtttctttgtatgaacaagggatggttcaaatgactgtgaaagactacatgagatctttgcatcagttttcagaaactcccatcctatccagagggaccagtttcaactcttgctattctactgcaagtgtaccacaaagcattcctgaatggctggaattttgggagatag

SEQ ID NO: 92298 - DNA, 558 bp, Artificial Sequence
  derived and/or modified sequence
agatggctcaggagtggagcttttgtggcagttagtttgcagaattactctcctatgatggcacagaaatcacaaggatctgacaaccttcaggaaggccaggaaaagagcaagagagagatcctgaagtgcaccaaaagcgcgtgggctccgctggatgagtggctgccccctgaccctgaggaggaaagccagagtctcaccatccccatgctggaagattccaagcaagaaagtattcagcagtggctggactctggattctttgtctctgcaaatgaaaactttcaacaagtcattgaccgcactgtttctttgtatgaacaagggatggttcaaatgactgtgaaagactacatgagatctttgcatcagttttcagaaactcccatcctatccagagggaccagtttcaactcttgctattctactgcaagtgtaccacaaagcattcctgaatggctggaattttgggagatagatccagtggagattctcttggatctggggtttggtgctgatgagccagacatctgcatgcaaatcccagccagattc

SEQ ID NO: 92299 - DNA, 4025 bp, Artificial Sequence
  derived and/or modified sequence
atgtcatttagtttgcagaattactctcctatgatggcacagaaatcacaaggatctgacaaccttcaggaaggccaggaaaagagcaagagagagatcctgaagtgcaccaaaagcgcgtgggctccgctggatgagtggctgccccctgaccctgaggaggaaagccagagtctcaccatccccatgctggaagattccaagcaagaaagtattcagcagtggctggactctggattctttgtctctgcaaatgaaaactttcaacaagtcattgaccgcactgtttctttgtatgaacaagggatggttcaaatgactgtgaaagactacatgagatctttgcatcagttttcagaaactcccatcctatccagagggaccagtttcaactcttgctattctactgcaagtgtaccacaaagcattcctgaatggctggaattttgggagatagatccagtggagattctcttggatctggggtttggtgctgatgagccagacatctgcatgcaaatcccagccagattccttggttgtggctcagcagccagaggaatcaacatccgtgtttttcttgaagctcaaaagcagcgaatggacattgagaaccccaacttgtacggtcgtttccgacagctggaaatcctggaccatgtgaccaatgccttctcatctctgctgagtgatgtcagcatcctgccaaacagagctgaagagaaagctggaggagagagtgtgcaaagaacctcagtgagtgccgccaaagagcatcgaagaagaatgggtaaactcttaaggagagcttccaaacagaacatcaggcgggattgtaacccagaggtatcagagtccttcaaggtgaaggatgaagtttttgttccctttacaaaaccatgggattgtggagcagagctagcagcaacctcaatcaaccacaagcaaaatcatttgtctctgtcagtagaacatcagtctctccaagcctgtgatgatttgctaccttatcctcctcatggtcttctgagcaagcagtggccttgctcatctatgccggccaagcaggctcctccttcctgtgtgtctgaggggtcagtcaagggcagaactcagaaggagaacttatttcagactaacaagctcaagagcttgtctcatcttgcaggcaaaggaccagactcatttgaaatggaagaggtccaaagctttgaagaagagactggtaatcctcttgacatgacttcaggaactgtaggtgccagggtggacagagcaaatagctgccagtctgacagcagcgggttcctggaggagccgctggaaccgctgcccctccagatgccttccttgccaaacagccagagtcctgctgagaatggaggtagaaagccaagagatcagagccacagcttagtatcatcccaggactgtcagctagagtcggatgggccagattccaaaagtagggcgagcatgtctttttcaagccaagaagcgaatgccttggaacaaagggcctcagtatctgtgatggaggaagagtttctgcttgaggccatggaggggccaccagagctgtatatcccagacatggcctgtgccaagaccaccacgaggggagaatgcccaaggaaagacagccatctgtggcagcttctgccaatgccccatgctgagtatgaggtcaccagacccacagccacttccaaatatgatcatcctctggggtttatggtaacccacgtcacagaaatgcaggacagttttgtgaggcctgagggagctggcaaagtgcaaagccaccacaatgagtctcaaaggtcacctggaaatgatcatactcaagacaagttccttcatgttgactctgaggccccacgagaagaggaaagcagtggattctgtcctcacaccaaccacagcttactcgtaccagaaagctcatcacagtgtatccccaagcacagtgaaatcacaccttatgcaactgaccttgctcaaacatctgaaaagctcattccccacctccataaactgcctggagatcctgcccaggtgaagtcaaggtctggtactttgggtcagatactacctgggacagaagctgagatggaaaaccttcctctaaatactggcagctccaggtctgtaatgacccagatgtcctccagcctggtgtcggctgctcagagggctgtggccttggggactggtcccagaggaacatctttagaatgcactgtgtgtgatcctgttaccgcaacagaaacaagactggggacaaaagcaagacagttaaatgatgcttccattcagacttcagctctaagcaacaagaccttgacacatgggccccagcccctcaccaaatccgtctctctagactcaggcttctctagtatctgcccaatgggcacctgccatgctatacctgcccactgctgcatctgctgtcatcaccaccctcactgccacggggagaggcaaagccctggccctgaaccctcagtctgtaggcactgcctgtgttcactaactggtcaccaggaagcccagttcatgacgactttgaaagcccttcaggacactacagtgagggagctatgttcctgcacagtccatgagatggaagccatgaagacgatatgccaaagtttccgggagtatttagaagaaattgaacagcaccttatgggacagcaggccctcttttccagggacatgtcagaggaggaaagggaggaggccgagcaactgcaaacgttacgtgaggccctgaggcagcaggtggcagagttggaatttcagttaggagaccgggctcagcaaatcagagaagggattttactgcagctggaggttctcacagcagagccacctgaacactattcaaatctgcatcaatataactggatagaagaaagcaatgggcagacttcatgttctaaaatccacccaggcatggccccgaggactgtgtttcctcccgatgatggccaggaggctccctgttcaggtgggacccagttggctgccttcactccacccaccttggagaacagcaccaggatgtctccttcatcatcagcttgggcaaagttaggtccaacccctttgtcaaattgtcctgttggagaaaaggatgcagatgtcttcctctagatcagagcaggtttgttaaccttcatacaaaatataaaggcccagaacagatgtagcaaggaaatttcaattttccccaaggagaagggtctgccaacccattgtcagctatatctctcatattctaccctttggttaaacccaagaggagtttagaatactctaatactcattcagtatagaataactgagcacctagtatgtgcctggcacagagtatgcaacagtgactaaatagtatacggtctctgccctgctagaacttacagtgtagtgggggagatagaattgcaaacaaaaagtatctgagacagacctcagtcaatatagaagtttattttgccaaggttaaggatacacacccagaagacaggtctgtgcctttctccaaagatgattttgaggccttcaacatttagtggggaaagggtgctaatggggaaagaggtgtgggtacataggaggcaaacagttgcatttttttgagtctgatcagcttttctcatgagagaaggggtagaggaactgtcacttatgcattcacctagctcagtggatctgcacttttacagaaggtaaaataaacatagggcagaggaagcaatcagatatgcatttgtctcgggggagcagagggatggctttgagttctgttctttgtcctgtacctattaagagaagctatcaatatactttgtcaggataaaattcaacagaactgttttagactaaagattttagggaccacaaggaatttcccagtgggcaaattgtgagggaggtatttagcttttaaaaaaatctttgtagctatctcatttagaaataaaatgggaggcagattgcctgatgcagctcct

SEQ ID NO: 92300 - DNA, 3165 bp, Artificial Sequence
  derived and/or modified sequence
atgtccttctcactacagaattattcccctatgatggcacagaaatctcaaggcagtgacaatttacaggagggccaggaaaaatccaaacgcgaaatactgaaatgcaccaagtcagcctgggctcccttggacgaatggctccccccggatcctgaagaggaaagccaaagtttgacaattcccatgctggaggactccaaacaggagtcaatccagcaatggttagattccggtttcttcgtttccgctaacgaaaattttcaacaagtcattgatcgaacggtttcattatacgaacagggtatggtgcagatgacagtgaaggactacatgaggtctctgcaccagttcagtgagactccaatcctgtcaagggggactagttttaacagttgctactcaaccgcgtctgttcctcagagtatacccgagtggctcgagttctgggaaatcgatccagtggagatcttactggatctgggttttggagcagacgagccggatatctgtatgcaaatcccagcccgattcttggggtgtggatccgcggcacgggggatcaacatccgcgtgtttctggaggcgcaaaagcagcggatggacatagagaacccaaacctgtatggccgctttcgtcagctggaaattctggaccacgtgacaaatgccttctctagtttgctgtcggatgtgagcatcctgcctaaccgcgcagaggagaaagctgggggtgagtctgtacaaaggacttcagtgtccgcggcgaaggagcatcgccgcaggatggggaagctgttgcgccgggcctctaagcagaacatcagacgcgactgcaacccagaagtgtctgaatcctttaaagtgaaggacgaggtgtttgttccattcaccaaaccctgggattgcggtgctgagctggctgccacaagcattaatcataagcagaaccatctgtcactctcggtggagcatcagtctttgcaggcctgcgatgatctcctgccataccctccccatggcctccttagtaagcagtggccttgcagctcaatgcccgcaaaacaagccccacccagttgcgtgagtgagggcagcgtaaagggacgaacccagaaagagaatctgttccaaacaaataaactgaagtcactgtctcaccttgcggggaaaggccctgattcttttgagatggaagaggtgcagagtttcgaagaagaaacagggaatcctctggatatgacctctggtaccgtcggagccagggtggatcgggccaactcatgccagagtgacagcagtggtttcctcgaagaacctcttgagccactccccctgcagatgcccagtctgccaaatagtcaatcacccgctgaaaacggaggtagaaagccacgcgaccagagtcatagccttgtctcttcccaagactgtcagttggaatcagacgggcctgactccaaatcgcgagcctctatgtccttctcatctcaggaggcaaatgcactcgaacagagggcttctgtgtcggtaatggaggaggaattcctgctcgaagcgatggagggacctcccgagctgtacattcccgatatggcctgtgcaaagacaacgactaggggggaatgcccccgcaaagatagccacctgtggcagctcctgccaatgccacacgccgaatatgaggtcacaaggcccacagcgacctccaagtacgaccaccccctggggtttatggtgactcacgttaccgagatgcaagactcttttgtgcggcctgaaggcgcaggcaaagtgcagagccaccacaatgagagccagagaagtcccggtaatgatcacacacaggataagttcctgcatgtcgattcagaggcaccaagagaagaggagtcctctggcttttgtccccatactaatcatagcctgttagtgcccgaatcttccagccagtgcatcccaaagcactccgagataacaccctacgcaaccgatctcgcgcagacatccgaaaaactgattcctcatctgcacaagttgcctggagatcccgcccaggtcaagagccgcagtggcacccttggccaaatcctcccaggtacagaagcagagatggagaatttacctttgaacacggggtcatcaaggtctgtgatgactcagatgtcctcgtctcttgtaagtgcagcccagcgcgcagtggccctcggcactggccctcgcggaaccagtctggaatgcaccgtgtgcgatcccgtgacggctaccgagacgcgcttgggcacaaaagcgcggcagctgaatgatgcctctatacagacttctgcactgagtaataaaacacttacccatgggcctcagccactcaccaagagcgtctcactagactccggctttagcagtatttgcccaatgggcacctgccatgccattccagcccactgttgtatatgttgccaccaccatccgcattgtcacggtgaaagacagagcccgggcccggagccatctgtctgtaggcactgtctgtgctccctaacaggccatcaggaggctcagttcatgacaacgctaaaggcgctacaggatacgaccgtccgagagctgtgttcttgcacagttcatgaaatggaggctatgaaaaccatttgccagtcgtttagggagtacctggaggaaattgaacagcatctcatggggcagcaagccctgttctcccgcgatatgagcgaagaggaacgggaggaagccgaacagctgcagacactcagggaggcgctgcggcaacaggtggcggagctggaatttcaactgggtgatagagcacaacagatcagggagggaatcctgctccaacttgaggtgctgaccgcagagcccccagaacactattccaacttgcatcaatacaattggatagaagagtcaaatgggcaaacttcctgtagtaagatacatcctgggatggcacctcggacagtgttccctcccgatgatgggcaggaagccccatgcagcggcgggactcaactggcagcattcacaccgcctacactggaaaattccactcgcatgtccccctcaagctctgcatgggccaagctcggaccaactcctctatccaattgcccagtgggtgaaaaagatgccgacgtcttcctatag

SEQ ID NO: 92301 - DNA, 3165 bp, Artificial Sequence
  derived and/or modified sequence
atgtccttcagcctgcagaactacagccccatgatggcccagaagagccagggcagtgacaacctgcaggagggccaggagaagagcaagcgggagatcctgaagtgcaccaagagcgcctgggcccccctggatgagtggctgcccccagaccctgaggaggagagccagagcctgaccatccccatgctggaggacagcaagcaggagagcatccagcagtggctggacagcggcttctttgtgtctgccaatgaaaacttccagcaggtgattgacagaacagtgtccctgtatgagcagggcatggtgcagatgacagtgaaggactacatgaggagcctgcaccagttcagcgagacccccatcctgagccggggcaccagcttcaacagctgctacagcacagcctctgtgccccagagcatccctgagtggctggagttctgggagattgatcctgtggagatcctgctggacctgggctttggagcagatgagccagacatctgcatgcagatcccagcccgcttcctgggctgcggcagcgctgcccggggcatcaacatccgggtcttcctggaggcccagaagcagaggatggacatcgagaaccccaacctgtatggccgcttccggcagctggagatcctggaccacgtgaccaatgccttcagcagcctgctgagtgatgtgtccatcctgcccaacagagctgaggagaaggccggcggggagagcgtgcagaggacctctgtgtctgctgccaaggagcacagaagaaggatgggcaagctgctgcggcgggccagcaagcagaacatccggcgggactgcaaccctgaggtgtctgagagcttcaaggtgaaggatgaggtgtttgtgcccttcaccaagccctgggactgtggggctgagctggccgccaccagcatcaaccacaagcagaaccacctgagcctgtctgtggagcaccagagcctgcaggcctgtgatgacctgctgccctacccaccccacggcctgctgagcaagcagtggccctgcagctccatgcctgccaagcaggccccacccagctgtgtgtctgagggctctgtgaagggccgcacccagaaggagaacctcttccagaccaacaagctgaagagcctgagccacctggccgggaaaggaccagacagctttgagatggaggaggtgcagagctttgaggaggagaccggcaaccccctggacatgaccagcggcaccgtgggcgcccgggtggaccgggccaacagctgccagagcgacagcagcggcttcctggaggagcccctggagcccctgcccctgcagatgcccagcctgcccaacagccagagccctgcagaaaatggaggcaggaagccccgggaccagagccacagcctggtgagcagccaggactgccagctggagagtgatggccctgacagcaagagccgggcctccatgtccttcagcagccaggaggccaatgccctggagcagagggcctctgtgtctgtgatggaggaggagttcctgctggaggccatggagggccccccagagctgtacatcccagacatggcctgtgccaagaccaccaccagaggagagtgccccaggaaggacagccacctgtggcagctgctgcccatgcctcatgctgaatatgaggtgacccggcccacagccaccagcaaatatgaccaccccctgggcttcatggtgacccacgtgacagagatgcaggacagctttgtgcggcctgagggcgctgggaaggtgcagagccaccacaatgaaagccagaggagccctggaaatgaccacacccaggacaagttcctgcacgtggacagcgaggccccccgggaggaggagagcagcggcttctgcccccacaccaaccacagcctgctggtgcctgagagcagcagccagtgcatccccaagcacagcgagatcaccccctatgccacagacctggcccagaccagcgagaagctgatcccccacctgcacaagctgcccggggaccctgcccaggtgaagagccgcagcggcaccctgggccagatcctgcctggaacagaagctgagatggagaacctgcccctgaacacaggcagcagccgctctgtgatgacccagatgagcagcagcctggtgtctgctgcccagagagctgtggccctgggcaccggcccccggggcaccagcctggagtgcaccgtgtgtgaccctgtgacagccacagagacccggctgggcaccaaggcccggcagctgaatgatgccagcatccagaccagcgccctgagcaacaagaccctgacccacggcccccagcccctgaccaagtctgtgtccctggacagcggcttcagcagcatctgccccatgggcacctgccacgccatcccagcccactgctgcatctgctgccaccaccacccccactgccacggggagcggcagagccctggccctgagcccagcgtgtgccgccactgcctgtgcagcctgaccggccaccaggaggcccagttcatgaccaccctgaaggccctgcaggacaccaccgtgcgggagctgtgcagctgcaccgtgcatgagatggaggccatgaagaccatctgccagagcttccgggagtacctggaggagattgagcagcacctgatgggccagcaggccctcttcagccgggacatgtctgaggaggagcgggaggaggccgagcagctgcagaccctgcgggaggccctgcggcagcaggtggccgagctggagttccagctgggggaccgggcccagcagatccgggagggcatcctgctgcagctggaggtgctgacagctgagcccccagagcactacagcaacctgcaccagtacaactggattgaggagagcaatggccagaccagctgcagcaagatccaccctggcatggcccccaggacagtgttccccccagatgatggccaggaggccccctgcagcggcggcacccagctggccgccttcaccccacccaccctggagaacagcaccaggatgagccccagcagcagcgcctgggccaagctgggccccacccccctgagcaactgccctgtgggggagaaggatgctgatgtgttcctgtag

SEQ ID NO: 92302 - DNA, 3165 bp, Artificial Sequence
  derived and/or modified sequence
atgagcttcagcctgcagaactacagccccatgatggcccagaagtcccaaggtagtgataatctgcaggagggccaggaaaaatcaaaacgggaaattctgaagtgcactaaatcagcctgggccccactggatgaatggttgcctcccgatcccgaggaggaaagccagagtctgacaatccccatgttggaggattctaaacaagagtcaatccaacaatggctggacagtggcttcttcgtgtccgccaatgagaacttccaacaagtgatcgatcgcacagtgtcattgtacgaacaaggaatggtccagatgaccgtcaaagattacatgcgctccctccaccagttttcggagactcccattctgtcaagaggaaccagcttcaattcctgttattcaacagcatcagtaccccagagtatccctgaatggttggagttttgggagatagacccagtcgagatactcttagatctgggttttggggctgatgagccagatatctgtatgcagattccagctcggtttctcgggtgtggctctgctgcccggggaattaatatcagggtgttcctggaggcacagaaacagaggatggatatcgaaaaccctaacttgtatggccgctttcggcagctggaaatactcgatcatgtcacgaatgcattcagctctctgcttagcgatgttagcatcttacccaaccgagccgaagaaaaagctggcggggagtctgtccagcgcaccagtgttagtgcagcaaaagaacacaggcgaaggatgggaaaacttctgcgaagggcaagtaagcagaacattcggagagactgcaaccccgaggtgtcggagagcttcaaggtcaaagatgaagtctttgttccattcaccaaaccatgggactgtggcgccgagctcgccgccacctctattaaccataaacagaaccacctctccctgagcgttgagcaccagagcttgcaggcgtgtgacgatttgctcccatatccaccccacggcttgttaagcaagcaatggccttgttcttccatgccagctaaacaggctcccccatcttgcgtctctgaggggtccgtgaagggcagaacacagaaagagaatttgttccaaacaaacaagctcaagtctctgtctcacctcgccgggaaaggacccgattcttttgagatggaggaagtacaatcatttgaggaagagacaggaaaccccttggatatgacgagcgggaccgttggggctagagtggatcgagccaactcttgtcagtcagatagctcaggcttcctagaggagcccctggagcctctgccacttcagatgccatctctgcccaatagtcaaagcccagccgaaaatggggggcgaaaaccgcgagatcaatctcattccctcgtctcctctcaggattgtcagctcgagtcagatggtcccgactccaagtcgagagccagcatgagcttttccagtcaggaagcgaacgcgctcgagcaacgggcctccgtgtcagttatggaagaggaatttctgctggaagccatggagggccccccagaactctatatacccgacatggcgtgtgcgaaaactaccacgcgcggagaatgtccccgcaaagattcccacctgtggcagctcctgcctatgcctcatgctgagtacgaggtcacaagacccacggctacttcgaaatacgatcacccactggggttcatggtaacacatgtcactgagatgcaggatagttttgtgagaccagaaggcgctggtaaggtgcagagccatcacaacgagtctcagcggtcacccggtaacgatcatacgcaggacaaattcctgcacgtcgattcagaggccccacgcgaagaggagtcaagcggcttctgcccacacaccaatcattctttgctggttccagagagttcttcacagtgcattccaaaacactccgaaataacaccgtacgcaactgatcttgctcaaacaagcgaaaagctgattccacatttgcacaaactccccggggatcctgctcaggttaaatcccgctcaggcactctcggacaaatcctcccaggaactgaggctgaaatggagaacctcccactgaatacaggcagcagtagatcagttatgacgcagatgagctcctccctggtatctgcggctcagagagccgtggcgctgggtactgggccccgagggacatcactcgaatgtacggtgtgtgatcccgtgacggctacagagactcggctgggaactaaggctcggcagctgaatgacgcttcaattcagacgagtgcactcagcaataagactttgacccacggcccccagcccctcactaagtcagtgagcttggattcaggattcagttcaatctgtccaatgggcacctgccatgctatacctgctcattgctgtatctgctgtcaccatcacccccactgtcatggggagcggcagtcacccggacccgaacccagtgtgtgcagacactgcctgtgctcacttaccggccaccaggaagctcagttcatgaccacactcaaagccttgcaagacactacagttcgtgaactgtgtagctgcactgttcatgagatggaggccatgaaaactatttgccagtcattccgggagtatctggaagagattgagcagcacctgatgggccaacaagccctattctcaagagacatgtcagaagaggaacgcgaggaggcagaacaactgcagacgctgcgcgaggccctaagacagcaagtggctgaactggagttccagttgggagaccgcgcccagcaaatcagggaaggcatattgctgcagttggaggtcctgacggctgagccaccagagcactatagtaacctgcaccaatacaactggattgaggaatcaaacggccaaactagttgtagtaagatccaccctggcatggccccacgcaccgtgttccctcctgatgacggtcaggaggcaccctgtagcggcggcactcagctggctgccttcaccccgcccacactagagaattccacacgaatgtcgccttccagctccgcatgggcaaagctaggaccaacccccctgtctaattgcccagtgggagaaaaagacgctgacgtgttcttgtag

SEQ ID NO: 92303 - DNA, 3165 bp, Artificial Sequence
  derived and/or modified sequence
atgagtttttccttacagaactacagtcctatgatggcccagaagtctcagggttcagacaatctgcaggaaggtcaggaaaagtcaaaacgggagatattgaaatgtacgaaaagtgcctgggcgcctctggacgaatggctgccaccggaccctgaagaagagtcgcagagccttactatccctatgctcgaagactctaaacaagaatcaattcagcagtggttggacagcggcttttttgtttctgccaacgagaattttcagcaggtgatcgacaggactgtgagcctgtatgagcagggtatggtccaaatgacggtgaaggactatatgcgatctctgcaccagtttagtgaaaccccgatactctctagaggtacttccttcaattcttgctacagtacggcgtcagttccacagtcaattcctgaatggctggagttttgggagattgaccccgttgagatcctgctggatttaggctttggcgcagacgaaccggatatctgtatgcagatcccggctcgattccttggttgcgggtcagccgctagggggattaatatccgagtgttccttgaagctcagaagcagagaatggacatcgaaaatccgaatttgtatggccgtttccggcaattggaaatcctagaccacgtaacaaacgctttttctagtttgctgagcgatgtgagcattctgccaaaccgtgccgaagagaaggcagggggtgagagcgtacagaggaccagtgtcagcgccgcaaaagagcatcgtcgtcgcatgggtaagctcctcaggcgagcttcgaaacaaaatattaggcgcgactgtaatccggaagtgtccgagtccttcaaagttaaagacgaagtgtttgtcccattcacaaaaccctgggactgcggagcagaactggctgccaccagcatcaatcacaaacagaaccatctgtctttgtctgtggagcaccaaagcttgcaagcatgtgacgatctcttaccttatcctccccacggacttttgtccaagcagtggccttgtagctctatgccagctaagcaggccccaccctcatgtgtcagtgagggttctgttaagggacggacacaaaaagaaaatctttttcagaccaataagctcaaaagtttatctcacctagccggaaaggggcctgactctttcgagatggaggaagtacagtcgttcgaagaagagacaggaaaccccctcgacatgactagcggaaccgtgggcgctcgagtggatcgcgctaacagctgccaatcagacagctcgggattcttggaagagccactggagccacttcctctgcaaatgcctagccttccaaactcccagagcccagccgagaacggtgggcgtaagcctcgggatcagagtcattccctcgtgagctcccaggactgccagctagaatcggacggtcccgactctaagtccagggctagcatgagcttcagttcccaggaggctaatgctctagagcagcgcgctagtgtttctgttatggaggaggagtttctgctggaggctatggaagggcctccagaactctacatcccagatatggcctgcgcgaagacgactactagaggggaatgtccgaggaaggatagccacttgtggcagctgcttcccatgcctcatgcagaatacgaggtgaccagacctaccgccacatcaaagtacgaccacccccttggcttcatggtcacccatgtaaccgaaatgcaggactcctttgtcagacccgaaggtgctggcaaggtacaatcacaccacaacgaatcacagcgcagccccggaaatgaccacacccaagacaaattcctgcacgtggattccgaagctccccgtgaagaagaatcgagtggtttctgtccgcacaccaaccattctttgcttgttcctgagtcctcttctcagtgcatcccaaaacattccgagattactccatatgcaaccgatctggcccagacatccgaaaaacttatacctcacctccacaaactgcctggagatcctgcgcaggtgaagtcaaggagtggcaccctgggtcagatcttacctggcactgaagccgaaatggaaaacctgccgctgaatactggctccagcagaagtgtgatgacgcagatgagctcttcgttggtttctgctgctcaaagggcagtcgccttaggcacaggccctagagggactagccttgagtgtactgtgtgtgaccccgtgaccgctacagagacaaggctgggcactaaggccaggcagctcaatgacgcttcaattcagacaagcgctctgtcaaataagactttgactcacggcccacaaccactcactaagtccgtaagtctcgattccgggttttctagcatctgccccatgggaacttgccatgccattcccgcacactgctgcatctgctgccaccaccacccccattgtcatggagaaaggcagtcacccggtccagagcccagcgtgtgtcgtcactgtctttgtagccttacggggcaccaggaggcacagttcatgacgactttgaaggctcttcaggatacaactgtgcgcgaactctgctcatgtacagtccatgagatggaagccatgaagacaatttgtcagtccttccgcgagtatctggaagaaattgagcaacacttaatgggccaacaggccctcttctctagggacatgtccgaggaggaaagggaagaggccgaacaactgcaaaccctcagggaggccctgcgccagcaggtcgctgaactggagtttcagctcggggatagggcccagcagatccgtgaggggatactattgcagctggaagtgctgactgctgaaccaccggaacattatagtaacctacatcagtacaactggatcgaggaatctaacggacagacttcgtgctccaagattcaccccggtatggccccacgtacggtgtttcctccagatgacggccaggaagccccttgtagcggaggcacccagcttgccgcattcaccccgcctaccctcgaaaatagcacccgcatgtccccgtcttcttcggcttgggctaagctcggtccgacccccctctcaaactgcccagttggtgagaaagatgccgacgtttttttgtag

SEQ ID NO: 92304 - protein, 142 aa, Artificial Sequence
  derived and/or modified sequence
MMAQKSQGSDNLQEGQEKSKREILKCTKSAWAPLDEWLPPDPEEESQSLTIPMLEDSKQESIQQWLDSGFFVSANENFQQVIDRTVSLYEQGMVQMTVKDYMRSLHQFSETPILSRGTSFNSCYSTASVPQSIPEWLEFWEI

SEQ ID NO: 92305 - protein, 1062 aa, Artificial Sequence
  derived and/or modified sequence
MPTTASCKTISLLKLLYSVSLQNYSPMMAQKSQGSDNLQEGQEKSKREILKCTKSAWAPLDEWLPPDPEEESQSLTIPMLEDSKQESIQQWLDSGFFVSANENFQQVIDRTVSLYEQGMVQMTVKDYMRSLHQFSETPILSRGTSFNSCYSTASVPQSIPEWLEFWEIDPVEILLDLGFGADEPDICMQIPARFLGCGSAARGINIRVFLEAQKQRMDIENPNLYGRFRQLEILDHVTNAFSSLLSDVSILPNRAEEKAGGESVQRTSVSAAKEHRRRMGKLLRRASKQNIRRDCNPEVSESFKVKDEVFVPFTKPWDCGAELAATSINHKQNHLSLSVEHQSLQACDDLLPYPPHGLLSKQWPCSSMPAKQAPPSCVSEGSVKGRTQKENLFQTNKLKSLSHLAGKGPDSFEMEEVQSFEEETGNPLDMTSGTVGARVDRANSCQSDSSGFLEEPLEPLPLQMPSLPNSQSPAENGGRKPRDQSHSLVSSQDCQLESDGPDSKSRASMSFSSQEANALEQRASVSVMEEEFLLEAMEGPPELYIPDMACAKTTTRGECPRKDSHLWQLLPMPHAEYEVTRPTATSKYDHPLGFMVTHVTEMQDSFVRPEGAGKVQSHHNESQRSPGNDHTQDKFLHVDSEAPREEESSGFCPHTNHSLLVPESSSQCIPKHSEITPYATDLAQTSEKLIPHLHKLPGDPAQVKSRSGTLGQILPGTEAEMENLPLNTGSSRSVMTQMSSSLVSAAQRAVALGTGPRGTSLECTVCDPVTATETRLGTKARQLNDASIQTSALSNKTLTHGPQPLTKSVSLDSGFSSICPMGTCHAIPAHCCICCHHHPHCHGERQSPGPEPSVCRHCLCSLTGHQEAQFMTTLKALQDTTVRELCSCTVHEMEAMKTICQSFREYLEEIEQHLMGQQALFSRDMSEEEREEAEQLQTLREALRQQVAELEFQLGDRAQQIREGILLQLEVLTAEPPEHYSNLHQYNWIEESNGQTSCSKIHPGMAPRTVFPPDDGQEAPCSGELLSAELDPFFFSSKANNSAKDEKIKSKDFLKTQDSGLL

SEQ ID NO: 92306 - protein, 163 aa, Artificial Sequence
  derived and/or modified sequence
MMAQKSQGSDNLQEGQEKSKREILKCTKSAWAPLDEWLPPDPEEESQSLTIPMLEDSKQESIQQWLDSGFFVSANENFQQVIDRTVSLYEQGMVQMTVKDYMRSLHQFSETPILSRGTSFNSCYSTASVPQSIPEWLEFWEIDPVEILLDLGFGADEPDICMQ

SEQ ID NO: 92307 - protein, 168 aa, Artificial Sequence
  derived and/or modified sequence
MMAQKSQGSDNLQEGQEKSKREILKCTKSAWAPLDEWLPPDPEEESQSLTIPMLEDSKQESIQQWLDSGFFVSANENFQQVIDRTVSLYEQGMVQMTVKDYMRSLHQFSETPILSRGTSFNSCYSTASVPQSIPEWLEFWEIDPVEILLDLGFGADEPDICMQIPARF

SEQ ID NO: 92308 - DNA, 3189 bp, Artificial Sequence
  derived and/or modified sequence
atgcccaccaccgccagctgcaagaccatcagcctgctgaagctgctgtacagcgtgagcctgcagaactacagccccatgatggcccagaagagccagggcagcgacaacctgcaggagggccaggagaagagcaagagagagatcctgaagtgcaccaagagcgcctgggcccccctggacgagtggctgccccccgaccccgaggaggagagccagagcctgaccatccccatgctggaggacagcaagcaggagagcatccagcagtggctggacagcggcttcttcgtgagcgccaacgagaacttccagcaggtgatcgacagaaccgtgagcctgtacgagcagggcatggtgcagatgaccgtgaaggactacatgagaagcctgcaccagttcagcgagacccccatcctgagcagaggcaccagcttcaacagctgctacagcaccgccagcgtgccccagagcatccccgagtggctggagttctgggagatcgaccccgtggagatcctgctggacctgggcttcggcgccgacgagcccgacatctgcatgcagatccccgccagattcctgggctgcggcagcgccgccagaggcatcaacatcagagtgttcctggaggcccagaagcagagaatggacatcgagaaccccaacctgtacggcagattcagacagctggagatcctggaccacgtgaccaacgccttcagcagcctgctgagcgacgtgagcatcctgcccaacagagccgaggagaaggccggcggcgagagcgtgcagagaaccagcgtgagcgccgccaaggagcacagaagaagaatgggcaagctgctgagaagagccagcaagcagaacatcagaagagactgcaaccccgaggtgagcgagagcttcaaggtgaaggacgaggtgttcgtgcccttcaccaagccctgggactgcggcgccgagctggccgccaccagcatcaaccacaagcagaaccacctgagcctgagcgtggagcaccagagcctgcaggcctgcgacgacctgctgccctaccccccccacggcctgctgagcaagcagtggccctgcagcagcatgcccgccaagcaggccccccccagctgcgtgagcgagggcagcgtgaagggcagaacccagaaggagaacctgttccagaccaacaagctgaagagcctgagccacctggccggcaagggccccgacagcttcgagatggaggaggtgcagagcttcgaggaggagaccggcaaccccctggacatgaccagcggcaccgtgggcgccagagtggacagagccaacagctgccagagcgacagcagcggcttcctggaggagcccctggagcccctgcccctgcagatgcccagcctgcccaacagccagagccccgccgagaacggcggcagaaagcccagagaccagagccacagcctggtgagcagccaggactgccagctggagagcgacggccccgacagcaagagcagagccagcatgagcttcagcagccaggaggccaacgccctggagcagagagccagcgtgagcgtgatggaggaggagttcctgctggaggccatggagggcccccccgagctgtacatccccgacatggcctgcgccaagaccaccaccagaggcgagtgccccagaaaggacagccacctgtggcagctgctgcccatgccccacgccgagtacgaggtgaccagacccaccgccaccagcaagtacgaccaccccctgggcttcatggtgacccacgtgaccgagatgcaggacagcttcgtgagacccgagggcgccggcaaggtgcagagccaccacaacgagagccagagaagccccggcaacgaccacacccaggacaagttcctgcacgtggacagcgaggcccccagagaggaggagagcagcggcttctgcccccacaccaaccacagcctgctggtgcccgagagcagcagccagtgcatccccaagcacagcgagatcaccccctacgccaccgacctggcccagaccagcgagaagctgatcccccacctgcacaagctgcccggcgaccccgcccaggtgaagagcagaagcggcaccctgggccagatcctgcccggcaccgaggccgagatggagaacctgcccctgaacaccggcagcagcagaagcgtgatgacccagatgagcagcagcctggtgagcgccgcccagagagccgtggccctgggcaccggccccagaggcaccagcctggagtgcaccgtgtgcgaccccgtgaccgccaccgagaccagactgggcaccaaggccagacagctgaacgacgccagcatccagaccagcgccctgagcaacaagaccctgacccacggcccccagcccctgaccaagagcgtgagcctggacagcggcttcagcagcatctgccccatgggcacctgccacgccatccccgcccactgctgcatctgctgccaccaccacccccactgccacggcgagagacagagccccggccccgagcccagcgtgtgcagacactgcctgtgcagcctgaccggccaccaggaggcccagttcatgaccaccctgaaggccctgcaggacaccaccgtgagagagctgtgcagctgcaccgtgcacgagatggaggccatgaagaccatctgccagagcttcagagagtacctggaggagatcgagcagcacctgatgggccagcaggccctgttcagcagagacatgagcgaggaggagagagaggaggccgagcagctgcagaccctgagagaggccctgagacagcaggtggccgagctggagttccagctgggcgacagagcccagcagatcagagagggcatcctgctgcagctggaggtgctgaccgccgagccccccgagcactacagcaacctgcaccagtacaactggatcgaggagagcaacggccagaccagctgcagcaagatccaccccggcatggcccccagaaccgtgttcccccccgacgacggccaggaggccccctgcagcggcgagctgctgagcgccgagctggaccccttcttcttcagcagcaaggccaacaacagcgccaaggacgagaagatcaagagcaaggacttcctgaagacccaggacagcggcctgctgtag

SEQ ID NO: 92309 - DNA, 3529 bp, Artificial Sequence
  derived and/or modified sequence
acacatactttgatgccaactacagcaagttgcaagaccatttctctgctgaaactcctttattctgttagtttgcagaattactctcctatgatggcacagaaatcacaaggatctgacaaccttcaggaaggccaggaaaagagcaagagagagatcctgaagtgcaccaaaagcgcgtgggctccgctggatgagtggctgccccctgaccctgaggaggaaagccagagtctcaccatccccatgctggaagattccaagcaagaaagtattcagcagtggctggactctggattctttgtctctgcaaatgaaaactttcaacaagtcattgaccgcactgtttctttgtatgaacaagggatggttcaaatgactgtgaaagactacatgagatctttgcatcagttttcagaaactcccatcctatccagagggaccagtttcaactcttgctattctactgcaagtgtaccacaaagcattcctgaatggctggaattttgggagatagatccagtggagattctcttggatctggggtttggtgctgatgagccagacatctgcatgcaaatcccagccagattccttggttgtggctcagcagccagaggaatcaacatccgtgtttttcttgaagctcaaaagcagcgaatggacattgagaaccccaacttgtacggtcgtttccgacagctggaaatcctggaccatgtgaccaatgccttctcatctctgctgagtgatgtcagcatcctgccaaacagagctgaagagaaagctggaggagagagtgtgcaaagaacctcagtgagtgccgccaaagagcatcgaagaagaatgggtaaactcttaaggagagcttccaaacagaacatcaggcgggattgtaacccagaggtatcagagtccttcaaggtgaaggatgaagtttttgttccctttacaaaaccatgggattgtggagcagagctagcagcaacctcaatcaaccacaagcaaaatcatttgtctctgtcagtagaacatcagtctctccaagcctgtgatgatttgctaccttatcctcctcatggtcttctgagcaagcagtggccttgctcatctatgccggccaagcaggctcctccttcctgtgtgtctgaggggtcagtcaagggcagaactcagaaggagaacttatttcagactaacaagctcaagagcttgtctcatcttgcaggcaaaggaccagactcatttgaaatggaagaggtccaaagctttgaagaagagactggtaatcctcttgacatgacttcaggaactgtaggtgccagggtggacagagcaaatagctgccagtctgacagcagcgggttcctggaggagccgctggaaccgctgcccctccagatgccttccttgccaaacagccagagtcctgctgagaatggaggtagaaagccaagagatcagagccacagcttagtatcatcccaggactgtcagctagagtcggatgggccagattccaaaagtagggcgagcatgtctttttcaagccaagaagcgaatgccttggaacaaagggcctcagtatctgtgatggaggaagagtttctgcttgaggccatggaggggccaccagagctgtatatcccagacatggcctgtgccaagaccaccacgaggggagaatgcccaaggaaagacagccatctgtggcagcttctgccaatgccccatgctgagtatgaggtcaccagacccacagccacttccaaatatgatcatcctctggggtttatggtaacccacgtcacagaaatgcaggacagttttgtgaggcctgagggagctggcaaagtgcaaagccaccacaatgagtctcaaaggtcacctggaaatgatcatactcaagacaagttccttcatgttgactctgaggccccacgagaagaggaaagcagtggattctgtcctcacaccaaccacagcttactcgtaccagaaagctcatcacagtgtatccccaagcacagtgaaatcacaccttatgcaactgaccttgctcaaacatctgaaaagctcattccccacctccataaactgcctggagatcctgcccaggtgaagtcaaggtctggtactttgggtcagatactacctgggacagaagctgagatggaaaaccttcctctaaatactggcagctccaggtctgtaatgacccagatgtcctccagcctggtgtcggctgctcagagggctgtggccttggggactggtcccagaggaacatctttagaatgcactgtgtgtgatcctgttaccgcaacagaaacaagactggggacaaaagcaagacagttaaatgatgcttccattcagacttcagctctaagcaacaagaccttgacacatgggccccagcccctcaccaaatccgtctctctagactcaggcttctctagtatctgcccaatgggcacctgccatgctatacctgcccactgctgcatctgctgtcatcaccaccctcactgccacggggagaggcaaagccctggccctgaaccctcagtctgtaggcactgcctgtgttcactaactggtcaccaggaagcccagttcatgacgactttgaaagcccttcaggacactacagtgagggagctatgttcctgcacagtccatgagatggaagccatgaagacgatatgccaaagtttccgggagtatttagaagaaattgaacagcaccttatgggacagcaggccctcttttccagggacatgtcagaggaggaaagggaggaggccgagcaactgcaaacgttacgtgaggccctgaggcagcaggtggcagagttggaatttcagttaggagaccgggctcagcaaatcagagaagggattttactgcagctggaggttctcacagcagagccacctgaacactattcaaatctgcatcaatataactggatagaagaaagcaatgggcagacttcatgttctaaaatccacccaggcatggccccgaggactgtgtttcctcccgatgatggccaggaggctccctgttcaggtgaattattgtctgcagagctggatcccttttttttttcttcaaaagcaaataactctgctaaagatgaaaaaataaaatcaaaagactttctgaagacacaagactctggtctgttgtaattgtttttctttgttgagaaaataatcagtttccagagtataacacatgtcgaacaaaatagaacatttgtaaagaggttagagtatcaaagtggtgcccctttgagaagaaaaagttttagagtgttttcatgtggaatggtgggttgcatacgtaatttcaaattgtaatttaaaacaacaaattgttcatgatgtgcgagaattgtaggttattaaaagccttgttaaattgtttttcttgaaaattgagagaacaggaacagaagccaaaatatggacggcacctttctctagcccaaactcagcctctaattgcctgatctta

SEQ ID NO: 92310 - DNA, 582 bp, Artificial Sequence
  derived and/or modified sequence
cacacatactttgatgccaactacagcaagttgcaagaccatttctctgctgaaactcctttattctgttagtttgcagaattactctcctatgatggcacagaaatcacaaggatctgacaaccttcaggaaggccaggaaaagagcaagagagagatcctgaagtgcaccaaaagcgcgtgggctccgctggatgagtggctgccccctgaccctgaggaggaaagccagagtctcaccatccccatgctggaagattccaagcaagaaagtattcagcagtggctggactctggattctttgtctctgcaaatgaaaactttcaacaagtcattgaccgcactgtttctttgtatgaacaagggatggttcaaatgactgtgaaagactacatgagatctttgcatcagttttcagaaactcccatcctatccagagggaccagtttcaactcttgctattctactgcaagtgtaccacaaagcattcctgaatggctggaattttgggagatagatccagtggagattctcttggatctggggtttggtgctgatgagccagacatctgcatgcaaat

SEQ ID NO: 92311 - DNA, 3189 bp, Artificial Sequence
  derived and/or modified sequence
atgcccacaactgcgtcatgcaagacgatcagcttactgaagctcctgtattccgtatccctgcagaactactcacccatgatggcacagaaatctcagggctcggacaacctgcaagagggacaggagaaatccaaacgagaaatcctgaaatgtacgaaaagtgcgtgggcacccctggatgaatggctcccccctgaccccgaggaagagtctcagagcctgaccatcccaatgctggaagactctaaacaggagtccatccagcagtggctcgattctgggttcttcgttagtgccaatgagaactttcaacaggtgatcgacagaacagttagtctgtatgagcagggaatggtccagatgaccgtgaaagattacatgagatcgttgcaccaattctctgagactcctattctgtctcgaggtactagttttaattcgtgctatagtacagcatccgtgccccaaagtatcccggaatggctcgagttctgggaaattgaccctgtagaaattcttctcgacctgggattcggtgccgacgagcctgacatctgtatgcagattcctgcccgctttctggggtgtgggtcagccgcccggggaatcaacattagggttttcttggaagctcagaagcagaggatggatatcgaaaatcccaatctctacgggagattccgacaactggaaattttggatcacgtgactaacgccttcagctcactgctgtcagacgtctcgatcctcccaaatcgggccgaggagaaagcagggggggagagcgtgcagcgcacctccgtgagtgccgcgaaggagcacaggcgcaggatggggaaactgctgcggcgcgccagtaagcagaacatccggcgagattgcaatcctgaagtgagcgagtctttcaaggttaaagacgaagtttttgttcccttcacaaaaccttgggactgcggcgccgaactggcagctacaagtatcaaccataaacaaaaccatctgagcctgtccgtagaacaccagtcgctgcaggcatgcgacgatctgctgccataccctccacacggcctcctctccaaacaatggccatgttctagcatgcccgccaagcaagcccctccaagctgcgtctccgaaggcagtgttaaaggcagaactcagaaagaaaatcttttccagacaaacaagctcaagagccttagccacctggccggcaagggccccgattccttcgagatggaggaggtgcaatctttcgaagaagagaccggcaaccccctagacatgacaagcggcaccgtgggtgcaagagtcgacagagctaactcctgtcagtcagactcctccggttttctcgaagaaccactagaacctctgcctctgcagatgccctctctgccaaacagtcagtcacctgcggagaacgggggacgcaaaccacgcgatcagtctcatagcctagtatcaagccaggactgtcagctggagtctgatggcccagacagcaaatcccgcgcatctatgtccttttcatcccaggaggccaatgctttagaacagcgcgcttctgtcagtgtcatggaagaagaattcctgctcgaggccatggagggtcccccagagctgtatattccagatatggcttgcgccaaaactactactagaggagagtgtcctcggaaggattcgcatctatggcagctgctccctatgccccacgcagaatatgaggtaacaagacctaccgcgacctctaagtacgatcatcctcttggcttcatggtaacccatgtaaccgaaatgcaggattcgtttgtccggcccgaaggggcaggaaaagtccagagtcatcataatgaaagtcaacggagcccaggtaatgaccacacgcaggataagttcctgcacgtggattcggaggccccacgggaggaggagagttctgggttttgcccccataccaaccactccctccttgttccagagtcatcgtcccagtgtatacctaagcatagcgaaattactccgtacgccacagacctggcccagacgtctgagaagcttatccctcatcttcacaagctgccaggggaccctgctcaggtcaagagcaggagtgggactcttgggcagattctgcctggaacggaagcggagatggaaaacctacccctcaatacgggatcttccagatcggtaatgacgcaaatgtcttcatcgctcgtctctgccgctcaacgggcagtcgccctgggaaccggccccaggggtacttccctggagtgtactgtgtgtgatcccgtgacggctacagagaccaggcttgggactaaggccagacagttgaacgacgcaagcatccagacctcagcgctgagtaacaagacactgacccatggaccacaacccctgaccaagagcgtgagcctcgactcagggttcagctcaatttgccccatgggtacttgccacgccatccctgcacattgctgtatctgttgtcaccatcaccctcattgtcacggagagcggcagagtcccgggcccgagccgagtgtttgccgacattgtttatgctctctcacaggccatcaggaagcccagtttatgactactctgaaagcactccaggacaccactgtgcgagagctgtgcagttgcacagtccacgaaatggaagccatgaagaccatctgtcagagcttccgagagtacctggaagaaattgagcaacacctcatggggcagcaggcacttttttcccgggacatgtctgaggaagagagggaagaagccgagcagttgcaaaccttgcgggaggcattgcgccagcaggtggcggaactcgagttccaactaggtgatagggcccaacaaattagggagggcatcctgctgcagttagaggtgctgacggcagaaccccccgaacattactcaaatctgcaccagtataattggatcgaagaaagtaatggccagactagttgcagcaaaattcacccagggatggctccacggactgttttcccacccgacgatgggcaggaggctccttgcagcggagaactccttagcgctgaactagacccattcttcttcagctccaaggctaacaactccgcgaaggacgaaaagatcaaaagcaaggacttcctcaaaacacaggactcagggcttctttag

SEQ ID NO: 92312 - DNA, 3189 bp, Artificial Sequence
  derived and/or modified sequence
atgcccaccacagccagctgcaagaccatcagcctgctgaagctgctgtacagcgtgtccctgcagaactacagccccatgatggcccagaagagccagggcagtgacaacctgcaggagggccaggagaagagcaagcgggagatcctgaagtgcaccaagagcgcctgggcccccctggatgagtggctgcccccagaccctgaggaggagagccagagcctgaccatccccatgctggaggacagcaagcaggagagcatccagcagtggctggacagcggcttctttgtgtctgccaatgaaaacttccagcaggtgattgacagaacagtgtccctgtatgagcagggcatggtgcagatgacagtgaaggactacatgaggagcctgcaccagttcagcgagacccccatcctgagccggggcaccagcttcaacagctgctacagcacagcctctgtgccccagagcatccctgagtggctggagttctgggagattgatcctgtggagatcctgctggacctgggctttggagcagatgagccagacatctgcatgcagatcccagcccgcttcctgggctgcggcagcgctgcccggggcatcaacatccgggtcttcctggaggcccagaagcagaggatggacatcgagaaccccaacctgtatggccgcttccggcagctggagatcctggaccacgtgaccaatgccttcagcagcctgctgagtgatgtgtccatcctgcccaacagagctgaggagaaggccggcggggagagcgtgcagaggacctctgtgtctgctgccaaggagcacagaagaaggatgggcaagctgctgcggcgggccagcaagcagaacatccggcgggactgcaaccctgaggtgtctgagagcttcaaggtgaaggatgaggtgtttgtgcccttcaccaagccctgggactgtggggctgagctggccgccaccagcatcaaccacaagcagaaccacctgagcctgtctgtggagcaccagagcctgcaggcctgtgatgacctgctgccctacccaccccacggcctgctgagcaagcagtggccctgcagctccatgcctgccaagcaggccccacccagctgtgtgtctgagggctctgtgaagggccgcacccagaaggagaacctcttccagaccaacaagctgaagagcctgagccacctggccgggaaaggaccagacagctttgagatggaggaggtgcagagctttgaggaggagaccggcaaccccctggacatgaccagcggcaccgtgggcgcccgggtggaccgggccaacagctgccagagcgacagcagcggcttcctggaggagcccctggagcccctgcccctgcagatgcccagcctgcccaacagccagagccctgcagaaaatggaggcaggaagccccgggaccagagccacagcctggtgagcagccaggactgccagctggagagtgatggccctgacagcaagagccgggcctccatgtccttcagcagccaggaggccaatgccctggagcagagggcctctgtgtctgtgatggaggaggagttcctgctggaggccatggagggccccccagagctgtacatcccagacatggcctgtgccaagaccaccaccagaggagagtgccccaggaaggacagccacctgtggcagctgctgcccatgcctcatgctgaatatgaggtgacccggcccacagccaccagcaaatatgaccaccccctgggcttcatggtgacccacgtgacagagatgcaggacagctttgtgcggcctgagggcgctgggaaggtgcagagccaccacaatgaaagccagaggagccctggaaatgaccacacccaggacaagttcctgcacgtggacagcgaggccccccgggaggaggagagcagcggcttctgcccccacaccaaccacagcctgctggtgcctgagagcagcagccagtgcatccccaagcacagcgagatcaccccctatgccacagacctggcccagaccagcgagaagctgatcccccacctgcacaagctgcccggggaccctgcccaggtgaagagccgcagcggcaccctgggccagatcctgcctggaacagaagctgagatggagaacctgcccctgaacacaggcagcagccgctctgtgatgacccagatgagcagcagcctggtgtctgctgcccagagagctgtggccctgggcaccggcccccggggcaccagcctggagtgcaccgtgtgtgaccctgtgacagccacagagacccggctgggcaccaaggcccggcagctgaatgatgccagcatccagaccagcgccctgagcaacaagaccctgacccacggcccccagcccctgaccaagtctgtgtccctggacagcggcttcagcagcatctgccccatgggcacctgccacgccatcccagcccactgctgcatctgctgccaccaccacccccactgccacggggagcggcagagccctggccctgagcccagcgtgtgccgccactgcctgtgcagcctgaccggccaccaggaggcccagttcatgaccaccctgaaggccctgcaggacaccaccgtgcgggagctgtgcagctgcaccgtgcatgagatggaggccatgaagaccatctgccagagcttccgggagtacctggaggagattgagcagcacctgatgggccagcaggccctcttcagccgggacatgtctgaggaggagcgggaggaggccgagcagctgcagaccctgcgggaggccctgcggcagcaggtggccgagctggagttccagctgggggaccgggcccagcagatccgggagggcatcctgctgcagctggaggtgctgacagctgagcccccagagcactacagcaacctgcaccagtacaactggattgaggagagcaatggccagaccagctgcagcaagatccaccctggcatggcccccaggacagtgttccccccagatgatggccaggaggccccctgcagcggggagctgctgtctgctgagctggaccccttcttcttcagcagcaaggccaacaacagcgccaaggatgagaagatcaagagcaaggacttcctgaagacccaggacagcggcctgctgtag

SEQ ID NO: 92313 - DNA, 3189 bp, Artificial Sequence
  derived and/or modified sequence
atgcccaccaccgccagctgcaagaccatcagcctgctgaagctgctgtactcggtgtcactgcagaactattcaccaatgatggcacaaaaaagccagggctccgataatctgcaggagggccaggaaaagtccaaacgtgagatcctgaagtgtaccaaaagtgcctgggcaccgttagatgagtggttgccccccgacccagaggaggagtcccagtctctcactatcccaatgctggaagactcaaaacaggagtccattcaacagtggttagactccgggttttttgtttctgcaaatgaaaactttcaacaagtcattgaccgcaccgtgagtctgtatgagcaaggtatggttcagatgacagtaaaagactatatgaggtctttgcatcagttctccgagacacccatcctttcccgaggtacaagtttcaatagctgttattctaccgcgtcagttcctcagtccattccagaatggctggaattttgggaaatcgatccagtggagattcttctggatcttggtttcggagccgatgaacctgatatctgtatgcagataccagcccggtttctgggttgcgggagcgcagcacgtggaattaacatccgagtatttctggaggcccagaagcagcggatggatatcgaaaaccccaatctctacggaagattcagacagctcgaaatccttgaccacgtgactaacgccttttcctctctgctgagcgacgtctccattcttcctaaccgtgccgaggagaaggctgggggggagtccgttcagcgcacctccgtgtctgctgccaaggaacaccggcggcgcatgggtaaattattaagacgcgcatccaagcagaacataaggagagactgcaacccagaagtgagcgagagcttcaaggtcaaggatgaggtgtttgtgccttttactaaaccatgggattgtggggctgaactagcagctacctcaatcaaccacaaacagaatcacctgtcactttccgtcgagcaccagagtttgcaggcctgtgacgatttactgccctacccacctcacgggctgttatctaaacagtggccctgttcgtcaatgcctgccaagcaggctccaccctcctgtgtgtccgagggcagcgtcaaggggcggacacaaaaagagaacctgttccagacgaacaagctcaagtcactgagccaccttgccggcaaaggcccagacagcttcgagatggaggaggtgcagtcatttgaagaagaaaccggtaaccccctggacatgacaagcggaacagtaggggcacgcgtggatcgggctaacagttgccagagtgatagctcgggtttcctggaagaaccccttgagccactgccacttcagatgccatcacttcccaactcccagtcccccgccgaaaatggtgggcgaaaaccaagagatcagtctcacagccttgtttcttcccaggactgccagctggaatccgacgggccggatagcaagtcacgtgcctcaatgtccttttcatcacaggaagcaaatgccctagagcagcgagcttctgtgagtgtgatggaagaggaatttctgctggaggcaatggaggggcccccagagctgtatattccggacatggcatgcgccaagaccactacaaggggtgagtgcccccggaaagatagtcatctttggcagctgttgcctatgccgcacgcagaatacgaggttacacgccctacagccacaagcaaatacgaccatcctttggggtttatggtaacgcacgtcaccgaaatgcaggactctttcgtacgtcctgaaggtgctgggaaagtccagagccatcacaacgagtcgcagcggagtcctggtaacgaccacacccaggataagtttttacacgttgactcagaggccccccgggaagaggagagcagcggtttttgccctcatactaaccatagcttactagttccagaaagctctagtcaatgcattcctaagcactccgagatcacaccctacgccacggatctggcgcagacaagcgaaaagctcattccccatttgcacaaacttccgggagaccccgctcaggtaaagagtcggtcagggaccttgggacaaatactgccgggcaccgaggccgagatggagaacttaccgctcaatacgggtagttcccgttctgtgatgacccagatgtcatcatcccttgtgagtgcggctcagcgtgctgtggccctgggcactgggcctcgtggcaccagtctggaatgcaccgtatgtgacccagtaactgctacagagaccaggctcggcacaaaggcgcgtcagctaaatgatgccagcatccaaacgtccgccctgagcaacaaaactctgacacatggaccacagcctcttaccaagtcagtgtccctggattctggtttctcttctatctgccccatggggacctgccacgccattccagcccactgctgcatatgctgccaccaccatcctcattgccacggcgaacggcagagcccgggtcctgagcctagcgtctgcagacattgtctgtgcagtctcactggccaccaggaggcccaattcatgactacacttaaagcgcttcaagatacaacggtccgtgagctttgctcatgcacagttcacgagatggaagctatgaagacaatatgccagagcttcagagagtacttagaagagatcgagcagcatctcatggggcagcaagcgctattctccagagatatgtcagaggaggaaagagaggaggcggaacagctccagaccctgcgggaagccttgcggcagcaggtggcagagctcgagttccaactcggcgaccgagcacagcagatcagagaaggcatcctcctacagctggaggtgttaacagccgaaccccctgaacattactcaaatctgcaccagtacaactggattgaagagtctaacggccaaacatcctgtagtaaaatccaccctgggatggcccccaggacagtgtttccgcctgatgatgggcaggaggcaccctgctctggagaactactctctgccgaacttgacccattcttcttttcctctaaagcgaacaactccgcaaaagacgagaaaatcaagtcaaaggacttcctgaagacgcaggacagcggactgctgtag

SEQ ID NO: 92314 - DNA, 3189 bp, Artificial Sequence
  derived and/or modified sequence
atgcccacaacggcctcatgcaagactatctcactgcttaagctcctgtactcagtatctttacagaactactcccccatgatggctcagaaatcccagggatccgataatctccaggagggacaagagaagagcaagagagaaattctgaagtgcacaaagtccgcatgggcaccactggatgagtggctcccccctgatcctgaggaggaatcccagtcactgaccatccccatgctggaggactcaaaacaagagagcatccaacagtggctagattctgggtttttcgtgagcgctaacgagaattttcagcaggttattgacaggaccgtgtcactgtacgaacagggaatggttcaaatgaccgtcaaggactacatgagatcactccaccaattttcagagacacctatccttagcagaggcacatcatttaattcttgctacagcaccgcaagcgttcctcagtccatccctgaatggctggaattctgggagattgatcctgtggagatcctactagaccttggatttggcgctgatgaacctgatatatgtatgcaaataccagccaggttcctgggttgcggctctgcggctcgcggaattaacatccgcgtttttctggaagctcagaagcagcgtatggatattgagaatcctaacttgtacggcagatttcgtcagctcgagatcctggaccatgttaccaacgccttttcaagtctattgagcgacgtgtctatactgcctaatcgggctgaagagaaagccggaggcgaatctgttcagagaacctccgttagtgccgcaaaggagcaccggaggcgcatgggcaagctcctcagacgggcaagcaagcaaaacatcaggcgggactgcaacccagaagtgagcgagtctttcaaggtcaaggacgaagtattcgtgcccttcactaaaccttgggattgcggagccgagctagccgctacatcaattaaccacaaacagaaccatctgagcttgtcagtagagcatcagagcctgcaggcatgtgacgacctgttaccttatccaccgcacgggctgctttccaaacaatggccatgcagctcaatgccagccaaacaagctccaccctcctgcgtgtccgaaggcagcgtgaaaggcagaactcagaaggaaaacctgttccaaaccaataaattgaaatctttatcccacttggcaggtaagggaccagactcatttgagatggaagaggtccagagtttcgaggaggaaacagggaatcccctggatatgacatccgggacagttggtgcccgagtagacagagccaattcctgtcagagtgatagcagtgggtttctcgaggaaccactggagcccttacctctccaaatgccatcattaccgaactctcagtcccctgctgagaacggcggaagaaaaccccgtgatcagtcacactcgttagtgagtagtcaggactgtcaactcgagtcagacggcccagactctaaaagtagggcctccatgagcttttcctcgcaagaggccaacgctctagagcagcgggctagtgtgagtgtaatggaggaggagtttcttctcgaggcaatggaagggcctcctgagctgtacatacccgatatggcttgtgccaagacgacaactcgaggagaatgcccccgtaaggatagtcacctgtggcagctactgccaatgccacatgcggaatacgaggtgacccgcccaacggctaccagcaaatatgaccacccgctggggttcatggtcacccatgtcacggaaatgcaggattcctttgttcgccctgagggcgcaggcaaagtccaatctcaccataacgagtcccagaggtcaccaggcaacgaccacacccaagataaattcctgcacgtggactctgaagcccctcgggaggaagagagctctgggttttgcccacatacaaaccatagcctgctggtgccagagagttcttcccagtgtatcccgaaacactctgagatcacgccttatgcaaccgatctcgctcaaacttctgaaaaactgattcctcacttacataagcttccaggggaccccgcacaagtgaaaagccgctctggtaccctgggacagattctgccaggcacagaagcagagatggaaaatctgcctctgaacacaggcagctcccgcagtgtcatgactcaaatgtcttcctccttggttagcgctgcacagcgcgctgtagctctaggaactggtccacggggaacatcgctcgaatgcacagtctgtgatcctgtgacagctacggagacacgattggggactaaagccagacagctgaacgatgcctccattcagacttctgccctgagcaataagacactcacgcacgggcctcagcctctcaccaagtcagtgagcctggactcaggctttagttcgatttgccccatggggacctgccatgcgattcccgcacattgttgcatttgttgccaccaccatcctcattgccatggagagagacagagcccgggaccagagccctctgtttgtagacactgtctctgtagtctgacaggccatcaagaggctcaatttatgaccacactgaaggctttgcaggacacaacggttcgggagctgtgcagctgtactgttcatgaaatggaagccatgaagactatctgccagtccttccgagaatatctggaagagattgaacagcatcttatgggccagcaggccctgttcagtagagacatgagcgaggaagaacgggaagaggctgaacagctgcagactctcagagaagccctgcgccagcaggttgccgagctggagtttcaactcggcgaccgggctcagcagatcagggagggcatcttactccagttggaggtgctcacagcagaaccccctgaacactactcaaatctgcatcagtataattggatagaagagtccaacggtcagacctcttgcagcaaaattcacccagggatggctccccgaacagtattccccccagacgatggacaggaggccccttgttcgggagagctcctgagcgccgaactggatccctttttcttctcctccaaggccaacaactccgccaaagacgaaaaaattaaatccaaagacttcctgaagacacaggattccggtctgttgtag

SEQ ID NO: 92315 - protein, 740 aa, Artificial Sequence
  derived and/or modified sequence
MGELCRRDSALTALDEETLWEMMESHRHRIVRCICPSRLTPYLRQAKVLCQLDEEEVLHSPRLTNSAMRAGHLLDLLKTRGKNGAIAFLESLKFHNPDVYTLVTGLQPDVDFSNFSGLMETSKLTECLAGAIGSLQEELNQEKGQKEVLLRRCQQLQEHLGLAETRAEGLHQLEADHSRMKREVSAHFHEVLRLKDEMLSLSLHYSNALQEKELAASRCRSLQEELYLLKQELQRANMVSSCELELQEQSLRTASDQESGDEELNRLKEENEKLRSLTFSLAEKDILEQSLDEARGSRQELVERIHSLRERAVAAERQREQYWEEKEQTLLQFQKSKMACQLYREKVNALQAQVCELQKERDQAYSARDSAQREISQSLVEKDSLRRQVFELTDQVCELRTQLRQLQAEPPGVLKQEARTREPCPREKQRLVRMHAICPRDDSDCSLVSSTESQLLSDLSATSSRELVDSFRSSSPAPPSQQSLYKRVAEDFGEEPWSFSSCLEIPEGDPGALPGAKAGDPHLDYELLDTADLPQLESSLQPVSPGRLDVSESGVLMRRRPARRILSQVTMLAFQGDALLEQISVIGGNLTGIFIHRVTPGSAADQMALRPGTQIVMVDYEASEPLFKAVLEDTTLEEAVGLLRRVDGFCCLSVKVNTDGYKRLLQDLEAKVATSGDSFYIRVNLAMEGRAKGELQVHCNEVLHVTDTMFQGCGCWHAHRVNSYTMKDTAAHGTIPNYSR

SEQ ID NO: 92316 - protein, 441 aa, Artificial Sequence
  derived and/or modified sequence
MVSSCELELQEQSLRTASDQESGDEELNRLKEENEKLRSLTFSLAEKDILEQSLDEARGSRQELVERIHSLRERAVAAERQREQYWEEKEQTLLQFQKSKMACQLYREKVNALQAQVCELQKERDQAYSARDSAQREISQSLVEKDSLRRQVFELTDQVCELRTQLRQLQAEPPGVLKQEARTREPCPREKQRLVRMHAICPRDDSDCSLVSSTESQLLSDLSATSSRELVDSFRSSSPAPPSQQSLYKRVAEDFGEEPWSFSSCLEIPEGDPGALPGAKAGDPHLDYELLDTADLPQLESSLQPVSPGRLDVSESGVLMRRRPARRILSQVTMLAFQGDALLEQISVIGGNLTGIFIHRVTPGSAADQMALRPGTQIVMVIRGYSRTWRPKWRPRGTHSTSGSTWPWRAGPKGSCRCIATRSCTSPTPCSRAAAAGMPTA

SEQ ID NO: 92317 - DNA, 2223 bp, Artificial Sequence
  derived and/or modified sequence
atgggcgagctgtgcagaagagacagcgccctgaccgccctggacgaggagaccctgtgggagatgatggagagccacagacacagaatcgtgagatgcatctgccccagcagactgaccccctacctgagacaggccaaggtgctgtgccagctggacgaggaggaggtgctgcacagccccagactgaccaacagcgccatgagagccggccacctgctggacctgctgaagaccagaggcaagaacggcgccatcgccttcctggagagcctgaagttccacaaccccgacgtgtacaccctggtgaccggcctgcagcccgacgtggacttcagcaacttcagcggcctgatggagaccagcaagctgaccgagtgcctggccggcgccatcggcagcctgcaggaggagctgaaccaggagaagggccagaaggaggtgctgctgagaagatgccagcagctgcaggagcacctgggcctggccgagaccagagccgagggcctgcaccagctggaggccgaccacagcagaatgaagagagaggtgagcgcccacttccacgaggtgctgagactgaaggacgagatgctgagcctgagcctgcactacagcaacgccctgcaggagaaggagctggccgccagcagatgcagaagcctgcaggaggagctgtacctgctgaagcaggagctgcagagagccaacatggtgagcagctgcgagctggagctgcaggagcagagcctgagaaccgccagcgaccaggagagcggcgacgaggagctgaacagactgaaggaggagaacgagaagctgagaagcctgaccttcagcctggccgagaaggacatcctggagcagagcctggacgaggccagaggcagcagacaggagctggtggagagaatccacagcctgagagagagagccgtggccgccgagagacagagagagcagtactgggaggagaaggagcagaccctgctgcagttccagaagagcaagatggcctgccagctgtacagagagaaggtgaacgccctgcaggcccaggtgtgcgagctgcagaaggagagagaccaggcctacagcgccagagacagcgcccagagagagatcagccagagcctggtggagaaggacagcctgagaagacaggtgttcgagctgaccgaccaggtgtgcgagctgagaacccagctgagacagctgcaggccgagccccccggcgtgctgaagcaggaggccagaaccagagagccctgccccagagagaagcagagactggtgagaatgcacgccatctgccccagagacgacagcgactgcagcctggtgagcagcaccgagagccagctgctgagcgacctgagcgccaccagcagcagagagctggtggacagcttcagaagcagcagccccgccccccccagccagcagagcctgtacaagagagtggccgaggacttcggcgaggagccctggagcttcagcagctgcctggagatccccgagggcgaccccggcgccctgcccggcgccaaggccggcgacccccacctggactacgagctgctggacaccgccgacctgccccagctggagagcagcctgcagcccgtgagccccggcagactggacgtgagcgagagcggcgtgctgatgagaagaagacccgccagaagaatcctgagccaggtgaccatgctggccttccagggcgacgccctgctggagcagatcagcgtgatcggcggcaacctgaccggcatcttcatccacagagtgacccccggcagcgccgccgaccagatggccctgagacccggcacccagatcgtgatggtggactacgaggccagcgagcccctgttcaaggccgtgctggaggacaccaccctggaggaggccgtgggcctgctgagaagagtggacggcttctgctgcctgagcgtgaaggtgaacaccgacggctacaagagactgctgcaggacctggaggccaaggtggccaccagcggcgacagcttctacatcagagtgaacctggccatggagggcagagccaagggcgagctgcaggtgcactgcaacgaggtgctgcacgtgaccgacaccatgttccagggctgcggctgctggcacgcccacagagtgaacagctacaccatgaaggacaccgccgcccacggcaccatccccaactacagcagatag

SEQ ID NO: 92318 - DNA, 2607 bp, Artificial Sequence
  derived and/or modified sequence
tgacttcaggctcttccttctgcccagctccgtcccacccagcagcccgcagagaaaggaggcagctggcaccacactgggctttggagacactgcggggactgtggaccccaccctgctgcacggagctcctgcaaaagcaaacctgagaaccttgggtcctcccagcgcccagccatgggggaactgtgccgcagggactccgcactcacggcactggacgaggagacactgtgggagatgatggagagccaccgccacaggatcgtacgctgcatctgccccagccgcctcaccccctacctgcgccaggccaaggtgctgtgccagctggacgaggaggaggtgctgcacagcccccggctcaccaacagcgccatgcgggccgggcacttgctggatttgctgaagactcgagggaagaacggggccatcgccttcctggagagcctgaagttccacaaccctgacgtctacaccctggtcaccgggctgcagcctgatgttgacttcagtaactttagcggtctcatggagacatccaagctgaccgagtgcctggctggggccatcggcagcctgcaggaggagctgaaccaggaaaaggggcagaaggaggtgctgctgcggcggtgccagcagctgcaggagcacctgggcctggccgagacccgtgccgagggcctgcaccagctggaggctgaccacagccgcatgaagcgtgaggttagcgcacacttccatgaggtgctgaggctgaaggacgagatgctcagcctctcgctgcactatagcaatgcgctgcaggagaaggagctggccgcctcacgctgccgcagcctgcaggaggagctgtatctactgaagcaggagctgcagcgagccaacatggtttcctcctgtgagctggaattgcaagagcagtccctgaggacagccagcgaccaggagtccggggatgaggagctgaaccgcctgaaggaggagaatgagaaactgcgctcgctgactttcagcctggcggagaaggacattctggagcagagcctggacgaggcgcgggggagccgacaggagctggtggagcgcatccactcgctgcgggagcgggccgtggctgccgagaggcagcgagagcagtactgggaagagaaggaacagaccctgctgcagttccagaagagtaagatggcctgccaactctacagggagaaggtgaatgcgctgcaggcccaggtgtgcgagctgcagaaggagcgagaccaggcgtactccgcgagggacagtgctcagagggagatttcccagagcctggtggagaaggactccctccgcaggcaggtgttcgagctgacggaccaggtctgcgagctgcgcacacagcttcgccagctgcaggcagagcctccgggtgtgctcaagcaggaagccaggaccagggagccctgtccacgggagaagcagcggctggtgcggatgcatgccatctgccccagagacgacagcgactgcagcctcgtcagctccacagagtctcagctcttgtcggacctgagtgccacgtccagccgcgagctggtggacagcttccgctccagcagccccgcgccccccagccagcagtccctgtacaagcgggtggccgaggacttcggggaagaaccctggtctttcagcagctgcctggagatcccggagggagacccgggagccctgccgggagctaaggcaggcgacccacacctggattatgagctcctagacacggcagaccttccgcagctggaaagcagcctgcagccagtctcccctggaaggcttgatgtctcggagagcggcgtcctcatgcggcggaggccagcccgcaggatcctgagccaggtcaccatgctggcgttccagggggatgcattgctggagcagatcagcgtcatcggcgggaacctcacgggcatcttcatccaccgggtcaccccgggctcggcggcggaccagatggccttgcgcccgggcacccagattgtgatggttgattacgaagcctcagagcccttgttcaaggcagtcctggaggacacgaccctggaggaggccgtggggcttctcaggagggtggacggcttctgctgcctgtctgtgaaggtcaacacggacggttataagaggctactccaggacctggaggccaaagtggcgacctcgggggactcattctacatccgggtcaacctggccatggagggcagggccaaaggggagctgcaggtgcattgcaacgaggtcctgcacgtcaccgacaccatgttccagggctgcggctgctggcatgcccaccgcgtgaactcttacaccatgaaggatactgccgcgcacggcaccatccccaactactccaggtgagcagctgcctcgagctcggtgcgtccccagagaggcccacagggaaatggcacccagcctgcctcggcttcctcctcctgcccagcaatagagggtgggcgtggtgagacccccctaaggagggaagcctgccaagatcactgctgaagatgttgtttctttgtgatggatgctttatatattgcaaatgaaatgttcattctagaa

SEQ ID NO: 92319 - DNA, 2223 bp, Artificial Sequence
  derived and/or modified sequence
atgggcgagctctgtcggagagatagcgccctcacagccctcgacgaggagaccctctgggagatgatggaatcacataggcatagaatagtgcggtgtatctgtccttcaagattgactccttacctacgccaggccaaagtcctgtgccagcttgatgaggaagaagtgctgcactcacctcgactgaccaatagcgcaatgagagcggggcacttgctggatctacttaaaactaggggaaaaaatggtgccatagcattcctggagtccctcaagtttcacaaccccgacgtctatacacttgtcaccggtttacagcctgacgtcgactttagtaacttcagcggcctcatggaaaccagcaaactgactgagtgtcttgcaggagcaattgggtcccttcaagaagaactgaaccaagagaagggccaaaaggaggttttgctgcgccgctgtcagcagttgcaggagcacctgggactggccgagaccagagcggagggcttgcaccaattggaggctgaccactcacggatgaaacgagaagtgtcggctcattttcacgaggttctccgtctcaaggatgaaatgctgtccctgtccctccactattcaaatgcccttcaggaaaaagagctcgccgcctcgaggtgtcgctcactgcaggaagaactgtacctgctgaagcaagaactccagcgggcaaacatggtcagcagctgtgaactggaactccaagaacagtccctgaggacagcatccgatcaagaatccggggacgaggaattgaaccgcttgaaggaagagaacgagaagcttcggtctcttacttttagcctggctgaaaaagatatactggagcaatcacttgacgaagcacgcggttcgcgacaggagctggtggagagaatacatagccttcgggaaagagcggtcgccgccgaacgccaaagagaacagtattgggaggagaaggaacaaactctcctgcagtttcaaaagtccaagatggcatgccagttataccgcgaaaaggtaaacgccctacaggcacaagtctgcgagctacaaaaagaaagagaccaagcatactccgctcgtgatagcgcccagcgggagatttcccaaagcctggtagagaaggacagcctgagaaggcaggtgtttgagctcacagaccaggtgtgtgaattacggacccagttgaggcagctccaggccgaacctcccggggtgctaaaacaggaagcccggaccagggagccatgccccagagagaaacagcgcttagtccggatgcacgccatctgtccacgagacgacagcgattgttctctggtgtcatctacagaatcccagctcctctcggatctaagtgctaccagtagtagggagttggtagacagctttcgctcatctagtcctgcccccccatctcagcagtctctgtataagcgagtcgcagaagacttcggagaggagccctggtcctttagctcatgcctagaaatcccggaaggcgaccccggagctttacccggcgcgaaggccggcgatcctcatctcgattatgaactgctggacaccgccgacttgccgcagctggagtcttcgctgcagcctgtatcgccagggcgtctggacgtgtctgagtctggcgtgctgatgcgccggaggcccgcccgtagaattctgagccaggtgacaatgttggctttccaaggggacgctcttctcgaacagattagcgtgatcggcggaaatctgaccggcatctttatccaccgcgttacaccgggctcagctgctgatcagatggccctacggcccggcacccaaatagtgatggtcgactacgaggccagtgaaccattatttaaggccgtgctggaagacaccacactagaggaggctgtgggcctcctcagacgcgttgacggtttctgttgcctgtccgtaaaagtgaacaccgacggctataagcggctgctgcaggatctggaagccaaagtggctacttccggcgactcattctacatccgcgtgaatcttgctatggaggggcgcgctaagggagagcttcaggtccactgtaacgaggtgctccatgtcaccgacactatgttccagggatgcggttgctggcatgcacatagggtaaatagttacacaatgaaggataccgccgcacacggaaccatccctaattactcccggtag

SEQ ID NO: 92320 - DNA, 2223 bp, Artificial Sequence
  derived and/or modified sequence
atgggagagctgtgccggcgggacagcgccctgacagccctggatgaggagaccctgtgggagatgatggagagccaccgccaccgcatcgtgcgctgcatctgccccagccggctgaccccctacctgcggcaggccaaggtgctgtgccagctggatgaggaggaggtgctgcacagcccccggctgaccaacagcgccatgagagctggccacctgctggacctgctgaagacccggggcaagaatggagccatcgccttcctggagagcctgaagttccacaacccagatgtgtacaccctggtgacaggcctgcagccagatgtggacttcagcaacttcagcggcctgatggagaccagcaagctgacagagtgcctggccggggccatcggcagcctgcaggaggagctgaaccaggagaagggccagaaggaggtgctgctgcggcgctgccagcagctgcaggagcacctgggcctggccgagaccagggctgagggcctgcaccagctggaggccgaccacagcaggatgaagcgggaggtgtctgcccacttccacgaggtgctgcggctgaaggatgagatgctgagcctgagcctgcactacagcaatgccctgcaggagaaggagctggccgccagccgctgccgcagcctgcaggaggagctgtacctgctgaagcaggagctgcagagggccaacatggtgagcagctgtgagctggagctgcaggagcagagcctgaggacagccagtgaccaggagagcggagatgaggagctgaaccggctgaaggaggagaatgagaagctgcggagcctgaccttcagcctggccgagaaggacatcctggagcagagcctggatgaggcccggggcagccggcaggagctggtggagcgcatccacagcctgcgggagagagctgtggccgctgagcggcagcgggagcagtactgggaggagaaggagcagaccctgctgcagttccagaagagcaagatggcctgccagctgtaccgggagaaggtgaatgccctgcaggcccaggtgtgtgagctgcagaaggagcgggaccaggcctacagcgcccgggacagcgcccagcgggagatcagccagagcctggtggagaaggacagcctgcggcggcaggtgtttgagctgacagaccaggtgtgtgagctgcggacccagctgcggcagctgcaggccgagcccccaggagtgctgaagcaggaggcccggacccgggagccctgcccccgggagaagcagaggctggtgaggatgcacgccatctgccccagagatgacagcgactgcagcctggtgagcagcacagagagccagctgctgagtgacctgagcgccaccagcagccgggagctggtggacagcttccgcagcagcagccctgccccacccagccagcagagcctgtacaagagggtggccgaggactttggagaggagccctggagcttcagcagctgcctggagatccctgagggggaccccggggccctgcccggggccaaggccggggacccccacctggactatgagctgctggacacagctgacctgccccagctggagagcagcctgcagcctgtgtccccaggccgcctggatgtgtctgagagcggcgtgctgatgagaagaagacctgcccggcgcatcctgagccaggtgaccatgctggccttccagggagatgccctgctggagcagatcagcgtcatcggcggcaacctgaccggcatcttcatccaccgggtgaccccaggcagcgctgctgaccagatggccctgcggcccggcacccagatcgtgatggtggactatgaggccagcgagcccctcttcaaggctgtgctggaggacaccaccctggaggaggccgtgggcctgctgcggcgggtggatggcttctgctgcctgtctgtgaaggtgaacacagatggctacaagaggctgctgcaggacctggaggccaaggtggccaccagcggggacagcttctacatccgggtgaacctggccatggagggccgggccaagggggagctgcaggtgcactgcaatgaggtgctgcacgtgacagacaccatgttccagggctgcggctgctggcacgcccaccgggtgaacagctacaccatgaaggacacagctgcccacggcaccatccccaactacagcaggtag

SEQ ID NO: 92321 - DNA, 2223 bp, Artificial Sequence
  derived and/or modified sequence
atgggcgagctgtgccggcgggacagcgccctgaccgccctggacgaggaaacattgtgggagatgatggaatctcatcgacacagaatcgtgcggtgcatttgccccagcaggctaacaccgtacctgaggcaagccaaggtcctctgtcagctggacgaggaagaggtcctgcactctcctagactgacgaattccgcaatgagagctggtcacctgctcgacctgctcaagacacgggggaaaaatggtgccattgccttcctggagtccctaaagtttcataatcccgacgtttataccctggttacaggattgcaacccgacgtcgactttagcaacttctccggtcttatggagacctcaaagctgacagaatgccttgccggggcaattggttctctgcaagaagaactcaatcaggaaaaggggcagaaagaagtgctattacgtcgttgccagcagttacaagaacatttggggttagctgagacacgcgcagagggattgcaccagcttgaggcagatcattccaggatgaagagagaagtatcagcccactttcatgaagtacttcgcttgaaagacgaaatgctctctctgtccctccactacagcaatgccttacaggagaaggagctggcagcctcaagatgtcgaagcttacaagaagaactgtatctgctgaagcaggagttacaaagggcgaacatggtgagcagctgtgagctcgaattgcaggaacagagcctgcggacagcatccgatcaagaatcgggcgatgaagagcttaacaggctgaaggaggagaacgagaaattgcgttcactgactttctcccttgccgaaaaggacattctcgagcagtcattagatgaggcgcgcggctccagacaggagctggttgaacggatccatagtttgcgtgagagggcggtagctgcagagcgacagcgagaacagtactgggaggagaaggagcaaacactgctccagttccagaagagcaaaatggcctgtcagttgtacagggagaaagtcaacgccctccaagcccaggtctgtgagctgcagaaagagcgcgaccaggcctactccgctcgcgactccgcacaacgtgagatctctcagtccctggtggaaaaagatagcctgcggaggcaggtgttcgaattgacagaccaggtctgcgagctccggacacagctgcgccagctgcaagcggagccccccggagtgttaaagcaggaggcgagaacccgggagccatgccccagagagaagcagcgtctggttcgcatgcatgccatttgccccagggatgacagcgattgttccctcgtgtcgagcactgaaagccaactcctctctgatttgtcagctacatcctcacgtgagctggtggacagctttaggtcatcttcacccgccccacccagccagcagagtctgtacaagcgggtggccgaggatttcggcgaagagccatggagcttttcttcttgcctggagatccccgaaggggatccaggagcattgcccggcgcaaaagcaggggatcctcacctcgactacgagcttctggataccgccgatttgccacagctggagtcgtctctgcagcccgtgagcccgggtagactggatgtgagcgaatccggcgttctcatgcggaggagaccagcccggagaatcttgagccaggtcacaatgctggcctttcagggagatgccctcctggagcagattagtgttatcggcggaaacctcacaggaatttttattcatagagtgacccccggttcagccgcggaccagatggccctgcggccaggaacccagatcgtcatggttgattacgaagcctctgagcctctcttcaaagccgtattggaagacaccaccctggaagaagcggtgggtctgctgaggagggtggacggattctgttgtctgtccgtgaaagtgaacaccgatggttataagcgcctcctgcaagacctggaagccaaggttgctacttctggagacagtttctacattcgcgtgaacctggccatggaagggcgcgcaaagggggaactgcaggtccactgtaatgaggtgctgcacgtgactgatacgatgttccaggggtgtggatgctggcatgctcatcgtgtgaatagttatacaatgaaagacaccgccgcccatggcaccattccgaactattccagatag

SEQ ID NO: 92322 - DNA, 2223 bp, Artificial Sequence
  derived and/or modified sequence
atgggcgaactgtgtaggcgggatagtgccctgacagctctcgacgaggaaaccttgtgggaaatgatggagagtcatcgtcatcgcattgttaggtgcatttgtccaagcaggcttaccccctatttgaggcaggccaaggttttgtgccagctagacgaagaggaagtgctgcactccccgcgactcaccaactccgccatgagggcagggcatctgctggacctgctcaagacgcgcggtaagaatggtgccatcgccttcctcgagagtctgaaattccataacccggacgtgtacacactcgtcaccggattgcaaccagatgtggatttcagcaatttctctggcctgatggaaacctctaagctgacagagtgtctggctggcgctattggaagtctccaggaggagttgaatcaggaaaagggtcagaaagaggtcctcttgcgcaggtgtcagcaactacaagaacatttaggacttgctgaaacccgggcagagggcctgcatcagctagaggctgaccattctaggatgaagcgggaagtgagcgcccactttcatgaagtcctgaggctcaaggacgagatgctcagcctgtctctccactactctaatgctcttcaagaaaaagaattagccgcatcaaggtgccgatcacttcaagaggaactgtacctcctgaagcaggaactgcaaagagccaatatggtctcgtcctgtgagctcgaactgcaagaacagtctttacgaaccgccagtgatcaggaaagtggggacgaggaactgaatagactgaaggaggagaacgagaagctccgaagcttaactttctcattggcagagaaggatatcctcgagcagtcccttgacgaggctcgcggatcacgacaggaattggtggagagaattcactccctccgggagcgcgctgtggccgcagagcgtcaacgggaacagtactgggaggaaaaagagcagaccctgttacagttccagaaatccaagatggcctgccagctttaccgagagaaagtaaacgccctccaggcacaggtttgcgaactacagaaggagagagatcaggcctattccgcaagggatagcgcccaaagagaaataagtcagtctctggttgagaaggattccctgcggagacaagtattcgaactgaccgatcaggtctgcgagctgagaactcagctccgacaattgcaagctgagccgcctggcgttttgaaacaggaggcaagaaccagagagccctgcccgagagagaaacagagactggtacgcatgcacgcaatatgccctagggacgattccgactgcagcctcgtaagttcaaccgaaagccagcttctgagcgacctgtctgctacgtcatcccgggagctggtggacagcttcaggtcatcctctcctgcccctcctagccagcagtctctgtataagagggtcgccgaggacttcggcgaggaaccgtggtcattttcatcatgtttggagattcccgagggggaccccggtgccctgcctggcgctaaggcaggcgacccgcacctggattacgaactgcttgacacggccgatttgccccagctggaaagttcgctccaacccgtctctcctggcagactggacgtgtctgaatcaggggtcctgatgcgacgacggcctgcacggagaattctcagccaggttacaatgttggccttccaaggggatgccttgctagaacagatttcagtgattggaggaaatctgaccggcattttcattcatcgggtgacacctggatccgccgctgatcagatggcccttaggccgggaacacagattgtgatggtggactatgaagcctctgagccactgttcaaagcagtgctggaggatacaacactcgaggaggcagtaggcctcctgcgtcgcgtcgacggattttgctgtctgtccgttaaggtgaacaccgatggctacaagcgcctgctgcaggacctggaagcaaaggttgccacttcgggagactctttttatatacgggtgaatctggctatggagggaagggctaagggcgaactgcaagttcactgcaatgaggtgctccacgtgacagacaccatgtttcagggttgcggttgctggcatgctcaccgcgtcaattcttacaccatgaaagataccgccgcacatggcaccattcccaactactctcgctag

SEQ ID NO: 92323 - protein, 924 aa, Artificial Sequence
  derived and/or modified sequence
MFSQQQQQQLQQQQQQLQQLQQQQLQQQQLQQQQLLQLQQLLQQSPPQAPLPMAVSRGLPPQQPQQPLLNLQGTNSASLLNGSMLQRALLLQQLQGLDQFAMPPATYDTAGLTMPTATLGNLRGYGMASPGLAAPSLTPPQLATPNLQQFFPQATRQSLLGPPPVGVPMNPSQFNLSGRNPQKQARTSSSTTPNRKDSSSQTMPVEDKSDPPEGSEEAAEPRMDTPEDQDLPPCPEDIAKEKRTPAPEPEPCEASELPAKRLRSSEEPTEKEPPGQLQVKAQPQARMTVPKQTQTPDLLPEALEAQVLPRFQPRVLQVQAQVQSQTQPRIPSTDTQVQPKLQKQAQTQTSPEHLVLQQKQVQPQLQQEAEPQKQVQPQVQPQAHSQGPRQVQLQQEAEPLKQVQPQVQPQAHSQPPRQVQLQLQKQVQTQTYPQVHTQAQPSVQPQEHPPAQVSVQPPEQTHEQPHTQPQVSLLAPEQTPVVVHVCGLEMPPDAVEAGGGMEKTLPEPVGTQVSMEEIQNESACGLDVGECENRAREMPGVWGAGGSLKVTILQSSDSRAFSTVPLTPVPRPSDSVSSTPAATSTPSKQALQFFCYICKASCSSQQEFQDHMSEPQHQQRLGEIQHMSQACLLSLLPVPRDVLETEDEEPPPRRWCNTCQLYYMGDLIQHRRTQDHKPPTPRRDVFAHVPVQGWSTARLVTDMIAKQSLRPFCTVCNRYFKTPRKFVEHVKSQGHKDKAKELKSLEKEIAGQDEDHFITVDAVGCFEGDEEEEEDDEDEEEIEVEEELCKQVRSRDISREEWKGSETYSPNTAYGVDFLVPVMGYICRICHKFYHSNSGAQLSHCKSLGHFENLQKYKAAKNPSPTTRPVSRRCAINARNALTALFTSSGRPPSQPNTQDKTPSKVTARPSQPPLPRRSTRLKT

SEQ ID NO: 92324 - DNA, 2775 bp, Artificial Sequence
  derived and/or modified sequence
atgttcagtcaacagcaacagcagcagttacaacagcagcagcagcagctgcagcaacttcagcagcaacagcttcagcaacagcagttgcagcagcagcagttgctccagctgcagcaactgctccaacagtcccccccacaggctcctttaccaatggcagttagccggggcctgccgcctcaacagccacaacaacccctgttgaacctccagggaacaaattccgcctctttgcttaatggttcaatgctccagcgagccctgcttctgcagcaacttcagggcctggatcagtttgctatgcctccggctacatatgataccgcgggtctaacaatgccaactgcgactctggggaacttgagaggttacggcatggcgagccccgggctggccgccccctcactgacacccccccaactcgccactcccaacctgcagcaattctttccccaggctacccgacagtctctgcttgggccaccacccgtcggtgtgccgatgaatccctcccaatttaatttgagcggaaggaatcctcagaaacaggccaggacgtccagttccaccacccctaaccggaaggatagtagtagtcagacaatgccagtggaggataaaagtgatccacccgagggatcagaggaagccgccgagccgaggatggacacccctgaagatcaggacctcccaccttgtcctgaagacattgccaaggaaaaacgaacaccagcaccagagcccgagccatgtgaggctagtgaacttccggcaaagcgcctcagatccagcgaggaaccgactgagaaggaaccaccaggacagcttcaggtcaaggctcagccgcaggcccgcatgaccgtgcccaaacagacacagacacccgacttacttcccgaggcactggaggctcaggttctgcctcggtttcaacccagggtgcttcaagtgcaggcgcaagtgcaatctcaaacccaaccccgtattcctagtaccgacacacaagttcaaccaaagctgcagaaacaggctcagacacagacaagcccggagcacctggttctccagcagaagcaggtccagccacagctgcagcaggaagcagagccccagaaacaggtgcaaccacaggtacaaccacaggcgcactcccaagggcctaggcaggtccaactgcagcaagaggcagagccgttgaagcaagtccagcctcaagtgcagccccaggcacactcccagccgccccggcaggtccagctgcaactccagaagcaggtgcagacacagacctatccacaggtccatacccaggctcaacctagtgtgcagccccaggagcatccccccgctcaggtctccgtgcaacctccagagcaaacgcacgaacagcctcatacacagcctcaggtgagcctgctggcccctgaacaaacaccggtggtcgtccacgtctgcggattagaaatgccgcctgatgcggttgaggccgggggcggtatggagaaaactctgcctgagcccgtgggcacccaggtgtctatggaggagattcagaacgagtccgcctgcggcctcgacgtaggggagtgcgagaacagggctcgggagatgcctggggtctggggcgctggcggctctttaaaggtcaccattctccagtctagcgattcccgcgccttctccacagtaccccttacacctgtgccaaggccttccgacagcgtcagctccacgccagcagccacttccaccccctctaaacaggctctgcagtttttttgctatatctgcaaggcctcttgctcatcacaacaggagttccaggatcacatgtcagagcctcagcatcagcagcgcctgggggagattcagcacatgtcgcaagcatgcctcctcagtcttttgccagtgcccagggacgtcctggaaaccgaagatgaggaacccccccctaggagatggtgcaacacatgccaactctattatatgggagatcttattcagcacaggcgcactcaggaccataagcccccaaccccaagaagggacgtgttcgcacatgtgcctgtgcagggatggtccaccgctcggctggtcacagacatgatcgccaaacagtcactgaggcctttctgtacggtgtgtaacaggtattttaaaacacctcggaaatttgttgagcatgtaaagtctcaaggtcacaaggataaggccaaggagcttaagagcctggagaaggaaatcgccgggcaggacgaggatcatttcattactgtagatgctgtgggatgcttcgagggtgacgaggaagaggaggaggatgatgaagatgaagaagagatcgaggtggaagaggagctgtgtaagcaggttcgttcgcgggatatatcgcgcgaagagtggaaaggaagcgagacatacagccctaacacggcttacggagtcgacttcttggtgcccgtgatgggctacatttgtcgaatttgccacaaattctaccatagcaacagtggagcacagttgtcccattgtaagtcactggggcatttcgaaaacctacaaaagtataaggccgcaaaaaatcccagccctaccactaggcccgttagtcgcaggtgtgccatcaacgcaaggaacgccctcacagccctattcacgagttctggacgccccccctcgcagcccaatacgcaagacaaaacaccaagcaaggtcactgcgaggccctcgcagccacccttgcccagacgctccacccgtctcaaaacctag

SEQ ID NO: 92325 - DNA, 2775 bp, Artificial Sequence
  derived and/or modified sequence
atgttcagccagcagcagcagcagcagctgcagcagcagcagcagcagctgcagcagctgcagcagcagcagctgcagcagcagcagctgcagcagcagcagctgctgcagctgcagcagctgctgcagcagagccccccccaggcccccctgcccatggctgtgtcccggggcctgcccccccagcagccccagcagcccctgctgaacctgcagggcaccaacagcgccagcctgctgaatggctccatgctgcagagggccctgctgctgcagcagctgcagggcctggaccagtttgccatgcccccagccacctatgacacagctggcctgaccatgcccacagccaccctgggcaacctgcggggctacggcatggccagccctggcctggccgcccccagcctgaccccaccccagctggccacccccaacctgcagcagttcttcccccaggccacccggcagagcctgctgggccccccacctgtgggcgtgcccatgaaccccagccagttcaacctgtctggaagaaacccccagaagcaggcccggaccagcagcagcaccacccccaacaggaaggacagcagcagccagaccatgcctgtggaggacaagagtgaccccccagagggcagcgaggaggccgctgagcccaggatggacaccccagaggaccaggacctgcccccctgcccagaggacatcgccaaggagaagaggaccccagcccctgagcctgagccctgtgaggccagcgagctgcctgccaagaggctgcggagcagcgaggagcccacagagaaggagcccccaggccagctgcaggtgaaggcccagccccaggccaggatgacagtgcccaagcagacccagaccccagacctgctgcctgaggccctggaggcccaggtgctgccccgcttccagccccgggtgctgcaggtgcaggcccaggtgcagagccagacccagccccgcatccccagcacagacacccaggtgcagcccaagctgcagaagcaggcccagacccagaccagccctgagcacctggtgctgcagcagaagcaggtgcagccccagctgcagcaggaggccgagccccagaagcaggtgcagccccaggtgcagccccaggcccacagccagggcccccggcaggtgcagctgcagcaggaggccgagcccctgaagcaggtgcagccccaggtgcagccccaggcccacagccagcccccccggcaggtgcagctgcagctgcagaagcaggtgcagacccagacctacccccaggtgcacacccaggcccagcccagcgtgcagccccaggagcaccccccagcccaggtgtctgtgcagcccccagagcagacccatgagcagccccacacccagccccaggtgtccctgctggcccctgagcagacccctgtggtggtgcacgtgtgtggcctggagatgcccccagatgctgtggaggccggcggcggcatggagaagaccctgcctgagcctgtgggcacccaggtgtccatggaggagatccagaatgaaagtgcctgtggcctggatgtgggggagtgtgagaacagagcccgggagatgcctggggtgtggggcgctgggggcagcctgaaggtgaccatcctgcagagcagtgacagccgggccttcagcacagtgcccctgacccctgtgccccggcccagcgacagcgtgagcagcaccccagctgccaccagcacccccagcaagcaggccctgcagttcttctgctacatctgcaaggccagctgcagcagccagcaggagttccaggaccacatgtctgagccccagcaccagcagaggctgggggagatccagcacatgagccaggcctgcctgctgagcctgctgcctgtgcccagagatgtgctggagacagaagatgaggagcccccaccccggcgctggtgcaacacctgccagctgtactacatgggagacctgatccagcacaggaggacccaggaccacaagccacccacccccaggagagatgtgtttgcccacgtgcctgtgcagggctggagcacagcccggctggtgacagacatgattgccaagcagagcctgcggcccttctgcaccgtgtgcaaccgctacttcaagacccccaggaagtttgtggagcacgtgaagagccagggccacaaggacaaggccaaggagctgaagagcctggagaaggagattgctggccaggatgaggaccacttcatcaccgtggatgctgtgggctgctttgaaggagatgaggaggaggaggaggatgatgaagatgaggaggagattgaggtggaggaggagctgtgcaagcaggtgcgcagccgggacatcagccgggaggagtggaagggcagcgagacctacagccccaacacagcctacggcgtggacttcctggtgcctgtgatgggctacatctgccgcatctgccacaagttctaccacagcaacagcggggcccagctgagccactgcaagagcctgggccactttgagaacctgcagaagtacaaggccgccaagaaccccagccccaccaccaggcctgtgagccgccgctgtgccatcaatgccagaaatgccctgacagccctcttcaccagcagcggccggccccccagccagcccaacacccaggacaagacccccagcaaggtgacagcccggcccagccagccccccctgcccaggaggagcacccggctgaagacctag

SEQ ID NO: 92326 - DNA, 2775 bp, Artificial Sequence
  derived and/or modified sequence
atgttcagccagcagcagcagcagcagctgcagcagcagcagcagcagctgcaacagttgcagcagcagcagctgcaacagcagcagctgcagcagcagcagctgctccagctccagcagctcctccagcagagtcccccacaggccccacttccaatggccgtgtctcggggcctccctccgcaacagccacagcagccgctcctgaatctgcagggcaccaacagcgcttctctactgaacgggtccatgctccagagggccctgttgctgcagcaacttcaaggcctggaccagtttgccatgcccccagccacctacgacacggccggtctgaccatgcctaccgccaccttgggcaacctccgcggctatggcatggcttcccctggcctggctgccccctccctgacgcctccgcagttggctaccccaaacttacagcaattctttccacaagctacaagacagagtctgttgggtccccccccggtgggagtaccaatgaatccatcccagttcaaccttagtggacgcaacccacaaaagcaggccagaacctcgagttctacaacccccaaccgtaaagacagtagttctcagacaatgcctgtggaggacaagagcgatccccctgagggaagcgaggaagccgccgagccccggatggacactccagaggatcaagacctgcccccgtgcccagaggacatcgctaaggaaaaacgtacacctgcgccagaacccgagccctgcgaagcttctgagctgccagccaagaggcttcgatcctcagaagagcccacagaaaaggagccacctggccaactccaggtgaaggcacagccacaagccagaatgactgtacccaaacagactcagacgccagacctcctcccagaggccctggaagcacaggtgctgccaagattccagccaagagtgcttcaggtgcaggctcaggtacagagtcagactcagcccagaattccatccaccgatacccaagtgcagcctaagttgcagaaacaggcccagacccagacctcacccgaacacctggtgctgcagcagaagcaagtccaacctcagttgcaacaggaagctgaaccccaaaagcaggtccagccgcaggtgcagccccaagcgcacagccagggtcctcggcaggtgcagttacagcaggaagccgagccgctgaaacaggttcagccgcaggtccagccacaggctcactctcagccaccccgccaggtacagcttcaactccagaagcaagttcagacacagacatatcctcaggtgcatacacaggcgcaaccgagcgtccagccccaggaacatcctcccgcccaggtcagcgttcagcccccggaacaaactcacgagcagccccatacacagcctcaggtctcactgttggccccagaacagacccccgtggtggtccatgtgtgcggacttgagatgcccccagacgctgttgaagcgggcggcgggatggaaaaaactttgcccgagcccgttggcactcaggttagtatggaggagatacaaaacgagagcgcatgtgggttggacgttggggaatgcgaaaacagagcccgggaaatgccaggtgtgtggggggctggaggcagtttgaaagtcaccatcctacaatcgagcgactcgcgcgccttcagcactgtgccactcacccctgtcccacggccctccgatagcgtaagctccacgcccgccgcaactagcacccctagcaaacaggccctccagtttttctgctacatatgtaaggcgtcatgttcctcccagcaggaattccaggaccacatgtccgagccccagcaccaacaacggttgggcgagatacagcatatgagccaggcatgccttctgtccctgctccctgtgccccgcgacgttttggagaccgaggatgaggaacccccaccaagacggtggtgcaacacttgccagttgtattatatgggtgaccttatccagcatagacggactcaggatcacaaaccacctactccaagacgcgacgttttcgctcacgttccagtccaaggatggagtaccgctagactcgtaacagatatgatcgcgaagcagtccctacgccctttctgcactgtgtgtaatcggtacttcaaaacgccccgcaaattcgtcgagcatgttaaatcgcagggtcataaagataaagctaaagagctgaaaagtctggagaaggaaatagcaggccaggatgaggatcatttcattactgtagacgctgtggggtgcttcgagggagatgaagaagaagaggaggatgacgaggacgaggaagagattgaagtggaagaggaactttgcaagcaagtacgatccagagatatcagcagagaagagtggaaaggttccgaaacctactctccaaataccgcttatggagtcgatttcctagtccccgtcatgggctacatttgccgtatatgccataagttttatcacagtaatagtggcgctcagctttcacattgcaaatctttaggccatttcgaaaatctgcagaagtataaggctgccaagaatcccagtccaaccactagacctgtgtcaaggcgttgcgctatcaacgctcggaacgcgctcacagccctgttcacgtctagcgggcggcccccctcccagcctaacacccaggataagacgccatcaaaggttaccgcacgcccaagtcagccaccattgcctaggaggagtacaagactcaaaacttag

SEQ ID NO: 92327 - DNA, 2775 bp, Artificial Sequence
  derived and/or modified sequence
atgttctcacaacagcagcagcaacaacttcaacagcagcagcagcaactccagcagcttcagcagcagcagctgcagcaacagcagttacagcaacagcagctccttcagcttcaacaattgttgcagcagtccccccctcaggcccctttgccaatggctgtatctcgcggtctacccccacaacaacctcaacaaccccttctgaacttacaaggcacaaattccgccagcctccttaatgggtccatgctgcagcgagccctgttgttacagcaactgcagggtctggatcagttcgctatgccaccggcaacatacgataccgcaggtctgaccatgcccaccgcaacactgggaaacttaaggggttatgggatggcttcaccaggtctcgcagctccaagcctcaccccgccacaactggccaccccaaacctgcagcagtttttcccacaggcgactaggcagtcactgctggggcctcctcccgttggggtacccatgaatccaagtcagtttaacctgtccgggagaaatcctcagaaacaggcacggacaagtagttctaccactccaaacaggaaggactcaagctcccagactatgccagtggaagataagagcgaccctcccgaagggagcgaagaggcggctgagccacgcatggatacccccgaggaccaagatctccctccatgccctgaagacatcgcaaaagaaaagcgcaccccagccccagaaccagaaccctgcgaagctagcgagttacccgcaaaacggctgcggagctctgaagagcctacagaaaaggagccacccggacaactccaggttaaggctcagccccaagccagaatgaccgtacctaagcagacgcagactcccgacttactgcccgaagcactggaggcacaggtgttacctaggttccagcctcgagtccttcaagtccaggcgcaggttcagtcccaaacgcaacccagaatccccagtactgacactcaggtgcagccgaaactgcagaaacaggcccagactcagacttcaccagaacatctggtgctgcagcagaagcaagttcaaccgcaacttcagcaggaagccgagccacaaaagcaggtgcagccccaggtacagccgcaggcgcacagccagggccctagacaggtccaattacagcaggaagccgaaccattgaaacaggtccagccacaggtgcagcctcaggcacattcgcaacctccccgacaggtgcagctgcagctgcaaaagcaggttcagactcagacatatccccaggtgcatacgcaggcgcaacccagtgtgcagccacaggagcaccctcccgctcaggtctcagtccagccaccagaacagacacatgagcagccccatacacagccacaggtgtctcttctggctcccgagcaaaccccagttgtggtccatgtctgtggcctcgaaatgccgcctgacgctgtggaagccggaggcggaatggaaaaaacactgcccgagccggttggaactcaagttagtatggaggaaatccagaacgagagcgcttgtgggctggatgtgggtgagtgcgaaaatagagctcgagaaatgcctggagtctggggagccggaggatccttaaaagtcaccatccttcagtcctccgactctagggcattcagtaccgttccactgactccagtgccaagaccttcggatagcgtatccagcacgccagcagcaacatccactcccagtaaacaagccctccagtttttttgctacatctgtaaggcctcttgttcttcccagcaggaatttcaggatcatatgtccgaacctcagcaccagcagcgtctaggcgagattcaacacatgagccaggcctgtctgttatctttgctccctgttcccagggatgtactagagaccgaggacgaggagccgcctcccagacgttggtgtaacacctgccagctatattacatgggggacctgatccagcatcgccgaacccaggaccacaagccgcctacccccagacgcgatgtctttgcacatgtgccagtgcagggctggtcgactgctcgcttggtcaccgacatgattgccaaacagagtttacgacccttttgcacagtgtgtaatcggtatttcaaaactccgaggaaatttgtcgagcacgtcaagagccagggccacaaagacaaggctaaggagcttaaaagccttgagaaagagatcgcaggtcaggacgaggaccactttatcactgtggatgcggtgggttgcttcgagggggatgaggaggaggaggaagacgacgaggacgaagaagagatagaagtagaagaggagctttgtaagcaggtgcgttctagggacattagccgggaagagtggaaaggcagcgaaacttacagccccaacaccgcctacggggtcgacttcctggtgcctgtaatgggctacatctgtagaatatgccacaagttctatcactccaattcaggagcgcagctctcccactgcaagagtttagggcattttgagaatttgcagaaatacaaagctgcaaagaatccttccccaactacaagacccgtgagcagacgatgcgctattaacgccagaaatgccctgacggcgcttttcacgtcctccgggagacctccaagtcagccgaacacccaggacaaaaccccatcaaaggtgacagccaggccaagccagccccctctgccaagaaggtctaccagactgaagacctag

SEQ ID NO: 92328 - DNA, 3154 bp, Artificial Sequence
  derived and/or modified sequence
gataattggcctcgaccctcctcacctactccttccttagccaaatctactgagaaaagacttggagggggactctccctccacccctccgtgggcaaactcctgacggactgtaagaccttggccgccctctcgcctggcctgggtccctcgaatgaatgtacatccgccaactgcgcgccccctctcaccgcagccccgcgcggggccccaggatcgcaggaccgcggcggccgcagggagccaccatgttcagccagcagcagcagcagcagctccagcaacagcagcagcagctccagcagttacagcagcagcagctccagcagcagcaattgcagcagcagcagttactgcagctccagcagctgctccagcagtccccaccacaggccccgttgcccatggctgtcagccgggggctccccccgcagcagccacagcagccgcttctgaatctccagggcaccaactcagcctccctcctcaacggctccatgctgcagagagctttgcttttacagcagttgcaaggactggaccagtttgcaatgccaccagccacgtatgacactgccggtctcaccatgcccacagcaacactgggtaacctccgaggctatggcatggcatccccaggcctcgcagcccccagcctcacacccccacaactggccactccaaatttgcaacagttctttccccaggccactcgccagtccttgctgggacctcctcctgttggggtccccatgaacccttcccagttcaacctttcaggacggaacccccagaaacaggcccggacctcctcctctaccacccccaatcgaaaggattcttcttctcagacaatgcctgtggaagacaagtcagaccccccagaggggtctgaggaagccgcagagccccggatggacacaccagaagaccaagatttaccgccctgcccagaggacatcgccaaggaaaaacgcactccagcacctgagcctgagccttgtgaggcgtccgagctgccagcaaagagattgaggagctcagaagagcccacagagaaggaacctccagggcagttacaggtgaaggcccagccgcaggcccggatgacagtaccgaaacagacacagacaccagacctgctgcctgaggccctggaagcccaagtgctgccacgattccagccacgggtcctgcaggtccaggcccaggtgcagtcacagactcagccgcggataccatccacagacacccaggtgcagccaaagctgcagaagcaggcgcaaacacagacctctccagagcacttagtgctgcaacagaagcaggtgcagccacagctgcagcaggaggcagagccacagaagcaggtgcagccacaggtacagccacaggcacattcacagggcccaaggcaggtgcagctgcagcaggaggcagagccgctgaagcaggtgcagccacaggtgcagccccaggcacattcacagcccccaaggcaggtgcagctgcagctgcagaagcaggtccagacacagacatatccacaggtccacacacaggcacagccaagcgtccagccacaggagcatcctccagcgcaggtgtcagtacagccaccagagcagacccatgagcagcctcacacccagccgcaggtgtcgttgctggctccagagcaaacaccagttgtggttcatgtctgcgggctggagatgccacctgatgcagtagaagctggtggaggcatggaaaagaccttgccagagcctgtgggcacccaagtcagcatggaagagattcagaatgagtcggcctgtggcctagatgtgggagaatgtgaaaacagagcgagagagatgccaggggtatggggcgccgggggctccctgaaggtcaccattctgcagagcagtgacagccgggcctttagcactgtacccctgacacctgtcccccgccccagtgactccgtctcctccacccctgcggctaccagcactccctctaagcaggccctccagttcttctgctacatctgcaaggccagctgctccagccagcaggagttccaggaccacatgtcggagcctcagcaccagcagcggctaggggagatccagcacatgagccaagcctgcctcctgtccctgctgcccgtgccccgggacgtcctggagacagaggatgaggagcctccaccaaggcgctggtgcaacacctgccagctctactacatgggggacctgatccaacaccgcaggacacaggaccacaagccacccacaccacgaagagatgtgtttgcccacgttccagtgcaggggtggagcacagcccggcttgttacagatatgattgccaaacaatccttgcgacccttctgcaccgtttgcaaccgctacttcaaaacccctcgcaagtttgtggagcacgtgaagtcccaggggcataaggacaaagccaaggagctgaagtcgcttgagaaagaaattgctggccaagatgaggaccacttcattacagtggacgctgtgggttgcttcgagggtgatgaagaagaggaagaggatgatgaggatgaagaagagatcgaggttgaggaggaactctgcaagcaggtgaggtccagagatatatccagagaggagtggaagggctcggagacctacagccccaatactgcatatggtgtggacttcctggtgcccgtgatgggctatatctgccgcatctgccacaagttctatcacagcaactcaggggcacagctctcccactgcaagtccctgggccactttgagaacctgcagaaatacaaggcggccaagaaccccagccccaccacccgacctgtgagccgccggtgcgcaatcaacgcccggaacgctttgacagccctgttcacctccagcggccgcccaccctcccagcccaacacccaggacaaaacacccagcaaggtgacggctcgaccctcccagcccccactacctcggcgctcaacccgcctcaaaacctgatagagggacctccctgtccctggcctgcctgggtccagatctgctaatgctttttaggagtctgcctggaaactttgacatggttcatgtttttactcaaaatccaataaaacaaggtagtttggctgtgc

SEQ ID NO: 92329 - DNA, 2775 bp, Artificial Sequence
  derived and/or modified sequence
atgttcagccagcagcagcagcagcagctgcagcagcagcagcagcagctgcagcagctgcagcagcagcagctgcagcagcagcagctgcagcagcagcagctgctgcagctgcagcagctgctgcagcagagccccccccaggcccccctgcccatggccgtgagcagaggcctgcccccccagcagccccagcagcccctgctgaacctgcagggcaccaacagcgccagcctgctgaacggcagcatgctgcagagagccctgctgctgcagcagctgcagggcctggaccagttcgccatgccccccgccacctacgacaccgccggcctgaccatgcccaccgccaccctgggcaacctgagaggctacggcatggccagccccggcctggccgcccccagcctgacccccccccagctggccacccccaacctgcagcagttcttcccccaggccaccagacagagcctgctgggccccccccccgtgggcgtgcccatgaaccccagccagttcaacctgagcggcagaaacccccagaagcaggccagaaccagcagcagcaccacccccaacagaaaggacagcagcagccagaccatgcccgtggaggacaagagcgacccccccgagggcagcgaggaggccgccgagcccagaatggacacccccgaggaccaggacctgcccccctgccccgaggacatcgccaaggagaagagaacccccgcccccgagcccgagccctgcgaggccagcgagctgcccgccaagagactgagaagcagcgaggagcccaccgagaaggagccccccggccagctgcaggtgaaggcccagccccaggccagaatgaccgtgcccaagcagacccagacccccgacctgctgcccgaggccctggaggcccaggtgctgcccagattccagcccagagtgctgcaggtgcaggcccaggtgcagagccagacccagcccagaatccccagcaccgacacccaggtgcagcccaagctgcagaagcaggcccagacccagaccagccccgagcacctggtgctgcagcagaagcaggtgcagccccagctgcagcaggaggccgagccccagaagcaggtgcagccccaggtgcagccccaggcccacagccagggccccagacaggtgcagctgcagcaggaggccgagcccctgaagcaggtgcagccccaggtgcagccccaggcccacagccagccccccagacaggtgcagctgcagctgcagaagcaggtgcagacccagacctacccccaggtgcacacccaggcccagcccagcgtgcagccccaggagcacccccccgcccaggtgagcgtgcagccccccgagcagacccacgagcagccccacacccagccccaggtgagcctgctggcccccgagcagacccccgtggtggtgcacgtgtgcggcctggagatgccccccgacgccgtggaggccggcggcggcatggagaagaccctgcccgagcccgtgggcacccaggtgagcatggaggagatccagaacgagagcgcctgcggcctggacgtgggcgagtgcgagaacagagccagagagatgcccggcgtgtggggcgccggcggcagcctgaaggtgaccatcctgcagagcagcgacagcagagccttcagcaccgtgcccctgacccccgtgcccagacccagcgacagcgtgagcagcacccccgccgccaccagcacccccagcaagcaggccctgcagttcttctgctacatctgcaaggccagctgcagcagccagcaggagttccaggaccacatgagcgagccccagcaccagcagagactgggcgagatccagcacatgagccaggcctgcctgctgagcctgctgcccgtgcccagagacgtgctggagaccgaggacgaggagcccccccccagaagatggtgcaacacctgccagctgtactacatgggcgacctgatccagcacagaagaacccaggaccacaagccccccacccccagaagagacgtgttcgcccacgtgcccgtgcagggctggagcaccgccagactggtgaccgacatgatcgccaagcagagcctgagacccttctgcaccgtgtgcaacagatacttcaagacccccagaaagttcgtggagcacgtgaagagccagggccacaaggacaaggccaaggagctgaagagcctggagaaggagatcgccggccaggacgaggaccacttcatcaccgtggacgccgtgggctgcttcgagggcgacgaggaggaggaggaggacgacgaggacgaggaggagatcgaggtggaggaggagctgtgcaagcaggtgagaagcagagacatcagcagagaggagtggaagggcagcgagacctacagccccaacaccgcctacggcgtggacttcctggtgcccgtgatgggctacatctgcagaatctgccacaagttctaccacagcaacagcggcgcccagctgagccactgcaagagcctgggccacttcgagaacctgcagaagtacaaggccgccaagaaccccagccccaccaccagacccgtgagcagaagatgcgccatcaacgccagaaacgccctgaccgccctgttcaccagcagcggcagaccccccagccagcccaacacccaggacaagacccccagcaaggtgaccgccagacccagccagccccccctgcccagaagaagcaccagactgaagacctag

SEQ ID NO: 92330 - DNA, 1227 bp, Artificial Sequence
  derived and/or modified sequence
atgcaagacgaacaaccatccgactcatttcagggacaagcagcacaaagcggcgtttggaatgacgacagtatgctgggtcccagtcaaaacttcgaggctgaaagcatacaagataatgcacatatggcagaaggtaccggattctatccgagcgagccaatgctatgcagtgagagcgtagaggggcaggtgccgcattcgctggagactttgtaccaatccgctgattgttctgatgccaacgacgccctgattgttctaatacatttactgatgctcgagtcgggatacattccccaaggcacggaagccaaggccctttctatgccggaaaagtggaagctctctggcgtgtacaagcttcaatacatgcacccattgtgtgaaggaagctcagccacactaacctgcgtccccctgggcaatctaatagtcgtgaacgctacactcaaaatcaacaacgagattaggtcagtgaagcggttgcagttgttaccagagtcatttatctgcaaggaaaagctgggcgagaacgtcgctaatatttacaaggatctgcagaaactaagtcgactattcaaagaccaactggtttatccgctcctggcttttactagacaggctctgaatctccccgacgtgtttggactggttgttctaccactcgaactcaaactgagaatatttcggctcttggatgttcgatcagtgctgagtctgtctgccgtgtgcagggatctgtttaccgcctccaatgaccctctcctgtggcgtttcttgtatctgcgcgatttccgtgacaacacagtgcgtgtccaggacacggattggaaggagctatacagaaaacgtcatatccaaagaaaggaatctccgaagggaagattcgtcatgttactgccgagctccacacacacgattcccttttatccaaatcctctgcaccccagacctttcccatcctctcggttgccacccggcatcattggaggggagtatgaccagcgcccgacgctgccatacgttggcgacccaatttcttctttgattcctggacctggtgaaactccctcgcaatttccaccactcaggccccgattcgatcccgtggggcctcttcctgggcccaacccgatcctgcccggccgaggtgggcctaacgatcgattcccttttagacctagccgcggccgacctactgatgggaggttatcttttatgtag

SEQ ID NO: 92331 - DNA, 1227 bp, Artificial Sequence
  derived and/or modified sequence
atgcaggatgagcagcccagcgacagcttccagggccaggccgcccagagcggcgtgtggaatgatgacagcatgctgggccccagccagaactttgaggccgagagcatccaggacaatgcccacatggccgagggcaccggcttctaccccagcgagcccatgctgtgcagcgagagcgtggagggccaggtgccccacagcctggagaccctgtaccagagcgctgactgcagtgatgccaatgatgccctgattgtgctgatccacctgctgatgctggagagcggctacatcccccagggcacagaggccaaggccctgtccatgcctgagaagtggaagctgtctggagtgtacaagctgcagtacatgcaccccctgtgtgagggcagcagcgccaccctgacctgtgtgcccctgggcaacctgattgtggtgaatgccaccctgaagatcaacaatgagatccgctctgtgaagaggctgcagctgctgcctgagagcttcatctgcaaggagaagctgggggagaatgtggccaacatctacaaggacctgcagaagctgagccgcctcttcaaggaccagctggtgtaccccctgctggccttcacccggcaggccctgaacctgcctgatgtgtttggcctggtggtgctgcccctggagctgaagctgcgcatcttccggctgctggatgtgcgctctgtgctgagcctgtctgctgtgtgccgggacctcttcaccgccagcaatgaccccctgctgtggaggttcctgtacctgcgggacttccgggacaacacagtgcgggtgcaggacacagactggaaggagctgtacaggaagaggcacatccagaggaaggagagccccaagggccgctttgtgatgctgctgcccagcagcacccacaccatccccttctaccccaaccccctgcacccccggcccttccccagcagccggctgcccccaggcatcatcggcggggagtatgaccagaggcccaccctgccctacgtgggggaccccatcagcagcctcatccctggccctggagagacccccagccagttcccccccctgcggcccaggtttgatcctgtgggccccctgcccggccccaaccccatcctgcccggccggggcggccccaatgaccgcttccccttccggcccagccggggccggcccacagatggccgcctgtccttcatgtag

SEQ ID NO: 92332 - DNA, 1227 bp, Artificial Sequence
  derived and/or modified sequence
atgcaggacgagcagcccagcgacagcttccagggccaggccgcccaatccggggtatggaacgatgattcaatgcttggcccttcccagaactttgaagctgaatccattcaagacaacgcgcacatggccgagggtactggattctaccccagtgaacctatgctctgctctgagtctgttgaaggccaggtccctcatagcctggagaccctgtaccagagtgccgactgttccgacgccaacgacgccctgatagtcctcatccaccttctcatgctggagtcaggctatattccccaggggacagaggctaaagccctgtcaatgccagaaaagtggaagctgtctggcgtgtacaaactccaatatatgcatcccctgtgtgaaggaagcagcgcgactctcacatgtgtcccgctcgggaatttgattgtcgtgaacgctaccttgaaaatcaataatgagatacggagcgtgaagcgattgcagttactgcctgagagtttcatttgtaaggagaagctgggggaaaatgtggctaatatttacaaggacctccaaaagcttagtagactctttaaagaccagctcgtatatcccttgcttgcgttcactaggcaggcccttaatttaccagacgtctttgggctggtcgtgctcccattggagcttaagctgaggatcttcagactcctggacgtaaggtccgttcttagcctctcagctgtttgtcgggatctgttcaccgcctccaatgacccacttttatggcggtttctgtatctcagagattttcgcgacaacaccgtgcgggtacaagatacagattggaaggagctctaccgcaagcggcatatccagcggaaagaatcgcccaagggacggttcgtaatgctgttgccatcttctactcataccattccattctacccaaatccgctccatcccagacctttcccttcctctcgtctgccccctggcattatcggtggcgagtatgaccagaggcctacactgccctacgtcggagaccccatttcatctctgattccgggacctggagagacaccttctcaattccctccattgcgacctcgcttcgatcctgttggtcccttgccaggtcctaacccaatactgcccggcagaggcggccctaacgatagatttcccttccgtcctagccgcggacgcccaacagacggccggttgagcttcatgtag

SEQ ID NO: 92333 - DNA, 1227 bp, Artificial Sequence
  derived and/or modified sequence
atgcaggatgagcagccatctgatagttttcaggggcaggctgcccagtcgggagtatggaacgatgacagtatgcttggaccgagccagaattttgaagccgaaagtattcaggacaacgcacatatggccgaggggacgggattctatccatcagagcccatgttgtgttcagaaagcgttgaaggccaggtgccccatagccttgagactctgtatcaatcagccgactgtagcgatgcgaatgacgcgctgattgtactaatccacctgctgatgttggagtctgggtatattccccaggggacggaagctaaggccttgtccatgcccgaaaaatggaagttgtccggggtttacaagctgcagtatatgcaccctctttgcgaaggctcttctgccacgctcacctgtgtgcctctcggcaacctgattgtcgtgaacgctactctgaagatcaacaatgagattagaagtgtcaagcgattacagctcctgccagaaagtttcatctgtaaggagaagctgggagagaatgtggccaatatctataaagatttacagaagctgtccaggctgtttaaggatcagctagtctacccactgctggcatttactcgccaggcactcaatctccctgacgtgtttggactggtggtgcttcccctggaactgaagttacgaattttccggctactcgacgtgcggagtgtgctcagtctgtctgccgtctgtcgcgatcttttcaccgcgagtaacgacccattactgtggagattcttgtacctgagggacttcagagataacactgtgagggtacaggatacggactggaaagagctgtacagaaagaggcacatccagcggaaagaaagccctaagggacgtttcgtcatgctactaccctcttcaacgcacaccatccccttctacccaaaccctttacatcctcgccctttcccatcatcccgtctacccccaggtattatagggggagagtatgatcagcgccctaccctcccatatgttggcgaccctatctcaagtctgatacctggccctggagaaactccttcccagttcccaccactaagacctcggtttgatccagttggtccactgcccggaccaaatcccattctgcccggacgcggaggtccgaatgataggtttccttttcgcccatcaagagggcgaccgacagacggcaggctgagcttcatgtag

SEQ ID NO: 92334 - DNA, 1227 bp, Artificial Sequence
  derived and/or modified sequence
atgcaggacgagcagcccagcgacagcttccagggccaggccgcccagagcggcgtgtggaacgacgacagcatgctgggccccagccagaacttcgaggccgagagcatccaggacaacgcccacatggccgagggcaccggcttctaccccagcgagcccatgctgtgcagcgagagcgtggagggccaggtgccccacagcctggagaccctgtaccagagcgccgactgcagcgacgccaacgacgccctgatcgtgctgatccacctgctgatgctggagagcggctacatcccccagggcaccgaggccaaggccctgagcatgcccgagaagtggaagctgagcggcgtgtacaagctgcagtacatgcaccccctgtgcgagggcagcagcgccaccctgacctgcgtgcccctgggcaacctgatcgtggtgaacgccaccctgaagatcaacaacgagatcagaagcgtgaagagactgcagctgctgcccgagagcttcatctgcaaggagaagctgggcgagaacgtggccaacatctacaaggacctgcagaagctgagcagactgttcaaggaccagctggtgtaccccctgctggccttcaccagacaggccctgaacctgcccgacgtgttcggcctggtggtgctgcccctggagctgaagctgagaatcttcagactgctggacgtgagaagcgtgctgagcctgagcgccgtgtgcagagacctgttcaccgccagcaacgaccccctgctgtggagattcctgtacctgagagacttcagagacaacaccgtgagagtgcaggacaccgactggaaggagctgtacagaaagagacacatccagagaaaggagagccccaagggcagattcgtgatgctgctgcccagcagcacccacaccatccccttctaccccaaccccctgcaccccagacccttccccagcagcagactgccccccggcatcatcggcggcgagtacgaccagagacccaccctgccctacgtgggcgaccccatcagcagcctgatccccggccccggcgagacccccagccagttcccccccctgagacccagattcgaccccgtgggccccctgcccggccccaaccccatcctgcccggcagaggcggccccaacgacagattccccttcagacccagcagaggcagacccaccgacggcagactgagcttcatgtag

SEQ ID NO: 92335 - protein, 352 aa, Artificial Sequence
  derived and/or modified sequence
MAAAVRQDLAQLMNSSGSHKDLAGKYRQILEKAIQLSGAEQLEALKAFVEAMVNENVSLVISRQLLTDFCTHLPNLPDSTAKEIYHFTLEKIQPRVISFEEQVASIRQHLASIYEKEEDWRNAAQVLVGIPLETGQKQYNVDYKLETYLKIARLYLEDDDPVQAEAYINRASLLQNESTNEQLQIHYKVCYARVLDYRRKFIEAAQRYNELSYKTIVHESERLEALKHALHCTILASAGQQRSRMLATLFKDERCQQLAAYGILEKMYLDRIIRGNQLQEFAAMLMPHQKATTADGSSILDRAVIEHNLLSASKLYNNITFEELGALLEIPAAKHEKPCQRGISRSNHFVSK

SEQ ID NO: 92336 - DNA, 1059 bp, Artificial Sequence
  derived and/or modified sequence
atggccgccgccgtgagacaggacctggcccagctgatgaacagcagcggcagccacaaggacctggccggcaagtacagacagatcctggagaaggccatccagctgagcggcgccgagcagctggaggccctgaaggccttcgtggaggccatggtgaacgagaacgtgagcctggtgatcagcagacagctgctgaccgacttctgcacccacctgcccaacctgcccgacagcaccgccaaggagatctaccacttcaccctggagaagatccagcccagagtgatcagcttcgaggagcaggtggccagcatcagacagcacctggccagcatctacgagaaggaggaggactggagaaacgccgcccaggtgctggtgggcatccccctggagaccggccagaagcagtacaacgtggactacaagctggagacctacctgaagatcgccagactgtacctggaggacgacgaccccgtgcaggccgaggcctacatcaacagagccagcctgctgcagaacgagagcaccaacgagcagctgcagatccactacaaggtgtgctacgccagagtgctggactacagaagaaagttcatcgaggccgcccagagatacaacgagctgagctacaagaccatcgtgcacgagagcgagagactggaggccctgaagcacgccctgcactgcaccatcctggccagcgccggccagcagagaagcagaatgctggccaccctgttcaaggacgagagatgccagcagctggccgcctacggcatcctggagaagatgtacctggacagaatcatcagaggcaaccagctgcaggagttcgccgccatgctgatgccccaccagaaggccaccaccgccgacggcagcagcatcctggacagagccgtgatcgagcacaacctgctgagcgccagcaagctgtacaacaacatcaccttcgaggagctgggcgccctgctggagatccccgccgccaagcacgagaagccctgccagagaggcatcagcagaagcaaccacttcgtgagcaagtag

SEQ ID NO: 92337 - DNA, 1059 bp, Artificial Sequence
  derived and/or modified sequence
atggctgcagccgtgcggcaggatctggcccaactcatgaacagttctgggagccataaagacttggctggaaagtatcgccagattctggaaaaggccattcagctgagtggagccgaacagcttgaggcactgaaggcattcgttgaagctatggtcaatgagaacgtctcattagtcatcagcaggcaacttttaactgacttctgtacacacctgccaaacctgcctgattccactgccaaagagatctatcatttcacactggagaagattcagccacgtgtcattagtttcgaagagcaggtcgcctctatcagacagcatctggcttctatctacgaaaaggaggaagactggagaaatgccgcgcaggttctcgtcgggataccactagaaaccggtcaaaaacaatacaacgttgactacaaactggagacgtacctcaaaatcgccagattgtacctggaggacgacgaccccgtacaggcagaggcatacattaacagagcttcattacttcaaaatgaatccacaaacgagcagctgcagatccactacaaggtatgctacgcccgcgtcctagactaccgccgcaaattcatagaagccgcccagagatacaatgagctctcatacaaaaccatcgtgcacgagtctgagcgcctcgaagccctgaaacatgcactccactgtaccatcctggccagcgcgggccagcagcgtagtcgtatgctcgctacgcttttcaaggacgaaaggtgccagcagctggcggcttatggtattctcgaaaagatgtatcttgacaggataatccgcggtaaccagctacaggagttcgcggcaatgctcatgcctcaccagaaggccacaacagccgatgggagtagtattttggatagggccgtcatcgaacacaacctgctaagtgcgtctaagttgtacaacaatattactttcgaagagctgggtgctctgctggagatcccggctgccaagcacgagaagccttgtcagcgggggatcagccggtcaaatcactttgtatctaaatag

SEQ ID NO: 92338 - DNA, 1059 bp, Artificial Sequence
  derived and/or modified sequence
atggctgctgctgtgcggcaggacctggcccagctgatgaacagcagcggcagccacaaggacctggccggcaagtaccggcagatcctggagaaggccatccagctgtctggagctgagcagctggaggccctgaaggcctttgtggaggccatggtgaatgaaaatgtgtccctggtgatcagccggcagctgctgacagacttctgcacccacctgcccaacctgcctgacagcacagccaaggagatctaccacttcaccctggagaagatccagcccagggtcatcagctttgaggagcaggtggccagcatccggcagcacctggccagcatctatgagaaggaggaggactggagaaatgctgcccaggtgctggtgggcatccccctggagaccggccagaagcagtacaacgtggactacaagctggagacctacctgaagatcgcccggctgtacctggaggatgatgatcctgtgcaggccgaggcctacatcaacagagccagcctgctgcagaatgaaagcaccaatgagcagctgcagatccactacaaggtgtgctacgcccgggtgctggactacagaaggaagttcatcgaggccgcccagcgctacaatgagctgagctacaagaccatcgtgcatgagagcgagcggctggaggccctgaagcacgccctgcactgcaccatcctggccagcgctggccagcagaggagcaggatgctggccaccctcttcaaggatgagcgctgccagcagctggccgcctacggcatcctggagaagatgtacctggaccgcatcatccggggcaaccagctgcaggagtttgctgccatgctgatgccccaccagaaggccaccacagcagatggcagcagcatcctggacagagctgtgattgagcacaacctgctgagcgccagcaagctgtacaacaacatcacctttgaggagctgggcgccctgctggagatcccagctgccaagcatgagaagccctgccagaggggcatcagccgcagcaaccactttgtgtccaagtag

SEQ ID NO: 92339 - DNA, 1059 bp, Artificial Sequence
  derived and/or modified sequence
atggccgccgccgtgcggcaggacctggcccagctgatgaacagctctggtagccataaggatctcgcagggaaataccggcagattttagaaaaggcgatccagctgtcaggagcggagcagctcgaagctcttaaggccttcgttgaagccatggtgaacgagaacgtgagtctggtgattagtcggcagttactcaccgacttctgcacccacttgcctaatctgccagattccacggccaaggaaatctatcatttcactttagagaagattcaaccccgggtcatcagcttcgaggagcaagtcgcctcaatccggcagcacttagcttctatttatgaaaaagaagaagactggcgtaatgccgctcaggtgcttgtcggcattccgctggagaccggccagaaacaatataatgttgattataagcttgaaacatacctcaagatcgcaagattatacctggaagatgacgatcctgtacaagctgaggcctacattaaccgggcttccctgctgcagaatgaatctacaaacgagcaattgcagatacattacaaagtgtgctacgcccgagtgctggattacagacgcaagttcatcgaggcagcacagcgttacaatgagctatcttataaaactatcgtgcatgaaagcgagaggctcgaggcactcaaacacgctctccactgtacgatattggcttccgccgggcagcagaggtctcggatgttggcaaccctgttcaaagacgaacggtgccagcagcttgcagcatatggtattctcgaaaagatgtacctagacagaatcatcaggggaaaccaattacaggagttcgctgccatgctgatgcctcaccagaaagctacgaccgctgacgggtcctctatattggaccgcgcagtgattgagcataatttgctctccgcctccaagctgtataacaatataacattcgaagaactgggcgcccttctggagattcctgccgctaagcatgaaaaaccttgccaacgagggattagccggtctaaccatttcgttagtaaatag

SEQ ID NO: 92340 - DNA, 1059 bp, Artificial Sequence
  derived and/or modified sequence
atggcagccgcagtgcggcaagatttagcccagcttatgaacagctctggaagtcacaaagatttggcgggtaagtaccgtcagatccttgaaaaagcaattcagctatctggtgccgaacagctagaggctttgaaggcgtttgtagaggctatggtaaacgaaaacgtctctctcgtgatttcaagacagctgctgactgatttttgcacacaccttcccaacttgccagactccacagccaaagagatctaccactttacactagagaaaatccagccacgcgtgattagcttcgaggagcaggtggcctctattaggcagcacctggcaagtatttacgaaaaggaagaagactggcggaatgcagctcaggtcctggtggggatccccctggaaacaggccagaaacagtacaacgtcgattacaagctagagacttacctaaagatcgcgcgattatatcttgaagacgacgacccagttcaagccgaggcttatattaatcgcgcttcattgcttcaaaatgagagcactaacgaacagctgcaaatccactacaaggtgtgttacgctcgcgtcctggactataggcgcaagttcattgaggcagcccagcgctacaacgaactgtcatataaaaccatagtgcacgaatccgagaggctggaagcactaaagcacgctcttcactgtactatccttgcgagtgctggtcagcagagaagccggatgctagccaccctgttcaaggacgagcgctgtcagcagctggccgcttacgggattctggagaagatgtacctggatagaatcattcgaggcaaccagctccaggaattcgcagcaatgcttatgcctcatcaaaaagcaaccaccgcagatggcagttctatccttgacagggccgtgattgaacacaacctgttgtcagccagcaagctgtataacaatatcacattcgaggaactgggggcactgctcgaaattcccgctgcgaaacacgagaaaccatgccagcgagggatcagtcgcagcaaccattttgtgagtaaatag

SEQ ID NO: 92341 - DNA, 2273 bp, Artificial Sequence
  derived and/or modified sequence
attctcctgcctcagcctcccgagttgctgggactacaggggtgcaccacctacgcccggctaatttttttgtatttttagtagagaacggggtttcaccgtgttagccaggatggcctcgatctcttgacctcgtgatccgcccgcctcggctgcccaaagtgctgggattacaggcgtgagccaccgcgcccggccgaaaggggggatattaatcattactccaggacgacagagggaaaatcgctttgtactggacaaactggaatgtctgaccaaccattataaagtgcacggagtgggaggaggaatagggacattttaattgtatttctaaaaagtatcttctgtggtgaatcggaaacaaaactcattctttaccacaggcagtttaagcgctgcctgaaagatcgaaggacggtaaaccacagacgtgagaaacggaactttgcgaaaacgcagtcgttttatgtaccggctactcattggagttacaccagagactcactactggagttcatcagccaatccaaagtccaagcgtgagagccagagcctgtaggagagacctgggcaggcctcagacctgaggagtggagctccgcatcactcaaccctgggggcggagctagcccaggctcccacacccgacgctctggcccacacagacgctactctgtagcatctcaggttccctctggctgcactctggaggaccacactcgttttctttttggctgccagaggcccccgcatccaccgctgagctgggagaaagatggcggcagccgtgcgacaggatttggcccagctcatgaattcgagcggctctcataaagatctggctggcaagtatcgtcagatcctggaaaaagccattcagttatctggagcagaacaactagaagctttgaaagcttttgtggaagcaatggtaaatgagaatgtcagtctcgtgatctcgcggcagttgctgactgatttttgcacacatcttcctaacttgcctgatagcacagccaaagaaatctatcacttcaccttggaaaagatccagcctagagtcatttcatttgaggagcaggttgcttccataagacagcatcttgcatctatatatgagaaagaagaagattggagaaatgcagcccaagtgttggtgggaattcctttggaaacaggacaaaaacagtacaatgtagattataaactggagacttacttgaagattgctaggctatatctggaggatgatgatccagtccaggcagaggcttacataaatcgagcatcgttgcttcagaatgaatcaaccaatgaacaattacagatacattataaggtatgctatgcacgtgttcttgattatagaagaaaattcattgaagctgcacaaaggtacaatgagctctcttacaagacaatagtccacgaaagtgaaagactagaggccttaaaacatgctttgcactgtacgatcttagcatcagcagggcagcagcgttctcggatgctagctactctttttaaggatgaaaggtgccagcaacttgctgcctatgggatcctagagaaaatgtatctagataggatcatcagaggaaatcaacttcaagaatttgctgccatgctgatgcctcaccaaaaagcaactacagctgatggttccagcatcttggacagagctgttattgaacacaatttgttgtctgcaagcaaattatataataatattaccttcgaagaacttggagctcttttagagatccctgcagctaagcacgagaagccctgccaacgtgggataagcagatccaatcactttgtttccaagtgaataaccttttggagaaaattagtcaaacagcaccagaatggacagcacaagccatggaagcccagatggctcagtgaatccttgcagaacttctgtgcacatgacatctttttccatgttgtgcagatcagtttcactatctccaaagcatttgcatcatgaccttatacatttcaatcccttttatgctggattccgtttaaagaagacattattagagcaggaagtacaagcatttaaaatatgtagttcccatatatttcagggtctctgtgtattaagctaactcagatgttttgaaagctttttctttaaacagaggtgaaatatctgtggctaaaaagtttgagatttgtgataactttgtagtcatgtaaaacttaagtgcttcatgcctctccaaatgtggttattctaataaatggagaaatgagcc

SEQ ID NO: 92342 - protein, 524 aa, Artificial Sequence
  derived and/or modified sequence
MMTTLQNKEECGKGPKRIFAPPAQKSYSLLPCSPNSPKEETPGISSPETEARISLPKASLKKKEEKATMKNVPSREQEKKRKAQINKQAEKKEKEKSSLTNAEFEEIVQIVLQKSLQECLGMGSGLDFAETSCAQPVVSTQSDKEPGITASATDTDNANGEEVPHTQEISVSWEGEAAPEIRTSKLGQPDPAPSKKKSNRLTLSKRKKEAQDEKVEKTQGGHEHRQEDRLKKTVQDHSQIRDQQKGEISGFGQCLVWVQCSFPNCGKWRRLCGNIDPSVLPDNWSCDQNTDVQYNRCDIPEETWTGLESDVAYASYIPGSIIWAKQYGYPWWPGMIESDPDLGEYFLFTSHLDSLPSKYHVTFFGETVSRAWIPVNMLKNFQELSLELSVMKKRRNDCSQKLGVALMMAQEAEQISIQERVNLFGFWSRFNGSNSNGERKDLQLSGLNSPGSCLEKKEKEEELEKEEGEKTALRKNLKLPRARPWQPAFQREKKLEQCQRTWAYQRVRGPAPHLRKKSPDTGNP

SEQ ID NO: 92343 - DNA, 1575 bp, Artificial Sequence
  derived and/or modified sequence
atgatgaccaccctgcagaacaaggaggagtgcggcaagggccccaagagaatcttcgccccccccgcccagaagagctacagcctgctgccctgcagccccaacagccccaaggaggagacccccggcatcagcagccccgagaccgaggccagaatcagcctgcccaaggccagcctgaagaagaaggaggagaaggccaccatgaagaacgtgcccagcagagagcaggagaagaagagaaaggcccagatcaacaagcaggccgagaagaaggagaaggagaagagcagcctgaccaacgccgagttcgaggagatcgtgcagatcgtgctgcagaagagcctgcaggagtgcctgggcatgggcagcggcctggacttcgccgagaccagctgcgcccagcccgtggtgagcacccagagcgacaaggagcccggcatcaccgccagcgccaccgacaccgacaacgccaacggcgaggaggtgccccacacccaggagatcagcgtgagctgggagggcgaggccgcccccgagatcagaaccagcaagctgggccagcccgaccccgcccccagcaagaagaagagcaacagactgaccctgagcaagagaaagaaggaggcccaggacgagaaggtggagaagacccagggcggccacgagcacagacaggaggacagactgaagaagaccgtgcaggaccacagccagatcagagaccagcagaagggcgagatcagcggcttcggccagtgcctggtgtgggtgcagtgcagcttccccaactgcggcaagtggagaagactgtgcggcaacatcgaccccagcgtgctgcccgacaactggagctgcgaccagaacaccgacgtgcagtacaacagatgcgacatccccgaggagacctggaccggcctggagagcgacgtggcctacgccagctacatccccggcagcatcatctgggccaagcagtacggctacccctggtggcccggcatgatcgagagcgaccccgacctgggcgagtacttcctgttcaccagccacctggacagcctgcccagcaagtaccacgtgaccttcttcggcgagaccgtgagcagagcctggatccccgtgaacatgctgaagaacttccaggagctgagcctggagctgagcgtgatgaagaagagaagaaacgactgcagccagaagctgggcgtggccctgatgatggcccaggaggccgagcagatcagcatccaggagagagtgaacctgttcggcttctggagcagattcaacggcagcaacagcaacggcgagagaaaggacctgcagctgagcggcctgaacagccccggcagctgcctggagaagaaggagaaggaggaggagctggagaaggaggagggcgagaagaccgccctgagaaagaacctgaagctgcccagagccagaccctggcagcccgccttccagagagagaagaagctggagcagtgccagagaacctgggcctaccagagagtgagaggccccgccccccacctgagaaagaagagccccgacaccggcaacccctag

SEQ ID NO: 92344 - DNA, 1575 bp, Artificial Sequence
  derived and/or modified sequence
atgatgaccaccctgcaaaacaaagaggagtgcggtaaggggcccaaacgaatttttgcccctcccgcccagaaatcttactccctgctcccttgttctccaaattccccaaaggaggagacccctggcatctccagcccagaaacagaggcacggatttcgttgccaaaagcctcattaaagaaaaaggaggagaaggcaactatgaagaatgtgccttcccgggagcaggaaaaaaagagaaaagctcagatcaataagcaggcggagaagaaggaaaaggagaagtcatctctcaccaatgctgagttcgaggagatagtccaaattgtcttgcagaagagtctccaggagtgtctgggtatggggtcagggctggacttcgctgaaactagttgcgcacagcccgtggtgagcacccagtctgataaagagccaggcatcacagcgagtgctaccgataccgataacgcgaatggtgaagaagtgccacacacacaggagatctcagtctcctgggaaggagaggcagcgcccgagattagaacatccaaactcggtcaaccggatcccgcaccatccaagaaaaaatccaacagactgaccctgtccaagcgcaagaaagaagcccaggacgagaaagtggaaaaaactcaggggggccacgaacatcggcaggaggatcgtttaaagaagaccgtccaggaccacagccagatccgtgatcaacagaaaggcgagatttccggcttcgggcaatgtctggtgtgggtgcagtgcagttttcctaactgcggtaagtggcgaaggttgtgtggtaacatcgaccccagcgtactccccgacaactggagctgtgaccagaatactgatgttcagtataacagatgcgatataccagaagaaacctggactgggctcgaatccgatgtcgcatacgccagttatatcccaggctctataatctgggctaagcaatacggctacccttggtggcccggcatgattgaatctgatcctgatctgggtgaatattttttgtttacgtctcacttggactctttgcctagcaagtatcatgttaccttcttcggggagacagtctccagggcatggattcccgtaaacatgctaaagaacttccaggaactcagcctcgaactgagcgttatgaaaaaaaggcggaacgattgcagtcagaagctgggcgtggctctgatgatggcacaggaggctgagcagattagcattcaggaacgagttaatctgtttggattttggagccggttcaacggatctaactcaaacggggagcgcaaggacctgcaacttagtggactaaacagccctggatcatgtttggagaagaaagaaaaggaggaagagttggagaaagaggaaggtgaaaagacagccctgcggaaaaacctgaagttaccacgtgctagaccatggcaacctgcctttcagcgggagaagaaactggagcagtgtcaaagaacttgggcataccagagggttcgtgggcctgcgccacacctcagaaaaaagagccccgatacgggaaacccttag

SEQ ID NO: 92345 - DNA, 1575 bp, Artificial Sequence
  derived and/or modified sequence
atgatgaccaccctgcagaacaaggaggagtgtgggaagggccccaagaggatctttgcccccccagcccagaagagctacagcctgctgccctgcagccccaacagccccaaggaggagaccccaggcatcagcagccctgagacagaggcccgcatcagcctgcccaaggccagcctgaagaagaaggaggagaaggccaccatgaagaatgtgcccagccgggagcaggagaagaagaggaaggcccagatcaacaagcaggccgagaagaaggagaaggagaagagcagcctgaccaatgctgagtttgaggagatcgtgcagatcgtgctgcagaagagcctgcaggagtgcctgggcatgggcagcggcctggactttgctgagaccagctgtgcccagcctgtggtgtccacccagagcgacaaggagcccggcatcacagccagcgccacagacacagacaatgccaatggagaggaggtgccccacacccaggagatctctgtgtcctgggagggggaggccgcccctgagatccgcaccagcaagctgggccagcctgaccctgcccccagcaagaagaagagcaaccggctgaccctgagcaagaggaagaaggaggcccaggatgagaaggtggagaagacccagggcggccacgagcaccggcaggaggaccggctgaagaagacagtgcaggaccacagccagatccgggaccagcagaagggggagatcagcggcttcggccagtgcctggtgtgggtgcagtgcagcttccccaactgtgggaagtggaggcggctgtgtggcaacatcgaccccagcgtgctgcctgacaactggagctgtgaccagaacacagatgtgcagtacaacagatgtgacatccctgaggagacctggacaggcctggagagtgatgtggcctatgccagctacatccctggcagcatcatctgggccaagcagtatggctacccctggtggccaggcatgattgaaagtgaccctgacctgggggagtacttcctgttcaccagccacctggacagcctgcccagcaagtaccacgtgaccttcttcggggagaccgtgtcccgggcctggatccctgtgaacatgctgaagaacttccaggagctgagcctggagctgtctgtgatgaagaagagaagaaatgactgcagccagaagctgggcgtggccctgatgatggcccaggaggccgagcagatcagcatccaggagcgggtgaacctgtttggcttctggagccgcttcaacggcagcaacagcaatggagagaggaaggacctgcagctgagcggcctgaacagccctggcagctgcctggagaagaaggagaaggaggaggagctggagaaggaggagggggagaagacagccctgaggaagaacctgaagctgccccgggcccggccctggcagcctgccttccagcgggagaagaagctggagcagtgccagaggacctgggcctaccagagggtgcggggccctgccccccacctgaggaagaagagcccagacaccggcaacccctag

SEQ ID NO: 92346 - DNA, 1575 bp, Artificial Sequence
  derived and/or modified sequence
atgatgaccaccctgcagaacaaggaggagtgcggcaagggccccaagcgcatatttgcacccccagctcagaagtcctatagcttgctgccatgttcccccaactcacctaaagaagagacacctggcatctcaagccctgaaaccgaagcaaggataagtctgccgaaggcctctctgaagaagaaggaggaaaaggcaacaatgaaaaacgtcccatcacgggaacaagagaaaaagcgcaaagctcagatcaacaaacaggccgaaaagaaggagaaggaaaagtccagcttgacgaacgccgagtttgaagagatcgtacagatagtgttgcagaagtctctgcaagaatgtttgggcatgggctccggattggacttcgccgaaacatcgtgtgcacagcccgtggttagcacgcagtccgataaggaacctgggataacagcttctgctacagacaccgataatgccaatggggaagaagtgcctcacacccaggagataagtgtgtcatgggaaggagaagcagcgcccgagatacgtactagcaagttgggtcaacctgatcctgcccccagcaaaaaaaagagcaaccgtctgacactctccaagagaaaaaaggaagcccaagatgaaaaggtcgagaaaacccagggggggcacgaacacaggcaggaggaccgtctaaaaaagaccgtacaggaccattcacagatccgggaccagcagaaaggggagatcagtgggtttgggcagtgtttggtctgggtgcagtgttcctttccaaactgtggtaagtggcgccggttgtgtggaaatattgacccgagtgtgttgcctgacaattggtcttgcgaccagaacacagatgtccagtacaaccggtgtgatataccagaggagacctggaccggccttgaaagcgatgtcgcctatgcttcatatattcccggtagcattatttgggctaaacagtacggttacccctggtggcctggtatgattgagtcagaccccgatctgggggaatatttcctcttcacgtcccatctcgattcacttccaagcaaatatcacgtcacgttcttcggcgagaccgtgtccagggcctggattcctgtgaatatgttgaagaatttccaggaattgagcttggaactctccgtgatgaagaaacggcgcaacgattgttctcagaaactgggtgtagcactgatgatggcacaagaggcagagcagatttctatccaggaacgggtgaatctgtttggattctggtccagattcaacggctcaaacagcaatggggagcggaaggacctacagctctctgggttaaactctcctggttcctgtctggagaaaaaagagaaggaggaagagctcgagaaagaagagggagaaaagacagcacttagaaagaacctcaaactgccgagggcccgaccatggcagccggcctttcagcgtgaaaaaaaattggagcagtgtcagcggacctgggcctatcaaagagtacgggggccagccccccacctgaggaagaaatctcccgatacaggcaacccctag

SEQ ID NO: 92347 - DNA, 1575 bp, Artificial Sequence
  derived and/or modified sequence
atgatgaccactctgcagaataaggaggagtgtggcaaaggaccgaagaggatattcgcccctcctgcccagaaatcgtattctttgctgccttgttctcccaactctcctaaggaggaaactcccggaattagtagcccagaaaccgaagccagaattagcctgccaaaggcatcactgaagaaaaaggaagaaaaagccaccatgaagaacgtgccttcgcgagagcaagaaaagaaaaggaaagcacagatcaacaagcaagcagaaaaaaaggaaaaagaaaagtcctctcttaccaatgcagaatttgaagagattgttcagatagtactccaaaagtctctgcaggaatgcctaggcatgggaagtggcctggactttgccgagacgagctgcgcacagcccgtggttagcacccagtcagacaaagagccaggcatcaccgcctctgccacggatacagacaatgctaacggtgaggaggtcccgcacactcaggaaatcagtgtatcgtgggaaggcgaagctgccccagaaataaggacatccaaactcggacagccagacccagctccctctaagaagaagagcaacagactgaccctatcgaagcggaagaaagaggcccaggacgagaaggtagagaagacacaaggtgggcacgagcaccggcaggaagatcggctgaagaaaaccgtgcaggatcactctcagataagggatcagcagaagggggagatatctggctttggacagtgtctggtgtgggtgcagtgctcatttcccaactgtgggaaatggaggcggctctgcgggaatattgatccatcagtgttaccagataactggagctgcgatcagaacacagacgtacagtataacagatgtgacatcccagaagagacttggaccgggctcgagtctgatgtggcatatgcatcttacatcccaggatctataatctgggctaagcagtacggatatccgtggtggcccggtatgattgagtcagacccagatctcggagaatactttctctttacgtctcacctggacagtctgccttctaagtaccacgtaacattcttcggcgagacggtgtccagagcttggattcctgtgaacatgttgaaaaattttcaagagctttctcttgaactgagtgtgatgaagaaaagaaggaatgactgtagccaaaaactgggggtagccttaatgatggctcaggaagcagaacaaatctcgatccaggagagggtgaacctgttcggcttctggagtcgtttcaacgggagcaacagtaatggagagcgaaaggacctccagctgagtggcctcaattcaccaggctcttgcttggagaaaaaggagaaagaggaggagttagaaaaggaggagggggaaaaaactgcacttcgaaagaatctgaaactgcccagggctcgaccttggcagccggcatttcagagagagaagaagcttgagcagtgtcagcgaacctgggcctaccagagggtgcgcggacccgcaccacatttgcggaagaagagcccggacacagggaacccgtag

SEQ ID NO: 92348 - DNA, 2110 bp, Artificial Sequence
  derived and/or modified sequence
gagatgcgccgcccggtctccctgccagcggagtgctgggccgaggacagggcggcaggggtgacagtggggtccaggagagtctcaaaatcctaagctttcagtatttgttattgtgaaagaagttaattcacctgaaacagaggaggggcaacctgagttatcagaaagtgacttcctggccttcccttctttactgatcagaggcacacaaagcgtagtttctaagctgaatgatgacaacgttgcagaataaagaagaatgtggaaagggaccaaagagaatctttgccccacctgcacaaaaatcttacagcctgttaccttgtagccctaactcccctaaggaggagaccccggggatcagttccccagagacagaggccaggataagcctgccaaaggccagtttaaagaagaaagaggaaaaagcaaccatgaagaatgttccaagcagggaacaggagaaaaaaagaaaggcacaaatcaacaagcaagcagagaagaaagaaaaggaaaaatcaagtcttaccaatgcagaatttgaggagattgtccagattgttctgcagaagtcccttcaggagtgcttggggatgggatctggccttgattttgcagagacttcttgtgcccagcccgtagtatctacccaatcagacaaggagccaggaattactgcttctgctactgatactgataatgctaatggagaggaggtaccacatactcaagagatttcagtgtcttgggaaggtgaagctgcccctgagataaggacatctaagttaggccagccagatcctgcaccctctaagaagaaatccaatagactcaccttaagcaaaagaaagaaggaagctcaagatgagaaggtggagaaaactcaaggtggacatgagcacagacaggaagaccgactaaagaaaacagttcaggatcattctcagatcagggaccagcaaaaaggagagataagtggttttggtcaatgtctggtctgggtccagtgttccttcccaaactgtgggaaatggaggcggctgtgtgggaacattgacccctcagttctcccagataattggtcctgtgatcagaacacagatgtgcagtataatcgctgtgatattcctgaggagacctggacagggcttgagagtgatgtggcctatgcctcctacatcccaggatccatcatctgggccaagcaatacggttacccctggtggccaggcatgatagaatctgatcctgacttaggggaatattttctttttacttcccatcttgattccctgccgtctaagtaccatgtgacgttttttggagaaacagtttctcgtgcatggatcccagtcaacatgctaaagaacttccaggagctgtccctggagctatcagtcatgaaaaagcgcagaaatgactgcagccagaaactgggggtggccctgatgatggctcaagaggcagaacagatcagcattcaggaacgggttaacttgtttggtttctggagccgattcaacggatctaacagtaatggggaaagaaaagacttacagctctctggtttgaacagcccaggatcctgcttagagaaaaaggagaaagaggaagagttggaaaaggaggaaggagagaaaacagccctaagaaaaaatttaaagctccccagagcaaggccttggcagccagcttttcagagggaaaagaagttagaacagtgccaaagaacctgggcctatcagcgtgtaagggggcctgcccctcatctgcgaaagaagagcccagacaccgggaacccctgacccaggaggctggaagtgtcccccttgaggacgaagcctccagtgacctggacctggagcaactcatggaagatgttgggagagagctggggcagagcggggagctgcagcacagcaacagtgatggcgaggacttccccgtggcgctgtttgggaagtagctggtgctcctctgctccctctttttctcccttctctggggcgcaggagggagaagttgctaagtgctgggtctgttcattggctatgaggttcaaatgtgtgtggtgcagtttctgtgttaataaagcaggttacagtcg

SEQ ID NO: 92349 - protein, 534 aa, Artificial Sequence
  derived and/or modified sequence
MASRCWRWWGWSAWPRTRLPPAGSTPSFCHHFSTQEKTPQICVVGSGPAGFYTAQHLLKRVEALCSQPRVLNSPALSGEGEDLGASQPLSLDPTSCHPVPQQHPQAHVDIYEKQPVPFGLVRFGVAPDHPEVKNVINTFTQTAHSGRCAFWGNVEVGRDVTVPELREAYHAVVLSYGAEDHRALEIPGEELPGVCSARAFVGWYNGLPENQELEPDLSCDTAVILGQGNVALDVARILLTPPEHLERTDITKAALGVLRQSRVKTVWLVGRRGPLQVAFTIKELREMIQLPGARPILDPVDFLGLQDKIKEVPRPRKRLTELLLRTATEKPGPAEAARQASASRAWGLRFFRSPQQVLPSPDGRRAAGVRLAVTRLEGVDEATRAVPTGDMEDLPCGLVLSSIGYKSRPVDPSVPFDSKLGVIPNVEGRVMDVPGLYCSGWVKRGPTGVIATTMTDSFLTGQMLLQDLKAGLLPSGPRPGYAAIQALLSSRGVRPVSFSDWEKLDAEEVARGQGTGKPREKLVDPQEMLRLLGH

SEQ ID NO: 92350 - DNA, 1967 bp, Artificial Sequence
  derived and/or modified sequence
gcttgtgggcgggcccgggcaggagcgggcttgccctgcggagcagtagctaggaacagatccacttgcaggttgctgttcccagccatggcttcgcgctgctggcgctggtggggctggtcggcgtggcctcggacccggctgcctcccgccgggagcaccccgagcttctgccaccatttctccacacaggagaagaccccccagatctgtgtggtgggcagtggcccagctggcttctacacggcccaacacctgctaaagagggtggaagccttgtgttctcagcccagggtcctgaactctcctgctctgtctggggaaggggaggacctgggggcgtcccagcctctctctctcgaccccaccagctgccaccctgttccccagcagcacccccaggcccacgtggacatctacgagaaacagcctgtgccctttggcctggtgcgctttggtgtggcgcctgatcaccccgaggtgaagaatgtcatcaacacatttacccagacggcccattctggccgctgtgccttctggggcaacgtggaggtgggcagggacgtgacggtgccggagctgcgggaggcctaccacgctgtggtgctgagctacggggcagaggaccatcgggccctggaaattcctggtgaggagctgccaggtgtgtgctccgcccgggccttcgtgggctggtacaacgggcttcctgagaaccaggagctggagccagacctgagctgtgacacagccgtgattctggggcaggggaacgtggctctggacgtggcccgcatcctactgaccccacctgagcacctggagagaacggacatcacgaaggcagccctgggtgtactgaggcagagtcgagtgaagacagtgtggctagtgggccggcgtggacccctgcaagtggccttcaccattaaggagcttcgggagatgattcagttaccgggagcccggcccattttggatcctgtggatttcttgggtctccaggacaagatcaaggaggtcccccgcccgaggaagcggctgacggaactgctgcttcgaacggccacagagaagccagggccggcggaagctgcccgccaggcatcggcctcccgtgcctggggcctccgctttttccgaagcccccagcaggtgctgccctcaccagatgggcggcgggcagcaggtgtccgcctagcagtcactagactggagggtgtcgatgaggccacccgtgcagtgcccacgggagacatggaagacctcccttgtgggctggtgctcagcagcattgggtataagagccgccctgtcgacccaagcgtgccctttgactccaagcttggggtcatccccaatgtggagggccgggttatggatgtgccaggcctctactgcagcggctgggtgaagagaggacctacaggtgtcatagccacaaccatgactgacagcttcctcaccggccagatgctgctgcaggacctgaaggctgggttgctcccctctggccccaggcctggctacgcagccatccaggccctgctcagcagccgaggggtccggccagtctctttctcagactgggagaagctggatgccgaggaggtggcccggggccagggcacggggaagcccagggagaagctggtggatcctcaggagatgctgcgcctcctgggccactgagcccagccccagccccggcccccagcagggaagggatgagtgttgggaggggaagggctgggtccgtctgagtgggactttgcacctctgctgatcccggccggccctggcttggaggcttggctgctcttccagcgtctctcctccctcctggggaaggtcgcccttgcgcgcaaggttttagctttcagcaactgaggtaaccttagggacaggtggaggtgtgggccgatctaaccccttacccatctctctactgctggactgtggagggt

SEQ ID NO: 92351 - DNA, 2157 bp, Artificial Sequence
  derived and/or modified sequence
acagatccacttgcaggttgctgttcccagccatggcttcgcgctgctggcgctggtggggctggtcggcgtggcctcggacccggctgcctcccgccgggagcaccccgagtaggagcagggcgcctttggggctggatgggagcgcggggaggcctgcgagcgctgagtaggggtcggagcagagctggggcagggctggagaagggcttctgccaccatttctccacacaggagaagaccccccagatctgtgtggtgggcagtggcccagctggcttctacacggcccaacacctgctaaagggagctccaagctactggctgtgctcctaagacaggaccacatgcagcacgtttgggacagtggcccttagcttgagtcaggcactgagcacagcatctcgtagcatcctcatgacaacctgcaaagcaggtgtcgtgcctcttgcttcacagcagcacccccaggcccacgtggacatctacgagaaacagcctgtgccctttggcctggtgcgctttggtgtggcgcctgatcaccccgaggtgaagaatgtcatcaacacatttacccagacggcccattctggccgctgtgccttctggggcaacgtggaggtgggcagggacgtgacggtgccggagctgcgggaggcctaccacgctgtggtgctgagctacggggcagaggaccatcgggccctggaaattcctggtgaggagctgccaggtgtgtgctccgcccgggccttcgtgggctggtacaacgggcttcctgagaaccaggagctggagccagacctgagctgtgacacagccgtgattctggggcaggggaacgtggctctggacgtggcccgcatcctactgaccccacctgagcacctggagagaacggacatcacgaaggcagccctgggtgtactgaggcagagtcgagtgaagacagtgtggctagtgggccggcgtggacccctgcaagtggccttcaccattaaggagcttcgggagatgattcagttaccgggagcccggcccattttggatcctgtggatttcttgggtctccaggacaagatcaaggaggtcccccgcccgaggaagcggctgacggaactgctgcttcgaacggccacagagaagccagggccggcggaagctgcccgccaggcatcggcctcccgtgcctggggcctccgctttttccgaagcccccagcaggtgctgccctcaccagatgggcggcgggcagcaggtgtccgcctagcagtcactagactggaggtgagtctcatgtttctcaaagacacccccttcccaggcctctgccacccgcctggtgttgcccacactctccccaacagggtgtcgatgaggccacccgtgcagtgcccacgggagacatggaagacctcccttgtgggctggtgctcagcagcattgggtataagagccgccctgtcgacccaagcgtgccctttgactccaagcttggggtcatccccaatgtggagggccgggttatggatgtgccaggcctctactgcagcggctgggtgaagagaggacctacaggtgtcatagccacaaccatgactgacagcttcctcaccggccagatgctgctgcaggacctgaaggctgggttgctcccctctggccccaggcctggctacgcagccatccaggccctgctcagcagccgaggggtccggccagtctctttctcagactgggagaagctggatgccgaggaggtggcccggggccagggcacggggaagcccagggagaagctggtggatcctcaggagatgctgcgcctcctgggccactgagcccagccccagccccggcccccagcagggaagggatgagtgttgggaggggaagggctgggtccgtctgagtgggactttgcacctctgctgatcccggccggccctggcttggaggcttggctgctcttccagcgtctctcctccctcctggggaaggtcgcccttgcgcgcaaggttttagctttcagcaactgaggtaaccttagggacaggtggaggtgtgggccgatctaaccccttacccatctctctactgctggactgtggagggtcaccaggttgggaacatgctggaaataaaacagctgcaacc

SEQ ID NO: 92352 - DNA, 1605 bp, Artificial Sequence
  derived and/or modified sequence
atggcgagccggtgctggcggtggtggggctggtctgcgtggcctcggactcgcctgcctccagccggctccacacccagcttctgtcaccatttctctactcaagaaaagacacctcagatctgtgttgtgggctccggtccagccggtttctatactgctcagcatttgctcaaacgggtagaagccttatgtagccagcccagggtgttgaactcccccgcgctgagcggtgagggggaggatctaggcgcatcccagccgctgtcactcgaccccacaagttgccatcctgtgccccagcagcacccacaggctcacgtcgatatctacgagaagcagccggtgcctttcgggctggtgaggtttggggtcgctccagaccatccggaagtgaaaaacgtgattaacacctttacccagaccgctcatagcggccggtgcgccttttggggcaatgtcgaggtggggagagatgtgacggtacctgagctgcgcgaagcttatcatgccgtggtcctcagctacggagcggaggatcaccgtgcactggagattccaggagaggaattgccaggtgtttgttccgcacgggctttcgtggggtggtataacggcttgcccgagaaccaggaactagagccagatctatcttgtgataccgccgtgatcttgggtcaaggcaatgtggccctggatgtcgcccggatactgctcacgcctcccgaacacctggaaagaaccgacataactaaagccgcattgggtgtgcttcgccagtcccgcgtcaaaaccgtatggctggtgggtcgtcgcgggccactccaagtcgcctttacaattaaggaactccgcgagatgatccaactgccgggcgcgcggcccattctggaccccgtggactttctgggcctccaggacaagattaaagaggtgccaagaccacggaaacggctgacagaactactgctgcgtacagctacggaaaagccaggcccggccgaagccgcccgtcaggcaagcgctagcagggcatggggtctgaggttcttcaggagccctcagcaagttttgcccagtccagacggacggcgagcagccggcgtaagactggcggtgacccggctggaaggggtcgacgaggcaacaagagcagtacccaccggggacatggaggacttgccatgtggcctggtcctctccagcatcgggtacaagagcagacccgtggacccttcagttccatttgattctaagcttggagtgatcccgaatgttgaagggagagtcatggacgtgcctggcctgtactgcagtggatgggtaaaaaggggacccactggggtgattgccaccaccatgactgattcttttctgactggccaaatgcttctgcaggatctgaaagccggtttgctgccttcagggcctcgtcctggctacgccgcgatccaggccctgctgtcttcacgcggggtgcgccccgttagcttctcagactgggaaaagctcgacgccgaagaagtcgccagagggcaaggaaccggcaaaccacgcgaaaaactggtagatccgcaagaaatgctgcgtctgttgggccattag

SEQ ID NO: 92353 - DNA, 1605 bp, Artificial Sequence
  derived and/or modified sequence
atggccagccgctgctggcgctggtggggctggagcgcctggcccaggacccggctgcccccagctggcagcacccccagcttctgccaccacttcagcacccaggagaagaccccccagatctgtgtggtgggcagcggccctgctggcttctacacagcccagcacctgctgaagagggtggaggccctgtgcagccagccccgggtgctgaacagccctgccctgtctggagaaggagaggacctgggcgccagccagcccctgagcctggaccccaccagctgccaccctgtgccccagcagcacccccaggcccacgtggacatctatgagaagcagcctgtgcccttcggcctggtgcgctttggagtggccccagaccaccctgaggtgaagaatgtcatcaacaccttcacccagacagcccacagcggccgctgtgccttctggggcaatgtggaggtgggcagagatgtgacagtgcctgagctgcgggaggcctaccacgctgtggtgctgtcctatggagctgaggaccaccgggccctggagatccctggagaggagctgcccggggtgtgcagcgcccgggcctttgtgggctggtacaacggcctgcctgagaaccaggagctggagccagacctgagctgtgacacagctgtgatcctgggccagggcaatgtggccctggatgtggcccgcatcctgctgaccccacctgagcacctggagaggacagacatcaccaaggccgccctgggcgtgctgcggcagagccgggtgaagacagtgtggctggtgggcagaagaggccccctgcaggtggccttcaccatcaaggagctgcgggagatgatccagctgcccggggcccggcccatcctggaccctgtggacttcctgggcctgcaggacaagatcaaggaggtgccccggcccaggaagaggctgacagagctgctgctgaggacagccacagagaagccaggccctgctgaggccgcccggcaggccagcgccagccgggcctggggcctgcgcttcttccgcagcccccagcaggtgctgcccagcccagatggccggcgggctgctggggtgcggctggccgtgacccggctggagggcgtggatgaggccaccagggctgtgcccaccggggacatggaggacctgccctgtggcctggtgctgagcagcatcggctacaagagcaggcctgtggaccccagcgtgccctttgacagcaagctgggcgtcatccccaacgtggagggccgggtgatggatgtgcccggcctgtactgcagcggctgggtgaagaggggccccactggagtcatcgccaccaccatgacagacagcttcctgaccggccagatgctgctgcaggacctgaaggccggcctgctgcccagcggccccaggcctggctacgccgccatccaggccctgctgagcagccggggcgtgcggcctgtgtccttcagtgactgggagaagctggatgctgaggaggtggcccggggccagggcaccgggaagccccgggagaagctggtggacccccaggagatgctgcggctgctgggccactag

SEQ ID NO: 92354 - DNA, 1605 bp, Artificial Sequence
  derived and/or modified sequence
atggccagccggtgctggcggtggtggggctggagcgcctggcccaggacgcgtttgccccccgctgggagcacaccgagtttttgtcaccatttctctactcaggaaaaaacgccccagatttgtgtcgtgggaagcggtccagctgggttttatacagcgcagcatcttctgaaacgcgtggaagctctgtgctctcaaccaagggtactaaattctcctgcactctctggggaaggcgaagatctcggtgcctcccagcctctctcacttgatccaacctcctgccatccagtccctcagcagcaccctcaggcccacgtggacatttatgaaaaacaaccagttccgtttggtctagttaggttcggtgttgccccggaccatccagaggttaagaatgtgatcaacactttcacgcagacagcccactccggccgatgcgccttttgggggaacgtagaggtcgggcgagatgtgactgtgccagaactgcgggaggcctaccacgctgtggtactctcttacggggctgaggatcatagagctttggaaatcccgggagaggagcttccaggcgtgtgctctgctcgcgcatttgtcggctggtataatggactgcctgagaatcaggagctggagcccgatctgagctgtgacactgcggttattctgggccagggtaacgttgcacttgatgtggccagaattcttctgacccccccagaacacctcgagcgcaccgacatcacaaaagctgccctgggcgtattacggcagtccagagttaaaacagtgtggttagttggtagacgtgggcccctccaggtggctttcactattaaagaactacgggaaatgatccagctgccaggagctcggcctatcctggatccagttgactttcttggactgcaggacaaaatcaaggaagtgcccagacctagaaagcgacttacagagctattgctgcggaccgcaacggagaagcctggacccgccgaagctgcgaggcaggcgagcgcatctcgcgcctggggactgcggttcttccggagtccccagcaggtgcttccctcaccagatggaaggcgcgccgcaggtgtgcggctggcagtgaccaggctggaaggggtggatgaagctacaagggctgtgcccaccggcgatatggaagatcttccctgcggactcgtgctgtcatccattgggtataagagtagaccggttgacccaagcgtaccatttgactcaaaactgggagtaattcccaacgtcgaaggccgggtgatggacgtccccgggctgtattgtagtggatgggtgaagcgtgggccaactggtgtgatcgccacaactatgacagattctttcctaaccggacagatgttgctgcaggatctaaaggcggggctcctcccttctggccctaggccaggttatgccgccatccaggcattgctgtcctcccggggagtgaggcccgtatctttttccgattgggaaaaactggatgcagaggaagtagcaaggggccagggaaccggaaaacccagggagaagctggttgatcctcaggaaatgctccgcttgcttggccactag

SEQ ID NO: 92355 - DNA, 1605 bp, Artificial Sequence
  derived and/or modified sequence
atggcctcaagatgctggagatggtggggttggtctgcgtggcctcggacccgtttgccccctgcaggttccactcctagcttctgccatcacttcagcacgcaagagaaaacacctcagatctgcgtagtggggagcggacctgccggattttacaccgcacagcatttgctcaagcgggttgaggctctttgctctcagcccagggttctgaattccccagccctttcgggcgaaggcgaggatctcggagctagtcagcccctgtcgctggacccaacaagctgccatcccgtaccccaacaacacccacaggcccatgtggacatctacgagaagcagcccgtgcccttcggactagtgaggtttggtgttgcacccgaccacccggaagtgaaaaatgtgataaacaccttcacccagaccgctcattcagggagatgtgctttctggggaaatgttgaagtaggacgtgatgtcacggtaccagagctacgtgaggcataccacgcggtcgtgctgtcttatggggcagaggaccacagagccctggaaattcccggagaggagctgccaggggtctgcagtgctcgcgctttcgtcgggtggtataatggcctccctgagaaccaagaattggaacctgatttgagttgcgatacagcagtgattcttgggcaggggaatgttgcccttgatgttgccagaattctgctgacacctcccgagcacttggaaaggacagatataacaaaagccgctctgggcgtgctgaggcagtccagggtgaagaccgtttggctcgtgggccgtcgtggtcctctgcaggtggcattcaccattaaggaacttcgggagatgatccagctcccgggagcccgaccgattttggaccctgtggactttctgggcctgcaggacaagatcaaggaggtgccaagacccaggaaacggctcacggagcttctgctccggacagccaccgagaaaccaggcccagctgaggcagcccgacaggcctctgcaagcagggcctgggggcttcggttctttaggtccccccagcaggttctcccatctcctgatggacggagagccgctggtgtgagactggcagtgaccaggctggaaggcgtggacgaggccactagagccgtgcccacaggcgacatggaggacctaccatgtgggctggtactgtctagcatcggctacaaatcccggcctgtggacccgagcgttccctttgatagcaagctcggagtgattcctaacgtcgaaggcagagtgatggacgtccccggactttactgctccggatgggtaaagagagggcctaccggggtgatcgccactacgatgaccgatagctttctgacgggtcaaatgcttttgcaggacctgaaggccggtcttctgccaagcggcccaagacccggttacgctgccattcaggcgctgctttcgtcccggggtgtaagacccgtcagttttagcgactgggagaaactagatgctgaagaggtcgctcggggacagggaactggaaagccaagggagaaactcgtcgatccacaggagatgttacgactactcggacactag

SEQ ID NO: 92356 - DNA, 1605 bp, Artificial Sequence
  derived and/or modified sequence
atggccagcagatgctggagatggtggggctggagcgcctggcccagaaccagactgccccccgccggcagcacccccagcttctgccaccacttcagcacccaggagaagaccccccagatctgcgtggtgggcagcggccccgccggcttctacaccgcccagcacctgctgaagagagtggaggccctgtgcagccagcccagagtgctgaacagccccgccctgagcggcgagggcgaggacctgggcgccagccagcccctgagcctggaccccaccagctgccaccccgtgccccagcagcacccccaggcccacgtggacatctacgagaagcagcccgtgcccttcggcctggtgagattcggcgtggcccccgaccaccccgaggtgaagaacgtgatcaacaccttcacccagaccgcccacagcggcagatgcgccttctggggcaacgtggaggtgggcagagacgtgaccgtgcccgagctgagagaggcctaccacgccgtggtgctgagctacggcgccgaggaccacagagccctggagatccccggcgaggagctgcccggcgtgtgcagcgccagagccttcgtgggctggtacaacggcctgcccgagaaccaggagctggagcccgacctgagctgcgacaccgccgtgatcctgggccagggcaacgtggccctggacgtggccagaatcctgctgaccccccccgagcacctggagagaaccgacatcaccaaggccgccctgggcgtgctgagacagagcagagtgaagaccgtgtggctggtgggcagaagaggccccctgcaggtggccttcaccatcaaggagctgagagagatgatccagctgcccggcgccagacccatcctggaccccgtggacttcctgggcctgcaggacaagatcaaggaggtgcccagacccagaaagagactgaccgagctgctgctgagaaccgccaccgagaagcccggccccgccgaggccgccagacaggccagcgccagcagagcctggggcctgagattcttcagaagcccccagcaggtgctgcccagccccgacggcagaagagccgccggcgtgagactggccgtgaccagactggagggcgtggacgaggccaccagagccgtgcccaccggcgacatggaggacctgccctgcggcctggtgctgagcagcatcggctacaagagcagacccgtggaccccagcgtgcccttcgacagcaagctgggcgtgatccccaacgtggagggcagagtgatggacgtgcccggcctgtactgcagcggctgggtgaagagaggccccaccggcgtgatcgccaccaccatgaccgacagcttcctgaccggccagatgctgctgcaggacctgaaggccggcctgctgcccagcggccccagacccggctacgccgccatccaggccctgctgagcagcagaggcgtgagacccgtgagcttcagcgactgggagaagctggacgccgaggaggtggccagaggccagggcaccggcaagcccagagagaagctggtggacccccaggagatgctgagactgctgggccactag

SEQ ID NO: 92357 - protein, 522 aa, Artificial Sequence
  derived and/or modified sequence
MASRCWRWWGWSAWPRTRLPPAGSTPTFGGSDEVRDPANAKALRNKRRRMQVRVKLGKFQLLLDIQEKTPQICVVGSGPAGFYTAQHLLKHPQAHVDIYEKQPVPFGLVRFGVAPDHPEVKNVINTFTQTAHSGRCAFWGNVEVGRDVTVPELREAYHAVVLSYGAEDHRALEIPGEELPGVCSARAFVGWYNGLPENQELEPDLSCDTAVILGQGNVALDVARILLTPPEHLERTDITKAALGVLRQSRVKTVWLVGRRGPLQVAFTIKELREMIQLPGARPILDPVDFLGLQDKIKEVPRPRKRLTELLLRTATEKPGPAEAARQASASRAWGLRFFRSPQQVLPSPDGRRAAGVRLAVTRLEGVDEATRAVPTGDMEDLPCGLVLSSIGYKSRPVDPSVPFDSKLGVIPNVEGRVMDVPGLYCSGWVKRGPTGVIATTMTDSFLTGQMLLQDLKAGLLPSGPRPGYAAIQALLSSRGVRPVSFSDWEKLDAEEVARGQGTGKPREKLVDPQEMLRLLGH

SEQ ID NO: 92358 - DNA, 1809 bp, Artificial Sequence
  derived and/or modified sequence
acagatccacttgcaggttgctgttcccagccatggcttcgcgctgctggcgctggtggggctggtcggcgtggcctcggacccggctgcctcccgccgggagcaccccgacctttgggggttcagatgaagtaagagaccctgcaaatgccaaagccttgaggaacaagagaaggaggatgcaggtgagggtgaagcttgggaagttccagcttctgttggatattcaggagaagaccccccagatctgtgtggtgggcagtggcccagctggcttctacacggcccaacacctgctaaagcacccccaggcccacgtggacatctacgagaaacagcctgtgccctttggcctggtgcgctttggtgtggcgcctgatcaccccgaggtgaagaatgtcatcaacacatttacccagacggcccattctggccgctgtgccttctggggcaacgtggaggtgggcagggacgtgacggtgccggagctgcgggaggcctaccacgctgtggtgctgagctacggggcagaggaccatcgggccctggaaattcctggtgaggagctgccaggtgtgtgctccgcccgggccttcgtgggctggtacaacgggcttcctgagaaccaggagctggagccagacctgagctgtgacacagccgtgattctggggcaggggaacgtggctctggacgtggcccgcatcctactgaccccacctgagcacctggagagaacggacatcacgaaggcagccctgggtgtactgaggcagagtcgagtgaagacagtgtggctagtgggccggcgtggacccctgcaagtggccttcaccattaaggagcttcgggagatgattcagttaccgggagcccggcccattttggatcctgtggatttcttgggtctccaggacaagatcaaggaggtcccccgcccgaggaagcggctgacggaactgctgcttcgaacggccacagagaagccagggccggcggaagctgcccgccaggcatcggcctcccgtgcctggggcctccgctttttccgaagcccccagcaggtgctgccctcaccagatgggcggcgggcagcaggtgtccgcctagcagtcactagactggagggtgtcgatgaggccacccgtgcagtgcccacgggagacatggaagacctcccttgtgggctggtgctcagcagcattgggtataagagccgccctgtcgacccaagcgtgccctttgactccaagcttggggtcatccccaatgtggagggccgggttatggatgtgccaggcctctactgcagcggctgggtgaagagaggacctacaggtgtcatagccacaaccatgactgacagcttcctcaccggccagatgctgctgcaggacctgaaggctgggttgctcccctctggccccaggcctggctacgcagccatccaggccctgctcagcagccgaggggtccggccagtctctttctcagactgggagaagctggatgccgaggaggtggcccggggccagggcacggggaagcccagggagaagctggtggatcctcaggagatgctgcgcctcctgggccactgagcccagccccagccccggcccccagcagggaagggatgagtgttgggaggggaagggctgggtccgtctgagtgggactttgcacctctgctgatcccggccggccctggcttggaggcttggctgctcttccagcgtctctcctccctcctggggaaggtcgcccttgcgcgcaaggttttagctttcagcaactgaggtaacctta

SEQ ID NO: 92359 - DNA, 1569 bp, Artificial Sequence
  derived and/or modified sequence
atggcctcacgatgctggagatggtggggctggtccgcgtggcccagaactagactcccaccagctggaagtactccaacatttggggggagcgatgaagtcagagatccggctaacgccaaggcccttagaaataaacggcgcaggatgcaggtaagagtgaaactgggaaaatttcagttactgcttgacattcaggagaagacgcctcagatttgcgtggtgggtagtgggcccgctggtttttacaccgcccagcatctgctgaagcacccacaggctcacgttgatatctacgagaagcaacctgtaccttttggtctggtgcgtttcggcgtggcccctgaccaccctgaagtcaaaaacgttataaacactttcacccagacagcccactctggacgctgtgctttttggggcaatgttgaggtcggacgcgacgttaccgtccctgagctccgcgaagcctaccatgcagtggtattaagctatggcgcagaagaccatagagcccttgaaatcccgggagaagagctcccaggtgtatgtagcgcacgggcctttgtaggttggtacaatggtctgccagagaatcaggagcttgagcctgatctgtcttgcgatacagcggtcatactgggccagggcaacgtcgccctggatgtagcccgcatcctgctaacccctcctgagcatctcgaacgcacagacataacgaaggccgcccttggtgtcctgaggcaatcaagagtcaagacagtttggctcgtagggcgtcggggtcccctacaggtagcttttaccatcaaagagctgcgggagatgatccagttgcctggtgcacggccaatccttgaccccgttgattttctcggtttgcaggacaaaatcaaggaagtcccacggcctcgcaagagactgacagagctactgctgcgtaccgccactgaaaagcccggacctgccgaggccgcacgccaggcatccgcgtctcgcgcctgggggctgcgcttctttagatccccgcagcaggtcctgcccagcccagatggcagaagagcagcgggagtgcgtcttgcggtgaccagactggagggggttgatgaagccacgagagccgtcccaactggtgacatggaggacctgccgtgtggcctggtactttcaagtataggctataagagccgccccgtggacccgtctgtgcctttcgatagcaagcttggagtgatcccaaacgtggaggggcgagttatggatgtgccaggtctgtactgctcaggatgggtgaagcggggccctacaggcgtgatcgccacaaccatgacggactcgttccttaccggtcagatgctgctccaggatctcaaggcaggcctgcttccaagcggtcctcgacccggttatgccgctatccaggcactgctgagcagtcggggcgttagaccagtttccttctccgattgggaaaagcttgacgcagaagaggtagcccgtggccaaggaacaggtaagcccagggaaaagttagtcgacccccaggagatgctgaggttactgggacactag

SEQ ID NO: 92360 - DNA, 1569 bp, Artificial Sequence
  derived and/or modified sequence
atggccagccgctgctggcgctggtggggctggagcgcctggcccaggacccggctgcccccagctggcagcacccccaccttcggcggcagtgatgaggtgcgggaccctgccaatgccaaggccctgaggaacaagagaagaaggatgcaggtgcgggtgaagctgggcaagttccagctgctgctggacatccaggagaagaccccccagatctgtgtggtgggcagcggccctgctggcttctacacagcccagcacctgctgaagcacccccaggcccacgtggacatctatgagaagcagcctgtgcccttcggcctggtgcgctttggagtggccccagaccaccctgaggtgaagaatgtcatcaacaccttcacccagacagcccacagcggccgctgtgccttctggggcaatgtggaggtgggcagagatgtgacagtgcctgagctgcgggaggcctaccacgctgtggtgctgtcctatggagctgaggaccaccgggccctggagatccctggagaggagctgcccggggtgtgcagcgcccgggcctttgtgggctggtacaacggcctgcctgagaaccaggagctggagccagacctgagctgtgacacagctgtgatcctgggccagggcaatgtggccctggatgtggcccgcatcctgctgaccccacctgagcacctggagaggacagacatcaccaaggccgccctgggcgtgctgcggcagagccgggtgaagacagtgtggctggtgggcagaagaggccccctgcaggtggccttcaccatcaaggagctgcgggagatgatccagctgcccggggcccggcccatcctggaccctgtggacttcctgggcctgcaggacaagatcaaggaggtgccccggcccaggaagaggctgacagagctgctgctgaggacagccacagagaagccaggccctgctgaggccgcccggcaggccagcgccagccgggcctggggcctgcgcttcttccgcagcccccagcaggtgctgcccagcccagatggccggcgggctgctggggtgcggctggccgtgacccggctggagggcgtggatgaggccaccagggctgtgcccaccggggacatggaggacctgccctgtggcctggtgctgagcagcatcggctacaagagcaggcctgtggaccccagcgtgccctttgacagcaagctgggcgtcatccccaacgtggagggccgggtgatggatgtgcccggcctgtactgcagcggctgggtgaagaggggccccactggagtcatcgccaccaccatgacagacagcttcctgaccggccagatgctgctgcaggacctgaaggccggcctgctgcccagcggccccaggcctggctacgccgccatccaggccctgctgagcagccggggcgtgcggcctgtgtccttcagtgactgggagaagctggatgctgaggaggtggcccggggccagggcaccgggaagccccgggagaagctggtggacccccaggagatgctgcggctgctgggccactag

SEQ ID NO: 92361 - DNA, 1569 bp, Artificial Sequence
  derived and/or modified sequence
atggccagccggtgctggcggtggtggggctggagcgcctggcccaggactcggctgccgcctgctggatccactccaacttttggtggttcagacgaggtgagggaccctgccaatgcaaaggctctgcggaataagagacggcggatgcaggtgcgcgtaaaattaggcaagttccagctgctgttagatattcaggaaaaaaccccccagatttgcgtggttgggagcggccctgcagggttctacactgcgcagcacctcctgaagcatccacaagcccatgtcgatatatacgagaagcagcccgtcccgtttggcctggtgcgattcggcgtggcaccagatcacccggaggttaaaaatgttattaatacattcacccagacagctcacagtggccgctgcgcattttgggggaatgtggaggtagggcgcgatgtgaccgttccagaattgcgggaggcttatcatgccgtagtgctgtcttacggagcagaagaccaccgggcgttggagatcccgggagaagaactgcctggagtatgcagtgcgcgggcctttgtgggctggtacaatgggctgcccgaaaatcaagagttggagcctgaccttagctgcgatacggccgtgatccttgggcagggaaacgtggcactcgatgtggcacgaattttgttaaccccacccgaacacttggagcgtaccgatattaccaaggctgccctcggagttctgagacagagtcgagtcaagaccgtgtggctggtgggaaggcgtgggcctctgcaagtggcctttaccattaaagagctgcgcgagatgattcagctgcctggggcgcggcccattctagatccggtggactttctgggtctgcaagataagattaaggaagtgcccaggcctaggaaaagactgaccgagctgttactacggaccgcgaccgaaaagcctggtccggcagaggccgctcggcaggcctcagcctctcgcgcatggggactgaggttttttcggagccctcaacaagtgcttccaagccctgatgggcgccgcgctgcgggggtgcgtctcgccgtcactcggctggagggagttgatgaggcaactagagcggtccccaccggagacatggaagacctgccttgcgggctggttttgagtagcatcgggtacaaaagtagacccgtcgacccgagcgtccctttcgactcaaaattaggggtgatcccaaacgtcgaaggaagggttatggatgttccgggactttattgctctggctgggtgaagcgcgggcctactggggtcatagccaccaccatgactgattcctttctgactggccagatgctgctgcaggacctgaaagcggggcttctcccttcgggcccccgacccggttacgccgctattcaggctctgttgtcatctaggggcgtgcggccagtgtcctttagtgattgggagaagctagacgccgaagaagttgctcggggccagggcaccggcaaaccaagggagaagctggttgacccccaggagatgctgcgcttgctggggcattag

SEQ ID NO: 92362 - DNA, 1569 bp, Artificial Sequence
  derived and/or modified sequence
atggcaagccggtgttggcgatggtgggggtggagtgcatggcccaggaccaggctaccgcctgcgggtagcaccccgaccttcgggggatcggacgaggtccgggacccagctaacgctaaggctctacgtaataagaggaggcgaatgcaggtgcgagttaaactcggtaagttccagctgcttctggatatacaggaaaaaacaccgcagatctgcgtcgttggaagcggacctgctggcttttacacggctcaacacctgttgaagcatccacaggcacacgtggacatctacgaaaaacagcctgttccattcgggttagttcggttcggagtcgctcccgatcacccagaggtgaaaaacgttattaatacctttacacaaactgcacactcggggagatgcgcgttctggggtaacgtggaggtgggcagggatgtaacagttcccgaactgcgggaggcttaccatgctgtcgtgctgagctacggtgccgaggatcatagggctttggagatcccaggagaggaattgcctggagtgtgcagcgctagggcttttgttggttggtacaacggactgcctgaaaatcaggagctggagcccgacctctcttgtgacactgcagttattctagggcaggggaatgtggcattagacgtggctagaatcttgctgaccccgcctgagcacctcgagcgaacggatatcacgaaagccgctttaggagttctgaggcagtcgagagtgaaaacagtgtggctggtgggacggaggggacccctccaggtggcattcaccatcaaagaacttcgcgagatgatccagctccctggtgctaggcctatattggacccagttgacttcctgggattacaggacaaaatcaaagaggtgcccagacccaggaagagactgaccgagcttctgttgcggactgccacagagaaaccgggaccagccgaagctgctaggcaagcaagtgcctctcgagcgtggggactgcgtttctttcggagtcctcagcaggtcctgccctctcccgacgggaggcgggcagccggagtgagattggctgtgactaggctggagggcgtggatgaggctacccgcgcagttcccactggagatatggaggacctaccttgtggcctggtcctgagtagcatcggctataagtctcgcccagttgacccgagcgttccttttgatagcaaactgggagtaattcccaatgttgagggacgcgtcatggatgtaccaggattgtactgcagcggttgggtgaagaggggccctaccggcgtgatcgcgactaccatgactgattcctttttgaccggccaaatgcttttgcaagatctcaaagctggattattaccatcagggcctaggcccggatatgcagctatccaagcacttctttctagccggggtgtccgtcctgtctccttcagtgattgggaaaaactcgacgctgaagaagtcgcaaggggacaggggaccggcaagcctcgggagaaactggtcgatccccaggaaatgcttagacttctgggacactag

SEQ ID NO: 92363 - DNA, 1569 bp, Artificial Sequence
  derived and/or modified sequence
atggccagcagatgctggagatggtggggctggagcgcctggcccagaaccagactgccccccgccggcagcacccccaccttcggcggcagcgacgaggtgagagaccccgccaacgccaaggccctgagaaacaagagaagaagaatgcaggtgagagtgaagctgggcaagttccagctgctgctggacatccaggagaagaccccccagatctgcgtggtgggcagcggccccgccggcttctacaccgcccagcacctgctgaagcacccccaggcccacgtggacatctacgagaagcagcccgtgcccttcggcctggtgagattcggcgtggcccccgaccaccccgaggtgaagaacgtgatcaacaccttcacccagaccgcccacagcggcagatgcgccttctggggcaacgtggaggtgggcagagacgtgaccgtgcccgagctgagagaggcctaccacgccgtggtgctgagctacggcgccgaggaccacagagccctggagatccccggcgaggagctgcccggcgtgtgcagcgccagagccttcgtgggctggtacaacggcctgcccgagaaccaggagctggagcccgacctgagctgcgacaccgccgtgatcctgggccagggcaacgtggccctggacgtggccagaatcctgctgaccccccccgagcacctggagagaaccgacatcaccaaggccgccctgggcgtgctgagacagagcagagtgaagaccgtgtggctggtgggcagaagaggccccctgcaggtggccttcaccatcaaggagctgagagagatgatccagctgcccggcgccagacccatcctggaccccgtggacttcctgggcctgcaggacaagatcaaggaggtgcccagacccagaaagagactgaccgagctgctgctgagaaccgccaccgagaagcccggccccgccgaggccgccagacaggccagcgccagcagagcctggggcctgagattcttcagaagcccccagcaggtgctgcccagccccgacggcagaagagccgccggcgtgagactggccgtgaccagactggagggcgtggacgaggccaccagagccgtgcccaccggcgacatggaggacctgccctgcggcctggtgctgagcagcatcggctacaagagcagacccgtggaccccagcgtgcccttcgacagcaagctgggcgtgatccccaacgtggagggcagagtgatggacgtgcccggcctgtactgcagcggctgggtgaagagaggccccaccggcgtgatcgccaccaccatgaccgacagcttcctgaccggccagatgctgctgcaggacctgaaggccggcctgctgcccagcggccccagacccggctacgccgccatccaggccctgctgagcagcagaggcgtgagacccgtgagcttcagcgactgggagaagctggacgccgaggaggtggccagaggccagggcaccggcaagcccagagagaagctggtggacccccaggagatgctgagactgctgggccactag

SEQ ID NO: 92364 - protein, 483 aa, Artificial Sequence
  derived and/or modified sequence
MASRCWRWWGWSAWPRTRLPPAGSTPSFCHHFSTQEKTPQICVVGSGPAGFYTAQHLLKHPQAHVDIYEKQPVPFGLVRFGVAPDHPEVKTAHSGRCAFWGNVEVGRDVTVPELREAYHAVVLSYGAEDHRALEIPGEELPGVCSARAFVGWYNGLPENQELEPDLSCDTAVILGQGNVALDVARILLTPPEHLERTDITKAALGVLRQSRVKTVWLVGRRGPLQVAFTIKELREMIQLPGARPILDPVDFLGLQDKIKEVPRPRKRLTELLLRTATEKPGPAEAARQASASRAWGLRFFRSPQQVLPSPDGRRAAGVRLAVTRLEGVDEATRAVPTGDMEDLPCGLVLSSIGYKSRPVDPSVPFDSKLGVIPNVEGRVMDVPGLYCSGWVKRGPTGVIATTMTDSFLTGQMLLQDLKAGLLPSGPRPGYAAIQALLSSRGVRPVSFSDWEKLDAEEVARGQGTGKPREKLVDPQEMLRLLGH

SEQ ID NO: 92365 - DNA, 1766 bp, Artificial Sequence
  derived and/or modified sequence
tagctaggaacagatccacttgcaggttgctgttcccagccatggcttcgcgctgctggcgctggtggggctggtcggcgtggcctcggacccggctgcctcccgccgggagcaccccgagcttctgccaccatttctccacacaggagaagaccccccagatctgtgtggtgggcagtggcccagctggcttctacacggcccaacacctgctaaagcacccccaggcccacgtggacatctacgagaaacagcctgtgccctttggcctggtgcgctttggtgtggcgcctgatcaccccgaggtgaagacggcccattctggccgctgtgccttctggggcaacgtggaggtgggcagggacgtgacggtgccggagctgcgggaggcctaccacgctgtggtgctgagctacggggcagaggaccatcgggccctggaaattcctggtgaggagctgccaggtgtgtgctccgcccgggccttcgtgggctggtacaacgggcttcctgagaaccaggagctggagccagacctgagctgtgacacagccgtgattctggggcaggggaacgtggctctggacgtggcccgcatcctactgaccccacctgagcacctggagagaacggacatcacgaaggcagccctgggtgtactgaggcagagtcgagtgaagacagtgtggctagtgggccggcgtggacccctgcaagtggccttcaccattaaggagcttcgggagatgattcagttaccgggagcccggcccattttggatcctgtggatttcttgggtctccaggacaagatcaaggaggtcccccgcccgaggaagcggctgacggaactgctgcttcgaacggccacagagaagccagggccggcggaagctgcccgccaggcatcggcctcccgtgcctggggcctccgctttttccgaagcccccagcaggtgctgccctcaccagatgggcggcgggcagcaggtgtccgcctagcagtcactagactggagggtgtcgatgaggccacccgtgcagtgcccacgggagacatggaagacctcccttgtgggctggtgctcagcagcattgggtataagagccgccctgtcgacccaagcgtgccctttgactccaagcttggggtcatccccaatgtggagggccgggttatggatgtgccaggcctctactgcagcggctgggtgaagagaggacctacaggtgtcatagccacaaccatgactgacagcttcctcaccggccagatgctgctgcaggacctgaaggctgggttgctcccctctggccccaggcctggctacgcagccatccaggccctgctcagcagccgaggggtccggccagtctctttctcagactgggagaagctggatgccgaggaggtggcccggggccagggcacggggaagcccagggagaagctggtggatcctcaggagatgctgcgcctcctgggccactgagcccagccccagccccggcccccagcagggaagggatgagtgttgggaggggaagggctgggtccgtctgagtgggactttgcacctctgctgatcccggccggccctggcttggaggcttggctgctcttccagcgtctctcctccctcctggggaaggtcgcccttgcgcgcaaggttttagctttcagcaactgaggtaaccttagggacaggtggaggtgtgggccgatctaaccccttacccatctctctactgctggactgtggagg

SEQ ID NO: 92366 - DNA, 1452 bp, Artificial Sequence
  derived and/or modified sequence
atggcttccaggtgctggcggtggtggggttggtccgcctggcccagaacacggttgcccccagcaggctccaccccatctttctgccaccattttagcacacaggagaagaccccacagatatgtgtggtgggaagtggacctgcaggcttctacactgctcagcatctcctcaaacatccgcaggcccacgtagatatatatgagaagcagccggtgcctttcggcttagtgcgttttggggtggcccctgaccaccctgaagttaagaccgcccattccgggaggtgcgccttctggggaaacgttgaagtggggagagatgtcacagttcctgagctccgtgaggcttaccacgccgtggtgttgtcctacggggcagaggatcaccgcgctctcgaaattcctggtgaggaactccccggtgtctgctcagctagggccttcgtaggatggtataacggtctgcccgaaaaccaggaactcgaaccggatctatcatgtgacactgcagtgatcctggggcaggggaatgttgctctagacgtggccaggatcttacttacacctcctgagcatctagagagaacggacataacaaaagctgctctgggcgtattaaggcaaagccgggttaagacagtctggctggtggggcgaagaggtccactgcaggtggcgtttacaatcaaggaacttagggagatgattcagttaccgggcgcgcggccaattcttgatcctgtcgattttctgggcctccaggataagattaaggaagtgcctcgccctcgcaaacgcctgaccgaactcttgttgaggaccgctacggaaaagcctggtcccgccgaagcagccagacaggcctcggccagcagggcatggggtctgaggttttttcgctctcctcaacaagttctccccagccctgatggacgtagggctgccggagttcgcctggctgtcacaagactggagggcgtcgatgaagctactcgggcagtgccaaccggagacatggaagacctgccttgtgggctggtgctgagcagcatcggatacaagagtagacctgtcgacccctcagtgccattcgactccaagctgggagtcatacccaacgtggaggggagggtcatggacgtgccaggattgtattgtagcggatgggttaaacgaggtcccacaggtgtgatagcaactacaatgaccgatagcttcttaacaggtcagatgctcctccaagacttgaaggcaggtcttctgccttctgggcccagacctggatacgcagctatccaggccctcctgtccagtagaggtgtgagacccgtctccttttccgactgggagaaactagacgctgaagaggttgctagaggacaaggaacagggaaacctcgtgagaagctagtcgatcctcaggagatgctgcgactgttaggccattag

SEQ ID NO: 92367 - DNA, 1452 bp, Artificial Sequence
  derived and/or modified sequence
atggccagccgctgctggcgctggtggggctggagcgcctggcccaggacccggctgcccccagctggcagcacccccagcttctgccaccacttcagcacccaggagaagaccccccagatctgtgtggtgggcagcggccctgctggcttctacacagcccagcacctgctgaagcacccccaggcccacgtggacatctatgagaagcagcctgtgcccttcggcctggtgcgcttcggcgtggccccagaccaccctgaggtgaagacagcccacagcggccgctgtgccttctggggcaatgtggaggtgggcagagatgtgacagtgcctgagctgcgggaggcctaccacgctgtggtgctgtcctatggagctgaggaccaccgggccctggagatccctggagaggagctgcccggggtgtgcagcgcccgggcctttgtgggctggtacaacggcctgcctgagaaccaggagctggagccagacctgagctgtgacacagctgtgatcctgggccagggcaatgtggccctggatgtggcccgcatcctgctgaccccacctgagcacctggagaggacagacatcaccaaggccgccctgggcgtgctgcggcagagccgggtgaagacagtgtggctggtgggccggcggggccccctgcaggtggccttcaccatcaaggagctgcgggagatgatccagctgcccggggcccggcccatcctggaccctgtggacttcctgggcctgcaggacaagatcaaggaggtgccccggcccaggaagaggctgacagagctgctgctgaggacagccacagagaagccaggccctgctgaggccgcccggcaggccagcgccagccgggcctggggcctgcgcttcttccgcagcccccagcaggtgctgcccagcccagatggaagaagagctgctggggtgcggctggccgtgacccggctggagggcgtggatgaggccaccagggctgtgcccactggagacatggaggacctgccctgtggcctggtgctgagcagcatcggctacaagagcaggcctgtggaccccagcgtgccctttgacagcaagctgggcgtcatccccaacgtggagggccgggtgatggatgtgcccggcctgtactgcagcggctgggtgaagaggggccccaccggggtgattgccaccaccatgacagacagcttcctgaccggccagatgctgctgcaggacctgaaggccggcctgctgcccagcggcccccggcccggctatgctgccatccaggccctgctgagcagcagaggagtgcggcctgtgtccttcagtgactgggagaagctggatgctgaggaggtggcccggggccagggcaccgggaagccccgggagaagctggtggacccccaggagatgctgcggctgctgggccactag

SEQ ID NO: 92368 - DNA, 1452 bp, Artificial Sequence
  derived and/or modified sequence
atggccagccggtgctggcggtggtggggctggagcgcctggccccgaaccaggctgccacctgcaggctccaccccatccttttgccaccatttttccacccaagagaaaacccctcaaatctgcgtggtgggcagcggcccagctggattctatacggcccaacacctcctcaaacaccctcaagctcatgtggacatctacgagaagcaacctgtgccgtttgggctggtgaggttcggggtggccccggatcatcctgaagtgaagactgctcattcaggtagatgcgctttctggggaaacgtggaggtggggcgtgacgttactgtgcctgagctgagagaagcttatcacgctgtcgtcctctcttacggtgccgaggaccatagggccctggagatacctggggaggagcttcccggtgtctgttccgctagggccttcgtagggtggtacaacggcctgcctgagaaccaggaactggaacccgatctgtcatgtgatactgccgtgatcctgggtcagggcaatgtggccctggacgttgcccggatcctccttactccccctgaacacctggaaaggactgatatcacgaaggccgctctgggagttctgcggcagtctcgagtgaagactgtctggctcgtgggtaggcgggggcccctacaggttgctttcacaatcaaggagctccgcgaaatgattcagctgcccggtgcgagaccaattcttgatcctgtggatttcttggggctgcaggacaaaatcaaggaggttcccagacctcgaaaacgtctgaccgaactcctcctgagaacagctaccgagaaaccaggaccagccgaagcagctaggcaagcttcagcctcccgtgcatggggtctgagattctttaggtccccgcagcaggtgctgccatctccggacggccggagagctgccggcgtccgattagccgtcacacgcctggaaggcgtagacgaagccactcgggcggtgccaacgggggacatggaggacttgccctgtggtctggttttatcctcaattgggtataaaagcaggccagtagatcccagtgtgcccttcgatagtaagttgggtgtcattccaaacgtggaagggagggttatggacgtacccggactctattgtagtggctgggtaaaacggggcccgactggggttattgccactaccatgactgactcgttcttgactggccagatgttgctgcaagacctcaaggctggtctgctgccgagtggccccagacctggctacgctgctattcaggctctactatcttccagaggcgtgcgtcctgttagcttctctgattgggaaaagctggacgcagaagaggtagcccgtgggcagggaaccggcaagccccgagagaaacttgtggacccacaagaaatgcttaggctgcttggccattag

SEQ ID NO: 92369 - DNA, 1452 bp, Artificial Sequence
  derived and/or modified sequence
atggcttctcgctgttggcgatggtggggatggtctgcctggcccaggacacgactgccgcctgctggtagcaccccgagcttttgccaccactttagcactcaggagaaaaccccccagatctgtgtggtgggaagtggcccagcagggttctacaccgcccaacacctacttaagcacccccaggcccatgtggacatctatgagaagcagccagtgccgttcggtctggtgcgctttggggtggcacctgatcacccagaggtgaagacggcacacagcgggagatgtgccttttggggcaatgttgaagtgggacgggacgtaacagtcccagagctgcgtgaggcctatcatgcagtcgtcctttcatatggcgctgaagatcacagagctttggagattcctggtgaggagctccctggtgtgtgctccgcgagggctttcgttgggtggtacaatggcctcccagaaaaccaggagctcgagcccgacctttcctgcgatacagctgtgattcttggccagggtaatgtagcattggacgtcgctcgaatcctgttgaccccccctgagcacctggagcgcactgacattacaaaggccgcactgggcgtacttcggcagtccagggtgaagacagtctggctggtggggcgtaggggtcccctgcaagtcgcctttacaattaaggaactgcgagagatgatccagctgcctggggctaggcccatactggatcctgtagattttctcggcctccaggataaaatcaaagaggtgccacgccctcggaaacgtctgaccgagctgttgctacgtactgccacagagaagccgggacccgcagaagcagctcggcaggcatcggcatcccgggcatggggtctcagattcttccgatctcctcagcaagtcctgcccagtccagatggacggagagccgcaggagttaggcttgcagtcacacgcctggaaggcgtggatgaagccaccagggccgtgccaacaggagacatggaagaccttccttgcggtctcgtgctgtcgagtataggatacaaatcacgccctgtggacccttcggtacccttcgacagcaaacttggagtgattcctaacgttgagggacgcgtcatggacgtgcccggtctctactgttctggatgggtgaagaggggacccactggcgtaatcgccaccactatgacggattctttcctgaccggacagatgttgctccaggatcttaaagcaggcctgttgccttccgggcctcggccagggtacgctgctatccaggccctcctctcttcaaggggcgtgcgcccagtttcgttttccgattgggagaagttggacgcggaagaggtcgccaggggacagggcacagggaaaccccgagagaagttagtggacccccaggagatgctgaggctgttgggacattag

SEQ ID NO: 92370 - DNA, 1452 bp, Artificial Sequence
  derived and/or modified sequence
atggccagcagatgctggagatggtggggctggagcgcctggcccagaaccagactgccccccgccggcagcacccccagcttctgccaccacttcagcacccaggagaagaccccccagatctgcgtggtgggcagcggccccgccggcttctacaccgcccagcacctgctgaagcacccccaggcccacgtggacatctacgagaagcagcccgtgcccttcggcctggtgagattcggcgtggcccccgaccaccccgaggtgaagaccgcccacagcggcagatgcgccttctggggcaacgtggaggtgggcagagacgtgaccgtgcccgagctgagagaggcctaccacgccgtggtgctgagctacggcgccgaggaccacagagccctggagatccccggcgaggagctgcccggcgtgtgcagcgccagagccttcgtgggctggtacaacggcctgcccgagaaccaggagctggagcccgacctgagctgcgacaccgccgtgatcctgggccagggcaacgtggccctggacgtggccagaatcctgctgaccccccccgagcacctggagagaaccgacatcaccaaggccgccctgggcgtgctgagacagagcagagtgaagaccgtgtggctggtgggcagaagaggccccctgcaggtggccttcaccatcaaggagctgagagagatgatccagctgcccggcgccagacccatcctggaccccgtggacttcctgggcctgcaggacaagatcaaggaggtgcccagacccagaaagagactgaccgagctgctgctgagaaccgccaccgagaagcccggccccgccgaggccgccagacaggccagcgccagcagagcctggggcctgagattcttcagaagcccccagcaggtgctgcccagccccgacggcagaagagccgccggcgtgagactggccgtgaccagactggagggcgtggacgaggccaccagagccgtgcccaccggcgacatggaggacctgccctgcggcctggtgctgagcagcatcggctacaagagcagacccgtggaccccagcgtgcccttcgacagcaagctgggcgtgatccccaacgtggagggcagagtgatggacgtgcccggcctgtactgcagcggctgggtgaagagaggccccaccggcgtgatcgccaccaccatgaccgacagcttcctgaccggccagatgctgctgcaggacctgaaggccggcctgctgcccagcggccccagacccggctacgccgccatccaggccctgctgagcagcagaggcgtgagacccgtgagcttcagcgactgggagaagctggacgccgaggaggtggccagaggccagggcaccggcaagcccagagagaagctggtggacccccaggagatgctgagactgctgggccactag

SEQ ID NO: 92371 - protein, 451 aa, Artificial Sequence
  derived and/or modified sequence
MASRCWRWWGWSAWPRTRLPPAGSTPSFCHHFSTQEKTPQICVVGSGPAGFYTAQHLLKQHPQAHVDIYEKQPVPFGLVRFGVAPDHPEVKSYGAEDHRALEIPGEELPGVCSARAFVGWYNGLPENQELEPDLSCDTAVILGQGNVALDVARILLTPPEHLERTDITKAALGVLRQSRVKTVWLVGRRGPLQVAFTIKELREMIQLPGARPILDPVDFLGLQDKIKEVPRPRKRLTELLLRTATEKPGPAEAARQASASRAWGLRFFRSPQQVLPSPDGRRAAGVRLAVTRLEGVDEATRAVPTGDMEDLPCGLVLSSIGYKSRPVDPSVPFDSKLGVIPNVEGRVMDVPGLYCSGWVKRGPTGVIATTMTDSFLTGQMLLQDLKAGLLPSGPRPGYAAIQALLSSRGVRPVSFSDWEKLDAEEVARGQGTGKPREKLVDPQEMLRLLGH

SEQ ID NO: 92372 - DNA, 1705 bp, Artificial Sequence
  derived and/or modified sequence
agatccacttgcaggttgctgttcccagccatggcttcgcgctgctggcgctggtggggctggtcggcgtggcctcggacccggctgcctcccgccgggagcaccccgagcttctgccaccatttctccacacaggagaagaccccccagatctgtgtggtgggcagtggcccagctggcttctacacggcccaacacctgctaaagcagcacccccaggcccacgtggacatctacgagaaacagcctgtgccctttggcctggtgcgctttggtgtggcgcctgatcaccccgaggtgaagagctacggggcagaggaccatcgggccctggaaattcctggtgaggagctgccaggtgtgtgctccgcccgggccttcgtgggctggtacaacgggcttcctgagaaccaggagctggagccagacctgagctgtgacacagccgtgattctggggcaggggaacgtggctctggacgtggcccgcatcctactgaccccacctgagcacctggagagaacggacatcacgaaggcagccctgggtgtactgaggcagagtcgagtgaagacagtgtggctagtgggccggcgtggacccctgcaagtggccttcaccattaaggagcttcgggagatgattcagttaccgggagcccggcccattttggatcctgtggatttcttgggtctccaggacaagatcaaggaggtcccccgcccgaggaagcggctgacggaactgctgcttcgaacggccacagagaagccagggccggcggaagctgcccgccaggcatcggcctcccgtgcctggggcctccgctttttccgaagcccccagcaggtgctgccctcaccagatgggcggcgggcagcaggtgtccgcctagcagtcactagactggagggtgtcgatgaggccacccgtgcagtgcccacgggagacatggaagacctcccttgtgggctggtgctcagcagcattgggtataagagccgccctgtcgacccaagcgtgccctttgactccaagcttggggtcatccccaatgtggagggccgggttatggatgtgccaggcctctactgcagcggctgggtgaagagaggacctacaggtgtcatagccacaaccatgactgacagcttcctcaccggccagatgctgctgcaggacctgaaggctgggttgctcccctctggccccaggcctggctacgcagccatccaggccctgctcagcagccgaggggtccggccagtctctttctcagactgggagaagctggatgccgaggaggtggcccggggccagggcacggggaagcccagggagaagctggtggatcctcaggagatgctgcgcctcctgggccactgagcccagccccagccccggcccccagcagggaagggatgagtgttgggaggggaagggctgggtccgtctgagtgggactttgcacctctgctgatcccggccggccctggcttggaggcttggctgctcttccagcgtctctcctccctcctggggaaggtcgcccttgcgcgcaaggttttagctttcagcaactgaggtaaccttagggacaggtggaggtgtgggccgatctaaccccttacccatctctctactgctggactgtggagggtcaccaggttgggaacatgctggaaataaaacagctgcaaccaag

SEQ ID NO: 92373 - DNA, 1356 bp, Artificial Sequence
  derived and/or modified sequence
atggcttcccgttgctggcgctggtgggggtggagtgcatggccccggacaaggctgccccctgccggtagcaccccctccttctgtcaccacttctctactcaggagaaaacgccacagatctgcgttgtgggcagtgggcccgcaggcttttataccgcccagcacttgctcaagcagcacccccaggcacatgtcgatatatacgagaaacaaccggttccattcggattagtgaggttcggagtcgccccggaccacccagaggtaaaaagctatggcgcagaggaccatcgggccctggagatcccgggggaggagttgccaggagtgtgcagcgctcgggctttcgtgggatggtacaatggcttacctgaaaatcaagaattggaaccagatctgtcatgcgacacagccgtgatcttgggccagggtaatgttgctctcgatgtagcgcgtatcctgctcacccccccagagcatttggaacggaccgacatcacgaaagcggctttaggggtcctacgacagagccgggtgaagactgtgtggctggttggtcgccggggccctctgcaggtcgccttcacaatcaaagagctgcgggagatgatccaattgcccggcgccaggccaatcctggaccccgtcgatttccttggcctccaggataaaatcaaagaggtgccccgcccacgaaaaaggttgactgagttgctcctcagaacagcgactgaaaagcccggccctgcagaggctgcaaggcaggcttctgcttcacgcgcctggggtcttcggttctttcggtcaccacaacaggtgcttccttcacccgacggcaggcgggcagcgggcgttagattagctgtgacgagactggagggggtggacgaggctacacgggccgtccctacaggggacatggaggacttaccgtgtggcctcgtgctgagcagcatcggatataagtctcgacctgtggatccctcagtcccttttgatagtaagttaggcgtcatccccaacgtagaaggccgtgttatggacgtgccgggactttactgcagcgggtgggttaaaagggggccaaccggggtgattgcaacaaccatgacagactcctttctgactggccagatgctactacaggatctgaaagcaggcttactgccttcggggccacgccccggctatgccgctatccaggccctgctcagcagtaggggtgtccggccagtgtctttcagcgactgggagaagctggatgccgaggaggttgcccgcggacagggcacaggtaagcctcgggagaaactggtggatccccaggagatgctaaggctgcttggacactag

SEQ ID NO: 92374 - DNA, 1356 bp, Artificial Sequence
  derived and/or modified sequence
atggccagccgctgctggcgctggtggggctggagcgcctggcccaggacccggctgcccccagctggcagcacccccagcttctgccaccacttcagcacccaggagaagaccccccagatctgtgtggtgggcagcggccctgctggcttctacacagcccagcacctgctgaagcagcacccccaggcccacgtggacatctatgagaagcagcctgtgcccttcggcctggtgcgctttggagtggccccagaccaccctgaggtgaagagctatggagctgaggaccaccgggccctggagatccctggagaggagctgcccggggtgtgcagcgcccgggcctttgtgggctggtacaacggcctgcctgagaaccaggagctggagccagacctgagctgtgacacagctgtgatcctgggccagggcaatgtggccctggatgtggcccgcatcctgctgaccccacctgagcacctggagaggacagacatcaccaaggccgccctgggcgtgctgcggcagagccgggtgaagacagtgtggctggtgggccggcggggccccctgcaggtggccttcaccatcaaggagctgcgggagatgatccagctgcccggggcccggcccatcctggaccctgtggacttcctgggcctgcaggacaagatcaaggaggtgccccggcccaggaagaggctgacagagctgctgctgaggacagccacagagaagccaggccctgctgaggccgcccggcaggccagcgccagccgggcctggggcctgcgcttcttccgcagcccccagcaggtgctgcccagcccagatggaagaagagctgctggggtgcggctggccgtgacccggctggagggcgtggatgaggccaccagggctgtgcccactggagacatggaggacctgccctgtggcctggtgctgagcagcatcggctacaagagcaggcctgtggaccccagcgtgccctttgacagcaagctgggcgtcatccccaacgtggagggccgggtgatggatgtgcccggcctgtactgcagcggctgggtgaagaggggccccaccggggtgattgccaccaccatgacagacagcttcctgaccggccagatgctgctgcaggacctgaaggccggcctgctgcccagcggcccccggcccggctatgctgccatccaggccctgctgagcagcagaggagtgcggcctgtgtccttcagtgactgggagaagctggatgctgaggaggtggcccggggccagggcaccgggaagccccgggagaagctggtggacccccaggagatgctgcggctgctgggccactag

SEQ ID NO: 92375 - DNA, 1356 bp, Artificial Sequence
  derived and/or modified sequence
atggccagccggtgctggcggtggtggggctggagcgcctggcccagaactaggttaccccctgccggaagtacaccctcattttgccaccactttagtacacaggaaaaaacaccccagatctgcgttgttggaagcggcccagctggattttatacggcacagcacctgctgaaacagcacccccaggcacacgttgacatctatgaaaagcagccagtgccattcgggttagtgcgattcggggtggctccggatcaccctgaagtgaagtcctacggagcagaggaccatcgagccctcgagatcccgggcgaagagctcccaggcgtgtgtagcgccagggcattcgtaggatggtataatgggctaccagaaaaccaggagctggaaccagatctctcatgcgacacagccgtgattttaggtcaggggaatgtcgctctcgatgtggcccgaatacttctgaccccacccgaacacctcgagcgcaccgatataacaaaagctgctctgggcgttttaaggcagtccagagtgaagactgtttggcttgtgggcagaagaggacctctgcaagtcgcctttacaatcaaggagctcagggagatgattcaacttccgggagcccgccccatccttgaccctgtcgacttccttgggttgcaagacaaaattaaggaagtaccacgccccaggaagcgccttaccgaactcctgcttagaacggctaccgaaaagccaggccctgcagaggcagcccggcaggccagcgcctcgcgagcatggggcctccgcttcttcagaagtccacagcaggtgttaccctcccccgatggccggagagctgctggggtccgcctggctgtaaccagactggaaggtgtagacgaagcgaccagagcagtgccaactggcgatatggaagacctgccttgcggccttgtcctgtccagcatcggttataaatccagacctgtggaccctagtgtcccctttgattcaaaactcggcgtcatccctaacgtcgagggccgagtcatggacgtgcccgggttatactgttccgggtgggtcaagaggggtcccacgggcgtcattgcaacaaccatgaccgacagttttctgaccggacagatgcttctgcaggatcttaaggctggcctacttccaagcggcccaaggcctgggtacgccgcaatacaggcccttttgtctagccggggagtgaggccagtcagctttagcgattgggaaaaactcgatgccgaagaggtggcccgcgggcaaggcaccggcaagccccgcgagaaacttgtggatccacaagagatgcttcgcttgcttggacattag

SEQ ID NO: 92376 - DNA, 1356 bp, Artificial Sequence
  derived and/or modified sequence
atggcctcacgatgctggagatggtggggttggtctgcctggcctcgtaccagactgccaccagctggatccacccctagcttctgtcatcattttagcacccaggagaagaccccacaaatttgcgtcgtggggtctgggccagcaggattttacaccgcacaacatcttcttaaacagcacccccaggcacacgtggatatctacgaaaaacaaccagttccctttgggctggtgaggttcggcgtagcccctgaccacccagaggttaagtcatacggggctgaggaccatagggctttagagataccaggcgaagagttgcccggagtatgtagcgcacgggcatttgtgggatggtataatgggctgcctgaaaaccaggaacttgaaccggacctgagctgtgacacagcagtgatcctgggtcaggggaacgtggccctggacgtggctcgtattttgctgacacctcctgagcacctcgaaagaaccgacattacgaaagcggcactcggagtattgagacaatctagagtgaagaccgtctggttggtcggacggagaggccctcttcaggtagctttcaccatcaaagagctccgagaaatgatacaactccctggtgctcggccaatcctggaccccgtggatttcctgggccttcaagacaagattaaggaagtcccccgtcctaggaagcggctgactgaactgctcctgagaactgccactgagaaacccggacccgcagaggctgccagacaagcttctgcatcgcgggcatggggactgaggttctttcggagtccacagcaagttctgccgtcccccgacgggaggagagccgcaggcgtgcggttggccgtgacccgattggagggggtggatgaggccacccgcgcagtgccaactggcgacatggaagatctcccgtgtgggctggttctgagcagtatcggctataagtcaagaccagtggatcctagcgtgccattcgactccaagctcggggtgatccctaacgtggaaggtcgagttatggatgtgccaggcctctattgcagcggatgggtgaagcggggacctaccggggtgattgcaaccacaatgacagattccttcctaaccggccagatgctgctccaggatctcaaggcgggtctgttgccatccgggcctaggcctggttacgctgctattcaggctcttttgagttctcggggagtgagaccagtgagcttctcagactgggagaagctcgatgctgaagaggttgccagaggccagggcaccgggaagccccgagaaaaactggtggatccccaggagatgttacgtctgttagggcattag

SEQ ID NO: 92377 - DNA, 1356 bp, Artificial Sequence
  derived and/or modified sequence
atggccagcagatgctggagatggtggggctggagcgcctggcccagaaccagactgccccccgccggcagcacccccagcttctgccaccacttcagcacccaggagaagaccccccagatctgcgtggtgggcagcggccccgccggcttctacaccgcccagcacctgctgaagcagcacccccaggcccacgtggacatctacgagaagcagcccgtgcccttcggcctggtgagattcggcgtggcccccgaccaccccgaggtgaagagctacggcgccgaggaccacagagccctggagatccccggcgaggagctgcccggcgtgtgcagcgccagagccttcgtgggctggtacaacggcctgcccgagaaccaggagctggagcccgacctgagctgcgacaccgccgtgatcctgggccagggcaacgtggccctggacgtggccagaatcctgctgaccccccccgagcacctggagagaaccgacatcaccaaggccgccctgggcgtgctgagacagagcagagtgaagaccgtgtggctggtgggcagaagaggccccctgcaggtggccttcaccatcaaggagctgagagagatgatccagctgcccggcgccagacccatcctggaccccgtggacttcctgggcctgcaggacaagatcaaggaggtgcccagacccagaaagagactgaccgagctgctgctgagaaccgccaccgagaagcccggccccgccgaggccgccagacaggccagcgccagcagagcctggggcctgagattcttcagaagcccccagcaggtgctgcccagccccgacggcagaagagccgccggcgtgagactggccgtgaccagactggagggcgtggacgaggccaccagagccgtgcccaccggcgacatggaggacctgccctgcggcctggtgctgagcagcatcggctacaagagcagacccgtggaccccagcgtgcccttcgacagcaagctgggcgtgatccccaacgtggagggcagagtgatggacgtgcccggcctgtactgcagcggctgggtgaagagaggccccaccggcgtgatcgccaccaccatgaccgacagcttcctgaccggccagatgctgctgcaggacctgaaggccggcctgctgcccagcggccccagacccggctacgccgccatccaggccctgctgagcagcagaggcgtgagacccgtgagcttcagcgactgggagaagctggacgccgaggaggtggccagaggccagggcaccggcaagcccagagagaagctggtggacccccaggagatgctgagactgctgggccactag

SEQ ID NO: 92378 - protein, 439 aa, Artificial Sequence
  derived and/or modified sequence
MEDKDREHPQAHVDIYEKQPVPFGLVRFGVAPDHPEVKNVINTFTQTAHSGRCAFWGNVEVGRDVTVPELREAYHAVVLSYGAEDHRALEIPGEELPGVCSARAFVGWYNGLPENQELEPDLSCDTAVILGQGNVALDVARILLTPPEHLERTDITKAALGVLRQSRVKTVWLVGRRGPLQVAFTIKELREMIQLPGARPILDPVDFLGLQDKIKEVPRPRKRLTELLLRTATEKPGPAEAARQASASRAWGLRFFRSPQQVLPSPDGRRAAGVRLAVTRLEGVDEATRAVPTGDMEDLPCGLVLSSIGYKSRPVDPSVPFDSKLGVIPNVEGRVMDVPGLYCSGWVKRGPTGVIATTMTDSFLTGQMLLQDLKAGLLPSGPRPGYAAIQALLSSRGVRPVSFSDWEKLDAEEVARGQGTGKPREKLVDPQEMLRLLGH

SEQ ID NO: 92379 - DNA, 1827 bp, Artificial Sequence
  derived and/or modified sequence
agagaatgtccttgttagcggggagcagctagagggacaggagggagggaaggaaggaaggaggaaacctggaagatgaggtcagccacgagagataaggggtaagaatatccggcagacttagcgttccggaggtggccctggagaggacatcgtgacccagagtgaaggatctgtcgcaggaaagaatggaagataaggacagagagcacccccaggcccacgtggacatctacgagaaacagcctgtgccctttggcctggtgcgctttggtgtggcgcctgatcaccccgaggtgaagaatgtcatcaacacatttacccagacggcccattctggccgctgtgccttctggggcaacgtggaggtgggcagggacgtgacggtgccggagctgcgggaggcctaccacgctgtggtgctgagctacggggcagaggaccatcgggccctggaaattcctggtgaggagctgccaggtgtgtgctccgcccgggccttcgtgggctggtacaacgggcttcctgagaaccaggagctggagccagacctgagctgtgacacagccgtgattctggggcaggggaacgtggctctggacgtggcccgcatcctactgaccccacctgagcacctggagagaacggacatcacgaaggcagccctgggtgtactgaggcagagtcgagtgaagacagtgtggctagtgggccggcgtggacccctgcaagtggccttcaccattaaggagcttcgggagatgattcagttaccgggagcccggcccattttggatcctgtggatttcttgggtctccaggacaagatcaaggaggtcccccgcccgaggaagcggctgacggaactgctgcttcgaacggccacagagaagccagggccggcggaagctgcccgccaggcatcggcctcccgtgcctggggcctccgctttttccgaagcccccagcaggtgctgccctcaccagatgggcggcgggcagcaggtgtccgcctagcagtcactagactggagggtgtcgatgaggccacccgtgcagtgcccacgggagacatggaagacctcccttgtgggctggtgctcagcagcattgggtataagagccgccctgtcgacccaagcgtgccctttgactccaagcttggggtcatccccaatgtggagggccgggttatggatgtgccaggcctctactgcagcggctgggtgaagagaggacctacaggtgtcatagccacaaccatgactgacagcttcctcaccggccagatgctgctgcaggacctgaaggctgggttgctcccctctggccccaggcctggctacgcagccatccaggccctgctcagcagccgaggggtccggccagtctctttctcagactgggagaagctggatgccgaggaggtggcccggggccagggcacggggaagcccagggagaagctggtggatcctcaggagatgctgcgcctcctgggccactgagcccagccccagccccggcccccagcagggaagggatgagtgttgggaggggaagggctgggtccgtctgagtgggactttgcacctctgctgatcccggccggccctggcttggaggcttggctgctcttccagcgtctctcctccctcctggggaaggtcgcccttgcgcgcaaggttttagctttcagcaactgaggtaaccttagggacaggtggaggtgtgggccgatctaaccccttacccatctctctactgctggactgtggagggtcaccaggttgggaacatgctggaaataaaacagctgcaaccaag

SEQ ID NO: 92380 - DNA, 1320 bp, Artificial Sequence
  derived and/or modified sequence
atggaagataaagatagagaacacccacaggcgcatgtggacatttacgagaagcagccagtgcccttcggattggtgcgattcggggtggccccggatcatccagaagttaaaaacgtgataaacacttttacccagacagcacattccggtagatgcgccttctggggaaatgtggaagttggacgggacgtaactgttccagaactgagggaggcctatcacgccgtcgtactttcctatggggcagaagaccatcgcgccctagaaatacccggagaagagttgcccggagtctgcagcgcccgcgcctttgtcggctggtacaatggcctgcctgaaaaccaggaactggaacctgatctgagttgcgacacagctgtaattctaggccagggtaatgttgccctcgatgtagcacgcatcctcctaacaccccccgaacatcttgaaagaaccgacatcaccaaagccgcccttggagtgctgaggcagtccagagtgaaaaccgtttggttggtcggtcggcgcggacctttgcaggtcgctttcaccatcaaggaattgagggaaatgatccagctccctggagctcgcccaatattggatcctgtggacttcctgggattacaagataaaatcaaggaggttcccaggcccaggaagcggttgaccgagctgctgctgagaaccgccaccgagaaacccggcccagccgaggccgcgagacaggctagtgctagcagagcctggggcttgcgatttttccgctcgccacagcaggtgctaccgtcccctgacggaaggcgggcggccggggtgcgcttagctgtgacacgcctcgagggcgtggacgaggctacgagagcggttcctactggagatatggaagacctcccttgcgggctggtcctgtctagcattggatacaagtcgcggcccgtggatccatctgttccttttgactcaaaacttggagtcatccctaacgtcgagggaagggtgatggacgtgcccggcctgtattgcagcggctgggtaaaaaggggccctaccggcgtgatcgccacaaccatgactgactcattcctcactggccagatgctcctccaggatctgaaagctggacttctgccgagcggcccccgccctggatatgccgctatccaagccctgttgagtagtaggggcgtccgtcccgtctcttttagcgactgggagaagctcgacgcagaagaggtggcacggggccaggggactggaaaaccacgagagaaactcgtcgacccccaagaaatgctgcgcctgctcgggcactag

SEQ ID NO: 92381 - DNA, 1320 bp, Artificial Sequence
  derived and/or modified sequence
atggaggacaaggaccgggagcacccccaggcccacgtggacatctatgagaagcagcctgtgcccttcggcctggtgcgcttcggcgtggccccagaccaccctgaggtgaagaatgtcatcaacaccttcacccagacagcccacagcggccgctgtgccttctggggcaatgtggaggtgggcagagatgtgacagtgcctgagctgcgggaggcctaccacgctgtggtgctgtcctatggagctgaggaccaccgggccctggagatccctggagaggagctgcccggggtgtgcagcgcccgggcctttgtgggctggtacaacggcctgcctgagaaccaggagctggagccagacctgagctgtgacacagctgtgatcctgggccagggcaatgtggccctggatgtggcccgcatcctgctgaccccacctgagcacctggagaggacagacatcaccaaggccgccctgggcgtgctgcggcagagccgggtgaagacagtgtggctggtgggccggcggggccccctgcaggtggccttcaccatcaaggagctgcgggagatgatccagctgcccggggcccggcccatcctggaccctgtggacttcctgggcctgcaggacaagatcaaggaggtgccccggcccaggaagaggctgacagagctgctgctgaggacagccacagagaagccaggccctgctgaggccgcccggcaggccagcgccagccgggcctggggcctgcgcttcttccgcagcccccagcaggtgctgcccagcccagatggaagaagagctgctggggtgcggctggccgtgacccggctggagggcgtggatgaggccaccagggctgtgcccactggagacatggaggacctgccctgtggcctggtgctgagcagcatcggctacaagagcaggcctgtggaccccagcgtgccctttgacagcaagctgggcgtcatccccaacgtggagggccgggtgatggatgtgcccggcctgtactgcagcggctgggtgaagaggggccccaccggggtgattgccaccaccatgacagacagcttcctgaccggccagatgctgctgcaggacctgaaggccggcctgctgcccagcggcccccggcccggctatgctgccatccaggccctgctgagcagcagaggagtgcggcctgtgtccttcagtgactgggagaagctggatgctgaggaggtggcccggggccagggcaccgggaagccccgggagaagctggtggacccccaggagatgctgcggctgctgggccactag

SEQ ID NO: 92382 - DNA, 1320 bp, Artificial Sequence
  derived and/or modified sequence
atggaggacaaggaccgggagcacccccaggcccacgtggacatctacgagaagcaaccagtcccctttggactggtccgctttggagtggcaccagatcaccctgaagtcaaaaacgtgattaacacattcactcaaactgcgcacagcggccgttgcgctttctgggggaacgtcgaagtggggagagacgtgactgttcccgaactgcgagaggcgtatcacgctgtggtcctctcatacggcgcagaagatcaccgcgccctagagatacccggagaagagttgccaggtgtgtgttctgccagagctttcgtggggtggtacaacggccttcccgaaaaccaggagcttgagcccgatctctcctgcgatactgcagtaatcttgggacagggcaacgtagctttggatgtcgcaaggattctgctgactcctccagagcatctagagagaacagacatcacgaaggcagccctgggcgtgcttcgccaatcccgtgtcaaaacagtttggctggtgggccgtaggggtcccctgcaagtcgcattcaccattaaggagcttcgcgagatgattcagctccctggagctcgacccatactggatccagtcgatttcttgggcctccaggataagattaaagaggtgccgagaccaagaaaaaggctcacagaactattgctcaggactgccactgaaaagcccggaccagctgaagcagccaggcaagcttctgccagtcgggcttgggggctgagattctttcgttctcctcagcaggtgttaccttcacccgatggccgaagggccgccggggtaagactcgctgtcacaaggcttgaaggcgtagacgaagccaccagagccgtgccaactggggacatggaagatctgccatgtggccttgtgctatcttctattggctacaagtctcgtccagtggatccctccgttccattcgacagtaaattgggagtcatcccaaacgtcgaggggcgcgtgatggatgttcctggattatactgctctggctgggtaaagcgcggacctactggagtgatagccacaactatgacagatagcttcttaacaggccagatgcttctccaggaccttaaggcaggcctgctgccaagcggtccacgacccggatacgccgctatacaggctcttctgagttcccgcggagttaggcccgtaagctttagtgactgggaaaagctcgatgccgaagaggtggcaagagggcagggaactggtaagccgcgggaaaagctggtggacccacaggagatgttaagactgctaggccactag

SEQ ID NO: 92383 - DNA, 1320 bp, Artificial Sequence
  derived and/or modified sequence
atggaggacaaagatcgagagcatcctcaggcgcatgtcgatatctatgaaaaacagcctgtgccttttggtcttgtgcgattcggggtcgcaccggatcaccctgaggtgaagaacgtcatcaatacatttacacagacggctcacagcggaagatgtgccttctggggaaacgtggaggtcggcagagacgtgaccgttcctgagttgcgcgaggcataccacgctgttgtgctttcgtacggagcggaggaccaccgtgcactggaaattccaggagaggagctgcctggtgtttgctcagctcgggctttcgtgggctggtacaatgggctgcctgaaaaccaagagttggagcctgatctgagctgtgatacggcagtgatcctaggtcagggcaatgtcgccctcgacgtcgcgaggatcctgttgacaccacctgaacacctggagcggacggacataacaaaagctgccctgggcgtgcttaggcaatccagagtaaagaccgtgtggctcgtgggtcgtcgcggtcccctgcaggtggccttcactattaaggagcttcgagagatgatacagctgcccggtgcccgaccgattctcgacccagtggattttttgggactccaggacaagattaaagaggtgccacgcccaaggaagcgactcactgagttgctgttgcgaaccgcaaccgaaaagccgggacctgccgaagccgctcgacaagctagcgcctctagggcatgggggctcaggttcttcagaagcccccagcaagtactgccctcccccgatggtcgccgagcagccggtgttaggctggccgtaacacgcctggagggagtggatgaagccacccgcgcagtaccgacaggggacatggaagatctaccatgtggccttgtgctgagctcaattggatacaaaagcagaccagtggaccctagcgtgccttttgacagtaaactgggagtcattcctaacgtcgagggtcgggtcatggatgtgcccggattatactgctccggatgggtgaaacgaggccctaccggagtgatagccactactatgactgactcatttctgactgggcagatgctgttgcaagacctgaaagccggtctgttgcccagtgggcctcgacctggttacgcggctattcaggcactgctctcatctcgaggcgtccggcctgtgagtttctccgattgggaaaagttggacgccgaagaagtggctaggggacagggaactgggaagccccgagagaagctagtggatccccaggaaatgctacgactgcttgggcattag

SEQ ID NO: 92384 - DNA, 1320 bp, Artificial Sequence
  derived and/or modified sequence
atggaggacaaggacagagagcacccccaggcccacgtggacatctacgagaagcagcccgtgcccttcggcctggtgagattcggcgtggcccccgaccaccccgaggtgaagaacgtgatcaacaccttcacccagaccgcccacagcggcagatgcgccttctggggcaacgtggaggtgggcagagacgtgaccgtgcccgagctgagagaggcctaccacgccgtggtgctgagctacggcgccgaggaccacagagccctggagatccccggcgaggagctgcccggcgtgtgcagcgccagagccttcgtgggctggtacaacggcctgcccgagaaccaggagctggagcccgacctgagctgcgacaccgccgtgatcctgggccagggcaacgtggccctggacgtggccagaatcctgctgaccccccccgagcacctggagagaaccgacatcaccaaggccgccctgggcgtgctgagacagagcagagtgaagaccgtgtggctggtgggcagaagaggccccctgcaggtggccttcaccatcaaggagctgagagagatgatccagctgcccggcgccagacccatcctggaccccgtggacttcctgggcctgcaggacaagatcaaggaggtgcccagacccagaaagagactgaccgagctgctgctgagaaccgccaccgagaagcccggccccgccgaggccgccagacaggccagcgccagcagagcctggggcctgagattcttcagaagcccccagcaggtgctgcccagccccgacggcagaagagccgccggcgtgagactggccgtgaccagactggagggcgtggacgaggccaccagagccgtgcccaccggcgacatggaggacctgccctgcggcctggtgctgagcagcatcggctacaagagcagacccgtggaccccagcgtgcccttcgacagcaagctgggcgtgatccccaacgtggagggcagagtgatggacgtgcccggcctgtactgcagcggctgggtgaagagaggccccaccggcgtgatcgccaccaccatgaccgacagcttcctgaccggccagatgctgctgcaggacctgaaggccggcctgctgcccagcggccccagacccggctacgccgccatccaggccctgctgagcagcagaggcgtgagacccgtgagcttcagcgactgggagaagctggacgccgaggaggtggccagaggccagggcaccggcaagcccagagagaagctggtggacccccaggagatgctgagactgctgggccactag

SEQ ID NO: 92385 - protein, 49 aa, Artificial Sequence
  derived and/or modified sequence
ADDKNPLEEFRETNYEVFLEIAKNGLKATSNPKRVVIVGAGMAGLSAAY

SEQ ID NO: 92386 - protein, 498 aa, Artificial Sequence
  derived and/or modified sequence
AHDRNPLEECFRETDYEEFLEIAKNGLTATSNPKRVVIVGAGMAGLSAAYVLAGAGHQVTVLEASERVGGRVRTYRKKDWYANLGPMRLPTKHRIVREYIKKFDLKLNEFSQENENAWYFIKNIRKRVREVKNNPGLLEYPVKPSEEGKSAAQLYVESLRKVVEELRSTNCKYILDKYDTYSTKEYLLKEGNLSPGAVDMIGDLLNEDSGYYVSFIESLKHDDIFGYEKRFDEIVGGMDQLPTSMYEAIKEKVQVHFNARVIEIQQNDREATVTYQTSANEMSSVTADYVIVCTTSRAARRIKFEPPLPPKKAHALRSVHYRSGTKIFLTCTKKFWEDDGIHGGKSTTDLPSRFIYYPNHNFTSGVGVIIAYGIGDDANFFQALDFKDCADIVINDLSLIHELPKEDIQTFCHPSMIQRWSLDKYAMGGITTFTPYQFQHFSEALTAPFKRIYFAGEYTAQFHGWIDSTIKSGLTAARDVNRASENPSGIHLSNDNEF

SEQ ID NO: 92387 - protein, 60 aa, Artificial Sequence
  derived and/or modified sequence
GPMRIPEKHRIVREYIRKFGLQLNEFVQETENAWYYIKNIRKKVHEVKKDPGLLKYPVKP

SEQ ID NO: 92388 - protein, 502 aa, Artificial Sequence
  derived and/or modified sequence
EGPQCSRSVDVAVVGAGPSGTYSAYKLRNKGQTVELFEYSNRIGGRLFTTHLPNVPDLNLESGGMRYFKNHHKIFGVLVKELNLSNKEFTEGFGKPGRTRFFARGKSLTLEEMTSGDVPYNLSTEEKANQANLAGYYLKKLTGFDGEVLTIPQANKLEVDDGRKLYQLTVDEALDKVGTPEGKEFLKAFSTGNTEFIEGVSAVNYFLVELGEREEEILTLTDGMSALPQALADAFLKSSTSHALTLNRKLQSLSKTDNGLYLLEFLETNTHEGYTEESNITDLVCARKVILAIPQSALIHLDWKPLRSETVNEAFNAVKFIPTSKVFLTFPTAWWLSDAVKNPAFVVKSTSPFNQMYDWKSSNVTGDAAMIASYADTSDTKFQENLNSKGELIPGSAPGANRVTVALKEELLSQLSQAYGIERSDIPEPKSGTSQFWSSYPFEGDWTVWKAGYHCEYTQYIIERPSLIDDVFVVGSDHVNCIENAWTESAFLSVENVFEKYF

SEQ ID NO: 92389 - protein, 537 aa, Artificial Sequence
  derived and/or modified sequence
RRVCESQQSCDDEQCDETLNIAIVGAGPSGAYSAYKMRHSGKDVGLFEYCNRVGGRLYTYQLPNTPDVNLELGGMRYITGAHNILQEVTKELGLKSVLFTEGFGRPGRTRYFLRGQSLTHEEVQSGDVPYNLTTIEKLNQGRIYEYYLKELTGFDIGNGSISREQLLKLRVSDGRLLYQLTFDEALDLVASPEGKEFARDVHVFHTEVTSDANAVSVFDDHLGEDGAGDAILTVEEGMQKVPKELIKEFKKTSASNQVQLNKYLQAIRSKSDHSFVLYFRPTSTVDGKTTILDYRPLQRVCARQVILALPVFALRRLDWPPLHEGRAETAYAAVRNMAASKVFMTFDQAWWLDRNFTDNTAFVTKGDTPFSQMYDWKKSNVSGDYILIASYADGNNTLYQKVLRDQGESINGSEPGANRVSEPLKNNILDHLSEAYGVDRSTIPEPKTAVSQFWTDYPFGCGWITWRAGYHFDDVMSTMRRPSLKDEVYVVGADYSWGLMSSWTEGALETADAVLKDYFKGECAKPPSVDHLDSHMA

SEQ ID NO: 92390 - protein, 589 aa, Artificial Sequence
  derived and/or modified sequence
MPNDDFCPGLTIKAMGAERAPQRQPCTLHLLVLVPILLSLVASQDWKAERSQDPFEKCMQDPDYEQLLKVVTWGLNRTLKPQRVIVVGAGVAGLVAAKVLSDAGHKVTILEADNRIGGRIFTYRDQNTGWIGELGAMRMPSSHRILHKLCQGLGLNLTKFTQYDKNTWTEVHEVKLRNYVVEKVPEKLGYALRPQEKGHSPEDIYQMALNQALKDLKALGCRKAMKKFERHTLLEYLLGEGNLSRPAVQLLGDVMSEDGFFYLSFAEALRAHSCLSDRLQYSRIVGGWDLLPRALLSSLSGLVLLNAPVVAMTQGPHDVHVQIETSPPARNLKVLKADVVLLTASGPAVKRITFSPPLPRHMQEALRRLHYVPATKVFLSFRRPFWREEHIEGGHSNTDRPSRMIFYPPPREGALLLASYTWSDAAAAFAGLSREEALRLALDDVAALHGPVVRQLWDGTGVVKRWAEDQHSQGGFVVQPPALWQTEKDDWTVPYGRIYFAGEHTAYPHGWVETAVKSALRAAIKINSRKGPASDTASPEGHASDMEGQGHVHGVASSPSHDLAKEEGSHPPVQGQLSLQNTTHTRTSH

SEQ ID NO: 92391 - DNA, 1770 bp, Artificial Sequence
  derived and/or modified sequence
atgcccaacgacgacttctgccccggcctgaccatcaaggccatgggcgccgagagagccccccagagacagccctgcaccctgcacctgctggtgctggtgcccatcctgctgagcctggtggccagccaggactggaaggccgagagaagccaggaccccttcgagaagtgcatgcaggaccccgactacgagcagctgctgaaggtggtgacctggggcctgaacagaaccctgaagccccagagagtgatcgtggtgggcgccggcgtggccggcctggtggccgccaaggtgctgagcgacgccggccacaaggtgaccatcctggaggccgacaacagaatcggcggcagaatcttcacctacagagaccagaacaccggctggatcggcgagctgggcgccatgagaatgcccagcagccacagaatcctgcacaagctgtgccagggcctgggcctgaacctgaccaagttcacccagtacgacaagaacacctggaccgaggtgcacgaggtgaagctgagaaactacgtggtggagaaggtgcccgagaagctgggctacgccctgagaccccaggagaagggccacagccccgaggacatctaccagatggccctgaaccaggccctgaaggacctgaaggccctgggctgcagaaaggccatgaagaagttcgagagacacaccctgctggagtacctgctgggcgagggcaacctgagcagacccgccgtgcagctgctgggcgacgtgatgagcgaggacggcttcttctacctgagcttcgccgaggccctgagagcccacagctgcctgagcgacagactgcagtacagcagaatcgtgggcggctgggacctgctgcccagagccctgctgagcagcctgagcggcctggtgctgctgaacgcccccgtggtggccatgacccagggcccccacgacgtgcacgtgcagatcgagaccagcccccccgccagaaacctgaaggtgctgaaggccgacgtggtgctgctgaccgccagcggccccgccgtgaagagaatcaccttcagcccccccctgcccagacacatgcaggaggccctgagaagactgcactacgtgcccgccaccaaggtgttcctgagcttcagaagacccttctggagagaggagcacatcgagggcggccacagcaacaccgacagacccagcagaatgatcttctaccccccccccagagagggcgccctgctgctggccagctacacctggagcgacgccgccgccgccttcgccggcctgagcagagaggaggccctgagactggccctggacgacgtggccgccctgcacggccccgtggtgagacagctgtgggacggcaccggcgtggtgaagagatgggccgaggaccagcacagccagggcggcttcgtggtgcagccccccgccctgtggcagaccgagaaggacgactggaccgtgccctacggcagaatctacttcgccggcgagcacaccgcctacccccacggctgggtggagaccgccgtgaagagcgccctgagagccgccatcaagatcaacagcagaaagggccccgccagcgacaccgccagccccgagggccacgccagcgacatggagggccagggccacgtgcacggcgtggccagcagccccagccacgacctggccaaggaggagggcagccacccccccgtgcagggccagctgagcctgcagaacaccacccacaccagaaccagccactag

SEQ ID NO: 92392 - DNA, 1704 bp, Artificial Sequence
  derived and/or modified sequence
atggcccccctggccctgcacctgctggtgctggtgcccatcctgctgagcctggtggccagccaggactggaaggccgagagaagccaggaccccttcgagaagtgcatgcaggaccccgactacgagcagctgctgaaggtggtgacctggggcctgaacagaaccctgaagccccagagagtgatcgtggtgggcgccggcgtggccggcctggtggccgccaaggtgctgagcgacgccggccacaaggtgaccatcctggaggccgacaacagaatcggcggcagaatcttcacctacagagaccagaacaccggctggatcggcgagctgggcgccatgagaatgcccagcagccacagaatcctgcacaagctgtgccagggcctgggcctgaacctgaccaagttcacccagtacgacaagaacacctggaccgaggtgcacgaggtgaagctgagaaactacgtggtggagaaggtgcccgagaagctgggctacgccctgagaccccaggagaagggccacagccccgaggacatctaccagatggccctgaaccaggccctgaaggacctgaaggccctgggctgcagaaaggccatgaagaagttcgagagacacaccctgctggagtacctgctgggcgagggcaacctgagcagacccgccgtgcagctgctgggcgacgtgatgagcgaggacggcttcttctacctgagcttcgccgaggccctgagagcccacagctgcctgagcgacagactgcagtacagcagaatcgtgggcggctgggacctgctgcccagagccctgctgagcagcctgagcggcctggtgctgctgaacgcccccgtggtggccatgacccagggcccccacgacgtgcacgtgcagatcgagaccagcccccccgccagaaacctgaaggtgctgaaggccgacgtggtgctgctgaccgccagcggccccgccgtgaagagaatcaccttcagcccccccctgcccagacacatgcaggaggccctgagaagactgcactacgtgcccgccaccaaggtgttcctgagcttcagaagacccttctggagagaggagcacatcgagggcggccacagcaacaccgacagacccagcagaatgatcttctaccccccccccagagagggcgccctgctgctggccagctacacctggagcgacgccgccgccgccttcgccggcctgagcagagaggaggccctgagactggccctggacgacgtggccgccctgcacggccccgtggtgagacagctgtgggacggcaccggcgtggtgaagagatgggccgaggaccagcacagccagggcggcttcgtggtgcagccccccgccctgtggcagaccgagaaggacgactggaccgtgccctacggcagaatctacttcgccggcgagcacaccgcctacccccacggctgggtggagaccgccgtgaagagcgccctgagagccgccatcaagatcaacagcagaaagggccccgccagcgacaccgccagccccgagggccacgccagcgacatggagggccagggccacgtgcacggcgtggccagcagccccagccacgacctggccaaggaggagggcagccacccccccgtgcagggccagctgagcctgcagaacaccacccacaccagaaccagccactag

SEQ ID NO: 92393 - DNA, 1770 bp, Artificial Sequence
  derived and/or modified sequence
atgcctaatgatgatttttgtcccggactgacgataaaggccatgggtgccgaaagagccccccagagacagccgtgcacactgcacctgctcgtgttggtcccaatcttgctctcattggtggcgtcccaggactggaaagcagaacgctctcaggacccgtttgaaaaatgcatgcaagatccagattacgagcagctcctaaaagttgtgacttggggtttgaatcgtacgctgaaaccccagcgagtgatcgtagttggggctggtgtcgccggactggtagcggccaaagttttgagtgacgcaggacacaaagtgactatcttggaggcggacaaccggatcggtggcagaatctttacataccgggaccagaataccgggtggatcggcgagttaggggccatgcggatgccctcttctcatcgcatacttcataagctgtgccagggactcgggctcaacctgaccaaattcacacagtatgacaagaacacatggacagaggtccacgaggtcaagctgcgaaattatgtcgtcgaaaaagttcccgagaagctggggtacgcactccgcccccaagaaaagggccatagtcctgaagatatatatcagatggccctgaatcaagccctgaaagacctgaaagccttgggatgtaggaaggccatgaagaagtttgagcgacacacattgctagagtacctgctgggagaaggtaatctttcccggcctgctgtgcagctgctgggagacgtaatgagcgaggatggattcttctatctgagttttgcagaagccttgcgcgctcattcttgtctgtcagatagactccaatacagccgcattgttggcgggtgggaccttctacctcgtgctctgttgagtagcttgtccgggctcgtgttactgaatgcgccagttgtcgcgatgacccagggccctcacgatgtgcatgtgcagatcgaaacaagtccacctgccaggaatttgaaggtactgaaggccgacgtcgtgctattaaccgcctctggacccgctgtcaagagaatcaccttcagtcctcctcttcccagacatatgcaagaagctttgaggaggcttcactacgtgccggcgactaaagtattcctctcatttcgcaggccattttggagagaggaacacatagaggggggacattccaatacggaccgaccgtcccgcatgattttttacccgccacctagagagggcgccctcctgctggcatcatacacttggtccgatgccgctgctgcattcgctgggctttccagagaagaggctctgaggttggctcttgatgacgtcgccgcgttgcacggccccgtcgtgcgccagctgtgggacggtaccggcgtagtgaagaggtgggccgaggatcagcactcccaaggagggtttgtggttcagccaccagccctctggcagaccgagaaggacgactggacggtgccatatggccggatttactttgcaggcgagcatactgcttacccccatgggtgggtagaaacagccgttaagtccgccttgcgcgctgcgatcaaaataaacagccgaaaaggccccgcatctgatactgcctcccccgaaggacatgcttctgatatggagggacagggccatgtgcacggcgtggcctcgagtcctagccatgacctggctaaggaagaggggtcccacccacctgtgcagggtcagctgtccttgcagaacactacccacactaggacctcccattag

SEQ ID NO: 92394 - DNA, 1704 bp, Artificial Sequence
  derived and/or modified sequence
atggccccattagccctccacttactggtgctagtgcctatactgctgtcactggtagcttcacaagattggaaggcagagcggtcacaggatcctttcgagaagtgtatgcaggatccggattacgaacagctgctcaaagtagtcacatgggggctgaacaggaccctcaaaccacagcgcgttattgttgtgggggccggggtggccgggctggtggccgccaaagtgctgtccgatgcaggacacaaagtcacgatcctggaggctgataacaggattgggggtagaatttttacataccgagatcagaacacgggctggataggggaactgggtgctatgaggatgcccagctcacaccgcattttgcacaaactgtgccagggacttggcctgaacctgactaaatttacgcagtatgacaaaaatacctggacagaggtgcacgaggtaaagctgagaaattacgttgtggaaaaggtccccgaaaagctaggctatgctctcagacctcaagagaagggccactcacctgaggatatttaccagatggcactcaaccaagctctcaaggatctaaaggcccttgggtgccgcaaggccatgaagaagtttgaacgccacacattgttagaatacttgttaggggaggggaacttgagtaggcccgccgtgcagctcttgggtgacgttatgtcagaagatgggttcttttacctgtctttcgctgaagcactgcgtgcacacagctgcctgagcgataggctacagtactctaggatagtgggggggtgggacctcctgccgcgcgccctactctcatccctgagtggcctagttctgcttaatgcgcctgtagtggctatgacacagggacctcatgatgtgcacgtccaaattgagacctccccaccagctaggaatcttaaagttttaaaggctgacgtagttctgctgactgccagtggcccagctgtgaagcgtattacattctctcccccgctgccccggcacatgcaggaggccctccgacgtctgcattacgttccagcaaccaaggtattcctctctttcagacgccctttctggagagaggagcacatagaaggaggccattcaaataccgaccgcccctcacgaatgattttctacccgccccccagggagggggctctgctgttggcttcctatacctggagcgacgctgcagccgcatttgcggggttatcaagggaagaggcattgaggttggcccttgatgatgtagcagcattacacgggcctgttgtccgccagttgtgggatgggaccggtgtagtgaagcgctgggctgaagatcaacactcacagggtggctttgtcgtccagccaccagccttatggcagaccgaaaaggatgactggactgtgccctacgggagaatatattttgctggagaacacaccgcttacccccatggatgggtggagaccgccgttaaaagcgctctcagagccgccatcaaaataaattcacgtaagggaccagcgagcgataccgcaagcccggaagggcacgcatccgatatggagggccagggtcacgtgcacggcgtggcgtccagtccatctcacgaccttgcaaaagaggagggatcacatccaccggtgcaaggtcagctctctctgcagaatacaactcacacccgcacatcccactag

SEQ ID NO: 92395 - DNA, 1770 bp, Artificial Sequence
  derived and/or modified sequence
atgcctaacgacgacttctgccctgggctgaccatcaaggctatgggcgccgaacgagccccacaaagacagccctgcaccctgcacttactggtcctggttccgatcctactttctcttgtggccagtcaagattggaaggccgagagatcccaagatccttttgaaaagtgcatgcaggatccagactacgaacaactgctcaaggttgtgacatggggcctcaatcgaacccttaaacctcagagagtgatcgtggttggagccggggtcgcaggtcttgttgctgccaaagtgctctcagacgctggacataaagtgacaatcctagaggctgataatcgaatcggaggcagaattttcacctatcgggaccagaacacaggctggataggagagctcggggcaatgcgcatgccatccagccatcgcatcttgcacaagctctgccagggactcggtctgaacctgactaagtttacccagtatgacaaaaatacctggactgaggtccacgaagtgaagctgcgaaattatgtggtcgagaaggttcctgagaagttgggctacgccctcagaccccaagagaaggggcattcaccagaagatatatatcagatggctctcaaccaggccctcaaagatttaaaagcactaggctgtaggaaggccatgaagaaatttgagcgacatactctcctggagtatcttttgggggaggggaatctgagccgccctgcagttcagctgctaggtgatgtcatgtctgaagacggctttttctacctttcctttgcggaggccctaagagctcactcttgcctaagcgaccgtctccagtacagccgaatcgtgggtggctgggatttacttccgagggctctgctttcttctctttccggactggtgctactgaatgcccctgtcgtggcgatgactcagggccctcacgatgtccacgtgcagattgagacaagccctccggcccgaaatctcaaagttttaaaagccgatgtggtcctgctaacagcatcgggaccagccgtcaagcggatcaccttcagccctcccctgcctagacatatgcaggaggcccttcgcaggctgcactacgtccccgcaaccaaggtcttcctgtcgtttcgtagacctttttggcgagaagagcatatagagggagggcactcgaataccgataggcctagccgaatgattttttacccacccccacgggagggagctttgctcctggcctcctacacgtggtctgacgctgccgctgcatttgctggattatcgagagaggaagccttgagactggctttagacgacgtggctgcccttcacggccctgtcgtgagacagctgtgggatgggaccggtgtggtgaaacgttgggcagaggatcagcactcccagggaggttttgttgtgcagccacccgccttatggcagaccgagaaagacgactggaccgtgccctacgggaggatctactttgccggggaacacacagcctatccccacgggtgggttgagacggctgtcaaaagcgccctcagggccgccattaagatcaatagtcgcaaaggtcctgcctcagatacggcatcacctgaagggcacgcctctgatatggagggccaggggcacgtccacggagtcgccagctcaccgagccacgatctagcaaaagaggaggggagtcaccccccagtgcagggacaattaagtctgcagaataccacccatactcggacctctcactag

SEQ ID NO: 92396 - DNA, 1770 bp, Artificial Sequence
  derived and/or modified sequence
atgcccaatgatgacttctgccccggcctgaccatcaaggccatgggcgctgagcgggccccccagaggcagccctgcaccctgcacctgctggtgctggtgcccatcctgctgagcctggtggccagccaggactggaaggccgagaggagccaggacccctttgagaagtgcatgcaggaccctgactatgagcagctgctgaaggtggtgacctggggcctgaacagaaccctgaagccccagagggtgattgtggtgggcgccggcgtggccggcctggtggccgccaaggtgctgagtgatgctggccacaaggtgaccatcctggaggccgacaaccgcatcggcggccgcatcttcacctacagagaccagaacacaggctggattggagagctgggcgccatgaggatgcccagcagccaccgcatcctgcacaagctgtgccagggcctgggcctgaacctgaccaagttcacccagtatgacaagaacacctggacagaggtgcatgaggtgaagctgagaaattatgtggtggagaaggtgcctgagaagctgggctacgccctgcggccccaggagaagggccacagccctgaggacatctaccagatggccctgaaccaggccctgaaggacctgaaggccctgggctgcaggaaggccatgaagaagtttgagcggcacaccctgctggagtacctgctgggggagggcaacctgagcaggcctgctgtgcagctgctgggagatgtgatgtctgaagatggcttcttctacctgagctttgctgaggccctgcgggcccacagctgcctgagtgaccggctgcagtacagccgcatcgtgggcggctgggacctgctgccccgggccctgctgagcagcctgagcggcctggtgctgctgaatgcccctgtggtggccatgacccagggcccccatgatgtgcacgtgcagatcgagaccagccccccagccaggaacctgaaggtgctgaaggcagatgtggtgctgctgacagccagcggccctgctgtgaagaggatcaccttcagcccccccctgcccaggcacatgcaggaggccctgcggcggctgcactacgtgcctgccaccaaggtgttcctgtccttccggcggcccttctggagggaggagcacattgaaggaggccacagcaacacagaccggcccagcaggatgatcttctaccccccaccccgggagggcgccctgctgctggccagctacacctggagcgatgctgctgctgcctttgctggcctgagccgggaggaggccctgcggctggccctggatgatgtggccgccctgcacggccctgtggtgcggcagctgtgggatggcaccggggtggtgaagcgctgggccgaggaccagcacagccagggcggctttgtggtgcagcccccagccctgtggcagacagagaaggatgactggacagtgccctacggccgcatctactttgctggggagcacacagcctacccccacggctgggtggagacagctgtgaagagcgccctgcgggccgccatcaagatcaacagcaggaagggccctgccagtgacacagccagccctgagggccacgccagtgacatggagggccagggccacgtgcatggagtggccagcagccccagccatgacctggccaaggaggagggcagccacccccctgtgcagggccagctgagcctgcagaacaccacccacaccaggaccagccactag

SEQ ID NO: 92397 - DNA, 1704 bp, Artificial Sequence
  derived and/or modified sequence
atggcccccctggccctgcacctgctggtgctggtgcccatcctgctgagcctggtggccagccaggactggaaggccgagaggagccaggacccctttgagaagtgcatgcaggaccctgactatgagcagctgctgaaggtggtgacctggggcctgaacagaaccctgaagccccagagggtgattgtggtgggcgccggcgtggccggcctggtggccgccaaggtgctgagtgatgctggccacaaggtgaccatcctggaggccgacaaccgcatcggcggccgcatcttcacctacagagaccagaacacaggctggattggagagctgggcgccatgaggatgcccagcagccaccgcatcctgcacaagctgtgccagggcctgggcctgaacctgaccaagttcacccagtatgacaagaacacctggacagaggtgcatgaggtgaagctgagaaattatgtggtggagaaggtgcctgagaagctgggctacgccctgcggccccaggagaagggccacagccctgaggacatctaccagatggccctgaaccaggccctgaaggacctgaaggccctgggctgcaggaaggccatgaagaagtttgagcggcacaccctgctggagtacctgctgggggagggcaacctgagcaggcctgctgtgcagctgctgggagatgtgatgtctgaagatggcttcttctacctgagctttgctgaggccctgcgggcccacagctgcctgagtgaccggctgcagtacagccgcatcgtgggcggctgggacctgctgccccgggccctgctgagcagcctgagcggcctggtgctgctgaatgcccctgtggtggccatgacccagggcccccatgatgtgcacgtgcagatcgagaccagccccccagccaggaacctgaaggtgctgaaggcagatgtggtgctgctgacagccagcggccctgctgtgaagaggatcaccttcagcccccccctgcccaggcacatgcaggaggccctgcggcggctgcactacgtgcctgccaccaaggtgttcctgtccttccggcggcccttctggagggaggagcacattgaaggaggccacagcaacacagaccggcccagcaggatgatcttctaccccccaccccgggagggcgccctgctgctggccagctacacctggagcgatgctgctgctgcctttgctggcctgagccgggaggaggccctgcggctggccctggatgatgtggccgccctgcacggccctgtggtgcggcagctgtgggatggcaccggggtggtgaagcgctgggccgaggaccagcacagccagggcggctttgtggtgcagcccccagccctgtggcagacagagaaggatgactggacagtgccctacggccgcatctactttgctggggagcacacagcctacccccacggctgggtggagacagctgtgaagagcgccctgcgggccgccatcaagatcaacagcaggaagggccctgccagtgacacagccagccctgagggccacgccagtgacatggagggccagggccacgtgcatggagtggccagcagccccagccatgacctggccaaggaggagggcagccacccccctgtgcagggccagctgagcctgcagaacaccacccacaccaggaccagccactag

SEQ ID NO: 92398 - DNA, 1770 bp, Artificial Sequence
  derived and/or modified sequence
atgcccaacgacgacttctgccccggcctgaccatcaaggccatgggcgcagaacgggctccccagcggcagccctgtactctccaccttctggttttggtgcccatcctgctgtcactggtggccagccaggactggaaagctgaacgttcccaggatcccttcgagaaatgcatgcaggatcctgactacgagcagctgctgaaggtagtgacttggggcctaaacagaacgcttaagccccagcgcgtgatcgtcgtcggggccggcgtcgccggactcgtcgctgcaaaggtgctttctgacgcaggacacaaagttacaatcctggaggcagataatcggataggggggaggatcttcacctatagagatcaaaataccgggtggatcggtgaactgggggccatgaggatgccttcaagtcaccggatcctgcataaactgtgtcaaggcctggggctaaacctcaccaagttcacccaatacgataagaacacgtggactgaggttcatgaggttaaactcaggaattacgtcgtggagaaggtccctgagaaactgggatacgcactaagaccgcaagagaagggacattctccggaagatatttaccagatggctctcaaccaagccctgaaggacctcaaagcgctagggtgcaggaaagctatgaaaaaattcgagagacacaccttgctggaatacttactgggagagggcaacttgagtcgccctgccgtacaacttctgggcgatgtgatgtcagaggatggctttttctacctatcttttgctgaggcactgagagcccactcttgcctgtccgatcgcttgcagtactcccggatagtaggggggtgggatctgctgcctagagctctgctgtcgtccctcagtgggctggttctgctgaacgcacccgtggtagcaatgacgcagggcccacacgacgtacatgtgcaaatcgaaacgtctccaccggcccggaacctgaaagtgctcaaagcagatgtggtgttgctgactgcatctggcccagccgtcaaaagaattaccttcagtccaccacttcctaggcacatgcaggaagctttgcgaaggttgcattatgtgcccgccacaaaggtgttcctgtcctttcggcgcccattctggcgggaagaacatatagaaggggggcacagcaatactgatagaccaagtcggatgatcttttaccctccgcctcgggagggagccctgctactggctagctatacttggagtgatgccgccgcagcgttcgccggactgtctcgggaagaggctctgaggttggccctggatgacgttgctgctctccacggacctgttgtccggcaactatgggatggaaccggcgtggtgaaaagatgggcagaggaccaacatagccagggcggctttgtcgttcaaccgcccgcactctggcagactgagaaagacgactggaccgtcccttacggtcggatatacttcgcaggagagcataccgcctacccccacggctgggttgagacagcagtgaagtcagctcttagagccgccatcaaaattaacagtcgaaagggaccagcctccgacaccgctagccccgagggccatgctagcgacatggaaggccagggtcacgttcatggcgtcgcctcctcaccatcccacgatctggctaaagaagagggctcacatccccctgtgcagggccagcttagcctccaaaatacaacgcacacaaggaccagtcactag

SEQ ID NO: 92399 - DNA, 1704 bp, Artificial Sequence
  derived and/or modified sequence
atggcccccctggccctgcacctgctggtgctggtgcccatcctgctgtcgctcgttgcttcccaagattggaaggcagaacgctcgcaagatccattcgaaaaatgtatgcaagacccagactatgagcagttacttaaggtcgtgacctggggactcaaccgtactcttaagccccagagggtgatcgtggttggtgcaggagtcgccgggctggtggcagccaaggtgctttccgatgctggccacaaagtgacgattctagaggcagacaacaggatcggggggagaatcttcacttacagggatcagaacaccggttggatcggcgagttgggggcaatgcggatgccaagcagccatcgaatcctccataagctctgtcaggggctggggctaaaccttaccaagtttacccagtatgacaaaaatacctggaccgaggtgcacgaagtcaagctgagaaactacgttgtggaaaaggtccctgagaaactggggtacgctttacgacctcaagaaaaggggcatagtcctgaagacatttatcagatggctttgaaccaggcgctcaaggacctcaaggctttggggtgcaggaaagcaatgaagaaatttgagagacatactctgttagaatatttattaggggagggaaacttgtctaggcccgcagtgcaactgctcggggacgtgatgtccgaagatggatttttttacctctcgttcgcagaagcactgcgggcccattcctgcttatctgacaggctgcagtacagccgaatagttggcggttgggacctactccctagagctttgctcagtagcctgagcgggttggtacttttgaatgcaccggttgtcgcaatgacccaagggccccatgacgttcatgttcagatcgaaacatccccacctgcccgcaacctgaaagtgttaaaagctgatgttgtgctgttgactgctagcggccctgcagtcaaacgtatcaccttcagccctccactgccacggcatatgcaagaggccctgcgtaggctgcattatgtgccagcaacaaaggtcttcctctccttcagaagacccttttggagagaggagcacatcgagggtggccacagtaatactgacagaccgtcgcgcatgatcttctaccccccccccagagaaggcgcactcctgcttgcgtcatacacttggtccgacgccgccgcagccttcgctggattatcgcgcgaggaggcattgcgcctcgccctcgacgacgtggccgccctgcatgggccagtcgtcagacaactgtgggatggaactggagtggttaagcgatgggcagaagatcaacacagtcaaggtggatttgtggtgcaaccccctgcactatggcagacggaaaaagatgattggaccgtgccttacggcagaatttacttcgccggtgaacacaccgcctacccacatggatgggtggaaactgccgtgaaatctgccctgagggcagctatcaagatcaatagcagaaagggcccagcatcggataccgccagtccggaaggccacgctagcgacatggagggacagggccatgtgcacggtgtcgcctccagtcctagtcacgacctcgctaaagaggaagggtcgcacccacccgtccaggggcagctgtctcttcagaacacaacacacacccggaccagccattag

SEQ ID NO: 92400 - DNA, 1770 bp, Artificial Sequence
  derived and/or modified sequence
atgcccaacgacgacttctgccccggcctgaccatcaaggccatgggcgccgagcgtgctccacaaagacaaccctgtaccctgcatctattggtgttggtgccaatcttgctttctctggtggccagccaggattggaaagccgagcggtctcaggacccgtttgaaaagtgtatgcaggaccccgactacgagcagttattaaaagtggttacatggggcctgaatagaacactcaaacctcagagagttatcgtcgtaggggccggggtggccggcctggtggccgctaaggtgctctcagacgctggacacaaagtgactattttggaggccgataaccgcatcggcgggcggattttcacctatcgcgatcagaacacagggtggattggtgagctgggcgcgatgcggatgccatcctcacacagaatcctccacaagctttgccagggtctggggctgaatctcacaaaatttacccagtacgataaaaatacatggacagaggtgcatgaggtcaaattaaggaactacgtcgtcgagaaggtccctgagaaactgggctacgcactcagacctcaagagaaaggccattcacccgaagacatatatcagatggctctgaatcaggcgttgaaggacctgaaggctttgggctgtcgcaaggccatgaagaagttcgaaaggcacacattgctggagtacctgttgggggaaggcaacctgtcgagacctgccgtgcagctcctaggcgacgtgatgtccgaggatggcttcttctatctgtctttcgccgaggcactgagagcccactcatgcctgagtgaccgcctgcaatattctcgaatagtgggcgggtgggatctcctcccccgggcactactctcatctctctcaggccttgtattgttgaacgcacccgtggtggctatgacccaggggccccacgacgtccatgtgcagatcgagacttcaccacccgcaagaaacctgaaagtcctgaaagcggatgtcgtgctgttgaccgcaagcggacctgccgttaaaaggatcacctttagtcctcctctgccccgacacatgcaggaagcgctccggagattgcactacgtgcccgccactaaggtgttcctgtcatttcggagacctttctggcgggaagaacacatcgagggcggccatagcaacacggatcgtccaagcagaatgattttctacccaccgcccagagagggggctttgctgcttgcatcttacacatggagtgacgccgccgcggcattcgctggtctgtcccgcgaggaagccctcagattggcactcgatgatgtcgcagccctccacggaccggtcgtgagacaactgtgggatgggacgggggtcgtaaaacgctgggccgaagaccaacacagtcaaggtgggttcgtagttcagcctcccgcgctgtggcagactgagaaggatgactggaccgtcccgtacggacgcatatatttcgccggggaacacaccgcatacccacatggatgggtggaaaccgcggtgaaatcagctctaagagccgcaattaagataaattcccgaaagggccccgcaagcgacactgcctctccggaggggcacgcttccgatatggaaggccaggggcacgttcacggcgtggcttcttctccctctcacgatctggccaaggaagagggatctcatcccccagtgcaagggcagttgtctcttcagaataccacacacaccagaacttctcactag

SEQ ID NO: 92401 - DNA, 1770 bp, Artificial Sequence
  derived and/or modified sequence
atgccgaatgacgacttttgcccagggttgaccataaaggccatgggagctgagagggcaccacagagacagccatgtacgttgcacctgctagtgcttgttccaattctacttagtctggtggcctcacaagactggaaggcggagaggtcacaagacccctttgagaagtgtatgcaggatccggattatgaacagctgctaaaggttgtgacgtgggggttaaatcgcaccctcaaaccccagagagtgatcgtcgttggcgctggcgttgcgggactggttgctgcaaaagttctgagcgacgctggacataaggtgaccattcttgaagctgacaataggatcgggggtcgcatttttacataccgggatcaaaacaccgggtggatcggggaactcggggcaatgcgcatgccaagctctcacaggatcctgcacaagctgtgccaaggtctggggctgaacctgactaaatttacacaatacgacaagaatacgtggacggaggttcacgaggtcaagctgcgaaactacgtcgtagaaaaggtacctgaaaaacttggttacgctctccggcctcaagagaaaggccacagtcctgaggatatttatcagatggcattgaatcaggctttgaaagatctgaaggccctcggctgcaggaaagccatgaagaagtttgaacgccataccttgctagaatacctccttggggagggtaaccttagtaggcctgccgtgcaattacttggcgacgtcatgagtgaagatggctttttttaccttagctttgcagaggctctgcgggctcacagttgtttgtccgatcgacttcagtattcgaggattgtgggaggatgggatctgctccctcgcgctctcctgtctagtctgtcaggcctcgtacttctgaacgccccagtagtagccatgacccaggggccacacgacgtgcacgtccagatcgaaacatctccacccgctaggaatctcaaggtcctcaaagccgacgtagtgttgctgacggcctccggtcctgcagtcaaacggattacctttagcccgccactgcccaggcacatgcaggaggccctgaggcggctgcactacgtaccagctacgaaggtgttccttagtttcagacgcccattttggcgggaagaacacattgaggggggacatagcaacaccgatcgtcctagccggatgatattctatcctccaccgcgtgagggggctctgctgctggctagctacacatggtcagacgcggctgccgcattcgcgggtctgagccgagaagaggcactgaggcttgctttagatgatgtagctgccctccatggaccagtggttcgccagctttgggacggcaccggagtggtgaaaaggtgggctgaggatcagcactcccagggcggattcgtggtgcagccacctgctctgtggcagacagagaaggatgattggaccgtgccatacggaaggatttacttcgctggtgagcacaccgcctacccgcacgggtgggttgagaccgccgtgaaaagcgctctgagagccgctattaagatcaacagtagaaagggccctgcgtctgacactgcatctcctgaaggacacgcgagtgacatggaaggccagggacacgtgcacggagtcgcaagctcgccaagccacgacctggcaaaggaggaggggagccatccgcctgtacagggtcaactgtccctccaaaacacaacacacactcggacttcacattag

SEQ ID NO: 92402 - DNA, 1704 bp, Artificial Sequence
  derived and/or modified sequence
atggcacctttagctctgcatttactggtgctggtgcccatattattaagcctggtggcttctcaagactggaaggctgagagatcgcaggatccatttgagaagtgtatgcaggaccctgattacgagcagctgctgaaggtcgttacctggggccttaacagaacactcaagccacagagggtgattgtcgtgggggctggagttgcaggactcgtcgctgcgaaggtcctgagtgatgccggacacaaggtgacgattctcgaagcggataatcgtatcggcggtaggatatttacttaccgggaccaaaacaccggctggatcggcgagctgggtgctatgagaatgccaagtagccaccggatcttacataaactctgtcagggcttaggtctcaacctgacaaaattcactcagtatgacaagaacacctggaccgaagtccatgaggttaagcttcgcaactacgtggtggagaaagttcccgagaaactggggtatgctctacgaccacaggagaaaggacacagcccagaagatatttatcagatggcgctcaatcaagccctgaaagaccttaaagctctgggatgtcgaaaagccatgaaaaaattcgaaaggcacactctattagaataccttctgggcgaagggaacctatctagacctgccgttcagctgcttggcgacgttatgagcgaggatggcttcttttatctgagctttgctgaggctcttcgggcacattcctgcctgagcgaccgtctgcagtactccaggatagtggggggttgggacttgctgccacgagcactgctatctagcttgagcggcttggtgttattgaatgctccggtggtagccatgacccaagggccacatgatgtccacgtgcagatagagaccagccccccagctagaaacctcaaagtgttgaaggccgacgttgtcctgctgacggccagcggtccggctgtgaagcgtattacattctccccaccactgccaagacacatgcaggaggctcttcgacgactccactacgtgccggctaccaaagtattcttgagcttccgccgtcctttctggcgcgaagagcacattgaggggggtcattctaacaccgacagaccttcaagaatgatcttttacccaccccctcgagagggcgcattactcttagcgtcctacacttggtctgatgccgcagccgcttttgctggattatcaagggaggaagccctccgcctggcattggacgacgtggcggctttacacggacccgtggtccgccaattatgggacgggaccggcgttgttaagagatgggccgaagatcaacacagccagggcggattcgtggtgcaaccacccgctctttggcaaactgagaaagacgattggaccgtgccctacgggaggatttacttcgcgggtgaacatacagcttacccgcatggctgggtggagacggccgttaagagcgccctgcgggcagctataaagattaatagccgcaaagggcctgcttctgacacagctagccctgagggacatgcaagtgatatggaggggcagggccatgtgcacggagttgctagcagtccaagtcatgatttagccaaggaagaagggtcccatcccccagtgcaaggccaactctctctgcagaacaccacccacaccaggacatcccattag

SEQ ID NO: 92403 - DNA, 1770 bp, Artificial Sequence
  derived and/or modified sequence
atgcccaatgacgacttctgtcccggtcttacaattaaggctatgggggcagaacgggcaccgcagcgtcagccttgtacgctgcaccttctcgtcttagtacctatcttgctatctctggtggccagtcaggattggaaggctgagcgctcgcaggatcctttcgaaaagtgtatgcaagatcccgactatgagcagttactgaaagtagtgacttgggggcttaaccgcacgttgaagccacaaagagtgatcgtggttggagctggcgtggccggactagtggctgctaaggtgcttagcgacgctggccataaggttaccattctcgaggctgacaatcgcataggagggcgaatttttacgtacagagatcagaataccgggtggataggtgagttgggagctatgcgtatgcctagcagccaccgaattctgcataagctgtgccaaggactgggcttaaatttgactaagttcacacaatatgataagaacacatggaccgaggtgcacgaagtgaaactgcgtaactacgtagtggagaaggttcctgagaaactcggctacgccctgcggccacaggaaaagggccattcaccagaggacatttaccaaatggccctgaatcaggctttgaaggacttgaaggcacttggctgtaggaaggcgatgaagaagtttgaaagacacaccctgctggaatatctactgggtgagggtaacctctctcgcccagccgtacagttattgggcgatgtcatgtctgaggacggtttcttttacctctcctttgcagaggccttgcgtgctcattcctgcttatccgacaggcttcagtactctcggatcgtcggaggatgggatctgctcccccgagctttgctgagcagtttgtctggactagtgttgctgaatgcccctgtggtggcaatgacccaggggcctcatgatgtacacgtgcagatcgaaacatcacccccagctcgcaaccttaaggtcttgaaagcagatgttgtgctgcttaccgcctcgggacctgcagtgaaacggatcactttttcacctcctcttccgagacacatgcaggaagcgctgaggcgactccactacgtgccggcaactaaggtgtttttatcatttcgtcgaccgttttggagggaggaacacatcgaggggggacatagcaacaccgaccggccttctcgcatgattttttacccccctcccagagaaggtgctcttttattagcctcctatacttggtccgatgccgctgccgcatttgccggattatcccgagaggaagctcttagactcgcactggacgacgtcgcagctctccacgggccagtggtgcggcagctttgggacggaactggggtggtgaaaagatgggccgaggaccagcattcacagggtggctttgtcgtacagcctcctgctctctggcagacagagaaagacgattggacagtaccttacggtcggatctacttcgcgggagagcatacagcttacccacacggttgggtcgaaaccgcagtgaagagtgcactccgtgcagctataaagatcaacagtcgtaagggtccagctagtgataccgctagtccagagggccacgcctcagatatggagggccaggggcacgtgcacggtgtagcttcttctccctcccacgacttggctaaagaagaggggagtcacccccctgttcaaggccagctgagcctgcagaacacgactcacacaaggacttcacactag

SEQ ID NO: 92404 - DNA, 2344 bp, Artificial Sequence
  derived and/or modified sequence
ggcccaccgtactacttctgcgcctgcgcgaccgtgattccccgctcgcgactccccaccccccagggctccctaaagagggccacgagctgcgaaagggcgggaaaggcagttggagaagaggtaagcggttactcactccatggctgcagcaaggagaggcggcggcggcctcggctgaagaaagaaggtgggagcggagagcgcaggcgtgaaacccaccttgtcccatccacatcaggacatcccagctggagttcaaccttcatcccttctgtggcagttaggagactgaatcaaggtccagagaaggtggaggaatcctgatactgagcggaagaaaatacacagatgtgcttccttcccagtcctgacaaatggcctttccttaagttcctcattaattcatatgaagacaacacatttggtgactaaatttggaatcagaggcttttaaagcctcccagctgctctgaccccaatatcaggaacttggcatctctgatctaacaagggcaccactaacaaggacaaagccaccatcattcaccttgattccgcacatgcccaacgatgacttctgtcctgggctaaccataaaggccatgggtgctgagagagccccccagaggcagccatgcaccctgcacctcctcgtcctcgtccccatcctcctcagcctggtggcctcccaggactggaaggctgaacgcagccaagaccccttcgagaaatgcatgcaggatcctgactatgagcagctgctcaaggtggtgacctgggggctcaatcggaccctgaagccccagagggtgattgtggttggcgctggtgtggccgggctggtggccgccaaggtgctcagcgatgctggacacaaggtcaccatcctggaggcagataacaggatcgggggccgcatcttcacctaccgggaccagaacacgggctggattggggagctgggagccatgcgcatgcccagctctcacaggatcctccacaagctctgccagggcctggggctcaacctgaccaagttcacccagtacgacaagaacacgtggacggaggtgcacgaagtgaagctgcgcaactatgtggtggagaaggtgcccgagaagctgggctacgccttgcgtccccaggaaaagggccactcgcccgaagacatctaccagatggctctcaaccaggccctcaaagacctcaaggcactgggctgcagaaaggcgatgaagaagtttgaaaggcacacgctcttggaatatcttctcggggaggggaacctgagccggccggccgtgcagcttctgggagacgtgatgtccgaggatggcttcttctatctcagcttcgccgaggccctccgggcccacagctgcctcagcgacagactccagtacagccgcatcgtgggtggctgggacctgctgccgcgcgcgctgctgagctcgctgtccgggcttgtgctgttgaacgcgcccgtggtggcgatgacccagggaccgcacgatgtgcacgtgcagatcgagacctctcccccggcgcggaatctgaaggtgctgaaggccgacgtggtgctgctgacggcgagcggaccggcggtgaagcgcatcaccttctcgccgccgctgccccgccacatgcaggaggcgctgcggaggctgcactacgtgccggccaccaaggtgttcctaagcttccgcaggcccttctggcgcgaggagcacattgaaggcggccactcaaacaccgatcgcccgtcgcgcatgattttctacccgccgccgcgcgagggcgcgctgctgctggcctcgtacacgtggtcggacgcggcggcagcgttcgccggcttgagccgggaagaggcgttgcgcttggcgctcgacgacgtggcggcattgcacgggcctgtcgtgcgccagctctgggacggcaccggcgtcgtcaagcgttgggcggaggaccagcacagccagggtggctttgtggtacagccgccggcgctctggcaaaccgaaaaggatgactggacggtcccttatggccgcatctactttgccggcgagcacaccgcctacccgcacggctgggtggagacggcggtcaagtcggcgctgcgcgccgccatcaagatcaacagccggaaggggcctgcatcggacacggccagccccgaggggcacgcatctgacatggaggggcaggggcatgtgcatggggtggccagcagcccctcgcatgacctggcaaaggaagaaggcagccaccctccagtccaaggccagttatctctccaaaacacgacccacacgaggacctcgcattaaagtattttcgg

SEQ ID NO: 92405 - DNA, 1793 bp, Artificial Sequence
  derived and/or modified sequence
gacagtggagggcagtggagaggaccgcgctgtcctgctgtcaccaagagctggagacaccatctcccaccgagagtcatggccccattggccctgcacctcctcgtcctcgtccccatcctcctcagcctggtggcctcccaggactggaaggctgaacgcagccaagaccccttcgagaaatgcatgcaggatcctgactatgagcagctgctcaaggtggtgacctgggggctcaatcggaccctgaagccccagagggtgattgtggttggcgctggtgtggccgggctggtggccgccaaggtgctcagcgatgctggacacaaggtcaccatcctggaggcagataacaggatcgggggccgcatcttcacctaccgggaccagaacacgggctggattggggagctgggagccatgcgcatgcccagctctcacaggatcctccacaagctctgccagggcctggggctcaacctgaccaagttcacccagtacgacaagaacacgtggacggaggtgcacgaagtgaagctgcgcaactatgtggtggagaaggtgcccgagaagctgggctacgccttgcgtccccaggaaaagggccactcgcccgaagacatctaccagatggctctcaaccaggccctcaaagacctcaaggcactgggctgcagaaaggcgatgaagaagtttgaaaggcacacgctcttggaatatcttctcggggaggggaacctgagccggccggccgtgcagcttctgggagacgtgatgtccgaggatggcttcttctatctcagcttcgccgaggccctccgggcccacagctgcctcagcgacagactccagtacagccgcatcgtgggtggctgggacctgctgccgcgcgcgctgctgagctcgctgtccgggcttgtgctgttgaacgcgcccgtggtggcgatgacccagggaccgcacgatgtgcacgtgcagatcgagacctctcccccggcgcggaatctgaaggtgctgaaggccgacgtggtgctgctgacggcgagcggaccggcggtgaagcgcatcaccttctcgccgccgctgccccgccacatgcaggaggcgctgcggaggctgcactacgtgccggccaccaaggtgttcctaagcttccgcaggcccttctggcgcgaggagcacattgaaggcggccactcaaacaccgatcgcccgtcgcgcatgattttctacccgccgccgcgcgagggcgcgctgctgctggcctcgtacacgtggtcggacgcggcggcagcgttcgccggcttgagccgggaagaggcgttgcgcttggcgctcgacgacgtggcggcattgcacgggcctgtcgtgcgccagctctgggacggcaccggcgtcgtcaagcgttgggcggaggaccagcacagccagggtggctttgtggtacagccgccggcgctctggcaaaccgaaaaggatgactggacggtcccttatggccgcatctactttgccggcgagcacaccgcctacccgcacggctgggtggagacggcggtcaagtcggcgctgcgcgccgccatcaagatcaacagccggaaggggcctgcatcggacacggccagccccgaggggcacgcatctgacatggaggggcaggggcatgtgcatggggtggccagcagcccctcgcatgacctggcaaaggaagaaggcagccaccctccagtccaaggccagttatctctccaaaacacgacccacacgaggacctcgcattaaagtattttcgg

SEQ ID NO: 92406 - DNA, 2407 bp, Artificial Sequence
  derived and/or modified sequence
ggcccaccgtactacttctgcgcctgcgcgaccgtgattccccgctcgcgactccccaccccccagggctccctaaagagggccacgagctgcgaaagggcgggaaaggcagttggagaagaggtaagcggttactcactccatggctgcagcaaggagaggcggcggcggcctcggctgaagaaagaaggtgggagcggagagcgcaggcgtgaaacccaccttgtcccatccacatcaggacatcccagctggagttcaaccttcatcccttctgtggcagttaggagactgaatcaaggtccagagaaggtggaggaatcctgatactgagcggaagaaaatacacagatgtgcttccttcccagtcctgacaaatggcctttccttaagttcctcattaattcatatgaagacaacacatttggtgactaaatttggaatcagaggcttttaaagatgtttgaaagtttccataataaaacacttctgagaaagggggacctgcctttcacagcctcccagctgctctgaccccaatatcaggaacttggcatctctgatctaacaagggcaccactaacaaggacaaagccaccatcattcaccttgattccgcacatgcccaacgatgacttctgtcctgggctaaccataaaggccatgggtgctgagagagccccccagaggcagccatgcaccctgcacctcctcgtcctcgtccccatcctcctcagcctggtggcctcccaggactggaaggctgaacgcagccaagaccccttcgagaaatgcatgcaggatcctgactatgagcagctgctcaaggtggtgacctgggggctcaatcggaccctgaagccccagagggtgattgtggttggcgctggtgtggccgggctggtggccgccaaggtgctcagcgatgctggacacaaggtcaccatcctggaggcagataacaggatcgggggccgcatcttcacctaccgggaccagaacacgggctggattggggagctgggagccatgcgcatgcccagctctcacaggatcctccacaagctctgccagggcctggggctcaacctgaccaagttcacccagtacgacaagaacacgtggacggaggtgcacgaagtgaagctgcgcaactatgtggtggagaaggtgcccgagaagctgggctacgccttgcgtccccaggaaaagggccactcgcccgaagacatctaccagatggctctcaaccaggccctcaaagacctcaaggcactgggctgcagaaaggcgatgaagaagtttgaaaggcacacgctcttggaatatcttctcggggaggggaacctgagccggccggccgtgcagcttctgggagacgtgatgtccgaggatggcttcttctatctcagcttcgccgaggccctccgggcccacagctgcctcagcgacagactccagtacagccgcatcgtgggtggctgggacctgctgccgcgcgcgctgctgagctcgctgtccgggcttgtgctgttgaacgcgcccgtggtggcgatgacccagggaccgcacgatgtgcacgtgcagatcgagacctctcccccggcgcggaatctgaaggtgctgaaggccgacgtggtgctgctgacggcgagcggaccggcggtgaagcgcatcaccttctcgccgccgctgccccgccacatgcaggaggcgctgcggaggctgcactacgtgccggccaccaaggtgttcctaagcttccgcaggcccttctggcgcgaggagcacattgaaggcggccactcaaacaccgatcgcccgtcgcgcatgattttctacccgccgccgcgcgagggcgcgctgctgctggcctcgtacacgtggtcggacgcggcggcagcgttcgccggcttgagccgggaagaggcgttgcgcttggcgctcgacgacgtggcggcattgcacgggcctgtcgtgcgccagctctgggacggcaccggcgtcgtcaagcgttgggcggaggaccagcacagccagggtggctttgtggtacagccgccggcgctctggcaaaccgaaaaggatgactggacggtcccttatggccgcatctactttgccggcgagcacaccgcctacccgcacggctgggtggagacggcggtcaagtcggcgctgcgcgccgccatcaagatcaacagccggaaggggcctgcatcggacacggccagccccgaggggcacgcatctgacatggaggggcaggggcatgtgcatggggtggccagcagcccctcgcatgacctggcaaaggaagaaggcagccaccctccagtccaaggccagttatctctccaaaacacgacccacacgaggacctcgcattaaagtattttcggaaaaa

SEQ ID NO: 92407 - protein, 826 aa, Artificial Sequence
  derived and/or modified sequence
MQHIFAFFCTGFLGAVVGANFPNNIQIGGLFPNQQSQEHAAFRFALSQLTEPPKLLPQIDIVNISDSFEMTYRCLSVLQKVLDTAAEKNWQVTAVNILTTTEEGYRMLFQDLEKKKERLVVVDCESERLNAILGQIIKLEKNGIGYHYILANLGFMDIDLNKFKESGANVTGFQLVNYTDTIPAKIMQQWKNSDARDHTRVDWKRPKYTSALTYDGVKVMAEAFQSLRRQRIDISRRGNAGDCLANPAVPWGQGIDIQRALQQVRFEGLTGNVQFNEKGRRTNYTLHVIEMKHDGIRKIGYWNEDDKFVPAATDAQAGGDNSSVQNRTYIVTTILEDPYVMLKKNANQFEGNDRYEGYCVELAAEIAKHVGYSYRLEIVSDGKYGARDPDTKAWNGMVGELVYGRADVAVAPLTITLVREEVIDFSKPFMSLGISIMIKKPQKSKPGVFSFLDPLAYEIWMCIVFAYIGVSVVLFLVSRFSPYEWHSEEFEEGRDQTTSDQSNEFGIFNSLWFSLGAFMQQGCDISPRSLSGRIVGGVWWFFTLIIISSYTANLAAFLTVERMVSPIESAEDLAKQTEIAYGTLEAGSTKEFFRRSKIAVFEKMWTYMKSAEPSVFVRTTEEGMIRVRKSKGKYAYLLESTMNEYIEQRKPCDTMKVGGNLDSKGYGIATPKGSALRNPVNLAVLKLNEQGLLDKLKNKWWYDKGECGSGGGDSKDKTSALSLSNVAGVFYILIGGLGLAMLVALIEFCYKSRSESKRMKGFCLIPQQSINEAIRTSTLPRNSGAGASSGGSGENGRVVSHDFPKSMQSIPCMSHSSGMPLGATGL

SEQ ID NO: 92408 - DNA, 2481 bp, Artificial Sequence
  derived and/or modified sequence
atgcagcacatttttgccttcttctgtacaggatttctgggcgccgtcgttggtgcaaattttccgaataatatccaaataggcggattatttcccaatcaacagtcacaagaacacgctgcttttcgatttgccctgtcccagctgaccgaaccaccaaaattgctgcctcagatagacattgtgaacatatcagacagctttgagatgacctataggtgtctatccgtgctgcaaaaagtactggataccgccgctgagaaaaactggcaagtgacagcggtaaacatacttaccacaacggaggagggatacaggatgcttttccaagatcttgagaagaagaaggagagactagttgttgtggactgtgaaagcgagcggctcaatgctattctgggccagataatcaagcttgaaaaaaacggaatcgggtatcactatatcctggcaaacctgggctttatggacattgaccttaataaatttaaagaatctggtgctaacgtgactgggtttcaattagtaaattacacggacaccataccggcaaagatcatgcagcagtggaagaattccgatgcaagagatcacacacgcgtagactggaagaggccaaagtacaccagcgcgctgacctatgatggtgtcaaggtgatggcagaagcatttcagtcactgagacggcagcgcatagatatttcccgtagggggaacgctggagactgtctcgccaaccccgccgttccatgggggcagggaatcgatattcagagagcactacagcaggtcaggttcgaagggctgactgggaacgtccagttcaatgagaagggaaggcggaccaattacaccctgcatgtcatcgagatgaaacacgacgggattagaaagattggatactggaacgaagacgataaattcgttcccgctgcaaccgatgcccaggcaggaggcgataactcttccgtgcagaacagaacctatatcgtgaccacgatccttgaggacccatacgtgatgcttaaaaaaaacgctaatcagttcgaagggaacgataggtatgagggttactgtgttgagctggccgccgagatcgcgaagcatgtggggtatagttaccgcttggagattgtctctgacgggaagtacggggccagggatccggatacaaaggcctggaatggcatggttggagagctggtgtacgggcgagcagacgtagctgtggcccctctgactatcaccctggttagagaagaggtgatcgacttctcgaagccctttatgtcgttggggatctccataatgatcaaaaaaccacagaagtcaaagccgggtgtcttcagctttcttgatcccctggcctacgaaatctggatgtgtatcgtgttcgcctacattggcgtcagtgtggtcctcttcctcgttagcagatttagcccatacgaatggcattctgaagagttcgaggagggcagagaccagaccaccagtgaccagtctaacgaattcgggatcttcaacagcctctggttctcgcttggggctttcatgcaacagggttgtgacatatcaccaaggtccctaagtggtaggatcgtcgggggcgtctggtggttcttcacccttataataatttctagttataccgctaatctggccgcttttcttaccgtggaaagaatggtgtccccgattgaaagcgctgaagaccttgccaagcagactgagattgcctacggcaccctggaagcaggatcgacaaaggagtttttccgcaggagtaagattgctgtgtttgaaaagatgtggacctacatgaagagtgccgagcctagcgtttttgtccgaaccaccgaagagggcatgatccgcgttcggaagagtaagggaaagtacgcttacctattggaatcaaccatgaacgagtacatcgaacagcggaagccctgtgataccatgaaagtgggaggaaacctggatagtaaaggctatggcattgctacccccaagggctctgcactgcgaaatcccgtgaacctggctgtcctgaaactcaatgagcagggactactcgacaagctgaagaacaagtggtggtacgacaagggagagtgtggctcaggcgggggcgattcaaaggataagacaagcgccctgagtctatccaacgtcgcaggtgtcttctatatcctgatcggcggtctcggactagcaatgctagtcgcgctaatcgaattctgttacaaaagtcgatcagaaagcaaacggatgaagggattctgccttatccctcagcaatcaattaatgaggctatccgcaccagcaccctgccacggaacagtggagcaggtgccagttcaggcggctcgggggagaatggtcgggtcgtctcacacgactttccaaagtccatgcaaagcattccgtgtatgagtcacagctccggcatgccactgggtgccacagggctttag

SEQ ID NO: 92409 - DNA, 2761 bp, Artificial Sequence
  derived and/or modified sequence
tcttttcccgtgctcagttaatctggctgtcagttggtgttaacgctgcagtttaagtgttcggattccaagggaaacagacaaacctcacgaaaggaaggaagcaagcaagcaaggaaggaactgcaggaggaaaagaacaggcagaacagcgagaagaataaagggaaagggggggaaacaccaaatctatgattggacctgggcttctttttcgccaatgcaaaaaggaatatgcagcacatttttgccttcttctgcaccggtttcctaggcgcggtagtaggtgccaatttccccaacaatatccagatcgggggattatttccaaaccagcagtcacaggaacatgctgcttttagatttgctttgtcgcaactcacagagcccccgaagctgctcccccagattgatattgtgaacatcagcgacagctttgagatgacctatagatgcttatccgtcctgcagaaagtcctggatacagctgctgagaagaactggcaggtgacagcagtcaacattttgacaaccacagaggagggataccggatgctctttcaggacctggagaagaaaaaggagcggctggtggtggtggactgtgaatcagaacgcctcaatgctatcttgggccagattataaagctagagaagaatggcatcggctaccactacattcttgcaaatctgggcttcatggacattgacttaaacaaattcaaggagagtggcgccaatgtgacaggtttccagctggtgaactacacagacactattccggccaagatcatgcagcagtggaagaatagtgatgctcgagaccacacacgggtggactggaagagacccaagtacacctctgcgctcacctacgatggggtgaaggtgatggctgaggctttccagagcctgcggaggcagagaattgatatatctcgccgggggaatgctggggattgtctggctaacccagctgttccctggggccaagggatcgacatccagagagctctgcagcaggtgcgatttgaaggtttaacaggaaacgtgcagtttaatgagaaaggacgccggaccaactacacgctccacgtgattgaaatgaaacatgacggcatccgaaagattggttactggaatgaagatgataagtttgtccctgcagccaccgatgcccaagctgggggcgataattcaagtgttcagaacagaacatacatcgtcacaacaatcctagaagatccttatgtgatgctcaagaagaacgccaatcagtttgagggcaatgaccgttacgagggctactgtgtagagctggcggcagagattgccaagcacgtgggctactcctaccgtctggagattgtcagtgatggaaaatacggagcccgagaccctgacacgaaggcctggaatggcatggtgggagagctggtctatggaagagcagatgtggctgtggctcccttaactatcactttggtccgggaagaagttatagatttctccaaaccatttatgagtttggggatctccatcatgattaaaaaaccacagaaatccaagccgggtgtcttctccttccttgatcctttggcttatgagatttggatgtgcattgtttttgcctacattggagtgagtgttgtcctcttcctggtcagccgcttcagtccctatgaatggcacagtgaagagtttgaggaaggacgggaccagacaaccagtgaccagtccaatgagtttgggatattcaacagtttgtggttctccctgggagccttcatgcagcaaggatgtgacatttctcccaggtccctgtctggtcgcatcgttggtggcgtctggtggttcttcaccttaatcatcatctcctcatatacagccaatctggccgccttcctgaccgtggagaggatggtgtctcccattgagagtgcagaggacctagcgaagcagacagaaattgcctacgggacgctggaagcaggatctactaaggagttcttcaggaggtctaaaattgctgtgtttgagaagatgtggacatacatgaagtcagcagagccatcagtttttgtgcggaccacagaggaggggatgattcgagtgaggaaatccaaaggcaaatatgcctacctcctggagtccaccatgaatgagtacattgagcagcggaaaccctgtgacaccatgaaggtgggaggtaacttggattccaaaggctatggcattgcaacacccaaggggtctgccctgagaaatccagtaaacctggcagtgttaaaactgaacgagcaggggcttttggacaaattgaaaaacaaatggtggtacgacaagggcgagtgcggcagcgggggaggtgattccaaggacaagacaagcgctctgagcctcagcaatgtggcaggcgtgttctacatcctgatcggaggacttggactagccatgctggttgccttaatcgagttctgctacaaatcccgtagtgaatccaagcggatgaagggtttttgtttgatcccacagcaatccatcaacgaagccatacggacatcgaccctcccccgcaacagcggggcaggagccagcagcggcggcagtggagagaatggtcgggtggtcagccatgacttccccaagtccatgcaatcgattccttgcatgagccacagttcagggatgcccttgggagccacgggattgtaactggagcagatggagaccccttggggagcaggctcgggctccccag

SEQ ID NO: 92410 - DNA, 2481 bp, Artificial Sequence
  derived and/or modified sequence
atgcagcacatctttgccttcttctgcaccggcttcctgggcgctgtggtgggcgccaacttccccaacaacatccagattggaggcctcttccccaaccagcagagccaggagcacgccgccttccgctttgccctgagccagctgacagagccccccaagctgctgccccagattgatattgtgaacatcagtgacagctttgagatgacctaccgctgcctgtctgtgctgcagaaggtgctggacacagctgctgagaagaactggcaggtgacagctgtgaacatcctgaccaccacagaggagggctacaggatgctgttccaggacctggagaagaagaaggagcggctggtggtggtggactgtgagagcgagcggctgaatgccatcctgggccagatcatcaagctggagaagaatggcatcggctaccactacatcctggccaacctgggcttcatggacatcgacctgaacaagttcaaggagagcggggccaacgtgacaggcttccagctggtgaactacacagacaccatcccagccaagatcatgcagcagtggaagaacagtgatgcccgggaccacaccagggtggactggaagaggcccaagtacaccagcgccctgacctatgatggagtgaaggtgatggccgaggccttccagagcctgcggcggcagagaattgacatcagcagaagaggaaatgctggggactgcctggccaacccagctgtgccctggggccagggcatcgacatccagagggccctgcagcaggtgcgctttgagggcctgactggaaatgtgcagttcaatgagaagggccgccgcaccaactacaccctgcacgtgattgagatgaagcatgatggcatcaggaagattggctactggaatgaagatgacaagtttgtgcctgctgccacagatgcccaggccggcggggacaacagctctgtgcagaacagaacctacatcgtgaccaccatcctggaggacccctacgtgatgctgaagaagaatgccaaccagtttgagggcaatgacagatatgagggctactgtgtggagctggccgctgagatcgccaagcacgtgggctacagctaccgcctggagatcgtgtctgatggcaagtacggggcccgggaccctgacaccaaggcctggaatggcatggtgggggagctggtgtatggccgggcagatgtggccgtggcccccctgaccatcaccctggtgcgggaggaggtgattgacttcagcaagcccttcatgagcctgggcatcagcatcatgatcaagaagccccagaagagcaagccaggagtcttctccttcctggaccccctggcctatgagatctggatgtgcatcgtgtttgcctacatcggcgtgtctgtggtgctcttcctggtgagccgcttcagcccctatgagtggcacagcgaggagtttgaggagggccgggaccagaccaccagtgaccagagcaatgaatttggcatcttcaacagcctgtggttcagcctgggcgccttcatgcagcagggctgtgacatcagccccaggagcctgagcggccgcatcgtgggcggcgtgtggtggttcttcaccctcatcatcatcagcagctacacagccaacctggccgccttcctgactgtggagaggatggtgagccccattgaatctgctgaggacctggccaagcagacagaaattgcctacggcaccctggaggccggcagcaccaaggagttcttccgccgcagcaagattgctgtgtttgagaagatgtggacctacatgaagtctgctgagcccagcgtgtttgtgaggaccacagaggagggcatgatccgggtgaggaagagcaagggcaagtatgcctacctgctggagagcaccatgaatgagtacatcgagcagaggaagccctgtgacaccatgaaggtgggcggcaacctggacagcaagggctacggcatcgccacccccaagggcagcgccctgagaaatcctgtgaacctggccgtgctgaagctgaatgagcagggcctgctggacaagctgaagaacaagtggtggtatgacaagggggagtgtggcagcggcggcggggacagcaaggacaagaccagcgccctgagcctgagcaatgtggccggggtcttctacatcctgattggaggcctgggcctggccatgctggtggccctgattgagttctgctacaagagccgctctgagagcaagaggatgaagggcttctgcctgatcccccagcagagcatcaatgaggccatccgcaccagcaccctgcccagaaattctggagctggggccagcagcggcggcagcggggagaatggccgggtggtgtcccatgacttccccaagtccatgcagagcatcccctgcatgagccacagcagcggcatgcccctgggcgccaccggcctgtag

SEQ ID NO: 92411 - DNA, 2481 bp, Artificial Sequence
  derived and/or modified sequence
atgcagcacatcttcgccttcttctgcaccggcttcctgggcgccgttgtgggagccaatttcccaaataatatccagataggtgggctctttccaaaccagcagagccaggagcatgccgcatttcgattcgcgctatcccagctcacagaacctcctaagcttttgcctcagatcgatattgtcaacatttctgactctttcgaaatgacctatagatgcttatcagtgctgcaaaaggtgctagacaccgctgccgagaaaaattggcaggtgactgccgtgaatatcctgactaccaccgaggagggctataggatgttgtttcaggacttggaaaagaagaaggagagattggtcgtggtcgactgtgagagcgaacggttaaatgcgattcttggccaaatcatcaagctggaaaaaaatgggatcgggtatcactacatactggccaatctgggattcatggacattgatcttaataaattcaaggagtctggggcaaatgtgaccgggttccagctggtgaactacactgacactattcccgctaaaatcatgcagcaatggaagaactctgacgcccgagaccacactagagtggattggaagagaccaaaatacacatcagcccttacttacgatggggtaaaggtgatggcagaggcattccagagtctcaggcgccagcggattgatattagccgccgcggcaacgcgggggattgcttggctaaccctgcagtcccttggggccagggtatcgatatccaacgtgcgctgcaacaggtccgctttgagggactcaccgggaatgtccagtttaatgaaaagggtcggcgaactaactacacactgcatgtaattgagatgaagcacgatgggattcgcaaaataggatactggaacgaggacgataaattcgtgcccgccgcgaccgatgctcaggcgggtggcgataattcctcggtgcagaatcgtacctatatcgtgacgactatcctggaggacccctatgttatgctgaaaaagaatgccaatcaatttgagggaaatgaccggtacgagggttattgcgtggaattagcggccgagatcgccaaacacgtggggtattcttacaggctggaaatcgtcagcgatggaaaatatggtgcacgggaccccgacacaaaggcttggaatggaatggtaggggagctggtgtatggtcgagccgacgtggccgtagcgccactgactatcaccctggtgagagaagaggtgatagactttagtaaacccttcatgagcctgggcatcagcataatgattaaaaaaccacagaagagcaagcccggcgtctttagtttccttgatcctctcgcttacgagatctggatgtgcatagtgtttgcttacatcggagtttctgttgtgctgttcttagtgtcgcggttttctccttacgagtggcactctgaagaattcgaggagggccgcgaccagacaactagcgaccagtctaacgaattcggtatcttcaattcactgtggttttctctgggggcatttatgcagcaaggctgcgatatcagccccagatccctttctggcaggatcgttggaggtgtctggtggttcttcactttgataatcatatcgagttatactgccaacttggcagcgttcctcaccgtggaacgcatggtttccccgatcgaaagcgcagaggatctggcaaagcagactgaaattgcgtatggaacgctggaagctgggagcacaaaagagttttttcggagatccaagatcgccgtgtttgaaaaaatgtggacttatatgaaatctgctgagcccagcgttttcgtacggacaacagaagaaggcatgatacgggttagaaagtctaaagggaagtacgcctatctactggagagtaccatgaatgagtacatcgagcaacggaagccctgtgatacaatgaaggtgggtggcaatcttgattctaagggctacgggatcgccacgcccaagggcagcgctctgcgcaaccctgtcaatttggccgtgctgaaacttaacgaacagggccttctcgataagctgaagaataagtggtggtacgataaaggggagtgcggatcaggaggcggcgatagcaaagataaaacctcagcactgtctctcagcaacgttgcaggcgtcttttatatattgattggcggcctcgggcttgcaatgttggtcgcattgatcgaattctgttataaatctcgctccgagagcaaacgaatgaagggattctgcctgatacctcagcagtcgatcaatgaggcgattagaacctccacactgcctcgtaattctggcgccggggcatctagtggtgggtccggagaaaatggcagggtagtatcccacgatttcccgaagtccatgcagtccattccatgtatgagtcactctagtggcatgccactcggcgcaactgggctttag

SEQ ID NO: 92412 - DNA, 2481 bp, Artificial Sequence
  derived and/or modified sequence
atgcagcacattttcgcttttttctgtacaggcttcctgggtgcagttgtaggggcaaactttcccaacaacattcagattggaggtctgttcccaaatcagcagagccaggaacacgctgcttttcggttcgccctctcacaactcacggagccccctaagttgctgccccagattgacatcgtcaatatctctgatagctttgagatgacataccgatgtctgtccgtacttcaaaaagtgctggacacagcggcagaaaaaaactggcaggtgacggccgtcaatattctgacaaccactgaggagggctatcgcatgctgttccaggacctggagaaaaagaaggagcgactggtggtggtagattgcgagagtgagcgactgaatgccatactagggcaaatcattaaattggagaagaatggcatcgggtatcactatattctggcaaatctggggtttatggacatagatctgaataagtttaaggaatccggagccaacgttaccggcttccagctggtgaattacacagacacgatccccgcaaagattatgcagcagtggaaaaacagtgatgccagggaccacacccgggtggactggaagcgcccaaagtatacttctgccctgacgtacgatggcgttaaggtgatggcagaagcgtttcagagtttgcggagacagcgtatcgatatctcaagacgcggtaatgctggcgattgcctggctaaccctgccgtgccgtggggacagggaatcgatattcagcgagccttgcagcaggtgcggtttgaaggcctgaccggtaacgtacagtttaatgaaaaggggagaaggactaactacaccctgcatgtcattgagatgaaacatgacggcatccgcaagattggctactggaatgaggacgataagttcgtaccggctgcgaccgacgctcaggccggaggtgacaattcatcagtgcagaataggacatatatcgttactacgattctcgaggatccttacgtgatgctgaagaaaaacgcaaaccagttcgagggcaacgatcgctacgagggatattgtgtggaattggcggctgaaatcgctaaacacgtaggttactcgtatcggctggagattgtgtccgacgggaaatacggggctagagaccccgacactaaagcctggaacgggatggttggcgaactggtgtatggcagggccgacgtggctgtggctccactaactatcaccctggtcagagaggaggtgatcgacttctccaaaccttttatgagcctgggcatctctatcatgataaagaagccacagaagtcaaaacccggagttttcagctttctggacccactggcatacgaaatttggatgtgtattgtgtttgcatacatcggcgtgtccgtcgtactcttcctggtgtctagattcagcccctacgagtggcattctgaagagtttgaggagggtagggatcaaacaacgagcgaccagtccaatgaatttggcatcttcaatagcctgtggtttagtttgggcgcattcatgcaacaggggtgtgatatctcccctagatcgctctctgggagaattgttggaggtgtctggtggttcttcaccctaattattatttcttcttatacagcaaatctcgccgcatttctcaccgtggagagaatggtgagcccaattgagtccgccgaggacctggccaaacagaccgagatcgcgtatgggactcttgaggctggttccaccaaagaattttttcgcagaagtaagatcgccgtgtttgagaagatgtggacatacatgaaatctgcagagccgtccgtattcgtgcgcaccacggaagaagggatgatccgggtgaggaagagtaagggaaaatatgcttacctgctggagagcaccatgaacgagtacatcgagcagagaaagccatgcgatacaatgaaagtgggcggtaatctggactcaaaaggatatggtatcgccactcccaagggttctgccctgaggaatccagtgaacttagccgtcctaaaactgaatgagcagggcctgttagacaaactcaagaataagtggtggtacgataagggagaatgtgggtcaggcggaggcgactccaaagataagacctcggccctgagtttaagtaatgtggccggtgtgttttacatactgatcggcggactggggctcgctatgttggttgcattgatcgaattttgctataaatcccgctctgagtccaaaaggatgaaaggcttctgcctgatcccgcaacagtcaattaacgaggccatcaggacaagcaccctccccagaaattccggtgcgggagctagttcaggtggatcaggagagaatggacgcgtggtttcgcacgactttccaaaaagcatgcaaagcatcccttgtatgtcgcatagttctggcatgccgctcggggctaccggtctgtag

SEQ ID NO: 92413 - DNA, 2481 bp, Artificial Sequence
  derived and/or modified sequence
atgcagcacatcttcgccttcttctgcaccggcttcctgggcgccgtggtgggcgccaacttccccaacaacatccagatcggcggcctgttccccaaccagcagagccaggagcacgccgccttcagattcgccctgagccagctgaccgagccccccaagctgctgccccagatcgacatcgtgaacatcagcgacagcttcgagatgacctacagatgcctgagcgtgctgcagaaggtgctggacaccgccgccgagaagaactggcaggtgaccgccgtgaacatcctgaccaccaccgaggagggctacagaatgctgttccaggacctggagaagaagaaggagagactggtggtggtggactgcgagagcgagagactgaacgccatcctgggccagatcatcaagctggagaagaacggcatcggctaccactacatcctggccaacctgggcttcatggacatcgacctgaacaagttcaaggagagcggcgccaacgtgaccggcttccagctggtgaactacaccgacaccatccccgccaagatcatgcagcagtggaagaacagcgacgccagagaccacaccagagtggactggaagagacccaagtacaccagcgccctgacctacgacggcgtgaaggtgatggccgaggccttccagagcctgagaagacagagaatcgacatcagcagaagaggcaacgccggcgactgcctggccaaccccgccgtgccctggggccagggcatcgacatccagagagccctgcagcaggtgagattcgagggcctgaccggcaacgtgcagttcaacgagaagggcagaagaaccaactacaccctgcacgtgatcgagatgaagcacgacggcatcagaaagatcggctactggaacgaggacgacaagttcgtgcccgccgccaccgacgcccaggccggcggcgacaacagcagcgtgcagaacagaacctacatcgtgaccaccatcctggaggacccctacgtgatgctgaagaagaacgccaaccagttcgagggcaacgacagatacgagggctactgcgtggagctggccgccgagatcgccaagcacgtgggctacagctacagactggagatcgtgagcgacggcaagtacggcgccagagaccccgacaccaaggcctggaacggcatggtgggcgagctggtgtacggcagagccgacgtggccgtggcccccctgaccatcaccctggtgagagaggaggtgatcgacttcagcaagcccttcatgagcctgggcatcagcatcatgatcaagaagccccagaagagcaagcccggcgtgttcagcttcctggaccccctggcctacgagatctggatgtgcatcgtgttcgcctacatcggcgtgagcgtggtgctgttcctggtgagcagattcagcccctacgagtggcacagcgaggagttcgaggagggcagagaccagaccaccagcgaccagagcaacgagttcggcatcttcaacagcctgtggttcagcctgggcgccttcatgcagcagggctgcgacatcagccccagaagcctgagcggcagaatcgtgggcggcgtgtggtggttcttcaccctgatcatcatcagcagctacaccgccaacctggccgccttcctgaccgtggagagaatggtgagccccatcgagagcgccgaggacctggccaagcagaccgagatcgcctacggcaccctggaggccggcagcaccaaggagttcttcagaagaagcaagatcgccgtgttcgagaagatgtggacctacatgaagagcgccgagcccagcgtgttcgtgagaaccaccgaggagggcatgatcagagtgagaaagagcaagggcaagtacgcctacctgctggagagcaccatgaacgagtacatcgagcagagaaagccctgcgacaccatgaaggtgggcggcaacctggacagcaagggctacggcatcgccacccccaagggcagcgccctgagaaaccccgtgaacctggccgtgctgaagctgaacgagcagggcctgctggacaagctgaagaacaagtggtggtacgacaagggcgagtgcggcagcggcggcggcgacagcaaggacaagaccagcgccctgagcctgagcaacgtggccggcgtgttctacatcctgatcggcggcctgggcctggccatgctggtggccctgatcgagttctgctacaagagcagaagcgagagcaagagaatgaagggcttctgcctgatcccccagcagagcatcaacgaggccatcagaaccagcaccctgcccagaaacagcggcgccggcgccagcagcggcggcagcggcgagaacggcagagtggtgagccacgacttccccaagagcatgcagagcatcccctgcatgagccacagcagcggcatgcccctgggcgccaccggcctgtag

SEQ ID NO: 92414 - protein, 916 aa, Artificial Sequence
  derived and/or modified sequence
MCCSTHLFQPLQLAGGLEWPWSNLLCFLTPVKLHPEVWGLFPNQQSQEHAAFRFALSQLTEPPKLLPQIDIVNISDSFEMTYRFCSQFSKGVYAIFGFYERRTVNMLTSFCGALHVCFITPSFPVDTSNQFVLQLRPELQDALISIIDHYKWQKFVYIYDADRGLSVLQKVLDTAAEKNWQVTAVNILTTTEEGYRMLFQDLEKKKERLVVVDCESERLNAILGQIIKLEKNGIGYHYILANLGFMDIDLNKFKESGANVTGFQLVNYTDTIPAKIMQQWKNSDARDHTRVDWKRPKYTSALTYDGVKVMAEAFQSLRRQRIDISRRGNAGDCLANPAVPWGQGIDIQRALQQVRFEGLTGNVQFNEKGRRTNYTLHVIEMKHDGIRKIGYWNEDDKFVPAATDAQAGGDNSSVQNRTYIVTTILEDPYVMLKKNANQFEGNDRYEGYCVELAAEIAKHVGYSYRLEIVSDGKYGARDPDTKAWNGMVGELVYGRADVAVAPLTITLVREEVIDFSKPFMSLGISIMIKKPQKSKPGVFSFLDPLAYEIWMCIVFAYIGVSVVLFLVSRFSPYEWHSEEFEEGRDQTTSDQSNEFGIFNSLWFSLGAFMQQGCDISPRSLSGRIVGGVWWFFTLIIISSYTANLAAFLTVERMVSPIESAEDLAKQTEIAYGTLEAGSTKEFFRRSKIAVFEKMWTYMKSAEPSVFVRTTEEGMIRVRKSKGKYAYLLESTMNEYIEQRKPCDTMKVGGNLDSKGYGIATPKGSALRNPVNLAVLKLNEQGLLDKLKNKWWYDKGECGSGGGDSKDKTSALSLSNVAGVFYILIGGLGLAMLVALIEFCYKSRSESKRMKGFCLIPQQSINEAIRTSTLPRNSGAGASSGGSGENGRVVSHDFPKSMQSIPCMSHSSGMPLGATGL

SEQ ID NO: 92415 - DNA, 2751 bp, Artificial Sequence
  derived and/or modified sequence
atgtgctgcagcacccacctttttcagccactgcaactcgctggcggtctggagtggccttggtcgaatctcttatgttttctcaccccagtcaagctgcaccctgaggtatggggccttttcccaaaccaacagtcgcaggagcacgcggccttccgtttcgccctgagtcagcttacggagcccccaaaacttctcccccagatagatattgtcaatatttcggattcgttcgagatgacataccgcttctgcagtcaattctccaagggcgtgtatgccatctttggattctacgaacggcgaacagtgaatatgctgacatctttttgcggtgcccttcatgtgtgttttatcacaccgagctttccggtggatacgtctaatcaattcgttctgcaactccgcccagagctacaggacgcgctcattagcattattgatcattataagtggcaaaaatttgtgtatatctacgatgctgaccgcggactgtctgtgcttcagaaggtgctggatactgctgctgagaagaactggcaggttacggctgtgaacatactgacaactaccgaggagggttatagaatgttgttccaagatctcgaaaagaagaaggagcggctcgtggttgtcgattgtgagtccgaaagactgaacgccattctcgggcagatcatcaaacttgaaaagaatggcatcggataccactacatcctggccaatcttgggttcatggacatcgatctgaacaagtttaaagagtccggggctaatgttacgggattccaactagtgaattacacggacacgattcctgctaaaatcatgcagcagtggaagaattcggatgccagggatcatacccgagtggactggaaaaggcccaagtacacaagcgccttgacttacgatggagtcaaagtgatggcggaagcgttccagtccctgcgcagacaaaggattgacatctccagaagggggaacgcgggggattgtctagcaaacccagctgtgccatgggggcagggcattgacattcagcgggcattgcaacaggtgcgctttgaggggctcacgggcaacgtgcaattcaatgagaagggaaggaggaccaattacacactgcatgtgatcgagatgaagcatgacggaatcaggaagattggttattggaatgaagacgacaagtttgtccctgctgccactgatgcccaggccgggggcgataactcaagcgtgcagaaccggacatatatagtcactacaatattagaggacccttatgttatgctgaaaaaaaacgctaaccagtttgaggggaacgatcgatatgagggctactgtgtggagctggctgctgagatagccaaacacgtaggctatagctaccggctggagatcgtctctgacggcaaatacggcgccagggacccagataccaaggcatggaatggaatggttggggaattggtgtacggaagagcagatgttgcagtcgctcccttgactataaccctagtccgggaggaagtcatcgacttctccaagccatttatgtctttaggaatctctattatgattaagaaacctcaaaagtcaaagcctggagtattcagcttcttggatcccctcgcatacgaaatctggatgtgtatcgttttcgcctatataggcgtgtccgtcgtgctgttcctggtctctcgattctctccctatgagtggcactcagaggagttcgaagagggaagagaccagaccacctctgaccagtcaaacgaatttggcatctttaacagcctctggtttagcctaggggcttttatgcagcaaggctgcgacatcagtccccgtagcctctctgggaggatcgtcgggggtgtctggtggtttttcactcttatcattatttccagttacaccgctaatcttgcagccttcctgaccgttgagagaatggtatcacccatcgagagtgccgaggacttagcgaagcagacagaaatcgcctatggcacgttggaggccgggagcaccaaagagtttttccggcgaagcaagatcgccgttttcgaaaagatgtggacgtacatgaagagtgccgaaccctccgtatttgttaggaccacagaggagggaatgatccgagtgcgaaagtccaagggcaagtacgcatacctcctcgagtccacaatgaatgagtatatcgagcaaagaaagccgtgtgacacaatgaaagtcggcggtaatttggactcgaagggctatggtatagctaccccaaaagggagtgccctcagaaatcccgttaacttggcggtgctcaagctgaacgaacagggcctgctggacaagcttaaaaataaatggtggtatgacaaaggggaatgcggaagcggcgggggggattctaaggacaaaacgagtgccttgtccctcagcaatgtggcgggggtcttttatatcctcatcggcggcctgggcctagcgatgttagtggctctcatcgagttttgctataagagtaggtcagagtcaaagcggatgaagggtttttgcttaataccacagcagagcatcaatgaagctattcggacctcaaccctgcccagaaattccggagccggcgcctcttcaggtgggagtggcgagaatgggagagtggtaagccacgatttcccgaagtccatgcagtccattccatgcatgagccactcaagtgggatgcccctgggagctacggggttgtag

SEQ ID NO: 92416 - DNA, 5233 bp, Artificial Sequence
  derived and/or modified sequence
gtgcaattgatattttgtcgggcatacatgtgctgcagtacccatctctttcagcctctccagctagctggcggcttggagtggccatggagtaacttgctttgtttcctgacacctgttaagctacatcctgaagtgtggggattatttccaaaccagcagtcacaggaacatgctgcttttagatttgctttgtcgcaactcacagagcccccgaagctgctcccccagattgatattgtgaacatcagcgacagctttgagatgacctatagattctgttcccagttctccaaaggagtctatgccatctttgggttttatgaacgtaggactgtcaacatgctgacctccttttgtggggccctccacgtctgcttcattacgccgagctttcccgttgatacatccaatcagtttgtccttcagctgcgccctgaactgcaggatgccctcatcagcatcattgaccattacaagtggcagaaatttgtctacatttatgatgccgaccggggcttatccgtcctgcagaaagtcctggatacagctgctgagaagaactggcaggtgacagcagtcaacattttgacaaccacagaggagggataccggatgctctttcaggacctggagaagaaaaaggagcggctggtggtggtggactgtgaatcagaacgcctcaatgctatcttgggccagattataaagctagagaagaatggcatcggctaccactacattcttgcaaatctgggcttcatggacattgacttaaacaaattcaaggagagtggcgccaatgtgacaggtttccagctggtgaactacacagacactattccggccaagatcatgcagcagtggaagaatagtgatgctcgagaccacacacgggtggactggaagagacccaagtacacctctgcgctcacctacgatggggtgaaggtgatggctgaggctttccagagcctgcggaggcagagaattgatatatctcgccgggggaatgctggggattgtctggctaacccagctgttccctggggccaagggatcgacatccagagagctctgcagcaggtgcgatttgaaggtttaacaggaaacgtgcagtttaatgagaaaggacgccggaccaactacacgctccacgtgattgaaatgaaacatgacggcatccgaaagattggttactggaatgaagatgataagtttgtccctgcagccaccgatgcccaagctgggggcgataattcaagtgttcagaacagaacatacatcgtcacaacaatcctagaagatccttatgtgatgctcaagaagaacgccaatcagtttgagggcaatgaccgttacgagggctactgtgtagagctggcggcagagattgccaagcacgtgggctactcctaccgtctggagattgtcagtgatggaaaatacggagcccgagaccctgacacgaaggcctggaatggcatggtgggagagctggtctatggaagagcagatgtggctgtggctcccttaactatcactttggtccgggaagaagttatagatttctccaaaccatttatgagtttggggatctccatcatgattaaaaaaccacagaaatccaagccgggtgtcttctccttccttgatcctttggcttatgagatttggatgtgcattgtttttgcctacattggagtgagtgttgtcctcttcctggtcagccgcttcagtccctatgaatggcacagtgaagagtttgaggaaggacgggaccagacaaccagtgaccagtccaatgagtttgggatattcaacagtttgtggttctccctgggagccttcatgcagcaaggatgtgacatttctcccaggtccctgtctggtcgcatcgttggtggcgtctggtggttcttcaccttaatcatcatctcctcatatacagccaatctggccgccttcctgaccgtggagaggatggtgtctcccattgagagtgcagaggacctagcgaagcagacagaaattgcctacgggacgctggaagcaggatctactaaggagttcttcaggaggtctaaaattgctgtgtttgagaagatgtggacatacatgaagtcagcagagccatcagtttttgtgcggaccacagaggaggggatgattcgagtgaggaaatccaaaggcaaatatgcctacctcctggagtccaccatgaatgagtacattgagcagcggaaaccctgtgacaccatgaaggtgggaggtaacttggattccaaaggctatggcattgcaacacccaaggggtctgccctgagaaatccagtaaacctggcagtgttaaaactgaacgagcaggggcttttggacaaattgaaaaacaaatggtggtacgacaagggcgagtgcggcagcgggggaggtgattccaaggacaagacaagcgctctgagcctcagcaatgtggcaggcgtgttctacatcctgatcggaggacttggactagccatgctggttgccttaatcgagttctgctacaaatcccgtagtgaatccaagcggatgaagggtttttgtttgatcccacagcaatccatcaacgaagccatacggacatcgaccctcccccgcaacagcggggcaggagccagcagcggcggcagtggagagaatggtcgggtggtcagccatgacttccccaagtccatgcaatcgattccttgcatgagccacagttcagggatgcccttgggagccacgggattgtaactggagcagatggagaccccttggggagcaggctcgggctccccagccccatcccaaacccttcagtgccaaaaacaacaacaaaatgaaacgcaaccaccaccaaccactgcgaccacaagaaggatgattcaacaggttttcctgaagaattgaaaaaccattttgctgtcccttttccttttttgatgttctttcacccttttctgtttgctaagtgaggatgaaaaaataacactgtactgcaataaggggagagtaaccctgtctaatgaaacctgtgtctctgagagtagagtcactggaacactaatgaggaaactgcactgttttattttaattcagttgttagtgtgtcttagtgtgtgcaattttttttcttactaatatccatggtttgcaggttctgttaggccctttccttctccttacttcttatccccaactccctacccacccctcttcagttttcagattggagattcaagatttgttccactttacaagcaagaggaaaaaaaagcaaccttcaaactaattctccatgggggctctccatgttaccctccactccttggcccaaacctctgatggagatagacattgttggagaagtgggctgccttccccaagtggggcactgcttaagcacttattcagtggagaacacaggtgaaaagcaactcaggatgagggtggtggagagggcaggggcagatgtgcagtcagagaaggactcctgaagttactgctgctcagaaaaacagttcctttaatgtggaagagccatttcataggtcataggtggtatggtatatttcttcagagtcaaccttggccctgagaagtatgtcctcctggtgtgctcaggctcaacggcagtctggtggctgaaggcacttggcctcctaaaccaagcagaattttgggaagagataacagccagggagatattgcccatgattctcactttttctttgcctggcatctaagcaggaacccattgtggagtagactctcttcttctatggagcctctgacatggggagcaatgctaagcaagctaagtgtaaaagaaaagtgacagaataattttggaagaggaagcctcatcaaaagctcacacaaaatagagcttcccatggtgtgccctatcctaggtttaagaaaacacgtatgaagtttatgctgatgcaaagaacttgggtttttatgttaatataaagtgttgttttagcatgtggccagatgatgctctgtcatctttagaaagtgagataaccaaggaaataattgaaggagtatagggagatggattaagttgataatgacatttagggcaacttaagacctttgatcccaggttctaactcaaagaggctgaccttcccccagctaagatagcatgaggacgttgtattccaatatacgtatgattggggctacaaagctgaactaaagcaagattggtgaagtggcagggtttatagagagaagcccaggctgagttcagcttttgttggaagtgagaatccctgacatatagctttcttggagatcccaactctcattcttggtgcaactggcttccagctctccagcagtcactctcctaggtgcatgattcagtgcgtgccatgtgtcattagcttttactgataaccatattctggcttgttcccttaccccctacttctatccaattttctctgctaggggttatcattagcaattgacatgctaaaggttttggagcccacctaggggtaggtgcagctttattggcttttctgtggattctctcagtggacccacaccatctctatgtctctccactctcctgccttcagccatagcaaagaatccttccaaaatcaaactcttcacttttttgactcaagtgttgttgttcagtctctcgcgtgtcaatgtggtcatggttcatgaaaccggaccctcaagatggatgattgcttttaactactgccagctgatgtctctcagcccctgccctcatacaagatttttctcagccttcagcctaccactgcagaatccgatgtgacccaccattagggagtctgcatcttggaagagttggaaataaccctttaacatcaacatgcttcaaagactttttgcctttggcctagtaagatgcctctccagctactgagcccacaagtaacatgagcggataaaaagagacttgtttgtgctagaaatgagggtctatgctatgagggggtccaagactctggcgaaatgtgctttttcatcaatggagaaatgaaaggaaaacacaagcaagaaaaaagttaacttgtattatgtatttttactacacttttcttaaaaatagagcattgggaaaactctgaaagagactgacatttttctcaacaggaatccatacttaacagttctggctttcattaaattttgctctttggta

SEQ ID NO: 92417 - DNA, 3069 bp, Artificial Sequence
  derived and/or modified sequence
attgcttggtagatggtgcttgattccatttttaatggggattatttccaaaccagcagtcacaggaacatgctgcttttagatttgctttgtcgcaactcacagagcccccgaagctgctcccccagattgatattgtgaacatcagcgacagctttgagatgacctatagattctgttcccagttctccaaaggagtctatgccatctttgggttttatgaacgtaggactgtcaacatgctgacctccttttgtggggccctccacgtctgcttcattacgccgagctttcccgttgatacatccaatcagtttgtccttcagctgcgccctgaactgcaggatgccctcatcagcatcattgaccattacaagtggcagaaatttgtctacatttatgatgccgaccggggcttatccgtcctgcagaaagtcctggatacagctgctgagaagaactggcaggtgacagcagtcaacattttgacaaccacagaggagggataccggatgctctttcaggacctggagaagaaaaaggagcggctggtggtggtggactgtgaatcagaacgcctcaatgctatcttgggccagattataaagctagagaagaatggcatcggctaccactacattcttgcaaatctgggcttcatggacattgacttaaacaaattcaaggagagtggcgccaatgtgacaggtttccagctggtgaactacacagacactattccggccaagatcatgcagcagtggaagaatagtgatgctcgagaccacacacgggtggactggaagagacccaagtacacctctgcgctcacctacgatggggtgaaggtgatggctgaggctttccagagcctgcggaggcagagaattgatatatctcgccgggggaatgctggggattgtctggctaacccagctgttccctggggccaagggatcgacatccagagagctctgcagcaggtgcgatttgaaggtttaacaggaaacgtgcagtttaatgagaaaggacgccggaccaactacacgctccacgtgattgaaatgaaacatgacggcatccgaaagattggttactggaatgaagatgataagtttgtccctgcagccaccgatgcccaagctgggggcgataattcaagtgttcagaacagaacatacatcgtcacaacaatcctagaagatccttatgtgatgctcaagaagaacgccaatcagtttgagggcaatgaccgttacgagggctactgtgtagagctggcggcagagattgccaagcacgtgggctactcctaccgtctggagattgtcagtgatggaaaatacggagcccgagaccctgacacgaaggcctggaatggcatggtgggagagctggtctatggaagagcagatgtggctgtggctcccttaactatcactttggtccgggaagaagttatagatttctccaaaccatttatgagtttggggatctccatcatgattaaaaaaccacagaaatccaagccgggtgtcttctccttccttgatcctttggcttatgagatttggatgtgcattgtttttgcctacattggagtgagtgttgtcctcttcctggtcagccgcttcagtccctatgaatggcacagtgaagagtttgaggaaggacgggaccagacaaccagtgaccagtccaatgagtttgggatattcaacagtttgtggttctccctgggagccttcatgcagcaaggatgtgacatttctcccaggtccctgtctggtcgcatcgttggtggcgtctggtggttcttcaccttaatcatcatctcctcatatacagccaatctggccgccttcctgaccgtggagaggatggtgtctcccattgagagtgcagaggacctagcgaagcagacagaaattgcctacgggacgctggaagcaggatctactaaggagttcttcaggaggtctaaaattgctgtgtttgagaagatgtggacatacatgaagtcagcagagccatcagtttttgtgcggaccacagaggaggggatgattcgagtgaggaaatccaaaggcaaatatgcctacctcctggagtccaccatgaatgagtacattgagcagcggaaaccctgtgacaccatgaaggtgggaggtaacttggattccaaaggctatggcattgcaacacccaaggggtctgccctgagaaatccagtaaacctggcagtgttaaaactgaacgagcaggggcttttggacaaattgaaaaacaaatggtggtacgacaagggcgagtgcggcagcgggggaggtgattccaaggacaagacaagcgctctgagcctcagcaatgtggcaggcgtgttctacatcctgatcggaggacttggactagccatgctggttgccttaatcgagttctgctacaaatcccgtagtgaatccaagcggatgaagggtttttgtttgatcccacagcaatccatcaacgaagccatacggacatcgaccctcccccgcaacagcggggcaggagccagcagcggcggcagtggagagaatggtcgggtggtcagccatgacttccccaagtccatgcaatcgattccttgcatgagccacagttcagggatgcccttgggagccacgggattgtaactggagcagatggagaccccttggggagcaggctcgggctccccagccccatcccaaacccttcagtgccaaaaacaacaacaaaatgaaacgcaaccaccaccaaccactgcgaccacaagaaggatgattcaacaggttttcctgaagaattgaaaaaccattttgctgtcccttttccttttttgatgttctttcacccttttctgtttgctaagtgaggatgaaaaaataacactgtactgcaataaggggagagtaaccctgtctaatgaaacctgtgtctctgagagtagagtcactggaacactaatgaggaaactgcactgttttattttaattcagttgttagtgtgtcttagtgtgtgcaattttttttcttactaatatccat

SEQ ID NO: 92418 - DNA, 2751 bp, Artificial Sequence
  derived and/or modified sequence
atgtgctgcagcacccacctgttccagcccctgcagctggccggcggcctggagtggccctggagcaacctgctgtgcttcctgacccctgtgaagctgcaccctgaggtgtggggcctcttccccaaccagcagagccaggagcacgccgccttccgctttgccctgagccagctgacagagccccccaagctgctgccccagattgatattgtgaacatcagtgacagctttgagatgacctaccgcttctgcagccagttcagcaagggcgtgtatgccatcttcggcttctatgaaagaagaacagtgaacatgctgaccagcttctgtggggccctgcacgtgtgcttcatcacccccagcttccctgtggacaccagcaaccagtttgtgctgcagctgcggcctgagctgcaggatgccctgatcagcatcatcgaccactacaagtggcagaagtttgtgtacatctatgatgctgaccggggcctgtctgtgctgcagaaggtgctggacacagctgctgagaagaactggcaggtgacagctgtgaacatcctgaccaccacagaggagggctacaggatgctgttccaggacctggagaagaagaaggagcggctggtggtggtggactgtgagagcgagcggctgaatgccatcctgggccagatcatcaagctggagaagaatggcatcggctaccactacatcctggccaacctgggcttcatggacatcgacctgaacaagttcaaggagagcggggccaacgtgacaggcttccagctggtgaactacacagacaccatcccagccaagatcatgcagcagtggaagaacagtgatgcccgggaccacaccagggtggactggaagaggcccaagtacaccagcgccctgacctatgatggagtgaaggtgatggccgaggccttccagagcctgcggcggcagagaattgacatcagcagaagaggaaatgctggggactgcctggccaacccagctgtgccctggggccagggcatcgacatccagagggccctgcagcaggtgcgctttgagggcctgactggaaatgtgcagttcaatgagaagggccgccgcaccaactacaccctgcacgtgattgagatgaagcatgatggcatcaggaagattggctactggaatgaagatgacaagtttgtgcctgctgccacagatgcccaggccggcggggacaacagctctgtgcagaacagaacctacatcgtgaccaccatcctggaggacccctacgtgatgctgaagaagaatgccaaccagtttgagggcaatgacagatatgagggctactgtgtggagctggccgctgagatcgccaagcacgtgggctacagctaccgcctggagatcgtgtctgatggcaagtacggggcccgggaccctgacaccaaggcctggaatggcatggtgggggagctggtgtatggccgggcagatgtggccgtggcccccctgaccatcaccctggtgcgggaggaggtgattgacttcagcaagcccttcatgagcctgggcatcagcatcatgatcaagaagccccagaagagcaagccaggagtcttctccttcctggaccccctggcctatgagatctggatgtgcatcgtgtttgcctacatcggcgtgtctgtggtgctcttcctggtgagccgcttcagcccctatgagtggcacagcgaggagtttgaggagggccgggaccagaccaccagtgaccagagcaatgaatttggcatcttcaacagcctgtggttcagcctgggcgccttcatgcagcagggctgtgacatcagccccaggagcctgagcggccgcatcgtgggcggcgtgtggtggttcttcaccctcatcatcatcagcagctacacagccaacctggccgccttcctgactgtggagaggatggtgagccccattgaatctgctgaggacctggccaagcagacagaaattgcctacggcaccctggaggccggcagcaccaaggagttcttccgccgcagcaagattgctgtgtttgagaagatgtggacctacatgaagtctgctgagcccagcgtgtttgtgaggaccacagaggagggcatgatccgggtgaggaagagcaagggcaagtatgcctacctgctggagagcaccatgaatgagtacatcgagcagaggaagccctgtgacaccatgaaggtgggcggcaacctggacagcaagggctacggcatcgccacccccaagggcagcgccctgagaaatcctgtgaacctggccgtgctgaagctgaatgagcagggcctgctggacaagctgaagaacaagtggtggtatgacaagggggagtgtggcagcggcggcggggacagcaaggacaagaccagcgccctgagcctgagcaatgtggccggggtcttctacatcctgattggaggcctgggcctggccatgctggtggccctgattgagttctgctacaagagccgctctgagagcaagaggatgaagggcttctgcctgatcccccagcagagcatcaatgaggccatccgcaccagcaccctgcccagaaattctggagctggggccagcagcggcggcagcggggagaatggccgggtggtgtcccatgacttccccaagtccatgcagagcatcccctgcatgagccacagcagcggcatgcccctgggcgccaccggcctgtag

SEQ ID NO: 92419 - DNA, 2751 bp, Artificial Sequence
  derived and/or modified sequence
atgtgctgcagcacccacctgttccagcccctgcagctggccggcggccttgagtggccatggtcaaatttactttgtttccttaccccagtaaagttgcacccagaggtgtgggggctgttccctaaccaacagagccaggagcatgcagcattccgattcgctctctcccagctgactgaacctcccaagctgctgccccaaatagacattgtcaatatcagcgacagcttcgagatgacctatcgattttgcagccagttttccaagggagtctacgccatctttgggttctacgagaggagaaccgtgaacatgctgaccagcttttgcggggcacttcacgtctgtttcatcacgccttcgtttcctgtcgatacatcaaatcagttcgtcctgcagcttcgacctgagctgcaagatgctttaatttctattatcgaccactataagtggcagaagtttgtctatatctatgatgccgaccgtggcttaagtgtgctgcagaaagtactagacacggccgcggaaaagaactggcaggtaaccgccgtaaacattctcacaacaacagaggaggggtaccgaatgctcttccaggatcttgagaagaagaaggagaggttagtggtagttgactgcgagtccgaaaggctgaatgcaattctgggccaaatcatcaagttggaaaaaaacggaattggatatcactacatcttggccaacctgggcttcatggatatagacctgaataaattcaaggagtccggcgccaacgtgacagggtttcagctcgttaattataccgacacaatccctgccaagataatgcagcagtggaagaatagcgacgcccgggatcatactcgcgttgattggaagcggcccaaatacacctccgctctgacctatgatggcgtcaaggttatggccgaggctttccagagcctcagaaggcagcggattgacatctcccggaggggaaacgcaggggactgcctggccaacccagccgtgccatggggccaagggatcgatatccagcgcgccctgcagcaggtaaggttcgaaggtctgactgggaatgtccagttcaatgaaaagggcaggcgcactaactacactctgcatgtcatagagatgaagcatgacggaatacggaagatcggctattggaatgaagacgataaatttgtgccagctgccacagatgctcaggccggcggagacaactcatccgtgcagaatcgaacttacatagtgaccactattctggaagatccctacgttatgttgaagaagaacgctaatcaatttgagggaaatgatcgatacgaaggttactgcgtggagcttgctgcggaaatcgcgaagcatgtgggatatagctacaggctggagatcgtttccgatgggaagtatggggcacgcgacccagatacaaaagcatggaacggcatggttggagagctggtctatggtcgggccgatgtcgccgttgctccgctgacgatcaccctcgttcgggaggaagtaatagatttctctaaaccttttatgagcttgggcatctcaataatgataaagaagcctcagaaaagtaagccaggagttttttctttcctggaccccctagcttatgagatttggatgtgcatcgttttcgcctatataggggtgagtgttgtcctcttcttagtttcacggttttcgccatacgagtggcacagcgaggagtttgaggaaggcagagaccagacaactagtgaccagtccaatgagttcggaatctttaactcactgtggttttcactgggcgcctttatgcagcaaggctgcgacatctccccccggtcccttagcgggcgaatcgtgggtggggtatggtggttcttcacgttgatcatcatcagctcatatacggctaatctcgcggctttccttacggtggaaagaatggtgtcaccaattgagagcgcagaagacctggcaaagcaaaccgaaatcgcttacggcactctggaggctgggagtaccaaagagtttttccggagaagtaaaatcgccgtgtttgagaagatgtggacctatatgaagtccgcagagccttcagtgttcgtgagaactaccgaagaggggatgataagagttcgtaaaagtaagggtaaatacgcctaccttctggaatccacaatgaacgagtacatcgagcagaggaagccctgcgacacaatgaaggtgggtggaaatctggatagcaagggctacggaatcgcaacacctaagggcagcgccctgagaaaccccgtgaatctcgccgttctgaagctcaacgagcaaggactgctggataaactcaaaaataagtggtggtatgacaaaggtgagtgtggtagcggaggtggggactcgaaagataaaactagtgccctctctctgagcaacgtagctggagttttctatatccttataggcggactaggcttggccatgcttgtggcactcattgagttctgctacaaatctagatctgagagcaaacgcatgaagggattttgtcttatcccccaacagtccattaacgaggccataaggaccagtaccctgccgagaaactcaggtgccggcgcatcttccggtggttccggagaaaatggtagggtggtgtcccatgatttccccaagtccatgcagtcaattccttgtatgagccatagttcagggatgcccctgggcgcaacaggtctgtag

SEQ ID NO: 92420 - DNA, 2751 bp, Artificial Sequence
  derived and/or modified sequence
atgtgctgcagcacacacctctttcagccattgcagttggcagggggtctggaatggccgtggtctaatctgctgtgtttcttgacgcccgttaaattacatcccgaggtgtgggggctgttcccgaatcagcagtctcaagagcatgcagccttccggtttgctctgtcccagctgaccgagccacctaagttactgcctcagatcgacatcgtcaatatatcagactctttcgaaatgacttacagattttgctcccagttttccaagggtgtttatgccatatttggtttttatgagagaagaaccgtcaacatgctaactagtttctgcggtgccctccatgtttgttttatcacaccatctttcccggtagatactagtaatcagtttgtactgcaattgagacccgagctgcaagatgcactgatctctatcattgaccactataagtggcaaaagtttgtgtatatctatgatgctgaccgcggacttagcgtgctgcaaaaggttctggacacagccgcagaaaagaattggcaggtcacggcagtcaatatcctcacaaccaccgaggaggggtatcgaatgttattccaagatcttgaaaaaaaaaaagagagactggtcgtggttgactgcgagagcgagaggctaaacgccatcttgggccagatcataaaacttgagaagaatgggattggctaccattatatcctggctaacctgggattcatggacatcgacctgaataagttcaaagaatccggggcaaatgtgacaggattccagctcgttaattataccgacaccatcccagccaagataatgcaacaatggaaaaattcggatgccagggaccacacccgcgtggattggaagaggcctaagtacacaagtgcacttacatacgacggcgtgaaggtaatggctgaagccttccagagccttcgtcgtcaacgtatagacatctcccgacggggtaatgctggcgactgccttgccaatccagccgtgccatgggggcagggcatagatattcagcgggctctccaacaggttcgattcgagggcctgacaggaaatgtgcagttcaatgagaaaggacgtcgcaccaactacactttacacgtgattgaaatgaagcacgatggaatcagaaagatcggttattggaatgaggatgataaatttgtccctgccgctaccgatgctcaagcaggtggggacaacagttctgtgcagaacaggacatacattgttaccactatccttgaggacccttacgtgatgcttaagaagaatgcaaaccagtttgaaggtaatgatcggtacgaagggtactgtgtggaattagctgcggagatcgcaaagcacgtcggttatagctacagattagagatcgtctctgacgggaagtacggagctcgggaccccgacaccaaggcatggaatggaatggtgggcgagctagtgtacgggcgagcggatgtcgccgttgcacccttgacaatcacactggtccgcgaagaggtgatagacttttcaaagccctttatgtctttgggtatctcaatcatgattaaaaaaccacagaaaagtaaacccggtgtgttctctttccttgacccactggcctatgagatctggatgtgcattgtgtttgcttacataggggtgagcgtcgtgctgtttctggtctctagattctcaccctatgaatggcacagtgaggagtttgaagagggtagagaccagacaacctccgaccagagcaacgagttcggcatcttcaatagcctttggtttagcctaggagcatttatgcagcagggatgcgacatcagccccaggtcactgagcggccgtattgtgggaggagtctggtggttctttacactgatcattattagcagctacactgctaatcttgccgcatttctgaccgtcgaacgtatggtgagccctatcgagtccgctgaggatctggccaaacagacagagatcgcctatggcacactggaagctggtagcactaaagagtttttccgacgctcaaagatcgcagttttcgaaaaaatgtggacttatatgaaatctgcggagccatcagtcttcgtaagaactaccgaggagggcatgatccgggtcaggaagagtaaaggtaagtatgcctatcttttagagagcaccatgaatgagtacatcgagcagcgaaaaccatgcgacaccatgaaggtgggaggcaatctggactccaagggatatggcatcgcgactcctaagggcagtgctctccgtaaccctgtgaacttggccgtgctcaaactaaatgagcaggggctgctggataaactgaagaacaaatggtggtatgacaaaggagagtgtgggtccgggggtggcgattccaaggataagacttcagccctgtcgctgtcaaacgtggcgggtgtattctacattttgattggcggactgggtctcgcgatgctcgtagcactgatcgagttctgctacaagtctcgcagcgagtccaaacggatgaaggggttctgtctaattcctcagcaatccataaacgaggctattaggacctccactctgcctcgcaacagcggcgcaggtgccagttcaggtggtagcggtgagaacgggagagtcgtgagtcacgattttcccaagtctatgcaatccattccctgtatgtcccactcctccggtatgccgttaggcgctactggcctctag

SEQ ID NO: 92421 - DNA, 2751 bp, Artificial Sequence
  derived and/or modified sequence
atgtgctgcagcacccacctgttccagcccctgcagctggccggcggcctggagtggccctggagcaacctgctgtgcttcctgacccccgtgaagctgcaccccgaggtgtggggcctgttccccaaccagcagagccaggagcacgccgccttcagattcgccctgagccagctgaccgagccccccaagctgctgccccagatcgacatcgtgaacatcagcgacagcttcgagatgacctacagattctgcagccagttcagcaagggcgtgtacgccatcttcggcttctacgagagaagaaccgtgaacatgctgaccagcttctgcggcgccctgcacgtgtgcttcatcacccccagcttccccgtggacaccagcaaccagttcgtgctgcagctgagacccgagctgcaggacgccctgatcagcatcatcgaccactacaagtggcagaagttcgtgtacatctacgacgccgacagaggcctgagcgtgctgcagaaggtgctggacaccgccgccgagaagaactggcaggtgaccgccgtgaacatcctgaccaccaccgaggagggctacagaatgctgttccaggacctggagaagaagaaggagagactggtggtggtggactgcgagagcgagagactgaacgccatcctgggccagatcatcaagctggagaagaacggcatcggctaccactacatcctggccaacctgggcttcatggacatcgacctgaacaagttcaaggagagcggcgccaacgtgaccggcttccagctggtgaactacaccgacaccatccccgccaagatcatgcagcagtggaagaacagcgacgccagagaccacaccagagtggactggaagagacccaagtacaccagcgccctgacctacgacggcgtgaaggtgatggccgaggccttccagagcctgagaagacagagaatcgacatcagcagaagaggcaacgccggcgactgcctggccaaccccgccgtgccctggggccagggcatcgacatccagagagccctgcagcaggtgagattcgagggcctgaccggcaacgtgcagttcaacgagaagggcagaagaaccaactacaccctgcacgtgatcgagatgaagcacgacggcatcagaaagatcggctactggaacgaggacgacaagttcgtgcccgccgccaccgacgcccaggccggcggcgacaacagcagcgtgcagaacagaacctacatcgtgaccaccatcctggaggacccctacgtgatgctgaagaagaacgccaaccagttcgagggcaacgacagatacgagggctactgcgtggagctggccgccgagatcgccaagcacgtgggctacagctacagactggagatcgtgagcgacggcaagtacggcgccagagaccccgacaccaaggcctggaacggcatggtgggcgagctggtgtacggcagagccgacgtggccgtggcccccctgaccatcaccctggtgagagaggaggtgatcgacttcagcaagcccttcatgagcctgggcatcagcatcatgatcaagaagccccagaagagcaagcccggcgtgttcagcttcctggaccccctggcctacgagatctggatgtgcatcgtgttcgcctacatcggcgtgagcgtggtgctgttcctggtgagcagattcagcccctacgagtggcacagcgaggagttcgaggagggcagagaccagaccaccagcgaccagagcaacgagttcggcatcttcaacagcctgtggttcagcctgggcgccttcatgcagcagggctgcgacatcagccccagaagcctgagcggcagaatcgtgggcggcgtgtggtggttcttcaccctgatcatcatcagcagctacaccgccaacctggccgccttcctgaccgtggagagaatggtgagccccatcgagagcgccgaggacctggccaagcagaccgagatcgcctacggcaccctggaggccggcagcaccaaggagttcttcagaagaagcaagatcgccgtgttcgagaagatgtggacctacatgaagagcgccgagcccagcgtgttcgtgagaaccaccgaggagggcatgatcagagtgagaaagagcaagggcaagtacgcctacctgctggagagcaccatgaacgagtacatcgagcagagaaagccctgcgacaccatgaaggtgggcggcaacctggacagcaagggctacggcatcgccacccccaagggcagcgccctgagaaaccccgtgaacctggccgtgctgaagctgaacgagcagggcctgctggacaagctgaagaacaagtggtggtacgacaagggcgagtgcggcagcggcggcggcgacagcaaggacaagaccagcgccctgagcctgagcaacgtggccggcgtgttctacatcctgatcggcggcctgggcctggccatgctggtggccctgatcgagttctgctacaagagcagaagcgagagcaagagaatgaagggcttctgcctgatcccccagcagagcatcaacgaggccatcagaaccagcaccctgcccagaaacagcggcgccggcgccagcagcggcggcagcggcgagaacggcagagtggtgagccacgacttccccaagagcatgcagagcatcccctgcatgagccacagcagcggcatgcccctgggcgccaccggcctgtag

SEQ ID NO: 92422 - protein, 916 aa, Artificial Sequence
  derived and/or modified sequence
MCCSTHLFQPLQLAGGLEWPWSNLLCFLTPVKLHPEVWGLFPNQQSQEHAAFRFALSQLTEPPKLLPQIDIVNISDSFEMTYRFCSQFSKGVYAIFGFYERRTVNMLTSFCGALHVCFITPSFPVDTSNQFVLQLRPELQDALISIIDHYKWQKFVYIYDADRGLSVLQKVLDTAAEKNWQVTAVNILTTTEEGYRMLFQDLEKKKERLVVVDCESERLNAILGQIIKLEKNGIGYHYILANLGFMDIDLNKFKESGANVTGFQLVNYTDTIPAKIMQQWKNSDARDHTRVDWKRPKYTSALTYDGVKVMAEAFQSLRRQRIDISRRGNAGDCLANPAVPWGQGIDIQRALQQVRFEGLTGNVQFNEKGRRTNYTLHVIEMKHDGIRKIGYWNEDDKFVPAATDAQAGGDNSSVQNRTYIVTTILEDPYVMLKKNANQFEGNDRYEGYCVELAAEIAKHVGYSYRLEIVSDGKYGARDPDTKAWNGMVGELVYGRADVAVAPLTITLVREEVIDFSKPFMSLGISIMIKKPQKSKPGVFSFLDPLAYEIWMCIVFAYIGVSVVLFLVSRFSPYEWHSEEFEEGRDQTTSDQSNEFGIFNSLWFSLGAFMQQGCDISPRSLSGRIVGGVWWFFTLIIISSYTANLAAFLTVERMVSPIESAEDLAKQTEIAYGTLEAGSTKEFFRRSKIAVFEKMWTYMKSAEPSVFVRTTEEGMIRVRKSKGKYAYLLESTMNEYIEQRKPCDTMKVGGNLDSKGYGIATPKGSALRGPVNLAVLKLSEQGVLDKLKSKWWYDKGECGSKDSGSKDKTSALSLSNVAGVFYILIGGLGLAMLVALIEFCYKSRSESKRMKGFCLIPQQSINEAIRTSTLPRNSGAGASSGGSGENGRVVSHDFPKSMQSIPCMSHSSGMPLGATGL

SEQ ID NO: 92423 - DNA, 2751 bp, Artificial Sequence
  derived and/or modified sequence
atgtgttgctctacccacctcttccaacctctacagctggccgggggattagagtggccctggagtaatttgctgtgtttcctcacaccagtcaagttgcaccccgaagtttggggattgttcccgaaccagcagtcccaggaacatgctgccttccgttttgccctcagtcagctgacggaaccccccaaactcctgccacagattgacatcgttaatatatctgactcattcgagatgacctaccgcttttgttcccagtttagtaaaggggtgtacgccatattcggtttctatgagcggagaaccgtgaatatgctcacctcattctgtggggcactgcatgtctgtttcattactccctcgttcccagtcgatacctctaatcagtttgttttgcagctgaggcccgagctgcaggatgcattgatttccattattgaccactataagtggcagaagttcgtatatatctatgatgctgaccgggggttgagcgtattacaaaaagtgctggatacagccgccgaaaagaattggcaggtgacggctgttaacattcttaccacgaccgaagaaggctaccggatgctgttccaggatttggagaaaaaaaaggagcgattggtggtggtggactgcgagtctgagaggctgaatgccattttgggtcagattatcaaactcgagaagaatggcatcggataccattacatactggctaatctcgggtttatggacatagacttgaacaaattcaaggagagcggcgcaaacgttacaggattccaactggtgaactatactgacaccattccagcgaagattatgcagcaatggaaaaattctgatgcccgggaccatacaagggtggattggaagcgcccaaagtacacctccgcactcacttacgatggtgtgaaggtgatggccgaagcattccagtctttacggagacagagaatcgatatctcccgcagaggtaacgccggcgactgtttggccaaccccgctgttccctggggtcaaggcatagatattcagcgagccctccaacaggtcaggtttgagggcttgacaggaaacgtccaatttaacgagaagggcaggcggactaattacacactgcacgtgatcgagatgaaacacgatgggatccggaaaatcgggtactggaacgaggatgacaaatttgtgccagctgcaaccgatgctcaggcagggggtgacaattcctctgtacagaaccgcacctatatcgttactactatcctggaagacccttatgtaatgttaaaaaagaacgccaatcaatttgagggcaacgataggtacgaaggatattgcgtcgagcttgccgccgaaattgcgaaacatgtagggtacagttacaggctggaaatcgtgtccgacggaaagtatggcgcccgggatccagatacaaaagcatggaacgggatggttggtgaactggtctatgggcgggctgacgtggcagtggctcccttgacaatcacgctagtgagagaggaggtgatagacttttctaagccgttcatgagcctcggcatttccattatgataaagaaacctcaaaagtctaagcccggggtcttcagtttcctggatccactcgcttatgaaatctggatgtgtatcgtgtttgcttacatcggggtgagtgtggtgctgtttctggtaagcaggttttctccttatgaatggcactctgaagaatttgaagaggggagggaccagacaacgtcagaccagtccaacgagttcggcattttcaatagcctctggttcagtttgggcgcatttatgcagcaggggtgtgatatttctccacggtccctctctggaaggattgtcgggggagtctggtggttttttacattaatcatcatctctagttataccgctaatctggccgctttccttacagtggaacgaatggtgtccccgatcgagagcgccgaagatcttgcgaagcagaccgagattgcttatgggactcttgaggcaggcagcactaaagaatttttcaggaggtcaaagattgcagtttttgagaaaatgtggacttacatgaagtccgctgagccctccgtcttcgtacgaactactgaagagggaatgatccgagtcagaaagtcaaagggcaagtacgcctatttactggagagtaccatgaatgaatatattgagcaaagaaaaccttgtgacaccatgaaagtgggtggaaaccttgactccaaggggtacggcattgctactcccaaggggtccgccctgagggggccggtcaacctggcggtgctgaagctgtctgaacagggagtgctcgataagctgaaaagtaagtggtggtacgataaaggtgagtgtggatcaaaggactccggctcaaaggataagacctccgcacttagtctgagtaacgtcgccggggtgttttacatacttattggaggactcggactagccatgttagtagcccttattgagttttgctataaatcccgctctgaaagcaaacggatgaaaggattttgtctgattccccagcagtccattaacgaagccatacgcacgtctactcttccacgaaacagcggcgctggagccagctctggtggctccggagaaaacggcagggtggtgagccacgacttccctaagagcatgcagagcatcccctgcatgagccactcgtctggcatgccactcggcgccacgggcctgtag

SEQ ID NO: 92424 - DNA, 3041 bp, Artificial Sequence
  derived and/or modified sequence
gtgcaattgatattttgtcgggcatacatgtgctgcagtacccatctctttcagcctctccagctagctggcggcttggagtggccatggagtaacttgctttgtttcctgacacctgttaagctacatcctgaagtgtggggattatttccaaaccagcagtcacaggaacatgctgcttttagatttgctttgtcgcaactcacagagcccccgaagctgctcccccagattgatattgtgaacatcagcgacagctttgagatgacctatagattctgttcccagttctccaaaggagtctatgccatctttgggttttatgaacgtaggactgtcaacatgctgacctccttttgtggggccctccacgtctgcttcattacgccgagctttcccgttgatacatccaatcagtttgtccttcagctgcgccctgaactgcaggatgccctcatcagcatcattgaccattacaagtggcagaaatttgtctacatttatgatgccgaccggggcttatccgtcctgcagaaagtcctggatacagctgctgagaagaactggcaggtgacagcagtcaacattttgacaaccacagaggagggataccggatgctctttcaggacctggagaagaaaaaggagcggctggtggtggtggactgtgaatcagaacgcctcaatgctatcttgggccagattataaagctagagaagaatggcatcggctaccactacattcttgcaaatctgggcttcatggacattgacttaaacaaattcaaggagagtggcgccaatgtgacaggtttccagctggtgaactacacagacactattccggccaagatcatgcagcagtggaagaatagtgatgctcgagaccacacacgggtggactggaagagacccaagtacacctctgcgctcacctacgatggggtgaaggtgatggctgaggctttccagagcctgcggaggcagagaattgatatatctcgccgggggaatgctggggattgtctggctaacccagctgttccctggggccaagggatcgacatccagagagctctgcagcaggtgcgatttgaaggtttaacaggaaacgtgcagtttaatgagaaaggacgccggaccaactacacgctccacgtgattgaaatgaaacatgacggcatccgaaagattggttactggaatgaagatgataagtttgtccctgcagccaccgatgcccaagctgggggcgataattcaagtgttcagaacagaacatacatcgtcacaacaatcctagaagatccttatgtgatgctcaagaagaacgccaatcagtttgagggcaatgaccgttacgagggctactgtgtagagctggcggcagagattgccaagcacgtgggctactcctaccgtctggagattgtcagtgatggaaaatacggagcccgagaccctgacacgaaggcctggaatggcatggtgggagagctggtctatggaagagcagatgtggctgtggctcccttaactatcactttggtccgggaagaagttatagatttctccaaaccatttatgagtttggggatctccatcatgattaaaaaaccacagaaatccaagccgggtgtcttctccttccttgatcctttggcttatgagatttggatgtgcattgtttttgcctacattggagtgagtgttgtcctcttcctggtcagccgcttcagtccctatgaatggcacagtgaagagtttgaggaaggacgggaccagacaaccagtgaccagtccaatgagtttgggatattcaacagtttgtggttctccctgggagccttcatgcagcaaggatgtgacatttctcccaggtccctgtctggtcgcatcgttggtggcgtctggtggttcttcaccttaatcatcatctcctcatatacagccaatctggccgccttcctgaccgtggagaggatggtgtctcccattgagagtgcagaggacctagcgaagcagacagaaattgcctacgggacgctggaagcaggatctactaaggagttcttcaggaggtctaaaattgctgtgtttgagaagatgtggacatacatgaagtcagcagagccatcagtttttgtgcggaccacagaggaggggatgattcgagtgaggaaatccaaaggcaaatatgcctacctcctggagtccaccatgaatgagtacattgagcagcggaaaccctgtgacaccatgaaggtgggaggtaacttggattccaaaggctatggcattgcaacacccaaggggtctgccctgagaggtcccgtaaacctagcggttttgaaactcagtgagcaaggcgtcttagacaagctgaaaagcaaatggtggtacgataaaggggaatgtggaagcaaggactccggaagtaaggacaagacaagcgctctgagcctcagcaatgtggcaggcgtgttctacatcctgatcggaggacttggactagccatgctggttgccttaatcgagttctgctacaaatcccgtagtgaatccaagcggatgaagggtttttgtttgatcccacagcaatccatcaacgaagccatacggacatcgaccctcccccgcaacagcggggcaggagccagcagcggcggcagtggagagaatggtcgggtggtcagccatgacttccccaagtccatgcaatcgattccttgcatgagccacagttcagggatgcccttgggagccacgggattgtaactggagcagatggagaccccttggggagcaggctcgggctccccagccccatcccaaacccttcagtgccaaaaacaacaacaaaatgaaacgcaaccaccaccaaccactgcgaccacaagaaggatgattcaacaggttttcctgaagaattgaaaaaccattttgctgtcccttttccttttttgatgttctttcacccttttctgtttgctaagtgaggatgaaaaaataacactgtactgcaataaggggagagtaac

SEQ ID NO: 92425 - DNA, 2751 bp, Artificial Sequence
  derived and/or modified sequence
atgtgctgcagcacccacctgttccagcccctgcagctggccggcggcctggagtggccctggagcaacctgctgtgcttcctgacccctgtgaagctgcaccctgaggtgtggggcctcttccccaaccagcagagccaggagcacgccgccttccgctttgccctgagccagctgacagagccccccaagctgctgccccagattgatattgtgaacatcagtgacagctttgagatgacctaccgcttctgcagccagttcagcaagggcgtgtatgccatcttcggcttctatgaaagaagaacagtgaacatgctgaccagcttctgtggggccctgcacgtgtgcttcatcacccccagcttccctgtggacaccagcaaccagtttgtgctgcagctgcggcctgagctgcaggatgccctgatcagcatcatcgaccactacaagtggcagaagtttgtgtacatctatgatgctgaccggggcctgtctgtgctgcagaaggtgctggacacagctgctgagaagaactggcaggtgacagctgtgaacatcctgaccaccacagaggagggctacaggatgctgttccaggacctggagaagaagaaggagcggctggtggtggtggactgtgagagcgagcggctgaatgccatcctgggccagatcatcaagctggagaagaatggcatcggctaccactacatcctggccaacctgggcttcatggacatcgacctgaacaagttcaaggagagcggggccaacgtgacaggcttccagctggtgaactacacagacaccatcccagccaagatcatgcagcagtggaagaacagtgatgcccgggaccacaccagggtggactggaagaggcccaagtacaccagcgccctgacctatgatggagtgaaggtgatggccgaggccttccagagcctgcggcggcagagaattgacatcagcagaagaggaaatgctggggactgcctggccaacccagctgtgccctggggccagggcatcgacatccagagggccctgcagcaggtgcgctttgagggcctgactggaaatgtgcagttcaatgagaagggccgccgcaccaactacaccctgcacgtgattgagatgaagcatgatggcatcaggaagattggctactggaatgaagatgacaagtttgtgcctgctgccacagatgcccaggccggcggggacaacagctctgtgcagaacagaacctacatcgtgaccaccatcctggaggacccctacgtgatgctgaagaagaatgccaaccagtttgagggcaatgacagatatgagggctactgtgtggagctggccgctgagatcgccaagcacgtgggctacagctaccgcctggagatcgtgtctgatggcaagtacggggcccgggaccctgacaccaaggcctggaatggcatggtgggggagctggtgtatggccgggcagatgtggccgtggcccccctgaccatcaccctggtgcgggaggaggtgattgacttcagcaagcccttcatgagcctgggcatcagcatcatgatcaagaagccccagaagagcaagccaggagtcttctccttcctggaccccctggcctatgagatctggatgtgcatcgtgtttgcctacatcggcgtgtctgtggtgctcttcctggtgagccgcttcagcccctatgagtggcacagcgaggagtttgaggagggccgggaccagaccaccagtgaccagagcaatgaatttggcatcttcaacagcctgtggttcagcctgggcgccttcatgcagcagggctgtgacatcagccccaggagcctgagcggccgcatcgtgggcggcgtgtggtggttcttcaccctcatcatcatcagcagctacacagccaacctggccgccttcctgactgtggagaggatggtgagccccattgaatctgctgaggacctggccaagcagacagaaattgcctacggcaccctggaggccggcagcaccaaggagttcttccgccgcagcaagattgctgtgtttgagaagatgtggacctacatgaagtctgctgagcccagcgtgtttgtgaggaccacagaggagggcatgatccgggtgaggaagagcaagggcaagtatgcctacctgctggagagcaccatgaatgagtacatcgagcagaggaagccctgtgacaccatgaaggtgggcggcaacctggacagcaagggctacggcatcgccacccccaagggcagcgccctgcggggccctgtgaacctggccgtgctgaagctgtctgagcagggcgtgctggacaagctgaagagcaagtggtggtatgacaagggggagtgtggcagcaaggacagcggcagcaaggacaagaccagcgccctgagcctgagcaatgtggccggggtcttctacatcctgattggaggcctgggcctggccatgctggtggccctgattgagttctgctacaagagccgctctgagagcaagaggatgaagggcttctgcctgatcccccagcagagcatcaatgaggccatccgcaccagcaccctgcccagaaattctggagctggggccagcagcggcggcagcggggagaatggccgggtggtgtcccatgacttccccaagtccatgcagagcatcccctgcatgagccacagcagcggcatgcccctgggcgccaccggcctgtag

SEQ ID NO: 92426 - DNA, 2751 bp, Artificial Sequence
  derived and/or modified sequence
atgtgctgcagcacccacctgttccagcccctgcagctggccggcggcctggagtggccctggtcgaatctgctgtgctttcttacacccgttaagctgcatcctgaggtctgggggttatttcctaatcaacagagtcaggagcatgcggcgtttcgctttgcactgtcgcaacttactgagccccccaagctcctaccccagatcgacatcgtgaacatcagcgacagcttcgaaatgacttaccggttctgttcccagtttagcaagggcgtgtatgcaatctttggcttttatgaacggcgcactgtcaacatgctgactagtttctgtggggccctgcacgtctgttttatcacaccaagcttccctgttgatacttccaatcagttcgttctccaactgaggcctgaactgcaggatgctctgatctccattattgaccactacaaatggcaaaagttcgtatacatctatgacgccgacagaggtctgtccgttctccaaaaagttctggatactgcagcggaaaaaaattggcaagtcacagccgtcaacattctgacaacgacggaggagggatacaggatgctcttccaggacttggagaaaaaaaaggagaggctggttgtcgtggattgcgagagcgagagactgaacgctatcctgggccaaattattaaattagaaaaaaacggtatcggttaccactatattctggcaaacctgggattcatggacatcgatttgaacaagttcaaagaaagcggggccaatgtgaccggattccaactggtaaactataccgacacaattcccgccaagatcatgcagcagtggaagaacagtgacgccagggaccacacacgtgtggactggaagagacccaaatatacatctgcccttacgtatgacggagttaaagtgatggcagaggccttccagtctctacggcgccagagaattgacatatcccgacgcggcaacgccggtgattgcttagcgaaccccgccgtgccatgggggcagggcatcgatatccagagagctttacagcaggtgcgctttgaaggactgacaggcaatgtccaatttaatgaaaaaggacgccggacaaactacacactccatgtgattgagatgaaacacgacggtatccgcaagataggctactggaacgaagatgacaaattcgtgcccgcagccaccgatgctcaggccgggggtgataatagcagcgtgcagaatcgcacttacatagttactactatcttggaggatccttacgtgatgctgaaaaagaatgcaaaccaatttgagggcaatgataggtatgagggctattgtgtggagctggcagccgagatagcgaagcacgtgggctattcataccgacttgagattgtgagtgacggaaagtacggcgcacgggaccccgataccaaggcctggaacggaatggtcggggagctggtgtacggccgggcggacgtggccgttgcacctctcacgattactctggtgcgcgaggaagtgatcgacttctccaaaccatttatgtccctaggaatctcgatcatgatcaaaaagccacagaagagtaagccaggagtctttagcttcttggacccgctcgcctatgagatctggatgtgcattgtcttcgcctacataggtgtgagtgtggttctgtttttggtcagccgcttttctccgtacgagtggcactccgaggagtttgaagagggaagggatcagacaactagcgatcaatctaacgagtttgggattttcaattccctgtggttttctctgggcgcctttatgcagcaggggtgcgatattagcccacgatccttatcggggcgaatcgtcggtggcgtctggtggttctttaccctgatcatcatttcttcatacacagcaaacctggcggcattccttacggtcgagagaatggtcagccccatcgaaagtgctgaagacttggcgaaacaaactgaaatcgcatacggcacgctcgaggcaggttcaaccaaggaattcttccgcaggtccaaaatcgctgtgttcgagaagatgtggacctatatgaagtccgctgagcccagcgtcttcgtgagaaccaccgaggaggggatgatacgcgtgagaaagtcaaaaggaaagtacgcttatcttctcgaatccacaatgaatgaatatattgaacagagaaagccatgcgacacaatgaaggtgggtggaaatctggactccaaggggtacggcattgctacccccaaaggatcagctctgcgcgggcctgtcaatctggctgtgttgaagctgtctgagcagggagtgctggacaaactgaagtcaaaatggtggtatgataaaggggaatgtggctcaaaggactctggctcaaaagataaaacctcagccctctcattaagcaatgtggcaggtgtattctacattctgattggagggctggggcttgccatgctggtcgctctaatagaattttgctacaagagccgatcagaatcaaaacgcatgaaggggttttgcctcatccctcagcagtctataaatgaggcaatccgaaccagcaccctgcccagaaacagcggcgctggcgcgagctccggcggctccggtgagaacggcagggtggtttcccatgatttccccaaatccatgcagagcattccctgcatgtctcatagctccggaatgcctctcggggctacaggcctttag

SEQ ID NO: 92427 - DNA, 2751 bp, Artificial Sequence
  derived and/or modified sequence
atgtgctgctctacccacctgttccaacctctccaactagctggagggttggaatggccctggagcaatctgctgtgcttcctcacccccgtgaaattgcaccccgaagtctggggcctttttcctaaccagcaatcccaagagcatgcggcattccgttttgctctgagccagctgaccgagccaccaaagttacttcctcagatcgacatcgtgaacatctccgatagttttgaaatgacctacaggttttgctctcagttttctaaaggtgtgtacgcaatcttcggtttttacgagcggaggactgtgaacatgctgacatctttctgcggggctctccatgtttgcttcataaccccctctttcccagtggatacctccaatcagtttgtgctgcagcttcgcccagagctgcaggacgccttgatctccatcattgaccactacaaatggcagaaatttgtgtatatatatgacgctgaccgtggcctgtctgtgcttcagaaggtgctcgacactgccgctgagaagaactggcaggttacagctgtcaacattttaacgaccacggaggaggggtatcgcatgttgtttcaggatctggaaaagaagaaagagaggctggtggtagtggattgtgagtcagagcggcttaatgctatactcggtcagattattaagttggagaagaatgggatcggttaccattacatcctggctaacctgggcttcatggacattgacttaaacaaatttaaggagagcggagctaatgtaacaggctttcagctggtgaactacactgatactattcccgctaagattatgcagcagtggaaaaactcagatgcacgcgaccacacgagggtagattggaaaagacccaaatacacgtctgctctgacctacgatggcgtgaaggtgatggcagaggcctttcagtctctgagaagacagcgcatcgatatttcacgtcgcggtaacgcgggtgactgtctcgccaatcctgcagtcccatgggggcaggggatagacattcagagggccctgcagcaggtgaggtttgagggtttaacaggcaatgtgcagtttaacgaaaaaggacgcagaacgaattacacgttgcacgtgatcgaaatgaaacacgacggaatccggaagatagggtattggaacgaagacgataagttcgtccctgccgcaacagacgcccaggccggaggcgataattcctcagtgcagaatcgtacatatatagtgacaaccatcctggaggatccatacgtgatgttgaagaaaaacgccaatcagtttgaaggcaatgatcgctatgaaggatattgcgtggaattagccgcagaaatcgccaaacacgtcgggtactcttacagactggaaattgtgtctgacggaaaatatggcgctcgggaccccgatactaaagcatggaacggaatggtcggggagctggtctatggtcgtgcggacgtggcagtcgctcctctcactatcactctggtgagggaagaagttatcgatttctcaaaaccgttcatgtccctgggaatctctatcatgataaaaaaaccacagaagagcaaaccgggtgtgttttcttttctggatccgttggcctacgagatctggatgtgtattgtttttgcctatatcggggtttccgtcgttctgtttttggtatcccggttctctccttacgagtggcacagcgaggagttcgaagaaggcagagaccagaccacctctgaccagtcgaatgagttcggcattttcaacagcctgtggttctcactcggagcatttatgcagcagggctgcgacataagtcccagaagcctgagcggacgcatagtgggaggggtgtggtggttcttcacccttatcatcatctcctcatataccgctaacctagcggctttcttgaccgtggaacgcatggtgtctccaatcgaatctgcagaagatttggccaaacagaccgaaatagcttatgggacgttagaggccggaagtacgaaggagttttttcgcaggagcaagattgccgtttttgaaaagatgtggacctacatgaagtctgctgaaccctcggtctttgttaggacgacagaggagggaatgattagagttagaaaaagtaaaggtaaatatgcctaccttctggagtccactatgaatgaatacattgagcagcggaaaccctgcgatactatgaaggtcggcggaaacctggacagcaaagggtacggcatcgctaccccaaaagggagtgccctgagagggcctgtgaatctggccgtgctcaaactgtccgagcaaggagtactggacaagctgaaatcaaagtggtggtatgacaagggcgaatgcggatctaaggactctggttcaaaggacaaaaccagtgccttgtccctgtccaatgtggcaggggtcttttatattctgatcggaggactgggcttagcgatgctggtagcacttattgagttctgctacaagagtagatccgaatcaaagcgaatgaagggattctgtctgatcccacagcagtctatcaacgaggccatccggacctcgaccttgcccaggaatagtggggctggcgcatccagtgggggaagcggggaaaacgggcgagtggtgtcacacgacttccccaagtcaatgcagagcataccctgtatgagccactctagcggaatgcccctgggggctacaggtctttag

SEQ ID NO: 92428 - DNA, 2751 bp, Artificial Sequence
  derived and/or modified sequence
atgtgctgcagcacccacctgttccagcccctgcagctggccggcggcctggagtggccctggagcaacctgctgtgcttcctgacccccgtgaagctgcaccccgaggtgtggggcctgttccccaaccagcagagccaggagcacgccgccttcagattcgccctgagccagctgaccgagccccccaagctgctgccccagatcgacatcgtgaacatcagcgacagcttcgagatgacctacagattctgcagccagttcagcaagggcgtgtacgccatcttcggcttctacgagagaagaaccgtgaacatgctgaccagcttctgcggcgccctgcacgtgtgcttcatcacccccagcttccccgtggacaccagcaaccagttcgtgctgcagctgagacccgagctgcaggacgccctgatcagcatcatcgaccactacaagtggcagaagttcgtgtacatctacgacgccgacagaggcctgagcgtgctgcagaaggtgctggacaccgccgccgagaagaactggcaggtgaccgccgtgaacatcctgaccaccaccgaggagggctacagaatgctgttccaggacctggagaagaagaaggagagactggtggtggtggactgcgagagcgagagactgaacgccatcctgggccagatcatcaagctggagaagaacggcatcggctaccactacatcctggccaacctgggcttcatggacatcgacctgaacaagttcaaggagagcggcgccaacgtgaccggcttccagctggtgaactacaccgacaccatccccgccaagatcatgcagcagtggaagaacagcgacgccagagaccacaccagagtggactggaagagacccaagtacaccagcgccctgacctacgacggcgtgaaggtgatggccgaggccttccagagcctgagaagacagagaatcgacatcagcagaagaggcaacgccggcgactgcctggccaaccccgccgtgccctggggccagggcatcgacatccagagagccctgcagcaggtgagattcgagggcctgaccggcaacgtgcagttcaacgagaagggcagaagaaccaactacaccctgcacgtgatcgagatgaagcacgacggcatcagaaagatcggctactggaacgaggacgacaagttcgtgcccgccgccaccgacgcccaggccggcggcgacaacagcagcgtgcagaacagaacctacatcgtgaccaccatcctggaggacccctacgtgatgctgaagaagaacgccaaccagttcgagggcaacgacagatacgagggctactgcgtggagctggccgccgagatcgccaagcacgtgggctacagctacagactggagatcgtgagcgacggcaagtacggcgccagagaccccgacaccaaggcctggaacggcatggtgggcgagctggtgtacggcagagccgacgtggccgtggcccccctgaccatcaccctggtgagagaggaggtgatcgacttcagcaagcccttcatgagcctgggcatcagcatcatgatcaagaagccccagaagagcaagcccggcgtgttcagcttcctggaccccctggcctacgagatctggatgtgcatcgtgttcgcctacatcggcgtgagcgtggtgctgttcctggtgagcagattcagcccctacgagtggcacagcgaggagttcgaggagggcagagaccagaccaccagcgaccagagcaacgagttcggcatcttcaacagcctgtggttcagcctgggcgccttcatgcagcagggctgcgacatcagccccagaagcctgagcggcagaatcgtgggcggcgtgtggtggttcttcaccctgatcatcatcagcagctacaccgccaacctggccgccttcctgaccgtggagagaatggtgagccccatcgagagcgccgaggacctggccaagcagaccgagatcgcctacggcaccctggaggccggcagcaccaaggagttcttcagaagaagcaagatcgccgtgttcgagaagatgtggacctacatgaagagcgccgagcccagcgtgttcgtgagaaccaccgaggagggcatgatcagagtgagaaagagcaagggcaagtacgcctacctgctggagagcaccatgaacgagtacatcgagcagagaaagccctgcgacaccatgaaggtgggcggcaacctggacagcaagggctacggcatcgccacccccaagggcagcgccctgagaggccccgtgaacctggccgtgctgaagctgagcgagcagggcgtgctggacaagctgaagagcaagtggtggtacgacaagggcgagtgcggcagcaaggacagcggcagcaaggacaagaccagcgccctgagcctgagcaacgtggccggcgtgttctacatcctgatcggcggcctgggcctggccatgctggtggccctgatcgagttctgctacaagagcagaagcgagagcaagagaatgaagggcttctgcctgatcccccagcagagcatcaacgaggccatcagaaccagcaccctgcccagaaacagcggcgccggcgccagcagcggcggcagcggcgagaacggcagagtggtgagccacgacttccccaagagcatgcagagcatcccctgcatgagccacagcagcggcatgcccctgggcgccaccggcctgtag

SEQ ID NO: 92429 - protein, 868 aa, Artificial Sequence
  derived and/or modified sequence
MIPKSLVQAAETQRGLCEPGGKGREGRSGGKGETRPRGVGTQEGKGTIPGSPREKRGERGEGDPALLPAEDLWRLPGSKDRLRSSLLPPPGPPSSDSGPGPPSSHSGKTAQGPRTLNWARKQSARTSSNLCAWSLAMATKMAEIPSSPYEPGQRGMKDTQRGDAPQRGSPEPRILQLARVGNVYLKEESSRSGRLEAKKWIPTKFLENLSVPHVDLGGNQLWSGGMEALTTQLGPGREGSSSPNSKQELQPYSGSSALKPNQVGETSLYGVPIVSLVIDGQERLCLAQISNTLLKNYSYNEIHNRRVALGITCVQCTPVQLEILRRAGAMPISSRRCGMITKREAERLCKSFLGEHKPPKLPENFAFDVVHECAWGSRGSFIPARYNSSRAKCIKCGYCSMYFSPNKFIFHSHRTPDAKYTQPDAANFNSWRRHLKLSDKSATDELSHAWEDRGLGLATGASGPAGPGGPGGGAGVRSYPVIPVPSKGFGLLQKLPPPLFPHPYGFPTAFGLCPKKDDPVLGAGEPKGGSYVSAFRPVVKDTESIAKLYGSAREAYGAGPARGPGPGAGSGGYVSPDFLSEGSSSYNSASPDVDTADEPEVDVESNRFPDDEDAQEETEPSAPSAGGGPDAGRPAFGDLAAEDLVRRPERSPPSGGGGYELREPCGPLGGPAPAKVFAPERDEHVKSAAVALGPAASYVCTPEAHEPDKEDNHSPADDLETRKSYPDQRSISQPSPANTDRGEDGLTLDVTGTHLVEKDIENLAREELQKLLLEQMELRKKLEREFQSLKDNFQDQMKRELAYREEMVQQLQIVRDTLCNELDQERKARYAIQQKLKEAHDALHHFSCKMLTPRHCTGNCSFKPPLLP

SEQ ID NO: 92430 - DNA, 2607 bp, Artificial Sequence
  derived and/or modified sequence
atgatccccaagagcctggtgcaggccgccgagacccagagaggcctgtgcgagcccggcggcaagggcagagagggcagaagcggcggcaagggcgagaccagacccagaggcgtgggcacccaggagggcaagggcaccatccccggcagccccagagagaagagaggcgagagaggcgagggcgaccccgccctgctgcccgccgaggacctgtggagactgcccggcagcaaggacagactgagaagcagcctgctgcccccccccggcccccccagcagcgacagcggccccggcccccccagcagccacagcggcaagaccgcccagggccccagaaccctgaactgggccagaaagcagagcgccagaaccagcagcaacctgtgcgcctggagcctggccatggccaccaagatggccgagatccccagcagcccctacgagcccggccagagaggcatgaaggacacccagagaggcgacgccccccagagaggcagccccgagcccagaatcctgcagctggccagagtgggcaacgtgtacctgaaggaggagagcagcagaagcggcagactggaggccaagaagtggatccccaccaagttcctggagaacctgagcgtgccccacgtggacctgggcggcaaccagctgtggagcggcggcatggaggccctgaccacccagctgggccccggcagagagggcagcagcagccccaacagcaagcaggagctgcagccctacagcggcagcagcgccctgaagcccaaccaggtgggcgagaccagcctgtacggcgtgcccatcgtgagcctggtgatcgacggccaggagagactgtgcctggcccagatcagcaacaccctgctgaagaactacagctacaacgagatccacaacagaagagtggccctgggcatcacctgcgtgcagtgcacccccgtgcagctggagatcctgagaagagccggcgccatgcccatcagcagcagaagatgcggcatgatcaccaagagagaggccgagagactgtgcaagagcttcctgggcgagcacaagccccccaagctgcccgagaacttcgccttcgacgtggtgcacgagtgcgcctggggcagcagaggcagcttcatccccgccagatacaacagcagcagagccaagtgcatcaagtgcggctactgcagcatgtacttcagccccaacaagttcatcttccacagccacagaacccccgacgccaagtacacccagcccgacgccgccaacttcaacagctggagaagacacctgaagctgagcgacaagagcgccaccgacgagctgagccacgcctgggaggacagaggcctgggcctggccaccggcgccagcggccccgccggccccggcggccccggcggcggcgccggcgtgagaagctaccccgtgatccccgtgcccagcaagggcttcggcctgctgcagaagctgcccccccccctgttcccccacccctacggcttccccaccgccttcggcctgtgccccaagaaggacgaccccgtgctgggcgccggcgagcccaagggcggcagctacgtgagcgccttcagacccgtggtgaaggacaccgagagcatcgccaagctgtacggcagcgccagagaggcctacggcgccggccccgccagaggccccggccccggcgccggcagcggcggctacgtgagccccgacttcctgagcgagggcagcagcagctacaacagcgccagccccgacgtggacaccgccgacgagcccgaggtggacgtggagagcaacagattccccgacgacgaggacgcccaggaggagaccgagcccagcgcccccagcgccggcggcggccccgacgccggcagacccgccttcggcgacctggccgccgaggacctggtgagaagacccgagagaagcccccccagcggcggcggcggctacgagctgagagagccctgcggccccctgggcggccccgcccccgccaaggtgttcgcccccgagagagacgagcacgtgaagagcgccgccgtggccctgggccccgccgccagctacgtgtgcacccccgaggcccacgagcccgacaaggaggacaaccacagccccgccgacgacctggagaccagaaagagctaccccgaccagagaagcatcagccagcccagccccgccaacaccgacagaggcgaggacggcctgaccctggacgtgaccggcacccacctggtggagaaggacatcgagaacctggccagagaggagctgcagaagctgctgctggagcagatggagctgagaaagaagctggagagagagttccagagcctgaaggacaacttccaggaccagatgaagagagagctggcctacagagaggagatggtgcagcagctgcagatcgtgagagacaccctgtgcaacgagctggaccaggagagaaaggccagatacgccatccagcagaagctgaaggaggcccacgacgccctgcaccacttcagctgcaagatgctgacccccagacactgcaccggcaactgcagcttcaagccccccctgctgccctag

SEQ ID NO: 92431 - DNA, 3332 bp, Artificial Sequence
  derived and/or modified sequence
atgatcccaaagagcctggtccaggcagcggaaacccagaggggtctctgcgagccaggagggaaaggaagagaggggagaagtggaggaaaaggggagacacgccccagaggagttggaacgcaggagggaaaggggaccatacccggtagcccgagggaaaaacgaggcgagaggggagaaggcgaccccgcgctgctacccgcggaagatttatggcgcctcccgggttccaaggacaggctgcgttcgtcgctgctgccaccgccgggacccccttcttctgactccgggcccggacccccctcctctcactcagggaaaaccgcgcagggacccaggaccctcaactgggccagaaagcaaagtgcaaggaccagcagcaacttgtgtgcctggagccttgcaatggctacgaagatggctgagattccttctagcccatatgagccgggacagcgaggcatgaaggatactcagagaggtgatgcccctcaaagaggaagcccagagccccgaatcctgcagttggcccgagtgggaaacgtatatctgaaggaggaaagctcaaggagtgggcgactggaagctaagaagtggatcccaacaaagttccttgagaacctctctgtcccacacgttgacctcggtggaaaccagctttggagcggcggcatggaggctctcaccactcagctggggccggggcgcgagggcagttcctcgcccaactccaagcaggagctgcagccgtactcgggctccagcgctctcaaacccaaccaggtgggcgagacgtcgctgtacggggtgcccattgtgtcgctggtcatcgacggccaggagcgcctatgcctggcgcagatctccaacaccctcctcaagaactacagctataatgagatccacaaccgccgcgtggccctgggcatcacgtgcgtgcagtgcacgccggtacagctggagattctgcgtcgggccggggccatgcccatctcgtcgcgccgctgcggcatgatcactaagcgagaggccgaacgcctgtgcaagtcgttcctgggcgagcacaaaccacccaagctgcccgagaacttcgccttcgatgtggtgcacgagtgcgcgtggggctcgcgtggtagcttcatccctgcgcgttacaacagctctcgtgccaagtgcatcaagtgcggctactgcagcatgtacttctcgcccaacaagttcatcttccactcgcaccgaacacccgacgccaagtacacgcagcccgatgccgccaacttcaactcctggcgtcgtcacctcaaactcagtgacaagtcggccacagacgaactgagccatgcttgggaggaccgcggacttggcctggcgactggagctagtggcccggcgggcccaggagggcccggtggcggcgccggcgtacgaagctacccggtgatcccggtgcccagcaaaggctttgggctcctgcaaaagctgcccccaccacttttcccccatccttacggcttccctacggccttcggcctatgccccaaaaaggacgacccggttttaggcgcgggcgagccaaagggcggctcctacgtgtcggccttccggccggtggtcaaggacaccgagagcatcgctaagctctacgggagcgcccgggaggcgtacggcgcggggcctgctcgggggccgggacccggcgctgggagcggcggctacgtgagcccggactttctgagcgagggcagctccagctacaattccgcctcgcccgacgtggacaccgcggacgagcccgaggtggacgtggaatccaaccgcttccccgacgacgaggacgcccaagaggagaccgagcccagcgcacccagcgcagggggcggcccagacgctggccggcccgcatttggggacttggcagccgaagacttggtgcggagacctgagaggagcccgccaagcggcggcggcggctacgagctgcgagagccttgcgggcccctaggaggccccgcgccggccaaggtgttcgcgcccgagagggatgagcacgtgaagagcgcggcggtggcgctggggcccgcggcctcctacgtctgcacccccgaggcccacgagccagataaggaagacaatcactcgcccgccgatgatttggaaacgaggaaatcctatccagaccaaaggagtatctcccagccaagtcctgcaaatacagacagaggcgaagatgggcttaccttggatgtcacaggaactcatttggtggagaaagatatcgagaacctggccagagaggaattgcaaaaactgctcctggaacaaatggagctccgcaagaagctggaacgggaatttcagagtctcaaagataattttcaggatcaaatgaagagggaattggcttatcgagaagaaatggtgcaacagctgcaaattgtcagagataccctgtgtaacgaactcgaccaggagcggaaggcgcgctatgccatccagcagaaattgaaagaagcccacgacgccctgcaccatttctcctgcaagatgctgacgccccgccactgcactggcaactgctccttcaagccaccgctgttgccctagggccggcctggccgcacccctgcgccctcaagccatgctgctccttgtaaatacccgctgctgcggtggccctgagcgaggaacaagccattcggacccgaccgatgtaaatacagccgcccgtccgcccgccttcctcccgggctccccggccttgcccgccccctcccgggcgtccctgtccagggccccggcttggtttccaagtgtaaataccgcctcgcgcctcaaatccccctaccccgtgtgaactctagggcatcggacctcaaggggttaactggacagacggggggcgggaggggagagcgccccctcccattgtatagccttgaacccgattgtgaatacaatgtagcaacttcgctggcgcctgccccgcactccccgtcccgtccacttctgaaactcctgttcctaatgacaaagtggctatgtgcaatggatataaatgtactgtgagtctctcggttcagtattaggttcactttaatttatttatgctgtaagttatttttgcttccttctcctggacccacttccagtcccgttttgcattcccctttggattttgctttggctattttttgttgtaacctcttgatgtaacagcactttaaaagggcgacaactgactcacgagatggcaaccacctggagcctgtttggggagaccaccctgtacccgtgactttcgtttttaataataataataataataataa

SEQ ID NO: 92432 - DNA, 2607 bp, Artificial Sequence
  derived and/or modified sequence
atgatcccgaaaagccttgtacaggctgctgagacacaacggggactttgtgagccaggcgggaaggggagagaaggacggtcagggggcaagggagaaacacggcccagaggggtgggcacccaggaaggcaagggcaccatacccggctcaccccgagaaaagcgcggggagaggggcgaaggggacccagcactgctgccggctgaggacctgtggagactgcctggttctaaagacaggctgaggtcatccctgctcccacccccgggcccaccctcatcagattccgggcccggccccccatcctctcactctggaaagaccgcacagggtccaagaacgctgaactgggcccgtaagcagtccgcacgaacctcaagcaatctttgcgcctggtccctggcaatggccaccaagatggctgagattccatccagtccttacgagcctgggcagcgcggaatgaaggacactcaacgtggagatgcacctcaaagaggaagcccagagcccagaattttgcagctggctcgggttggaaatgtgtatctgaaggaagagtcgtcccgatcaggccgtttggaggcgaaaaaatggatccccacaaaatttctagaaaatctgagcgttcctcacgttgatctgggaggcaatcaattgtggtcgggcggcatggaagcactgacgacacagctggggcccggccgagaggggagctcttctcccaattccaaacaggaactgcagccctactcaggaagcagcgcccttaaacccaaccaggtcggagaaaccagcctctatggagtgcctatcgtgtctctggttattgacggacaggagcgcctgtgcctggcacagattagcaacacgttgctgaagaactacagctacaacgaaattcataaccgcagagtcgctctgggcattacctgtgtgcagtgcacacctgtccagttagagatccttaggcgcgccggtgctatgcccattagttcacgacgctgcggcatgatcaccaagcgggaggcagaacgactttgtaagtcatttctcggagagcacaagccgccgaagctgccggagaatttcgccttcgacgtggtgcacgagtgcgcttggggatcgcgaggctcctttatccccgcgagatacaactccagccgcgccaagtgcatcaaatgtggatactgctccatgtacttcagccctaataagttcatcttccacagccatcgaactccggacgcaaagtacactcagccagacgccgccaacttcaattcatggcggcggcatttgaaactgtccgacaagtcggccaccgacgaactgagccacgcatgggaggatagaggccttggtctggccacgggggcatcagggcctgctggacccggcggcccagggggaggcgctggggtgcgaagttacccagttatcccggtaccttccaagggctttggactgttacaaaagctgcctcctccattgttcccgcatccatacgggttcccaacagccttcggcctgtgcccaaaaaaagatgatccggtcctgggagccggcgaaccaaagggtggatcatatgtgagcgcgttcaggccagtggtgaaagacaccgagagtatagctaaattgtacgggagcgctagagaggcatacggcgccgggccagctcggggccccggccccggagcgggtagcggcgggtacgtcagtcccgatttcctaagtgaaggttcctcttcttacaactctgcttcacccgatgtcgacactgctgacgagccagaagttgacgtagaatccaatcggttcccagatgatgaagacgcccaggaggaaactgaaccatccgcaccttcggctggcggtggcccagatgcaggtaggccagccttcggtgatcttgcggctgaggatctggtgcgccgtccagaaaggagccctccttcaggcggtggcggatacgagctgagggagccctgtggtcctcttggtggaccggcccccgccaaggtcttcgcaccggagcgggacgaacacgtgaaatccgccgctgtggccttggggccggccgcctcctacgtgtgtacacctgaggcccatgaacccgacaaagaggacaaccactctccagctgacgacttggaaacccgcaagagctatcccgatcagaggtcaatctcacagccaagccccgctaacacagaccgcggcgaggatggactgacattggatgtgaccggcactcacttagtagagaaagacattgaaaacctggcgagggaagagctgcagaaactgcttctggagcagatggagcttcggaaaaagttagagcgcgagtttcagtctctcaaggacaattttcaagaccagatgaaaagggaacttgcatatcgcgaagaaatggtgcaacagttacaaatcgtgagagataccctctgcaacgagcttgatcaggagaggaaggccagatacgccatccagcagaagttgaaggaagcccatgacgccctccaccacttttcctgcaagatgctcaccccgagacactgtacaggaaactgctcgttcaagccaccacttctaccatag

SEQ ID NO: 92433 - DNA, 2607 bp, Artificial Sequence
  derived and/or modified sequence
atgatccccaagagcctggtgcaggccgctgagacccagaggggcctgtgtgagcccggcggcaagggccgggagggccgcagcggcggcaaaggagagacccggccccggggcgtgggcacccaggagggcaagggcaccatccctggcagcccccgggagaagagaggagagcggggggagggggaccctgccctgctgcctgctgaggacctgtggaggctgcccggcagcaaggaccggctgcggagcagcctgctgcccccacctggcccccccagcagtgacagcggccctggcccccccagcagccacagcggcaagacagcccagggccccaggaccctgaactgggccaggaagcagagcgcccggaccagcagcaacctgtgtgcctggagcctggccatggccaccaagatggccgagatccccagcagcccctatgagcccggccagaggggcatgaaggacacccagagaggagatgccccccagaggggcagccctgagccccgcatcctgcagctggcccgggtgggcaatgtgtacctgaaggaggagagcagccgcagcggccgcctggaggccaagaagtggatccccaccaagttcctggagaacctgtctgtgccccacgtggacctgggcggcaaccagctgtggagcggcggcatggaggccctgaccacccagctgggccctggccgggagggcagcagcagccccaacagcaagcaggagctgcagccctacagcggcagcagcgccctgaagcccaaccaggtgggggagaccagcctgtatggagtgcccatcgtgtccctggtgattgatggccaggagcggctgtgcctggcccagatcagcaacaccctgctgaagaactacagctacaatgagatccacaacagaagagtggccctgggcatcacctgtgtgcagtgcacccctgtgcagctggagatcctgcggcgggccggggccatgcccatcagcagcagaagatgtggcatgatcaccaagcgggaggccgagcggctgtgcaagagcttcctgggggagcacaagccacccaagctgcctgaaaattttgcctttgatgtggtgcatgaatgtgcctggggcagccggggcagcttcatcccagcccgctacaacagcagccgggccaagtgcatcaagtgtggctactgcagcatgtacttcagccccaacaagttcatcttccacagccacaggaccccagatgccaagtacacccagccagatgctgccaacttcaacagctggaggaggcacctgaagctgagtgacaagagcgccacagatgagctgagccacgcctgggaggaccggggcctgggcctggccactggagccagcggccctgctggccctgggggccctgggggcggggccggcgtgcgcagctaccctgtgattcctgtgcccagcaaaggatttggcctgctgcagaagctgcccccacccctcttcccccacccctacggcttccccacagccttcggcctgtgccccaagaaggatgatcctgtgctgggcgctggggagcccaagggcggcagctatgtgtctgccttccggcctgtggtgaaggacacagagagcatcgccaagctgtatggcagcgcccgggaggcctacggggccggccctgcccggggccctggccctggggccggcagcggcggctacgtgtccccagacttcctgtctgagggcagcagcagctacaacagcgccagcccagatgtggacacagcagatgagcctgaggtggatgtggagagcaaccgcttcccagatgatgaagatgcccaggaggagacagagcccagcgcccccagcgctgggggcggcccagatgctggccggcctgccttcggggacctggccgctgaggacctggtgcggcggcctgagaggagcccccccagcggcggcggcggctatgagctgcgggagccctgtggccccctgggcggccctgccccagccaaggtgtttgcccctgagagagatgagcacgtgaagtctgctgctgtggccctgggccctgctgccagctatgtgtgcaccccagaggcccacgagccagacaaggaggacaaccacagccctgcagatgacctggagaccaggaagagctacccagaccagaggagcatcagccagcccagccctgccaacacagacagaggagaagatggcctgaccctggatgtgacaggcacccacctggtggagaaggacatcgagaacctggcccgggaggagctgcagaagctgctgctggagcagatggagctgaggaagaagctggagcgggagttccagagcctgaaggacaacttccaggaccagatgaagcgggagctggcctaccgggaggagatggtgcagcagctgcagatcgtgcgggacaccctgtgcaatgagctggaccaggagaggaaggcccgctatgccatccagcagaagctgaaggaggcccatgatgccctgcaccacttcagctgcaagatgctgacccccaggcactgcaccggcaactgcagcttcaagccacccctgctgccctag

SEQ ID NO: 92434 - DNA, 2607 bp, Artificial Sequence
  derived and/or modified sequence
atgatccccaagagcctggtgcaggccgccgagacccagcggggcctctgcgagcccgggggtaaaggtcgcgaggggcgctccgggggcaagggtgagacacggcctcgaggcgttggcacccaggaagggaagggcaccatcccaggctcacctcgcgagaaacgtggcgaacgtggcgagggcgaccccgccctcctcccagctgaggacctgtggcgcctgcctggcagcaaggaccgactacgttcttcgcttctccccccccctggcccccccagttctgactctgggccaggacccccaagttcacatagcggcaagacagcccaggggccacgtactttgaattgggctcgcaaacagtccgcccgcacctcaagtaatctgtgcgcttggtctctggccatggctacaaaaatggctgagatccccagttccccctacgaacctggccagagggggatgaaagatactcagcggggggacgcaccccagagagggagcccggagccacgcatcttgcagctggctagggtgggaaatgtatacctaaaggaagaatcttctcggtctgggaggctagaagccaaaaagtggataccgacgaaattccttgaaaacctcagcgtaccgcacgtggacttgggaggcaaccagttgtggagtggcggcatggaagcattgacaacccagcttggaccaggcagggagggctcttcttcgcccaattcaaagcaggaactccagccttactctgggagctctgctctcaagccaaaccaggtgggagagacgagcctttacggagtccccatcgtgagtctggtgatcgatggacaggagcgcctgtgcctcgcacagatcagcaacactctgctgaagaactacagttacaatgaaatacacaacagacgggtggcactcggcatcacttgtgtccagtgcacccccgtgcaactggaaatcctgcggagggctggggctatgcccatctcttctcgaaggtgcggaatgattacaaagcgggaggcagaacgcctgtgtaagtcgtttctcggcgaacacaaacctcccaaacttccagagaactttgccttcgatgtggtgcatgaatgcgcgtggggttcaaggggatcctttatcccagcgcggtacaactcatccagagccaaatgcattaaatgcgggtactgctccatgtatttctccccgaacaagttcatctttcatagccaccgcaccccagatgcaaagtacacgcagccagacgccgcaaacttcaactcgtggcgccgccacctgaaattgtccgataagagcgcgaccgatgagctgtctcacgcttgggaggaccgggggcttgggctggccacaggagcctccggtccagcaggccccggcggccctgggggcggcgctggagtaagaagttatcccgtgatcccagtgccaagtaaaggctttggcctcttgcagaagctgcctccccctctttttccgcacccctacggcttcccaacggcatttggattgtgccctaagaaagatgacccagtgctgggcgccggagagcctaagggcggctcatacgtgagtgcctttaggccagtcgttaaggacacggagtccatcgcgaagctctacggcagcgccagagaagcctacggcgccggaccggcgcgcggaccaggacctggcgctggtagcgggggttatgtaagtccggatttcctgtcggagggatcaagctcttataacagcgcctcgccggacgtggacacagctgacgagccagaggtggatgtggaaagcaatcgattcccagacgacgaagacgctcaggaggaaaccgaaccaagtgccccctccgctggcggcggtcccgacgctgggcgccctgcatttggagatctcgcagctgaggacctcgtgcgccgtccagagcgctctcccccaagtggaggcggcggatatgagctccgagaaccctgcggacccttggggggcccagcccccgccaaggttttcgcccccgagagggatgagcacgtgaagtcagctgcagttgcactgggtccggctgccagttatgtgtgtaccccggaggcacatgaacccgacaaggaggataatcattcaccagcggatgacctagagaccagaaaatcctaccctgatcagcggagcattagtcagccgagcccagcgaacaccgaccgcggagaggatggacttacacttgacgtaacggggacacatcttgtggagaaagatatcgaaaacctagcccgcgaagagttgcagaagttactcctggaacagatggagctacggaagaaactagaaagggaattccagtccctaaaagacaatttccaggaccagatgaaacgagaattggcgtatcgggaggagatggtccagcagctccagattgttagagatacactctgtaatgagctcgaccaggagagaaaagctcgctacgcaattcagcaaaagctaaaagaagcccacgatgccctccaccacttctcctgcaaaatgttgacccctcgtcactgtactgggaactgctcatttaaaccccctctgctgccatag

SEQ ID NO: 92435 - DNA, 2607 bp, Artificial Sequence
  derived and/or modified sequence
atgatacccaagtccctggtccaggccgcagaaacacagcggggactctgtgaacccggaggcaaaggcagagagggaaggtctggcggaaaaggggagactaggcctaggggggttggaacccaggaaggtaaagggaccatacctggctccccgagagagaagcggggagagcgcggagaaggtgatcctgctttgctccccgcagaagacctatggaggctgcctggcagcaaggaccgtctgcgaagctccttgctccctcctccagggccaccctcttctgactcaggccctggccctccgtccagtcacagcggcaaaacggcgcagggccctcgtaccttgaattgggccaggaagcaaagtgcaagaaccagcagcaatctgtgtgcctggagcctggctatggctactaagatggcggagattcctagctccccatatgagccaggccaacgtgggatgaaggacactcagaggggcgacgcaccacaaaggggcagtccggagccaagaatcttgcaactggcaagggtgggaaatgtgtacctgaaagaggagtcatctagaagtggacggctcgaagctaaaaagtggatacccacaaaattcctagagaatctctctgtgccccacgtggatctaggagggaatcaactgtggagcggcggaatggaggcactcactactcagcttggccctgggagagagggtagctcaagccccaattccaagcaggaattgcagccctactccgggtccagcgccctgaaaccgaaccaggtcggagaaactagcttgtatggagtgcccatcgtgagcctggtgattgacggacaggagaggctatgcctagcacaaatttctaacaccctgctcaagaactactcatataacgagatacacaataggcgcgttgctttgggcattacatgcgttcagtgcacacctgtgcaacttgagattctgcggcgtgccggtgccatgccaatatccagcagacggtgcggtatgatcactaagcgggaagccgaacgcttatgtaaatctttcctgggcgaacacaagccacccaagttgccagaaaattttgcttttgacgtggtccacgaatgcgcctggggctccagggggtccttcatacccgcacgctataactcttcgcgtgctaaatgcatcaaatgcggatactgttctatgtacttttctcctaataaatttatattccactcccaccgcacgcccgacgcaaagtacactcagccggacgccgctaattttaattcctggaggcgacacctaaagctttccgacaagtcagcgaccgatgaactgagccatgcttgggaggaccgagggcttggcctggccacaggggcaagcgggccagcaggccctggaggcccagggggaggcgctggagtcagaagctaccctgttatacccgtcccttctaaagggttcggactgttgcagaagttgccaccacctctgtttccacacccatatggatttcccacggcattcggcctttgtccaaagaaggacgatccagtcttaggagcaggagaacctaaaggcggtagctacgtgtctgctttcagacccgtggtgaaggatacagagtctattgccaaactctatggcagcgccagagaagcctacggggctggacccgctagagggccagggcctggagccggaagcggcggatacgtttctcccgactttctatccgagggtagctcctcctacaatagcgcaagccctgacgttgatactgccgatgaacccgaagtagacgtcgagtcaaacagatttccagacgacgaagatgcccaggaggagaccgaacctagtgctccgagtgccggtggcggacccgacgcaggacgtcccgcttttggcgacctggcagcagaggacttagtgcgtcgtcctgagcgcagcccaccctctggaggagggggttatgagctgagggaaccatgcggaccgctcggcggtcctgcaccagctaaagtgttcgccccagaaagagacgagcacgttaaatcagcagcagttgctctgggacctgcagcatcatatgtttgtaccccagaggcgcatgagccagacaaagaggacaatcactcacccgcagacgatctcgagaccagaaaaagctacccggaccagcggtccatctcccaaccaagtcccgctaacacagataggggtgaagatggcctgacgctggacgtgactggtactcacttggtggagaaggatattgaaaatctggcgagggaagagctgcagaagctcttgttagaacagatggaactccggaagaaactggaacgggagtttcagagcttgaaggataatttccaggaccagatgaagcgtgaactggcgtaccgcgaggaaatggtacaacagttacagattgtgcgcgatacgctctgcaacgagttggatcaagagagaaaggctagatacgccatacagcagaaactaaaagaagcccacgatgctcttcatcattttagttgtaaaatgctgaccccacgccactgcacaggtaattgttcttttaaaccaccccttttgccttag

SEQ ID NO: 92436 - DNA, 504 bp, Artificial Sequence
  derived and/or modified sequence
atgatcaaggactgcggcgccacctgggtggtgctgggccacagcgagagaagacacgtgttcggcgagagcgacgagctgatcggccagaaggtggcccacgccctggccgagggcctgggcgtgatcgcctgcatcggcgagaagctggacgagagagaggccggcatcaccgagaaggtggtgttcgagcagaccaaggtgatcgccgacaacgtgaaggactggagcaaggtggtgctggcctacgagcccgtgtgggccatcggcaccggcaagaccgccaccccccagcaggcccaggaggtgcacgagaagctgagaggctggctgaagagcaacgtgagcgacgccgtggcccagagcaccagaatcatctacggcggcagcgtgaccggcgccacctgcaaggagctggccagccagcccgacgtggacggcttcctggtgggcggcgccagcctgaagcccgagttcgtggacatcatcaacgccaagcagtag

SEQ ID NO: 92437 - DNA, 504 bp, Artificial Sequence
  derived and/or modified sequence
atgattaaggactgtggggcaacttgggtggtactcgggcattcagagaggcggcacgtatttggcgagtctgacgagctgattgggcaaaaagtcgctcacgctcttgccgagggattaggggtcatcgcttgtatcggagagaaacttgacgagagagaggcagggattactgagaaggtggtttttgagcagactaaggtcatcgcggataacgttaaggactggtcgaaggtggttctcgcctacgaacctgtgtgggccattggaactggcaaaacagccaccccacaacaagctcaagaggtgcatgagaagttgcggggatggttgaagtccaacgtttctgacgcggtggctcagtctactcgcataatttacggggggtctgtaactggcgctacgtgcaaggagctagccagccagcctgacgtcgatgggttcctcgttggcggggccagcctcaagcctgagttcgttgatataatcaatgccaaacaatag

SEQ ID NO: 92438 - DNA, 504 bp, Artificial Sequence
  derived and/or modified sequence
atgatcaaggactgtggggccacctgggtggtgctgggccacagcgagaggagacatgtgtttggagagagtgatgagctgattggccagaaggtggcccacgccctggccgagggcctgggcgtgattgcctgcatcggggagaagctggatgagcgggaggccggcatcacagagaaggtggtgtttgagcagaccaaggtgattgctgacaacgtgaaggactggagcaaggtggtgctggcctatgagcctgtgtgggccatcggcaccgggaagacagccaccccccagcaggcccaggaggtgcatgagaagctgcggggctggctgaagagcaatgtgtctgatgctgtggcccagagcacccgcatcatctatggaggctctgtgactggagccacctgcaaggagctggccagccagccagatgtggatggcttcctggtgggcggggccagcctgaagccagagtttgtggacatcatcaatgccaagcagtag

SEQ ID NO: 92439 - DNA, 504 bp, Artificial Sequence
  derived and/or modified sequence
atgatcaaggactgcggcgccacctgggtggtgctgggccacagcgaaaggagacatgtcttcggggaatccgacgagctgatcggccagaaagtggcgcatgctctagcagagggccttggcgtgatagcttgtataggggagaagctggacgagagggaagctgggataacagagaaagtggtgtttgagcagaccaaagtgatcgcagataacgttaaggattggtccaaagttgtgcttgcgtatgaaccggtttgggccatcggaaccggcaagactgccacacctcagcaggcacaggaggtccatgagaaactgagaggctggctgaaatccaatgtgtctgatgcagtcgctcaatctaccagaatcatttatggcggtagcgtgaccggtgccacatgcaaggaacttgccagccagcctgacgtcgacggcttccttgttggaggcgcctctctaaagccggagttcgtggacatcataaatgccaaacagtag

SEQ ID NO: 92440 - DNA, 504 bp, Artificial Sequence
  derived and/or modified sequence
atgatcaaagattgcggcgctacctgggtcgtactggggcacagcgagaggcggcacgtgttcggcgagtcagacgaactcattgggcagaaagtggctcacgccttagccgagggactcggagtgatcgcatgtatcggggaaaagctggacgagagagaagccggtatcactgaaaaggtggtcttcgagcagaccaaggtcatagcagataatgtgaaggactggtcgaaggtggtcttagcatacgaacctgtatgggctattggtaccggcaaaactgctacccctcagcaggcacaagaggtacatgaaaagttaagggggtggctgaagtccaatgtgagcgatgccgttgcccagagcactcggatcatttacggcggatctgtgaccggcgctacctgtaaggaactggcttcccagccagacgtcgacggttttcttgtgggaggggctagtctgaagcccgagttcgtcgacatcataaatgctaaacagtag

SEQ ID NO: 92441 - DNA, 504 bp, Artificial Sequence
  derived and/or modified sequence
atgatcaaggactgcggtgctacatgggtggtgctcggtcactccgaaagacgccacgtgtttggagaatctgatgagttaatcggccaaaaggttgcacatgcgctggctgaaggactgggcgttattgcctgtataggtgagaagttggacgaaagagaggcagggatcaccgagaaggtcgtcttcgagcagacgaaagttattgcagacaatgtaaaagactggagcaaagtcgtgttagcttacgaacccgtctgggccattgggaccggcaagaccgccactcctcagcaggcccaggaagttcacgagaagctgaggggctggctcaagtccaacgtgagcgatgccgtggcccagagtactagaataatctacggaggctccgtaaccggggcaacctgcaaggaacttgctagccagcccgatgttgacggcttcctggtgggcggtgcctctctgaagccagaattcgtggatatcattaacgcaaagcagtag

SEQ ID NO: 92442 - DNA, 504 bp, Artificial Sequence
  derived and/or modified sequence
atgatcaaggactgcggcgccacctgggtggtgctgggccacagcgaaaggcgccatgtcttcggcgagtctgacgagctgattgggcaaaaggtagctcatgctctagccgaggggcttggcgttatcgcatgtatcggagaaaaattggacgagcgcgaggcagggataaccgagaaagtggtattcgagcagaccaaggtgatcgccgacaacgttaaggactggtccaaggtggtgttggcttacgagcctgtttgggccatcggtaccgggaagaccgcaacacctcagcaggcccaggaggttcatgaaaaattgcgcggctggttgaagagtaatgtcagtgatgctgtagcccagtccaccaggattatttatgggggcagtgttaccggagccacttgtaaggagctggctagtcaaccagacgtggatgggtttctggtcggaggtgcctccctgaagccggaattcgtggacatcattaacgcaaagcagtag

SEQ ID NO: 92443 - DNA, 504 bp, Artificial Sequence
  derived and/or modified sequence
atgatcaaagactgcggtgcaacctgggtggtcttgggacattcagagcgccgacatgtgttcggcgagtccgatgaactcattggacagaaggtcgcccacgcactggctgaggggctaggagtgattgcatgtattggcgagaaacttgacgaacgtgaggccggaattacagagaaagttgtgttcgagcagaccaaagtcatcgcagacaacgttaaagattggagcaaggtggttctggcctacgagcctgtgtgggccattggaacaggcaaaaccgcaaccccccagcaagcccaggaggtccacgaaaagcttcgaggctggttaaaatcaaacgtgtccgatgctgtcgcccaaagcaccaggatcatttatggtggttcggtgaccggtgctacatgtaaggaacttgcctcccaacccgatgtcgacggcttccttgtcgggggtgcgtctttaaagccggagttcgtggacataataaatgctaaacagtag

SEQ ID NO: 92444 - protein, 631 aa, Artificial Sequence
  derived and/or modified sequence
MESYHKPDQQKLQALKDTANRLRISSIQATTAAGSGHPTSCCSAAEIMAVLFFHTMRYKSQDPRNPHNDRFVLSKGHAAPILYAVWAEAGFLAEAELLNLRKISSDLDGHPVPKQAFTDVATGSLGQGLGAACGMAYTGKYFDKASLPSSWDYSYRVYCLLGDGELSEGSVWEAMAFASIYKLDNLVAILDINRLGQSDPAPLQHQMDIYQKRCEAFGWHAIIVDGHSVEELCKAFGQAKHQPTAIIAKTFKGRGITGVEDKESWHGKPLPKNMAEQIIQEIYSQIQSKKKILATPPQEDAPSVDIANIRMPSLPSYKVGDKIATRKAYGQALAKLGHASDRIIALDGDTKNSTFSEIFKKEHPDRFIECYIAEQNMVSIAVGCATRNRTVPFCSTFAAFFTRAFDQIRMAAISESNINLCGSHCGVSIGEDGPSQMALEDLAMFRSVPTSTVFYPSDGVATEKAVELAANTKGICFIRTSRPENAIIYNNNEDFQVGQAKVVLKSKDDQVTVIGAGVTLHEALAAAELLKKEKINIRVLDPFTIKPLDRKLILDSARATKGRILTVEDHYYEGGIGEAVSSAVVGEPGITVTHLAVNRVPRSGKPAELLKMFGIDRDAIAQAVRGLITKA

SEQ ID NO: 92445 - DNA, 1896 bp, Artificial Sequence
  derived and/or modified sequence
atggagagctaccacaagcccgaccagcagaagctgcaggccctgaaggacaccgccaacagactgagaatcagcagcatccaggccaccaccgccgccggcagcggccaccccaccagctgctgcagcgccgccgagatcatggccgtgctgttcttccacaccatgagatacaagagccaggaccccagaaacccccacaacgacagattcgtgctgagcaagggccacgccgcccccatcctgtacgccgtgtgggccgaggccggcttcctggccgaggccgagctgctgaacctgagaaagatcagcagcgacctggacggccaccccgtgcccaagcaggccttcaccgacgtggccaccggcagcctgggccagggcctgggcgccgcctgcggcatggcctacaccggcaagtacttcgacaaggccagcctgcccagcagctgggactacagctacagagtgtactgcctgctgggcgacggcgagctgagcgagggcagcgtgtgggaggccatggccttcgccagcatctacaagctggacaacctggtggccatcctggacatcaacagactgggccagagcgaccccgcccccctgcagcaccagatggacatctaccagaagagatgcgaggccttcggctggcacgccatcatcgtggacggccacagcgtggaggagctgtgcaaggccttcggccaggccaagcaccagcccaccgccatcatcgccaagaccttcaagggcagaggcatcaccggcgtggaggacaaggagagctggcacggcaagcccctgcccaagaacatggccgagcagatcatccaggagatctacagccagatccagagcaagaagaagatcctggccacccccccccaggaggacgcccccagcgtggacatcgccaacatcagaatgcccagcctgcccagctacaaggtgggcgacaagatcgccaccagaaaggcctacggccaggccctggccaagctgggccacgccagcgacagaatcatcgccctggacggcgacaccaagaacagcaccttcagcgagatcttcaagaaggagcaccccgacagattcatcgagtgctacatcgccgagcagaacatggtgagcatcgccgtgggctgcgccaccagaaacagaaccgtgcccttctgcagcaccttcgccgccttcttcaccagagccttcgaccagatcagaatggccgccatcagcgagagcaacatcaacctgtgcggcagccactgcggcgtgagcatcggcgaggacggccccagccagatggccctggaggacctggccatgttcagaagcgtgcccaccagcaccgtgttctaccccagcgacggcgtggccaccgagaaggccgtggagctggccgccaacaccaagggcatctgcttcatcagaaccagcagacccgagaacgccatcatctacaacaacaacgaggacttccaggtgggccaggccaaggtggtgctgaagagcaaggacgaccaggtgaccgtgatcggcgccggcgtgaccctgcacgaggccctggccgccgccgagctgctgaagaaggagaagatcaacatcagagtgctggaccccttcaccatcaagcccctggacagaaagctgatcctggacagcgccagagccaccaagggcagaatcctgaccgtggaggaccactactacgagggcggcatcggcgaggccgtgagcagcgccgtggtgggcgagcccggcatcaccgtgacccacctggccgtgaacagagtgcccagaagcggcaagcccgccgagctgctgaagatgttcggcatcgacagagacgccatcgcccaggccgtgagaggcctgatcaccaaggcctag

SEQ ID NO: 92446 - DNA, 1896 bp, Artificial Sequence
  derived and/or modified sequence
atggagtcctatcataagcctgaccagcaaaaactccaagccttaaaagacaccgccaaccggttgcgcattagctcaattcaggcaaccactgccgccgggtctggccatcccaccagctgttgttccgctgcggaaattatggctgtattattcttccataccatgaggtacaagagtcaggaccccagaaacccacacaacgatagattcgtcttgagcaaaggacacgctgcacctatactgtatgctgtttgggcagaggcaggcttcttggcagaagccgaactccttaacctgagaaaaatttctagtgacctcgatggtcatccagtgccaaaacaggccttcacagacgttgccactgggagtttagggcaggggctgggcgccgcatgtggtatggcatatacgggtaagtatttcgataaggcctccttaccctccagttgggactattcttacagagtgtattgtctgcttggcgacggcgagttgagcgaggggtccgtttgggaggctatggcctttgctagcatctataaacttgacaacctggtggcaattctcgatatcaataggctgggtcaatcagatccagcccccttacagcaccagatggacatttaccaaaaaaggtgcgaggcgttcgggtggcatgccatcatagttgatggtcattcagttgaggaattatgtaaagccttcgggcaggccaaacaccaaccaaccgccatcatcgcaaagacctttaagggaagaggcataaccggagtcgaagataaggagtcttggcacggtaagcctctacccaagaatatggcggagcagatcattcaggaaatctatagccaaatccagtcaaaaaagaagatcctagccaccccaccccaggaggacgcaccttcagtagacattgctaatatacggatgcctagcttgccttcctataaggtgggcgataagatagccacaaggaaggcttacggccaggctctcgccaagctcggccacgcctccgaccgtattatagccttagatggggatacaaaaaattctacattttctgagatttttaagaaggaacacccggatcgtttcatagagtgctatatcgctgagcagaacatggtttctatcgctgtaggttgcgcaacgcggaaccgcacagtgccattttgctcgacattcgctgctttttttaccagggcgttcgaccagattcgtatggctgcgatcagcgagtccaacatcaacctctgcggatctcattgcggtgtttcgattggagaagacggacccagtcaaatggcgcttgaagacctggcgatgtttcgctccgtccccacgagcactgtgttctacccctccgacggcgtagcgacagagaaagctgtggaactggccgctaacacaaaggggatctgtttcattcgtacaagtcggcccgaaaacgcaattatatacaacaataacgaagacttccaggtgggacaggctaaggttgtgctgaagagcaaagatgaccaggtcactgtaatcggagctggcgttactttgcatgaggcccttgccgccgccgaattactgaagaaagagaagattaatatccgggtgctcgacccattcacaattaagcctctggatcgtaagctgatcctggatagcgccagagccaccaaaggcagaatcctcaccgtagaggatcattattacgaggggggcatcggggaagccgtcagttccgcagtcgtgggggaaccgggaattacagtgacccacctcgcggtcaatcgagtaccacgctctggaaaacccgctgagttgttgaagatgtttggcattgacagagacgccattgctcaggctgttcgcggcctgataaccaaagcctag

SEQ ID NO: 92447 - DNA, 1896 bp, Artificial Sequence
  derived and/or modified sequence
atggagagctaccacaagccagaccagcagaagctgcaggccctgaaggacacagccaaccggctgcgcatcagcagcatccaggccaccacagctgctggcagcggccaccccaccagctgctgcagcgctgctgagatcatggctgtgctcttcttccacaccatgagatacaagagccaggaccccaggaacccccacaatgacagatttgtgctgagcaaaggacatgctgcccccatcctgtatgctgtgtgggccgaggccggcttcctggccgaggccgagctgctgaacctgaggaagatcagcagtgacctggatggccaccctgtgcccaagcaggccttcacagatgtggccaccggcagcctgggccagggcctgggcgccgcctgtggcatggcctacaccgggaagtactttgacaaggccagcctgcccagctcctgggactacagctacagagtgtactgcctgctgggagatggagagctgtctgagggctctgtgtgggaggccatggcctttgccagcatctacaagctggacaacctggtggccatcctggacatcaaccggctgggccagagcgaccctgcccccctgcagcaccagatggacatctaccagaagagatgtgaggccttcggctggcacgccatcatcgtggatggccacagcgtggaggagctgtgcaaggccttcggccaggccaagcaccagcccacagccatcatcgccaagaccttcaagggccggggcatcactggagtggaggacaaggagagctggcacggcaagcccctgcccaagaacatggccgagcagatcatccaggagatctacagccagatccagagcaagaagaagatcctggccaccccaccccaggaggatgcccccagcgtggacatcgccaacatccgcatgcccagcctgcccagctacaaggtgggggacaagatcgccaccaggaaggcctacggccaggccctggccaagctgggccacgccagtgaccgcatcatcgccctggatggagacaccaagaacagcaccttcagcgagatcttcaagaaggagcacccagaccgcttcatcgagtgctacatcgccgagcagaacatggtgtccattgctgtgggctgtgccaccaggaacagaacagtgcccttctgcagcacctttgctgccttcttcacccgggcctttgaccagatccgcatggccgccatcagcgagagcaacatcaacctgtgtggcagccactgcggcgtgtccattggagaagatggccccagccagatggccctggaggacctggccatgttccgctctgtgcccaccagcaccgtcttctaccccagtgatggagtggccacagagaaggctgtggagctggccgccaacaccaagggcatctgcttcatccgcaccagcaggccagaaaatgccatcatctacaacaacaatgaagacttccaggtgggccaggccaaggtggtgctgaagagcaaggatgaccaggtgaccgtcatcggggccggcgtgaccctgcacgaggccctggccgctgctgagctgctgaagaaggagaagatcaacatccgggtgctggaccccttcaccatcaagcccctggacaggaagctgatcctggacagcgcccgggccaccaagggccgcatcctgactgtggaggaccactactatgagggcggcatcggggaggccgtgagcagcgctgtggtgggggagcccggcatcaccgtgacccacctggccgtgaacagagtgcccaggtctgggaagccagctgagctgctgaagatgtttggaattgacagagatgccatcgcccaggccgtgcggggcctcatcaccaaggcctag

SEQ ID NO: 92448 - DNA, 1896 bp, Artificial Sequence
  derived and/or modified sequence
atggagagctaccacaagcccgaccagcagaagctgcaggccctgaaagatactgctaataggctgcgcatcagttcaatccaagctacgactgccgctggcagcgggcatcccacctcctgttgcagcgccgcggaaatcatggccgtactctttttccacaccatgcgatataagagccaggacccaagaaacccacataacgatagatttgtgctgtcaaagggacacgcggcccctattttatatgccgtgtgggccgaagcaggctttttagctgaagcggagctgctgaacctgcgtaaaatatcctcagacctggacggtcatccggtgcccaaacaggccttcactgatgtcgcaaccgggagtctaggacaggggctgggtgccgcttgcggcatggcctataccggcaaatattttgataaggcatctttgcccagcagctgggattacagctatcgggtgtattgtttgcttggcgacggcgaactgagcgagggatcggtctgggaagccatggcctttgcatccatctacaaattagataatcttgtggccatcctggatattaacaggctcgggcagtcagatccggctcccctccagcaccagatggatatctaccaaaagcgctgcgaggcctttggttggcatgccatcatcgtcgatggtcactcagtcgaggagctgtgtaaggcattcggccaggctaaacatcaaccaaccgccatcatcgcaaagactttcaaggggcgcggtattacgggagtcgaggacaaggaatcttggcacggcaagcccctaccgaaaaacatggcagagcagatcattcaggaaatctatagccagattcagagcaagaagaagatactggccacaccccctcaggaggacgccccatccgttgatattgctaatatcagaatgccaagtttgccctcctataaagtgggagataagatcgccacccgtaaggcctatggtcaagcgctggctaagctgggacacgcctctgatagaatcattgctctcgacggagacactaaaaactccactttctctgagatcttcaaaaaggaacaccctgacagattcattgagtgctatatcgcagaacagaatatggtctccatagcggttggatgcgctacccggaacaggacagtacctttctgcagtactttcgcagcctttttcacccgcgctttcgatcagattaggatggctgctatttctgagtcaaacatcaatctgtgtggcagtcattgcggtgtgagtataggagaagatggcccgagccaaatggccctggaagatctggccatgttccggtccgtgcctacatcaactgttttttaccctagcgacggtgtggctacagagaaggctgttgagttggccgccaataccaagggcatttgcttcattcgtacaagccggcccgagaacgccattatctacaataacaatgaagatttccaggtcggccaagcaaaagtggttctgaagtccaaggacgatcaggtaacagttatcggcgccggcgttacactgcacgaggcactcgctgccgcagaacttctaaaaaaggagaaaatcaacatccgggttctggaccccttcactatcaaaccgttagaccgaaaactcatcttagattccgctcgggccaccaagggacggattctgacggttgaagaccactactacgaagggggcatcggtgaagctgtgtcttctgcggtggtgggtgaaccagggattacagtgacgcacctcgccgtgaatagagtcccgcggtctggaaaacccgctgagttgctgaagatgttcgggatcgatagagatgcgatagcccaagcagtgagaggcctgatcactaaagcctag

SEQ ID NO: 92449 - DNA, 1896 bp, Artificial Sequence
  derived and/or modified sequence
atggaaagctaccataagcccgaccagcaaaaactgcaagctctgaaagatacagctaataggctgagaatctcctccatacaggctaccacagctgctggaagtggccatcccacctcttgctgtagcgctgcagagatcatggctgtgttattcttccacacaatgaggtacaaaagccaggaccccagaaatccacacaacgatcgcttcgtcctctctaaagggcacgcagctcctatcctctatgccgtgtgggccgaggctggcttcctcgccgaagccgaattgctgaatttaaggaaaatcagctctgatctggatgggcatcctgtgccgaaacaggccttcactgatgtggctaccggcagtctgggccagggtctgggcgctgcctgtggaatggcttacactgggaagtattttgacaaggcttctctcccctcttcatgggattacagctacagggtttactgtcttctgggcgacggcgagctgtccgaggggtctgtttgggaagccatggcctttgcttcaatatacaagctggacaatttggtggccatcctggacataaatagactggggcagtctgaccctgctccactccaacatcagatggatatataccagaagcgctgcgaagcatttggatggcacgccattatcgtggatggccactccgtggaggaactgtgcaaggcgttcggtcaggccaaacatcaacccacggccattattgccaagacattcaaagggaggggaatcacaggggttgaggataaggagagttggcacggaaagccattacctaagaacatggctgagcaaattattcaggagatttactcgcagatccagagtaaaaaaaaaatactggccacgcctcctcaggaggacgcccctagcgtggatattgcaaacatccggatgccgtccctgccctcttacaaggtgggcgataaaatcgcaacccgaaaggcatatggccaagccctggccaagctcggccacgctagtgatcgcattatcgccttggacggtgacacaaaaaactcaaccttctccgaaattttcaaaaaagaacaccctgacagatttattgagtgttacatcgcagagcagaatatggtctctatcgccgtcggttgcgctacgcgcaaccggacagtcccattttgcagcacatttgcagctttttttacaagggctttcgaccaaattcgcatggccgctattagtgagtctaatatcaatttgtgtggcagccactgtggcgtctcaatcggagaagacggcccaagccagatggctcttgaggacctggctatgttcaggtctgtacctacttcaacggtcttctacccaagtgatggggtcgccactgaaaaggcggtggagctggcagcaaacactaagggtatctgtttcataaggacttcaagaccagagaacgcgatcatctataataacaacgaagatttccaggttggccaggcaaaggttgtcctcaagagtaaggacgaccaggtaacagtgattggggcaggagttaccttgcacgaggctctggccgcagcagagctcttaaagaaggagaaaatcaatatcagggtgttggacccattcaccattaaacctctggatcggaagctcatacttgacagcgccagggcaacgaaaggcagaattctgaccgtggaggaccactactacgaaggaggaataggggaggctgtgtccagtgccgtcgttggtgaacctgggattacagtgacacacttggccgtaaaccgagtgcccaggagcggcaagcctgccgaactactgaagatgtttggaatcgatcgtgatgctattgcccaggctgtgcggggtctgattactaaggcttag

SEQ ID NO: 92450 - DNA, 2075 bp, Artificial Sequence
  derived and/or modified sequence
ctcggcagccgcctgtcgccgcgggagcagccgctatctctgtgtgtccgcgtgtgcgcccggtccccgcctgccgcaccatggagagctaccacaagcctgaccagcagaagctgcaggccttgaaggacacggccaaccgcctacgtatcagctccatccaggccaccactgcggcgggctctggccaccccacgtcatgctgcagcgccgcagagatcatggctgtcctctttttccacaccatgcgctacaagtcccaggacccccggaatccgcacaatgaccgctttgtgctctccaagggccatgcagctcccatcctctacgcggtctgggctgaagctggtttcctggccgaggcggagctgctgaacctgaggaagatcagctccgacttggacgggcacccggtcccgaaacaagctttcaccgacgtggccactggctccctgggccagggcctcggggccgcttgtgggatggcctacaccggcaaatacttcgacaaggccagcctcccgagtagctgggactacagctaccgagtctattgcttgctgggagacggggagctgtcagagggctctgtatgggaggccatggccttcgccagcatctataagctggacaaccttgtggccattctagacatcaatcgcctgggccagagtgacccggccccactgcagcaccagatggacatctaccagaagcggtgcgaggccttcggttggcatgccatcatcgtggatggacacagcgtggaggagctgtgcaaggcctttggccaggccaagcaccagccaacagccatcattgccaagaccttcaagggccgagggatcacgggggtagaagataaggagtcttggcatgggaagcccctccccaaaaacatggctgagcagatcatccaggagatctacagccagatccagagcaaaaagaagatcctggcaacccctccacaggaggacgcaccctcagtggacattgccaacatccgcatgcccagcctgcccagctacaaagttggggacaagatagccacccgcaaggcctacgggcaggcactggccaagctgggccatgccagtgaccgcatcatcgccctggatggggacaccaaaaattccaccttctcggagatcttcaaaaaggagcacccggaccgcttcatcgagtgctacattgctgagcagaacatggtgagcatcgcggtgggctgtgccacccgcaacaggacggtgcccttctgcagcacttttgcagccttcttcacgcgggcctttgaccagattcgcatggccgccatctccgagagcaacatcaacctctgcggctcccactgcggcgtttccatcggggaagacgggccctcccagatggccctagaagatctggctatgtttcggtcagtccccacatcaactgtcttttacccaagtgatggcgttgctacagagaaggcagtggaactagccgccaatacaaagggtatctgcttcatccggaccagccgcccagaaaatgccatcatctataacaacaatgaggacttccaggtcggacaagccaaggtggtcctgaagagcaaggatgaccaggtgaccgttatcggggctggggtgaccctgcacgaggccttggccgctgccgaactgctgaagaaagaaaagatcaacatccgcgtgctggaccccttcaccatcaagcccctggacagaaaactcattctcgacagcgctcgtgccaccaagggcaggatcctcaccgtggaggaccattattatgaaggtggcattggtgaggctgtgtccagtgcagtagtgggcgagcctggcatcactgtcacccacctggcagttaaccgggtaccaagaagtgggaagccggctgagctgctgaagatgtttggtatcgacagggatgccattgcacaagctgtgaggggcctcatcaccaaggcctagggcgggtatgaagtgtggggcgggggtctatacattcctgagattctgggaaaggtgctcaaagatgtactgagaggaggggtaaatatatgttttgag

SEQ ID NO: 92451 - protein, 739 aa, Artificial Sequence
  derived and/or modified sequence
MPLCTPNSMVVEHPEFLKAGKEPGLQIWRVEKFDLVPVPTNLYGDFFTGDAYVILKTVQLRNGNLQYDLHYWLGNECSQDESGAAAIFTVQLDDYLNGRAVQHREVQGFESATFLGYFKSGLKYKKGGVASGFKHVVPNEVVVQRLFQVKGRRVVRATEVPVSWESFNNGDCFILDLGNNIHQWCGSNSNRYERLKATQVSKGIRDNERSGRARVHVSEEGTEPEAMLQVLGPKPALPAGTEDTAKEDAANRKLAKLYKVSNGAGTMSVSLVADENPFAQGALKSEDCFILDHGKDGKIFVWKGKQANTEERKAALKTASDFITKMDYPKQTQVSVLPEGGETPLFKQFFKNWRDPDQTDGLGLSYLSSHIANVERVPFDAATLHTSTAMAAQHGMDDDGTGQKQIWRIEGSNKVPVDPATYGQFYGGDSYIILYNYRHGGRQGQIIYNWQGAQSTQDEVAASAILTAQLDEELGGTPVQSRVVQGKEPAHLMSLFGGKPMIIYKGGTSREGGQTAPASTRLFQVRANSAGATRAVEVLPKAGALNSNDAFVLKTPSAAYLWVGTGASEAEKTGAQELLRVLRAQPVQVAEGSEPDGFWEALGGKAAYRTSPRLKDKKMDAHPPRLFACSNKIGRFVIEEVPGELMQEDLATDDVMLLDTWDQVFVWVGKDSQEEEKTEALTSAKRYIETDPANRDRRTPITVVKQGFEPPSFVGWFLGWDDDYWSVDPLDRAMAELAA

SEQ ID NO: 92452 - DNA, 2220 bp, Artificial Sequence
  derived and/or modified sequence
atgccactgtgcactcccaactccatggttgtagaacaccccgagttccttaaagcaggaaaagaacctggcctgcagatctggcgggtcgaaaaattcgatttggtccccgttcccacgaatctgtatggagacttcttcaccggcgacgcttatgtgatcttaaaaacggtccagcttcggaacgggaatcttcagtacgatctccactattggctgggaaatgagtgttctcaggatgaatccggcgccgctgctattttcactgtccagctggacgactacctcaacggtagggcggtgcagcaccgagaagtccaggggttcgaatcagctacatttctggggtactttaaatcaggactgaagtataagaaaggtggcgtcgcctctggttttaaacatgttgtcccaaatgaagttgtcgtccaacggctcttccaagttaagggccgacgcgtcgtgcgtgctactgaagtgccagttagttgggaatctttcaacaacggtgattgttttatccttgatctgggcaataatatccaccagtggtgtggctctaatagcaaccgttacgagcggcttaaggctacccaggttagtaagggaattcgggataacgagcgatctggaagagctcgcgttcacgtgagcgaggagggaacagagccggaagctatgttgcaggttctgggccccaaacctgcactgccggcaggcacagaagacaccgctaaggaagatgcggctaaccgaaagcttgctaaactttataaagtgtccaacggagcgggaacgatgagcgtctcattggtggcagatgaaaatcctttcgcgcagggcgctttgaaaagcgaggactgctttatcctggaccacgggaaggacggaaaaatcttcgtgtggaaaggaaagcaagctaacacagaggaacggaaagctgcgcttaagacagctagcgacttcataaccaaaatggattatcccaaacagacccaggtctccgtgctcccagagggtggggaaactcccttgttcaagcagttcttcaaaaactggcgtgatcctgatcagaccgacgggctgggccttagttatttgtcctctcatattgccaatgtagagagggtcccctttgatgctgccacccttcacacttctaccgctatggcagctcagcacgggatggatgacgacggcacaggccagaagcagatctggaggattgagggcagcaacaaagtcccagtagatcctgccacatacgggcagttctatgggggagactcctacatcatcctgtataattacaggcacggaggccggcagggacagatcatttacaattggcagggcgcgcagagtacccaagatgaagtggctgcttctgcaattctgaccgcacagctcgacgaggagctggggggcacgccagtccagtcccgcgtcgtccagggaaaggagcctgcccaccttatgtccctgttcggcgggaagccgatgatcatctataagggaggtacttcgagagaagggggccagactgcccccgcctccaccagactgttccaggtcagggccaactccgccggcgccactagagccgtcgaggtgctgcctaaggcaggtgctctgaattctaacgacgcctttgtgctgaaaaccccttctgctgcatacctgtgggtcggcaccggggcctcagaggcagaaaaaaccggcgcccaggaattactcagggtgctgagagcccagcctgtgcaggttgctgaagggagcgaaccagacggcttttgggaggcactgggtgggaaggcagcgtataggacatctcctcgactcaaggataagaaaatggatgctcaccctccaagactctttgcctgctcaaataagatcggacgctttgtcatcgaagaagtccctggtgagctcatgcaggaagatctggccaccgacgatgtcatgctcctggatacctgggatcaggtcttcgtgtgggtgggcaaggattctcaggaggaggaaaaaacagaggccctcacttctgcaaaaagatatatcgaaaccgacccagctaatcgagaccgcaggacgcccatcactgtagtgaaacagggattcgaacctcctagttttgtggggtggttcctggggtgggacgacgactattggtcagtggaccctttggaccgtgcaatggctgaattggccgcctag

SEQ ID NO: 92453 - DNA, 1042 bp, Artificial Sequence
  derived and/or modified sequence
ctcccccacccgcctgcccggccgccccgccccgagggcggctcccgcccgcgccctgcccaccccggccgcgcgcaccacaacgcccccgccccgccgcccggaaccagctgagcgcagctggacccagcagccgctgtctccagtgccgcagcagcaggtagtgctcatagctctctttgtccagtgcttcggccttggtcccagcgccttcccacggagcagcactcttcaccctgcacagccttgttagcccaacagcatggtggtggaacaccccgagttcctcaaggcagggaaggagcctggcctgcagatctggcgtgtggagaagttcgatctggtgcccgtgcccaccaacctttatggagacttcttcacgggcgacgcctacgtcatcctgaagacagtgcagctgaggaacggaaatctgcagtatgacctccactactggctgggcaatgagtgcagccaggatgagagcggggcggccgccatctttaccgtgcagctggatgactacctgaacggccgggccgtgcagcaccgtgaggtccagggcttcgagtcggccaccttcctaggctacttcaagtctggcctgaagtacaagaaaggaggtgtggcatcaggattcaagcacgtggtacccaacgaggtggtggtgcagagactcttccaggtcaaagggcggcgtgtggtccgtgccaccgaggtacctgtgtcctgggagagcttcaacaatggcgactgcttcatcctggacctgggcaacaacatccaccagtggtgtggttccaacagcaatcggtatgaaagactgaaggccacacaggtgtccaagggcatccgggacaacgagcggagtggccgggcccgagtgcacgtgtctgaggagggcactgagcccgaggcgatgctccaggtgctgggccccaagccggctctgcctgcaggtaccgaggacaccgccaaggaggatgcggccaaccgcaagctggccaagctctacaaggtctccaatggtgcagggaccatgtcc

SEQ ID NO: 92454 - DNA, 2428 bp, Artificial Sequence
  derived and/or modified sequence
gtgctcccagggcccacaactgcttgaatgactattggtgttcctgtttgtgtgccctctgggccgggaagtcagagaaagaaaggagacaatttgtgattgaacagccactgtggccatcattctccttacctgtctgatgagagctgatcttcatgccactgtgtacacccaacagcatggtggtggaacaccccgagttcctcaaggcagggaaggagcctggcctgcagatctggcgtgtggagaagttcgatctggtgcccgtgcccaccaacctttatggagacttcttcacgggcgacgcctacgtcatcctgaagacagtgcagctgaggaacggaaatctgcagtatgacctccactactggctgggcaatgagtgcagccaggatgagagcggggcggccgccatctttaccgtgcagctggatgactacctgaacggccgggccgtgcagcaccgtgaggtccagggcttcgagtcggccaccttcctaggctacttcaagtctggcctgaagtacaagaaaggaggtgtggcatcaggattcaagcacgtggtacccaacgaggtggtggtgcagagactcttccaggtcaaagggcggcgtgtggtccgtgccaccgaggtacctgtgtcctgggagagcttcaacaatggcgactgcttcatcctggacctgggcaacaacatccaccagtggtgtggttccaacagcaatcggtatgaaagactgaaggccacacaggtgtccaagggcatccgggacaacgagcggagtggccgggcccgagtgcacgtgtctgaggagggcactgagcccgaggcgatgctccaggtgctgggccccaagccggctctgcctgcaggtaccgaggacaccgccaaggaggatgcggccaaccgcaagctggccaagctctacaaggtctccaatggtgcagggaccatgtccgtctccctcgtggctgatgagaaccccttcgcccagggggccctgaagtcagaggactgcttcatcctggaccacggcaaagatgggaaaatctttgtctggaaaggcaagcaggcaaacacggaggagaggaaggctgccctcaaaacagcctctgacttcatcaccaagatggactaccccaagcagactcaggtctcggtccttcctgagggcggtgagaccccactgttcaagcagttcttcaagaactggcgggacccagaccagacagatggcctgggcttgtcctacctttccagccatatcgccaacgtggagcgggtgcccttcgacgccgccaccctgcacacctccactgccatggccgcccagcacggcatggatgacgatggcacaggccagaaacagatctggagaatcgaaggttccaacaaggtgcccgtggaccctgccacatatggacagttctatggaggcgacagctacatcattctgtacaactaccgccatggtggccgccaggggcagataatctataactggcagggtgcccagtctacccaggatgaggtcgctgcatctgccatcctgactgctcagctggatgaggagctgggaggtacccctgtccagagccgtgtggtccaaggcaaggagcccgcccacctcatgagcctgtttggtgggaagcccatgatcatctacaagggcggcacctcccgcgagggcgggcagacagcccctgccagcacccgcctcttccaggtccgcgccaacagcgctggagccacccgggctgttgaggtattgcctaaggctggtgcactgaactccaacgatgcctttgttctgaaaaccccctcagccgcctacctgtgggtgggtacaggagccagcgaggcagagaagacgggggcccaggagctgctcagggtgctgcgggcccaacctgtgcaggtggcagaaggcagcgagccagatggcttctgggaggccctgggcgggaaggctgcctaccgcacatccccacggctgaaggacaagaagatggatgcccatcctcctcgcctctttgcctgctccaacaagattggacgttttgtgatcgaagaggttcctggtgagctcatgcaggaagacctggcaacggatgacgtcatgcttctggacacctgggaccaggtctttgtctgggttggaaaggattctcaagaagaagaaaagacagaagccttgacttctgctaagcggtacatcgagacggacccagccaatcgggatcggcggacgcccatcaccgtggtgaagcaaggctttgagcctccctcctttgtgggctggttccttggctgggatgatgattactggtctgtggaccccttggacagggccatggctgagctggctgcctgaggaggggcagggcccacccatgtcaccggtcagtgccttttggaactgtcctt

SEQ ID NO: 92455 - DNA, 2220 bp, Artificial Sequence
  derived and/or modified sequence
atgcccctgtgcacccccaacagcatggtggtggagcaccctgagttcctgaaggccggcaaggagcccggcctgcagatctggagggtggagaagtttgacctggtgcctgtgcccaccaacctgtatggagacttcttcaccggagatgcctacgtgatcctgaagacagtgcagctgagaaatggaaacctgcagtatgacctgcactactggctgggcaatgaatgttcccaggatgagagcggggctgctgccatcttcaccgtgcagctggatgactacctgaatggccgggctgtgcagcaccgggaggtgcagggctttgaaagtgccaccttcctgggctacttcaagagcggcctgaagtacaagaagggcggcgtggccagcggcttcaagcacgtggtgcccaatgaggtggtggtgcagaggctcttccaggtgaagggccggcgggtggtgcgggccacagaggtgcctgtgtcctgggagagcttcaacaatggagactgcttcatcctggacctgggcaacaacatccaccagtggtgtggcagcaacagcaacagatatgaaaggctgaaggccacccaggtgtccaagggcatccgggacaatgaaagaagtggccgggcccgggtgcacgtgtctgaggagggcacagagcctgaggccatgctgcaggtgctgggccccaagccagccctgcctgctggaacagaggacacagccaaggaggatgctgccaacaggaagctggccaagctgtacaaggtgtccaatggagctggcaccatgtctgtgtccctggtggctgatgagaacccctttgcccagggcgccctgaagtctgaggactgcttcatcctggaccacggcaaggatggcaagatctttgtgtggaagggcaagcaggccaacacagaggagaggaaggccgccctgaagacagccagtgacttcatcaccaagatggactaccccaagcagacccaggtgtctgtgctgcctgagggcggggagacccccctcttcaagcagttcttcaagaactggagggaccctgaccagacagatggcctgggcctgagctacctgagcagccacatcgccaacgtggagcgggtgccctttgatgctgccaccctgcacaccagcacagccatggccgcccagcacggcatggatgatgatggcaccggccagaagcagatctggagaattgagggcagcaacaaggtgcctgtggaccctgccacctacggccagttctacggcggggacagctacatcatcctgtacaactacagacatggaggccggcagggccagatcatctacaactggcagggcgcccagagcacccaggatgaggtggccgccagcgccatcctgacagcccagctggatgaggagctgggcggcacccctgtgcagagccgggtggtgcagggcaaggagcccgcccacctgatgagcctgtttggaggcaagcccatgatcatctacaagggcggcaccagccgggagggcggccagacagccccagccagcaccaggctcttccaggtgcgggccaacagcgctggggccaccagggctgtggaggtgctgcccaaggccggggccctgaacagcaatgatgcctttgtgctgaagaccccatctgctgcctacctgtgggtgggcactggagccagcgaggccgagaagacaggagcccaggagctgctgcgggtgctgcgggcccagcctgtgcaggtggccgagggcagcgagccagatggcttctgggaggccctgggcggcaaggccgcctaccgcaccagcccccggctgaaggacaagaagatggatgcccaccccccccggctgtttgcctgcagcaacaagattggccgcttcgtcatcgaggaggtgcctggagagctgatgcaggaggacctggccacagatgatgtgatgctgctggacacctgggaccaggtgtttgtgtgggtgggcaaggacagccaggaggaggagaagacagaggccctgaccagcgccaagcgctacatcgagacagatcctgccaacagagacaggaggacccccatcaccgtggtgaagcagggctttgagccccccagctttgtgggctggttcctgggctgggatgatgactactggagcgtggaccccctggaccgggccatggccgagctggccgcctag

SEQ ID NO: 92456 - DNA, 2220 bp, Artificial Sequence
  derived and/or modified sequence
atgcccctgtgcacccccaacagcatggtggtggagcaccccgagttcctgaaggccggtaaggaacctggtctacagatctggcgtgtggagaagttcgacctcgtgcccgtgcctacaaacctctatggcgatttttttacaggtgatgcgtatgtgatcctgaaaactgtccagttgcgtaatgggaatctgcagtatgatcttcattattggttaggtaacgaatgctcacaggatgaatcaggggccgctgcaattttcactgtgcagttggatgactacctcaacgggcgcgcggtccagcatagggaagttcaggggttcgagtcggcaaccttcctgggatacttcaagtccggattgaagtataagaaaggcggagttgctagcggatttaagcacgtggtgccaaatgaggtggtagtccagaggctgtttcaagtcaagggcaggcgagtggtgagagccactgaagtgcctgtctcttgggagagctttaacaacggggactgtttcatcctcgaccttggcaacaatatacatcagtggtgcggcagtaacagcaacagatacgagaggctcaaggcaacccaggtcagtaaaggaatccgggacaatgaacgaagcgggcgcgcacgcgtacatgtgtcggaagagggcactgagcccgaggcaatgctgcaggtgttgggacccaagcccgccctgcctgccggtaccgaggatactgccaaggaggatgccgctaataggaaactagctaagttgtacaaggtgagcaacggcgccggcacaatgagcgtgagtctggtggctgacgagaatccatttgcccaaggcgccttgaaatccgaggactgctttatcttggaccacggtaaagacggaaaaatttttgtctggaaaggaaaacaagctaataccgaagagcggaaggccgctttaaagacagccagcgactttatcaccaagatggactatcctaagcagacacaggtatctgtcctaccagagggaggagagacacctttatttaagcagttttttaagaactggagagacccggatcagactgatggcttgggcttatcatatctgagctcacacatcgctaacgtggagcgggtacctttcgatgcggcaacactccacacgtccacagccatggccgcacagcacggcatggacgacgatgggaccggtcagaagcagatctggaggattgagggctctaacaaggtgcctgtggaccctgctacctatggccagttttacggaggagactcttacatcatcctctacaattaccgccacggcggccgccagggccagattatctacaattggcagggcgcacagagcacccaggatgaggtagcagcctcagctatccttacagcccagctggacgaggagctgggggggacccctgtgcaatctcgcgttgtgcagggaaaggagccagctcacctgatgtcactgtttgggggaaagcccatgataatctacaaaggtggaacctcgagggaaggtggccaaaccgccccagcgagcacacgcctattccaggtgagggcgaatagcgctggcgctacgagagccgtagaggtgttgccaaaggccggagcccttaatagcaatgatgccttcgtgctcaaaaccccaagcgcagcctatctgtgggtgggaaccggagcctcagaggcggagaaaactggggctcaggagctgctgagggtcctgcgtgcccaaccagtccaggtcgctgagggatccgaaccagacggcttctgggaggccttaggcggaaaggccgcatataggacatcccccaggctgaaggacaaaaaaatggacgctcacccacctagactgttcgcgtgttcgaacaaaatagggcgattcgttatcgaagaggtgccgggcgagctcatgcaggaagatctggccaccgatgatgtgatgctactggatacctgggaccaagttttcgtgtgggttgggaaagatagccaggaggaagagaagaccgaggctctgactagcgcaaagaggtacattgaaaccgaccctgctaaccgggacagaagaacacctattaccgtagttaagcagggctttgagcctccctcattcgtgggctggtttctgggctgggacgatgattattggagtgttgaccctctcgacagagctatggccgagttagcggcttag

SEQ ID NO: 92457 - DNA, 2220 bp, Artificial Sequence
  derived and/or modified sequence
atgcccctatgcaccccaaactcaatggtagtggagcacccagagtttctgaaggccggtaaggagcccggactgcagatctggcgcgtggaaaagttcgatctcgtaccagttcccacgaatctctatggcgatttctttaccggcgacgcctacgtcatcctcaaaacggtgcaactccgtaacggtaatctacagtatgatctgcactattggctgggtaacgagtgttcccaggacgaaagcggtgcagccgctatttttaccgtgcagctggatgactacctcaacggcagagctgtccagcaccgggaggtgcaaggatttgaaagtgcaaccttcctgggatacttcaagtccggactcaaatataagaaagggggtgtcgcttctggattcaagcatgtggttcccaatgaggtcgtggtgcaacggcttttccaggtcaaggggcgtcgggtggtgcgggctacagaagtgcccgtttcctgggagtcgttcaataatggtgactgtttcattcttgaccttggtaataatatccatcaatggtgtggaagtaacagcaaccgatacgagcgtctcaaagcaactcaggtttcaaaggggattagggacaatgagcggtcaggcagggcgagggtccacgtgtctgaagaaggaaccgagccagaagcaatgctccaggtgctgggccctaagcccgcactccctgcgggaaccgaagataccgctaaagaagacgctgccaacaggaagttagctaagttgtacaaagtgagcaacggcgctggcactatgtctgtttcactggttgcggacgagaaccctttcgcacaaggggctctgaagtcagaggactgtttcatactcgatcatggtaaagacgggaagattttcgtgtggaaaggtaaacaggcaaacaccgaggagcgcaaggcggcactcaaaaccgcttcagacttcatcacgaagatggattacccaaagcagacgcaggttagcgttcttccagaaggcggtgagaccccgctgtttaaacagttcttcaagaattggagggaccccgaccaaaccgatgggctggggctgtcctacctttcctcacacattgctaacgtcgagagggttccgtttgatgcagcaacattgcataccagcacagctatggcggcacagcacggcatggatgacgacgggactggccaaaaacaaatttggaggattgaaggctccaacaaggtgcctgtggacccagccacctacggtcagttctacggcggagattcttacataatactgtacaactatcggcacggcggaaggcagggacagatcatctacaattggcagggagcccaatcaactcaagacgaggtggccgcaagcgcgatactgaccgctcagcttgatgaggaactgggtggtacccctgtacagtctagagtagtgcaggggaaagagcctgcacacttgatgtcccttttcggaggtaaaccaatgatcatctataaaggcggtacctcccgagaaggcggacagacggcacctgcaagcacgcgcttattccaagtccgggcaaattcagcgggagccacgcgagctgtagaagtgctgccaaaggcaggggctttgaactcgaatgatgcatttgttctgaagaccccatctgccgcttacctttgggtgggaactggggcatccgaagccgagaagacaggcgctcaagagctgctgcgcgttctgagagcgcagccagtccaggttgctgaagggtccgaacccgacgggttctgggaagccttgggcggtaaagcagcctaccgcacttcaccaaggctcaaggataaaaagatggatgctcacccaccaaggttattcgcttgctctaacaagatcggcaggttcgtgatcgaagaagtccctggggaactgatgcaggaagaccttgctactgatgatgttatgctgctcgatacatgggaccaggtttttgtgtgggtgggcaaggattcgcaggaagaggagaagacagaagccttgacaagcgctaaacgatatattgaaaccgaccccgcaaacagagacaggagaactcccattactgtcgttaaacaaggatttgaacccccatcttttgtcggttggttcctggggtgggacgatgactactggtctgtggatccactggacagggcgatggcagagctggctgcttag

SEQ ID NO: 92458 - DNA, 2220 bp, Artificial Sequence
  derived and/or modified sequence
atgcccctgtgtactcccaactcaatggttgttgagcatccagagttcctgaaagctggaaaagaacccggcctgcagatttggcgggtggagaagttcgacctagtacccgtgccaacaaacttatatggcgatttctttacaggagatgcgtacgtgattctcaaaacagtgcagctgcgtaacggaaacctgcagtacgacttgcactactggctagggaacgagtgctctcaagatgaaagcggcgccgcagctatcttcactgtgcaattggatgactacctgaatggccgagccgtccagcaccgggaggttcaaggattcgagtccgctacattcctggggtacttcaagagtggtttaaaatataagaaaggcggagtcgcctcagggttcaaacatgtggtccctaacgaggtcgtcgtgcaaagactttttcaggttaaaggaagacgagtggtcagagccacagaggtgcccgtgagctgggaatccttcaacaatggcgattgcttcatcctcgatctgggaaacaatatccatcagtggtgcggatctaattctaatcggtatgagaggttaaaggctacacaggtgagcaaaggcatacgtgacaacgaaagatcagggcgggcccgcgtgcacgtgtcagaggaaggcactgaacctgaagccatgttgcaggtattaggccctaagccagctctgcctgctggaacagaagacactgccaaagaggatgctgccaaccggaaattggccaaattgtacaaggtgtctaacggggccggtacgatgtcggtgagcctagtggcagacgaaaacccattcgcccagggcgcccttaagtcagaggattgtttcatcctagaccacgggaaagacggcaagatattcgtttggaagggtaagcaggcaaacaccgaagaacggaaagctgctctcaaaactgcgagtgatttcataactaaaatggactatcctaaacagacacaagtgtctgtccttcccgaaggcggcgagaccccacttttcaagcagttcttcaaaaactggagggatccagatcagactgacggcttaggtctctcctatttgtccagccacatagccaacgtggaacgagtcccctttgacgcagcgacattgcacacctcaaccgcaatggcggctcaacacggtatggacgatgatggaaccggtcagaaacagatttggcggatcgagggctccaacaaggtccccgtggatcccgccacctatggccagttttacggtggcgattcatatatcattctgtacaactaccggcacggcgggagacagggacaaatcatctacaactggcagggcgcgcagtctacgcaggatgaggtagccgctagcgcgattctgaccgcgcagctagacgaagagctgggcggcactcccgtgcagagccgagtggtgcagggaaaggaacccgctcatctaatgtctctgttcggcggcaagcctatgattatctacaaaggtgggacttcacgcgagggtggccagacagctcccgcctctactaggttgtttcaggtacgagccaatagcgcaggtgccaccagggcagtcgaggtcctcccaaaggccggggcactcaacagcaacgacgcctttgtgttaaagacacctagtgccgcatacctgtgggtaggaactggggcgagcgaagctgagaaaaccggtgcacaggagctactgcgtgtcctccgggcccagccagtgcaggttgccgagggcagtgagcccgacggcttttgggaggctctaggcgggaaggcagcttacaggacttctccccgcctcaaggacaagaagatggatgcacacccacccaggttgttcgcttgttccaataagattggccgctttgtgatcgaagaagtcccaggagagctgatgcaggaagatcttgccaccgacgatgttatgcttctggatacatgggatcaggtgttcgtatgggttggtaaagacagccaggaggaagagaaaacggaagctctcaccagcgctaagagatacattgagaccgaccctgccaacagagaccgcagaactccaattactgttgtaaagcagggcttcgaaccaccgagttttgttggatggttcctcggatgggacgatgattactggagtgttgaccccctggacagggcaatggccgagctagctgcctag

SEQ ID NO: 92459 - DNA, 2220 bp, Artificial Sequence
  derived and/or modified sequence
atgcccctgtgtaccccaaattcaatggtggtggagcaccccgaatttcttaaggcagggaaggaaccgggcctccagatttggagagtggaaaaatttgacctcgttcccgtgcccacaaacttgtacggcgatttttttaccggtgatgcatacgtgatcttgaaaaccgtccaactacgaaacggaaatctgcaatatgatttgcattattggttaggcaacgagtgcagccaagatgagtccggggccgccgcaatattcacagtgcaactagacgactatctgaatggaagagctgtccagcaccgggaggttcaaggattcgagtccgctacattcctggggtacttcaagagtggtttaaaatataagaaaggcggagtcgcctcagggttcaaacatgtggtccctaacgaggtcgtcgtgcaaagactttttcaggttaaaggaagacgagtggtcagagccacagaggtgcccgtgagctgggaatccttcaacaatggcgattgcttcatcctcgatctgggaaacaatatccatcagtggtgcggatctaattctaatcggtatgagaggttaaaggctacacaggtgtccaagggaataagggacaacgagaggagcggaagggccagggtgcacgtgtcagaagaaggaacagagccagaggccatgctgcaggtccttggtccgaaacctgctctgcccgcgggaacagaagacacggcaaaggaggacgcagccaacagaaagttagccaaattatataaagtatccaacggagccggtaccatgtcagtctctctagtggcagacgagaatccattcgcccagggggcactcaaaagcgaagactgctttatactcgaccacggaaaggacggaaagatcttcgtgtggaagggcaaacaagcaaatacggaagagcggaaagcagcgctaaaaacagcgtctgattttattacgaagatggattacccgaagcagacacaggtgagcgttttacccgagggcggcgaaactcccttgtttaaacagtttttcaagaattggagagaccccgaccagacagacggccttggcttatcttatctcagttcccacattgcaaacgtggaacgcgtcccttttgatgcagccaccctgcatacaagtaccgcaatggcagcgcagcatgggatggacgatgacgggacaggacagaaacagatatggagaattgagggctcaaataaagtaccagtggacccagccacctacggacagttctatggcggtgattcctatatcattctatacaattacagacatggcggccgccaaggacagattatatacaattggcaaggagctcaatcgactcaggacgaagtggcggcatcagctatattaactgctcagcttgacgaggagctggggggaacacctgtgcagtcccgcgtggtgcagggtaaggagcctgctcatctgatgagtctatttggagggaagcctatgatcatttataagggcggtacaagccgagaaggcggccagactgccccagcctccacgagactatttcaggtgagggcaaattcagctggcgccacaagagctgtcgaagtcctgccaaaagccggagcgctcaattccaacgatgcattcgtcctgaagacccctagtgccgcctatttatgggtgggtaccggagctagcgaagctgagaagaccggagcacaggaactgcttagggtactgcgggcccagcccgtgcaagtcgccgaggggagcgagccagacggattttgggaagccttgggagggaaggcagcgtaccggacatctcccagattaaaagacaagaagatggatgcacatcccccaaggttgtttgcatgttctaacaagattggccgttttgttattgaggaagtacctggcgagctcatgcaggaggacctagctactgatgatgtcatgctcctcgatacatgggaccaggttttcgtctgggttggcaaagattcacaggaggaggagaagactgaggctttgacctctgccaaaagatacatagaaacagaccccgcaaatcgtgacagaaggacacctataacagtcgttaagcagggattcgagccaccaagcttcgtgggatggttcttaggttgggatgacgattattggtccgttgacccactggatcgtgcaatggcagaactggctgcatag

SEQ ID NO: 92460 - DNA, 2220 bp, Artificial Sequence
  derived and/or modified sequence
atgcccctgtgcacccccaacagcatggtggtggagcaccccgagttcctgaaggccggcaaggagcccggcctgcagatctggagagtggagaagttcgacctggtgcccgtgcccaccaacctgtacggcgacttcttcaccggcgacgcctacgtgatcctgaagaccgtgcagctgagaaacggcaacctgcagtacgacctgcactactggctgggcaacgagtgcagccaggacgagagcggcgccgccgccatcttcaccgtgcagctggacgactacctgaacggcagagccgtgcagcacagagaggtgcagggcttcgagagcgccaccttcctgggctacttcaagagcggcctgaagtacaagaagggcggcgtggccagcggcttcaagcacgtggtgcccaacgaggtggtggtgcagagactgttccaggtgaagggcagaagagtggtgagagccaccgaggtgcccgtgagctgggagagcttcaacaacggcgactgcttcatcctggacctgggcaacaacatccaccagtggtgcggcagcaacagcaacagatacgagagactgaaggccacccaggtgagcaagggcatcagagacaacgagagaagcggcagagccagagtgcacgtgagcgaggagggcaccgagcccgaggccatgctgcaggtgctgggccccaagcccgccctgcccgccggcaccgaggacaccgccaaggaggacgccgccaacagaaagctggccaagctgtacaaggtgagcaacggcgccggcaccatgagcgtgagcctggtggccgacgagaaccccttcgcccagggcgccctgaagagcgaggactgcttcatcctggaccacggcaaggacggcaagatcttcgtgtggaagggcaagcaggccaacaccgaggagagaaaggccgccctgaagaccgccagcgacttcatcaccaagatggactaccccaagcagacccaggtgagcgtgctgcccgagggcggcgagacccccctgttcaagcagttcttcaagaactggagagaccccgaccagaccgacggcctgggcctgagctacctgagcagccacatcgccaacgtggagagagtgcccttcgacgccgccaccctgcacaccagcaccgccatggccgcccagcacggcatggacgacgacggcaccggccagaagcagatctggagaatcgagggcagcaacaaggtgcccgtggaccccgccacctacggccagttctacggcggcgacagctacatcatcctgtacaactacagacacggcggcagacagggccagatcatctacaactggcagggcgcccagagcacccaggacgaggtggccgccagcgccatcctgaccgcccagctggacgaggagctgggcggcacccccgtgcagagcagagtggtgcagggcaaggagcccgcccacctgatgagcctgttcggcggcaagcccatgatcatctacaagggcggcaccagcagagagggcggccagaccgcccccgccagcaccagactgttccaggtgagagccaacagcgccggcgccaccagagccgtggaggtgctgcccaaggccggcgccctgaacagcaacgacgccttcgtgctgaagacccccagcgccgcctacctgtgggtgggcaccggcgccagcgaggccgagaagaccggcgcccaggagctgctgagagtgctgagagcccagcccgtgcaggtggccgagggcagcgagcccgacggcttctgggaggccctgggcggcaaggccgcctacagaaccagccccagactgaaggacaagaagatggacgcccacccccccagactgttcgcctgcagcaacaagatcggcagattcgtgatcgaggaggtgcccggcgagctgatgcaggaggacctggccaccgacgacgtgatgctgctggacacctgggaccaggtgttcgtgtgggtgggcaaggacagccaggaggaggagaagaccgaggccctgaccagcgccaagagatacatcgagaccgaccccgccaacagagacagaagaacccccatcaccgtggtgaagcagggcttcgagccccccagcttcgtgggctggttcctgggctgggacgacgactactggagcgtggaccccctggacagagccatggccgagctggccgcctag

SEQ ID NO: 92461 - protein, 687 aa, Artificial Sequence
  derived and/or modified sequence
MANEEDDPVVQEIDVYLAKSLAEKLYLFQYPVRPASMTYDDIPHLSAKIKPKQQKVELEMAIDTLNPNYCRSKGEQIALNVDGACADETSTYSSKLMDKQTFCSSQTTSNTSRYAAALYRQGELHLTPLHGILQLRPSFSYLDKADAKHREREAANEAGDSSQDEAEDDVKQITVRFSRPESEQARQRRVQSYEFLQKKHAEEPWVHLHYYGLRDSRSEHERQYLLCPGSSGVENTELVKSPSEYLMMLMPPSQEEEKDKPVAPSNVLSMAQLRTLPLADQIKILMKNVKVMPFANLMSLLGPSIDSVAVLRGIQKVAMLVQGNWVVKSDILYPKDSSSPHSGVPAEVLCRGRDFVMWKFTQSRWVVRKEVATVTKLCAEDVKDFLEHMAVVRINKGWEFILPYDGEFIKKHPDVVQRQHMLWTGIQAKLEKVYNLVKETMPKKPDAQSGPAGLVCGDQRIQVAKTKAQQNHALLERELQRRKEQLRVPAVPPGVRIKEEPVSEEGEEDEEQEAEEEPMDTSPSGLHSKLANGLPLGRAAGTDSFNGHPPQGCASTPVARELKAFVEATFQRQFVLTLSELKRLFNLHLASLPPGHTLFSGISDRMLQDTVLAAGCKQILVPFPPQTAASPDEQKVFALWESGDMSDQSRLTQECGEDLSKQEVDKVLKDCCVSYGGMWYLKGTVQS

SEQ ID NO: 92462 - DNA, 2064 bp, Artificial Sequence
  derived and/or modified sequence
atggctaacgaagaggacgatcccgttgtccaagaaattgatgtgtacctggcaaaatccctcgcggaaaagctttatttgtttcagtaccctgtgaggcctgcttcaatgacttatgatgatatacctcacctaagcgcaaagatcaaacctaagcagcaaaaggttgagctggagatggcgatcgacaccctaaaccctaattactgtcggagcaaaggagaacagatcgctctgaatgtcgacggggcatgcgccgatgagacaagtacttacagctctaagctgatggacaaacagactttttgcagttctcagaccacttccaataccagcaggtatgccgcagctctgtatagacagggcgaactccacctgacccctctgcacgggatcctccagcttcggccgagtttctcctatctggataaagctgatgcaaagcacagggaaagagaggccgccaacgaagctggcgactccagtcaggacgaggcggaagacgatgtgaaacaaatcaccgtacgcttctcacgccctgagtcagaacaggctcgtcaacgacgcgtgcagtcctatgagtttctacaaaaaaaacacgctgaagagccatgggtgcacctgcactactacgggctgcgtgacagcagatctgagcacgagagacagtacctgctatgcccaggcagttcaggtgtggaaaataccgaactagtgaagtctccttccgaatacctgatgatgctcatgcctccgtctcaagaagaagaaaaggataaacctgtcgccccatctaatgttctcagcatggcccaattgcgcaccttgccactcgctgatcagattaaaatcttaatgaaaaacgtgaaggttatgcccttcgcgaaccttatgagtctgctgggcccgagcatcgactctgttgcagttctcaggggaatccagaaagtggctatgctagttcagggcaactgggtggtgaaaagcgacatcctgtacccaaaggattcgagcagcccacatagcggcgtgccagctgaggtcctgtgccggggccgtgactttgtcatgtggaagttcacccagagcaggtgggtggtgcggaaggaggttgccactgtgacaaagctgtgcgcggaggacgtcaaagacttcttagagcacatggccgtcgttcgcatcaataaggggtgggagtttatcctaccttacgatggcgaatttataaaaaaacacccggatgtcgtgcagcgacagcatatgctgtggacgggcatacaggctaaactcgaaaaggtgtacaacttagttaaggaaactatgcccaagaagcctgatgcccagagcggccctgcgggtctcgtgtgcggggaccagcgcatccaggtcgctaagacaaaggcccagcagaaccacgccctgctcgaaagagaacttcagcggcggaaggagcagctgcgggtacctgccgtcccgcctggcgtgcggataaaagaagagccggtgtctgaagaaggagaagaagacgaggaacaggaagccgaggaggagcccatggacacctcgcccagcgggcttcacagcaaactggcaaacggccttccccttggcagggccgccgggacagattcctttaacggtcaccctccccaaggctgtgcttccacacccgtcgccagggagctgaaagcatttgtcgaggctacctttcaaagacaattcgtgttgacactctctgaactgaaacggctattcaatctgcatctggcgagtctcccaccagggcataccctcttcagcggcataagtgatcggatgctccaggatactgtgctcgctgccgggtgtaaacagatattggtgcctttcccccctcagacagcagcctccccagacgagcagaaagtgtttgcactttgggaaagtggggacatgtccgatcaatcaagattaactcaagagtgcggcgaggaccttagcaagcaggaggtggataaagttttgaaggactgctgtgtgagctacggcgggatgtggtatttaaaggggaccgtgcagtcttag

SEQ ID NO: 92463 - DNA, 2064 bp, Artificial Sequence
  derived and/or modified sequence
atggccaatgaagaagatgatcctgtggtgcaggagattgatgtgtacctggccaagagcctggccgagaagctgtacctgttccagtaccctgtgcggcctgcctccatgacctatgatgacatcccccacctgagcgccaagatcaagcccaagcagcagaaggtggagctggagatggccatcgacaccctgaaccccaactactgccgcagcaaaggagagcagatcgccctgaatgtggatggagcctgtgctgatgagaccagcacctacagcagcaagctgatggacaagcagaccttctgcagcagccagaccaccagcaacaccagccgctatgctgctgccctgtaccggcagggcgagctgcacctgacccccctgcacggcatcctgcagctgcggcccagcttctcctacctggacaaggcagatgccaagcaccgggagcgggaggccgccaatgaggccggggacagcagccaggatgaagcagaagatgatgtgaagcagatcaccgtgcgcttcagcaggcctgagagcgagcaggcccggcagaggagagtgcagagctatgagttcctgcagaagaagcatgctgaggagccctgggtgcacctgcactactacggcctgcgggacagccgctctgagcacgagcggcagtacctgctgtgccccggcagcagtggagtggagaacacagagctggtgaagagccccagcgagtacctgatgatgctgatgccacccagccaggaggaggagaaggacaagcctgtggcccccagcaatgtgctgtccatggcccagctgcggaccctgcccctggccgaccagatcaagatcctgatgaagaatgtgaaggtgatgccctttgccaacctgatgagcctgctgggccccagcattgattctgtggccgtgctgcggggcatccagaaggtggccatgctggtgcagggcaactgggtggtgaagagtgacatcctgtaccccaaggacagcagcagcccccacagcggcgtgcctgctgaggtgctgtgccggggccgggactttgtgatgtggaagttcacccagagccgctgggtggtgaggaaggaggtggccaccgtgaccaagctgtgtgccgaggatgtgaaggacttcctggagcacatggctgtggtgcgcatcaacaagggctgggagttcatcctgccctatgatggagagttcatcaagaagcacccagatgtggtgcagaggcagcacatgctgtggacaggcatccaggccaagctggagaaggtgtacaacctggtgaaggagaccatgcccaagaagccagatgcccagagcggccctgctggcctggtgtgtggggaccagaggatccaggtggccaagaccaaggcccagcagaaccacgccctgctggagcgggagctgcagaggaggaaggagcagctgcgggtgcctgctgtgcccccaggagtgcgcatcaaggaggagcctgtgtctgaggagggggaggaggatgaggagcaggaggccgaggaggagcccatggacaccagccccagcggcctgcacagcaagctggccaacggcctgcccctgggccgggccgccggcacagacagcttcaacggccaccccccccagggctgtgccagcacccctgtggcccgggagctgaaggcctttgtggaggccaccttccagaggcagtttgtgctgaccctgtctgagctgaagaggctcttcaacctgcacctggccagcctgcccccaggccacaccctcttcagcggcatcagtgacaggatgctgcaggacacagtgctggccgccggctgcaagcagatcctggtgcccttccccccccagacagctgccagcccagatgagcagaaggtgtttgccctgtgggagagcggggacatgtctgaccagagccggctgacccaggagtgtggggaggacctgagcaagcaggaggtggacaaggtgctgaaggactgctgcgtgtcctatggaggcatgtggtacctgaagggcaccgtgcagagctag

SEQ ID NO: 92464 - DNA, 2064 bp, Artificial Sequence
  derived and/or modified sequence
atggccaacgaggaggacgaccccgtggtgcaggagatcgacgtgtacctcgccaaatcacttgccgagaaattgtacctgttccagtatcctgtcagacctgctagcatgacttacgatgacatcccccatttgagtgccaaaataaagcccaaacaacaaaaagtcgagttagagatggccatcgacacactgaacccgaactattgcagatctaaaggcgagcagattgctctcaacgtggacggagcttgcgccgacgagactagcacttattcctctaagctgatggataaacaaactttctgctccagccagactacatctaacacctcaaggtacgcagccgcactgtaccgccagggggagctgcacttaacaccgcttcacgggatcctgcagctgcggcccagcttctcatatttggataaagccgatgctaagcatcgggagagggaagcagctaacgaggccggagattcttcacaggacgaggccgaggacgacgttaagcagatcaccgtccggttcagccgcccggaatcagagcaagcccggcagcgccgagttcaatcttacgagttcttacagaaaaagcatgctgaagaaccatgggtgcatctccattactacggcttaagagacagtcggtccgagcacgaacggcagtacttactctgcccaggaagctcaggcgtggaaaataccgagttggtcaaaagtccctccgaataccttatgatgctgatgcctccttcacaagaggaagaaaaggataaacccgtggccccatcaaacgttttaagcatggctcaactgcgtaccctgccattggccgaccagataaagattctgatgaaaaacgtgaaggtgatgccattcgcaaacctgatgtccttgctgggtccaagcattgattccgtggcagtccttaggggaattcaaaaggtggccatgctggtacagggcaactgggtagttaagtctgacatcctctacccgaaagactctagctcccctcattcaggtgtgcctgccgaagtgctgtgcagaggccgcgacttcgtaatgtggaagttcactcaatcgcggtgggtggtgaggaaggaagttgccactgtgactaagctctgcgcagaggacgtgaaagactttctggaacatatggctgtggtcaggatcaacaaaggctgggaatttatcctgccctacgacggggagttcatcaagaagcaccccgacgtggtgcagaggcaacatatgctctggaccgggattcaggctaagttggaaaaggtgtacaacctggttaaggaaaccatgccaaagaagcctgacgcccagtccggaccggcaggcctggtgtgcggcgaccagcggatccaggtagccaaaaccaaagctcagcagaaccatgcactactggagagagaattacagaggagaaaagaacagttgagggttcctgccgtgccaccaggcgtgaggataaaagaggagcccgtcagtgaggagggcgaggaggatgaggagcaggaagccgaagaagaaccaatggatacctcgcccagtggtctgcactccaagctggcgaatggactgccactagggcgagcggccggaacagattcgtttaatgggcaccccccccaagggtgcgctagtactcctgttgcacgagagttgaaggctttcgtggaggcaacattccagcggcagtttgtcctcacactgtctgagctgaagaggctgtttaacctgcacctggcatctctgccccccgggcacacacttttttctggcatctccgacagaatgctgcaggacaccgttctcgcagcaggatgtaaacagattcttgtgccctttccaccccagaccgccgcgtcccccgacgaacaaaaagtgttcgctctgtgggagtcaggcgacatgagtgaccagagcagattaacgcaggagtgcggagaagacctgtcgaagcaggaagtagataaagtcttaaaagactgctgtgtttcctatggcgggatgtggtacctgaaggggactgtccagagctag

SEQ ID NO: 92465 - DNA, 2064 bp, Artificial Sequence
  derived and/or modified sequence
atggctaacgaggaagatgatcccgtggtccaggagattgacgtctacttagcaaaaagcctggccgagaagctgtacttgtttcagtatcccgttaggccagcttccatgacctatgacgacattccccacttgagcgctaaaatcaaacctaagcaacaaaaagtcgagctagagatggcgatagataccctcaatcctaactattgtcggagtaagggcgagcagattgctctgaatgtggatggagcatgcgctgacgaaacatctacatactcgagcaaactgatggataagcagactttctgctccagtcaaactacctccaatacgagtagatatgccgcagccctgtataggcagggcgagctgcacctgacccccttgcacggcattcttcagctacgcccatccttctcctatctggacaaggctgacgccaagcacagagaacgtgaagcagcgaacgaggccggtgactcgagccaggacgaagcagaggacgacgtcaagcagataacagtaaggttcagcagacctgagtccgaacaggccagacaacgaagggtccagtcatatgagttcttgcagaagaagcatgccgaggagccttgggtacacctgcactactacggactgagagattctaggagtgaacacgagagacaatacctactctgcccaggcagttccggggtagagaatacagagctggtgaagtcacctagcgaatacctgatgatgctaatgcctccatcccaagaggaagagaaagacaaacccgttgccccttctaacgttttgtctatggcccagcttcgtaccctgcccttagctgaccagatcaagatccttatgaaaaacgttaaagttatgcctttcgccaatctcatgagcctgttaggcccatccattgattcagtcgctgtgttaagaggcatccagaaagtcgccatgctcgtgcaggggaactgggtggtgaagtctgacatactgtaccccaaagacagcagctctcctcattccggagtccccgctgaagtactatgtcggggaagagattttgttatgtggaagtttactcagtcccggtgggttgttagaaaagaggtcgctacagttaccaagctgtgcgccgaggacgtgaaagattttctcgagcatatggccgttgttaggattaataagggctgggaatttattctcccgtacgatggagaatttattaaaaagcatcccgacgtagtccagcggcagcatatgctatggaccggtatacaagctaaactcgagaaagtgtacaacctggttaaagaaactatgcctaagaagcccgacgcccaaagtggacccgctggtctggtatgtggagatcagagaattcaggtagccaagacgaaagcccaacaaaatcacgcactgctggagagagaactgcagagacgcaaagaacagctgcgggtgcccgctgttcctccgggagtgaggatcaaagaggagcccgtttcggaggagggggaggaggatgaggaacaggaagcagaggaggaacctatggatacctcgccttccgggctgcattcaaaattggcaaacgggctgcctctggggagagcggcaggcaccgactccttcaatggtcatcctccccaaggatgcgcaagcactccagtcgccagggagttgaaggcattcgtcgaggccacctttcagcgacagttcgttctgacattgtctgagctcaagaggctgttcaaccttcacctggcaagcctgcccccagggcacaccctgttctccggaatcagcgatcgtatgctgcaagacacggttctcgccgcagggtgcaagcagattttggtaccgtttcctcctcagactgccgcttctcctgacgagcagaaggtttttgctttgtgggagtccggggacatgtccgatcagagtcgattgacgcaggagtgtggtgaagatttgagcaaacaggaagtggataaggtgcttaaggattgctgcgtttcatatggcggtatgtggtatcttaagggaacagtccagagttag

SEQ ID NO: 92466 - DNA, 2064 bp, Artificial Sequence
  derived and/or modified sequence
atggccaacgaggaggacgaccccgtggtgcaggagatcgacgtgtacctggccaagagcctggccgagaagctgtacctgttccagtaccccgtgagacccgccagcatgacctacgacgacatcccccacctgagcgccaagatcaagcccaagcagcagaaggtggagctggagatggccatcgacaccctgaaccccaactactgcagaagcaagggcgagcagatcgccctgaacgtggacggcgcctgcgccgacgagaccagcacctacagcagcaagctgatggacaagcagaccttctgcagcagccagaccaccagcaacaccagcagatacgccgccgccctgtacagacagggcgagctgcacctgacccccctgcacggcatcctgcagctgagacccagcttcagctacctggacaaggccgacgccaagcacagagagagagaggccgccaacgaggccggcgacagcagccaggacgaggccgaggacgacgtgaagcagatcaccgtgagattcagcagacccgagagcgagcaggccagacagagaagagtgcagagctacgagttcctgcagaagaagcacgccgaggagccctgggtgcacctgcactactacggcctgagagacagcagaagcgagcacgagagacagtacctgctgtgccccggcagcagcggcgtggagaacaccgagctggtgaagagccccagcgagtacctgatgatgctgatgccccccagccaggaggaggagaaggacaagcccgtggcccccagcaacgtgctgagcatggcccagctgagaaccctgcccctggccgaccagatcaagatcctgatgaagaacgtgaaggtgatgcccttcgccaacctgatgagcctgctgggccccagcatcgacagcgtggccgtgctgagaggcatccagaaggtggccatgctggtgcagggcaactgggtggtgaagagcgacatcctgtaccccaaggacagcagcagcccccacagcggcgtgcccgccgaggtgctgtgcagaggcagagacttcgtgatgtggaagttcacccagagcagatgggtggtgagaaaggaggtggccaccgtgaccaagctgtgcgccgaggacgtgaaggacttcctggagcacatggccgtggtgagaatcaacaagggctgggagttcatcctgccctacgacggcgagttcatcaagaagcaccccgacgtggtgcagagacagcacatgctgtggaccggcatccaggccaagctggagaaggtgtacaacctggtgaaggagaccatgcccaagaagcccgacgcccagagcggccccgccggcctggtgtgcggcgaccagagaatccaggtggccaagaccaaggcccagcagaaccacgccctgctggagagagagctgcagagaagaaaggagcagctgagagtgcccgccgtgccccccggcgtgagaatcaaggaggagcccgtgagcgaggagggcgaggaggacgaggagcaggaggccgaggaggagcccatggacaccagccccagcggcctgcacagcaagctggccaacggcctgcccctgggcagagccgccggcaccgacagcttcaacggccaccccccccagggctgcgccagcacccccgtggccagagagctgaaggccttcgtggaggccaccttccagagacagttcgtgctgaccctgagcgagctgaagagactgttcaacctgcacctggccagcctgccccccggccacaccctgttcagcggcatcagcgacagaatgctgcaggacaccgtgctggccgccggctgcaagcagatcctggtgcccttccccccccagaccgccgccagccccgacgagcagaaggtgttcgccctgtgggagagcggcgacatgagcgaccagagcagactgacccaggagtgcggcgaggacctgagcaagcaggaggtggacaaggtgctgaaggactgctgcgtgagctacggcggcatgtggtacctgaagggcaccgtgcagagctag

SEQ ID NO: 92467 - protein, 672 aa, Artificial Sequence
  derived and/or modified sequence
MANEEDDPVVQEIKPKQQKVELEMAIDTLNPNYCRSKGEQIALNVDGACADETSTYSSKLMDKQTFCSSQTTSNTSRYAAALYRQGELHLTPLHGILQLRPSFSYLDKADAKHREREAANEAGDSSQDEAEDDVKQITVRFSRPESEQARQRRVQSYEFLQKKHAEEPWVHLHYYGLRDSRSEHERQYLLCPGSSGVENTELVKSPSEYLMMLMPPSQEEEKDKPVAPSNVLSMAQLRTLPLADQIKILMKNVKVMPFANLMSLLGPSIDSVAVLRGIQKVAMLVQGNWVVKSDILYPKDSSSPHSGVPAEVLCRGRDFVMWKFTQSRWVVRKEVATVTKLCAEDVKDFLEHMAVVRINKGWEFILPYDGEFIKKHPDVVQRQHMLWTGIQAKLEKVYNLVKETMPKKPDAQSGPAGLVCGDQRIQVAKTKAQQNHALLERELQRRKEQLRVPAVPPGVRIKEEPVSEEGEEDEEQEAEEEPMDTSPSGLHSKLANGLPLGRAAGTDSFNGHPPQGCASTPVARELKAFVEATFQRQFVLTLSELKRLFNLHLASLPPGHTLFSGISDRMLQDTVLAAGCKQILVPFPPQTAASPDEQKVFALWESGDMSDQHRQVLLEIFSKNYRVRRNMIQSRLTQECGEDLSKQEVDKVLKDCCVSYGGMWYLKGTVQS

SEQ ID NO: 92468 - DNA, 2019 bp, Artificial Sequence
  derived and/or modified sequence
atggccaacgaggaagacgatcccgttgtgcaagaaataaagcccaaacagcagaaggtcgagctggagatggcaattgatactctgaatcctaactactgtcgcagcaagggggagcaaatcgcactgaacgtcgatggtgcttgtgccgacgagacctctacctattcaagtaagttaatggacaaacagaccttttgctctagccagactactagcaacacatcgagatatgcagccgccctttacaggcagggcgagctgcatctgacccccctccacggaatcttacagctacggccctcgttctcatacctggacaaggcggatgcaaaacatcgcgagagagaggcagccaacgaggctggcgacagttctcaagacgaggctgaagacgacgtcaagcagatcaccgtccggttctctcggccagagagtgagcaggcccgccaaaggcgggtgcagagctacgagttcttacagaaaaagcatgccgaagagccttgggttcacctgcactactacggtttgagagactcccgatccgaacacgagcgtcagtacttgctgtgtcccggaagctctggagtcgagaatacagaactggttaaaagccccagtgaatatctgatgatgctgatgcccccatcgcaagaagaagagaaggacaagccagtggcgccatccaacgttttgtcaatggcccaactgagaacccttccattagcagatcagataaagatcctaatgaagaacgtgaaagttatgcccttcgccaatctgatgtcactcttgggaccatccattgactccgtggctgtcttacgagggatccagaaggtggctatgctcgtgcaaggaaattgggtggtaaagtctgacattctctatcccaaggatagctcttcacctcactcgggcgtacccgccgaggttctgtgtagagggcgtgatttcgtaatgtggaaatttactcagagccgttgggtagtgaggaaagaagtggccacggtgaccaagctgtgcgcagaggacgttaaagatttcctggaacatatggccgtggtgaggattaataaggggtgggaatttatcctaccatatgacggggaatttattaagaagcatcccgatgtagtccaaagacagcatatgttgtggacaggcatccaagctaagctcgagaaagtgtacaacttggtgaaagagacaatgcccaaaaaacctgacgcacagagcggccccgcaggcctagtatgtggggaccagcggattcaggtcgccaaaaccaaggctcagcagaaccatgccctgcttgagagagagctgcagcgtcgcaaggagcagctccgggtgccagctgtgccacctggggtgcgcatcaaggaagagccagtcagtgaggagggggaggaggatgaggaacaggaagccgaagaggaaccaatggacacttctccttcagggctccactccaaactggccaacggtctccctctgggcagagcggctgggacagactcatttaacgggcatccccctcagggatgcgcttcgacccctgtggctagggagctgaaggccttcgttgaggcaacctttcaacggcagtttgtgctgacactatcggaactgaagagactgtttaacctgcacctagcttcgcttccaccaggccatacattgttttccggaatctccgatcgcatgttgcaggacaccgtgttagccgctggatgcaaacagattttggtgccgtttcctccgcaaacagccgcctcaccagacgagcaaaaggtgttcgctttgtgggagtccggagacatgagtgaccagcataggcaagtcctcctggagatttttagtaaaaactatagagtgaggcgaaacatgatccaatcccggcttacacaggaatgcggagaagatttgagtaaacaggaagtcgacaaggtactcaaagattgctgcgtgagctatggggggatgtggtacttgaaaggcaccgtgcagtcctag

SEQ ID NO: 92469 - DNA, 2019 bp, Artificial Sequence
  derived and/or modified sequence
atggccaatgaagaagatgatcctgtggtgcaggagatcaagcccaagcagcagaaggtggagctggagatggccatcgacaccctgaaccccaactactgccgcagcaaaggagagcagatcgccctgaatgtggatggagcctgtgctgatgagaccagcacctacagcagcaagctgatggacaagcagaccttctgcagcagccagaccaccagcaacaccagccgctatgctgctgccctgtaccggcagggcgagctgcacctgacccccctgcacggcatcctgcagctgcggcccagcttctcctacctggacaaggcagatgccaagcaccgggagcgggaggccgccaatgaggccggggacagcagccaggatgaagcagaagatgatgtgaagcagatcaccgtgcgcttcagcaggcctgagagcgagcaggcccggcagaggagagtgcagagctatgagttcctgcagaagaagcatgctgaggagccctgggtgcacctgcactactacggcctgcgggacagccgctctgagcacgagcggcagtacctgctgtgccccggcagcagtggagtggagaacacagagctggtgaagagccccagcgagtacctgatgatgctgatgccacccagccaggaggaggagaaggacaagcctgtggcccccagcaatgtgctgtccatggcccagctgcggaccctgcccctggccgaccagatcaagatcctgatgaagaatgtgaaggtgatgccctttgccaacctgatgagcctgctgggccccagcattgattctgtggccgtgctgcggggcatccagaaggtggccatgctggtgcagggcaactgggtggtgaagagtgacatcctgtaccccaaggacagcagcagcccccacagcggcgtgcctgctgaggtgctgtgccggggccgggactttgtgatgtggaagttcacccagagccgctgggtggtgaggaaggaggtggccaccgtgaccaagctgtgtgccgaggatgtgaaggacttcctggagcacatggctgtggtgcgcatcaacaagggctgggagttcatcctgccctatgatggagagttcatcaagaagcacccagatgtggtgcagaggcagcacatgctgtggacaggcatccaggccaagctggagaaggtgtacaacctggtgaaggagaccatgcccaagaagccagatgcccagagcggccctgctggcctggtgtgtggggaccagaggatccaggtggccaagaccaaggcccagcagaaccacgccctgctggagcgggagctgcagaggaggaaggagcagctgcgggtgcctgctgtgcccccaggagtgcgcatcaaggaggagcctgtgtctgaggagggggaggaggatgaggagcaggaggccgaggaggagcccatggacaccagccccagcggcctgcacagcaagctggccaacggcctgcccctgggccgggccgccggcacagacagcttcaacggccaccccccccagggctgtgccagcacccctgtggcccgggagctgaaggcctttgtggaggccaccttccagaggcagtttgtgctgaccctgtctgagctgaagaggctcttcaacctgcacctggccagcctgcccccaggccacaccctcttcagcggcatcagtgacaggatgctgcaggacacagtgctggccgccggctgcaagcagatcctggtgcccttccccccccagacagctgccagcccagatgagcagaaggtgtttgccctgtgggagagcggggacatgtctgaccagcaccggcaggtgctgctggagatcttcagcaagaactacagagtgagaagaaacatgatccagagccggctgacccaggagtgtggggaggacctgagcaagcaggaggtggacaaggtgctgaaggactgctgcgtgtcctatggaggcatgtggtacctgaagggcaccgtgcagagctag

SEQ ID NO: 92470 - DNA, 2019 bp, Artificial Sequence
  derived and/or modified sequence
atggccaacgaggaggacgaccccgtggtgcaggagatcaagcccaagcagcagaaggtggaactggagatggcaatagataccctgaacccaaactactgccggtcaaagggagaacagatcgcgttgaatgttgacggcgcttgcgcagacgagacctcaacgtattcatccaagctgatggataaacaaactttctgttcctctcagactaccagcaacacatctcggtacgcagcagccctgtaccggcaaggtgagctacacttgacaccattacatggaatcctccagttgcgcccctctttttcctacctcgacaaggccgatgctaagcatagggagcgagaggccgccaacgaggccggagatagctcccaggacgaagccgaagacgacgtgaagcagatcactgtccgtttcagccgccccgagagcgagcaggctaggcagcgacgcgtccagagctatgaattcctgcagaaaaaacacgccgaagagccttgggtgcacctgcactattacggtctcagggatagccgatccgagcacgaacggcagtacctgctgtgtccgggatcaagtggggtcgaaaacacagaacttgtgaaatcacccagcgaatacctaatgatgttgatgccaccatctcaggaagaggagaaagataagccggtcgctcctagtaacgtgttgagcatggcccagctaagaacactgcccttagccgatcagattaaaatcctcatgaagaatgtaaaggtcatgccatttgccaacctcatgtcactgctcgggccctccatcgattcagtggccgtgcttagaggaattcaaaaagtggcgatgctggttcaaggaaattgggttgtcaaatctgatattctttaccctaaggatagctcttcacctcatagcggtgttccagccgaggtgctgtgcaggggtcgggattttgtgatgtggaagtttacacaatcgcgctgggttgttaggaaagaagtcgccacagtaaccaaactctgcgccgaagacgtgaaggattttctagagcacatggctgtggtgagaatcaataaaggttgggaatttattttgccttatgatggcgaatttattaagaagcatcccgacgtggtgcagaggcagcacatgctatggacgggaattcaggctaaactcgaaaaggtgtacaaccttgtgaaggagacaatgcctaagaaaccagacgcgcagtccggcccagccggactagtttgtggtgatcaacgaattcaggtggccaagacgaaagctcaacagaaccacgcccttttggaaagagagctgcagagacgtaaggaacagctccgcgtcccagccgttcctcccggggtccggattaaagaagagcccgtgagcgaggaaggagaagaggatgaggaacaagaggctgaggaggagcctatggacacatcaccttctggactccattccaaacttgctaacggactgccattgggacgagccgcggggactgacagctttaatggtcacccaccacagggttgcgcatccacccctgtggcacgcgaattaaaggcctttgtcgaagctactttccaaagacaatttgtcctgaccttaagcgaattgaagcgcctgtttaacctccacctggcttctctgcctcccgggcacactctcttcagcggtatatcggacaggatgttacaggacactgtcctcgccgctggttgtaagcagattcttgtaccttttccaccacaaaccgccgccagtcctgacgagcaaaaggttttcgcactctgggagtccggcgatatgtctgatcagcaccgccaggtactgctggaaattttttctaagaattatcgcgtgcgacgcaatatgatccagagccggctgactcaggagtgtggtgaagacttgtctaaacaggaggtggacaaagtgctaaaggactgctgtgtctcttacggaggcatgtggtacctgaaaggaacagtgcagtcatag

SEQ ID NO: 92471 - DNA, 2019 bp, Artificial Sequence
  derived and/or modified sequence
atggccaatgaagaagacgacccagtggtgcaagagatcaagccgaagcagcagaaggtagaactagaaatggccatcgacaccctcaacccgaattactgtagaagtaagggtgaacagatagctctgaatgtggacggagcttgtgcagatgagacgagtacgtactcatcgaaactaatggacaagcagactttttgcagctcgcagacaactagtaacactagcaggtatgcagccgctctgtatagacagggcgaattgcacctcactccgttgcacggaattctgcaattgcgaccatcatttagctatttggacaaggctgacgccaagcaccgcgagagagaggccgctaatgaggccggagacagctcccaagatgaagcagaagatgatgttaagcagatcacagtccggtttagtcgccctgaatcagaacaggctcgccaacgccgagttcaaagctatgagtttttgcagaagaagcacgctgaggagccttgggttcatttgcattactatggcctgcgcgacagccggtccgagcacgaacgacagtatttactgtgcccaggctccagcggcgtcgaaaacacggaactggtgaagagcccatctgaatatcttatgatgctcatgcccccttcccaggaggaagagaaagacaagcctgtcgccccatccaacgtcttaagcatggcccagctgcgcactctgccactcgcagatcagatcaagatcctgatgaagaacgtcaaggtgatgccctttgccaatctgatgagtttactggggccttcaattgattccgtagccgtcctccggggaattcagaaagtagcaatgctcgtccagggaaattgggtggtaaaatccgacattctttatcccaaggactcaagctccccccactccggggtgcctgcagaggtgctgtgccgaggcagggactttgttatgtggaagttcacccagagcaggtgggtcgtcagaaaggaggtcgccaccgtgaccaaactatgtgccgaagatgtcaaagacttcctggaacacatggcagtggtgaggattaacaaggggtgggaattcatattgccttacgatggtgaatttatcaagaaacatcctgacgtggttcagcgccagcacatgctttggacaggcatacaggcaaaactcgagaaggtgtacaacctggttaaagaaaccatgcccaaaaaacctgatgcccagagtgggcctgcgggactggtgtgtggcgatcaacgaatacaggtcgccaagacgaaagctcagcaaaaccacgcgctgttggagagggagcttcaaagaagaaaagaacagctcagagtacccgcagtccccccaggtgtgagaataaaagaagagccagtgagtgaggaaggtgaggaggacgaagaacaagaagctgaggaagaacccatggacacgagccccagtggcttgcattctaagctggcaaatgggcttcccctgggaagggctgcagggactgattccttcaatggacacccgccacagggatgcgcctcaacccccgtggccagagagctgaaggcatttgtggaggccacatttcagaggcagttcgttctcaccctctctgagctcaagcgcctattcaatcttcacctggcctcattgcccccaggacacactctgttctcgggcatctccgatcggatgctccaggacacggtgctcgccgctggatgcaaacagattctcgttccctttccaccacagactgcagcttccccagacgaacagaaggtttttgctctgtgggaaagcggagacatgtcagatcagcacaggcaggtcttgctagagattttttcaaaaaactaccgggtgagacgtaacatgatacagtccagactgacacaggaatgtggtgaggatttatcgaaacaggaggttgacaaggtattgaaggattgttgcgtgagctacggcggaatgtggtatctgaaaggaaccgtacagagctag

SEQ ID NO: 92472 - DNA, 2019 bp, Artificial Sequence
  derived and/or modified sequence
atggccaacgaggaggacgaccccgtggtgcaggagatcaagcccaagcagcagaaggtggagctggagatggccatcgacaccctgaaccccaactactgcagaagcaagggcgagcagatcgccctgaacgtggacggcgcctgcgccgacgagaccagcacctacagcagcaagctgatggacaagcagaccttctgcagcagccagaccaccagcaacaccagcagatacgccgccgccctgtacagacagggcgagctgcacctgacccccctgcacggcatcctgcagctgagacccagcttcagctacctggacaaggccgacgccaagcacagagagagagaggccgccaacgaggccggcgacagcagccaggacgaggccgaggacgacgtgaagcagatcaccgtgagattcagcagacccgagagcgagcaggccagacagagaagagtgcagagctacgagttcctgcagaagaagcacgccgaggagccctgggtgcacctgcactactacggcctgagagacagcagaagcgagcacgagagacagtacctgctgtgccccggcagcagcggcgtggagaacaccgagctggtgaagagccccagcgagtacctgatgatgctgatgccccccagccaggaggaggagaaggacaagcccgtggcccccagcaacgtgctgagcatggcccagctgagaaccctgcccctggccgaccagatcaagatcctgatgaagaacgtgaaggtgatgcccttcgccaacctgatgagcctgctgggccccagcatcgacagcgtggccgtgctgagaggcatccagaaggtggccatgctggtgcagggcaactgggtggtgaagagcgacatcctgtaccccaaggacagcagcagcccccacagcggcgtgcccgccgaggtgctgtgcagaggcagagacttcgtgatgtggaagttcacccagagcagatgggtggtgagaaaggaggtggccaccgtgaccaagctgtgcgccgaggacgtgaaggacttcctggagcacatggccgtggtgagaatcaacaagggctgggagttcatcctgccctacgacggcgagttcatcaagaagcaccccgacgtggtgcagagacagcacatgctgtggaccggcatccaggccaagctggagaaggtgtacaacctggtgaaggagaccatgcccaagaagcccgacgcccagagcggccccgccggcctggtgtgcggcgaccagagaatccaggtggccaagaccaaggcccagcagaaccacgccctgctggagagagagctgcagagaagaaaggagcagctgagagtgcccgccgtgccccccggcgtgagaatcaaggaggagcccgtgagcgaggagggcgaggaggacgaggagcaggaggccgaggaggagcccatggacaccagccccagcggcctgcacagcaagctggccaacggcctgcccctgggcagagccgccggcaccgacagcttcaacggccaccccccccagggctgcgccagcacccccgtggccagagagctgaaggccttcgtggaggccaccttccagagacagttcgtgctgaccctgagcgagctgaagagactgttcaacctgcacctggccagcctgccccccggccacaccctgttcagcggcatcagcgacagaatgctgcaggacaccgtgctggccgccggctgcaagcagatcctggtgcccttccccccccagaccgccgccagccccgacgagcagaaggtgttcgccctgtgggagagcggcgacatgagcgaccagcacagacaggtgctgctggagatcttcagcaagaactacagagtgagaagaaacatgatccagagcagactgacccaggagtgcggcgaggacctgagcaagcaggaggtggacaaggtgctgaaggactgctgcgtgagctacggcggcatgtggtacctgaagggcaccgtgcagagctag

SEQ ID NO: 92473 - protein, 666 aa, Artificial Sequence
  derived and/or modified sequence
MANEEDDPVVQEIDVYLAKSLAEKLYLFQYPVRPASMTYDDIPHLSAKIKPKQQKVELEMAIDTLNPNYCRSKGEQIALNVDGACADETSTYSSKLMDKQTFCSSQTTSNTSRYAAALYRQGELHLTPLHGILQLRPSFSYLDKADAKHREREAANEAGDSSQDEAEDDVKQITVRFSRPESEQARQRRVQSYEFLQKKHAEEPWVHLHYYGLRDSRSEHERQYLLCPGSSGVENTELVKSPSEYLMMLMPPSQEEEKDKPVAPSNVLSMAQLRTLPLADQIKILMKNVKVMPFANLMSLLGPSIDSVAVLRGIQKVAMLVQGNWVVKSDILYPKDSSSPHSGVPAEVLCRGRDFVMWKFTQSRWVVRKEVATVTKLCAEDVKDFLEHMAVVRINKGWEFILPYDGEFIKKHPDVVQRQHMLWTGIQAKLEKVYNLVKETMPKKPDAQSGPAGLVCGDQRIQVAKTKAQQNHALLERELQRRKEQLRVPAVPPGVRIKEEPVSEEGEEDEEQEAEEEPMDTSPSGLHSKLANGLPLGRAAGTDSFNGHPPQGCASTPVARELKAFVEATFQRQFVLTLSELKRLFNLHLASLPPGHTLFSGISDRMLQDTVLAAGCKQILVPFPPQTAASPDEQKVFALWESGDMSDQDCCVSYGGMWYLKGTVQS

SEQ ID NO: 92474 - DNA, 2001 bp, Artificial Sequence
  derived and/or modified sequence
atggctaatgaagaggacgatccagtggtgcaggagatcgacgtgtatctggccaagagtctcgccgagaaactttatcttttccagtaccctgtgagaccagcatcaatgacatatgacgacatcccccatctgtcagctaagattaagccaaagcagcaaaaggtggagttggaaatggcaattgatacattgaatccaaactactgtaggtccaaaggggagcagattgctctcaacgttgacggcgcctgcgctgatgagaccagtacatattctagcaaattaatggacaagcagacgttctgtagcagtcagacaaccagcaatacttcacgatatgctgccgcactgtatcgccagggtgagttgcacctgactccgttgcatgggatcctccagctgcgcccttcttttagctacctggacaaggccgatgcaaaacacagagagcgggaggcagcaaatgaggcgggcgattcgtcacaggacgaagcggaagacgacgtgaaacagattactgtgcggttctctcggccagagtccgagcaggcaagacagagaagagtccagagctacgaatttctccagaaaaagcacgccgaggagccctgggtccacctgcactactacggtctacgcgatagtagatccgaacacgagcggcaatacctgctgtgtcccggcagttctggcgtggagaatacggagctggtcaaatccccgagtgaatacttaatgatgctcatgccaccctctcaagaggaggagaaggacaagccggtagccccctccaacgttctcagcatggcccagctgcggactctcccactcgctgaccagatcaaaattctcatgaagaatgtgaaagtgatgcccttcgccaatttgatgagcctcctgggtccaagtattgactcagtggctgtactccgtggaatccagaaggtggcaatgctcgtccagggaaactgggtcgtgaagtctgacatactttacccaaaggattcttcatcaccacactctggagtacccgccgaagtcctgtgccgcggccgggactttgttatgtggaagtttacacagagtcgctgggtggtgagaaaggaagttgccacagtaactaagctgtgcgcagaagatgtcaaggacttcttagagcatatggccgtagtccgaattaataaaggttgggaatttatcctgccttatgatggcgagttcataaaaaagcacccagacgtcgtccagcgacagcatatgctgtggacggggattcaggctaagcttgaaaaagtctacaacttggtgaaagaaacaatgcccaaaaaaccagacgctcagagtggcccagcaggccttgtgtgcggcgatcagcgtatccaggtcgcaaaaaccaaagcacagcagaatcacgctttgctggaacgtgaactgcagcggagaaaagagcagctgcgcgttcctgcagtgccaccaggcgtccggataaaggaagaacccgttagcgaggaaggggaggaggatgaggagcaggaagccgaggaggagccgatggacacatcgccatccgggctgcactccaagctggctaatgggctccctctaggacgcgccgcagggactgatagcttcaacggtcacccacctcagggttgtgctagtacacctgtcgccagagaacttaaggcatttgtggaggccacatttcagcgtcagtttgtattgactctgtctgagctaaaacggctcttcaacctacacttggcatcgttgccccctggccataccctgttctctgggatcagtgaccgcatgctgcaggataccgtgttagcagcaggctgtaagcagatcctggtcccatttccaccccagacagctgcttctccagatgaacagaaagtgttcgctctgtgggagtccggtgatatgtcagaccaagattgctgtgtgtcatacggaggaatgtggtatctgaagggtacagtgcaaagctag

SEQ ID NO: 92475 - DNA, 2001 bp, Artificial Sequence
  derived and/or modified sequence
atggccaatgaagaagatgatcctgtggtgcaggagattgatgtgtacctggccaagagcctggccgagaagctgtacctgttccagtaccctgtgcggcctgcctccatgacctatgatgacatcccccacctgagcgccaagatcaagcccaagcagcagaaggtggagctggagatggccatcgacaccctgaaccccaactactgccgcagcaaaggagagcagatcgccctgaatgtggatggagcctgtgctgatgagaccagcacctacagcagcaagctgatggacaagcagaccttctgcagcagccagaccaccagcaacaccagccgctatgctgctgccctgtaccggcagggcgagctgcacctgacccccctgcacggcatcctgcagctgcggcccagcttctcctacctggacaaggcagatgccaagcaccgggagcgggaggccgccaatgaggccggggacagcagccaggatgaagcagaagatgatgtgaagcagatcaccgtgcgcttcagcaggcctgagagcgagcaggcccggcagaggagagtgcagagctatgagttcctgcagaagaagcatgctgaggagccctgggtgcacctgcactactacggcctgcgggacagccgctctgagcacgagcggcagtacctgctgtgccccggcagcagtggagtggagaacacagagctggtgaagagccccagcgagtacctgatgatgctgatgccacccagccaggaggaggagaaggacaagcctgtggcccccagcaatgtgctgtccatggcccagctgcggaccctgcccctggccgaccagatcaagatcctgatgaagaatgtgaaggtgatgccctttgccaacctgatgagcctgctgggccccagcattgattctgtggccgtgctgcggggcatccagaaggtggccatgctggtgcagggcaactgggtggtgaagagtgacatcctgtaccccaaggacagcagcagcccccacagcggcgtgcctgctgaggtgctgtgccggggccgggactttgtgatgtggaagttcacccagagccgctgggtggtgaggaaggaggtggccaccgtgaccaagctgtgtgccgaggatgtgaaggacttcctggagcacatggctgtggtgcgcatcaacaagggctgggagttcatcctgccctatgatggagagttcatcaagaagcacccagatgtggtgcagaggcagcacatgctgtggacaggcatccaggccaagctggagaaggtgtacaacctggtgaaggagaccatgcccaagaagccagatgcccagagcggccctgctggcctggtgtgtggggaccagaggatccaggtggccaagaccaaggcccagcagaaccacgccctgctggagcgggagctgcagaggaggaaggagcagctgcgggtgcctgctgtgcccccaggagtgcgcatcaaggaggagcctgtgtctgaggagggggaggaggatgaggagcaggaggccgaggaggagcccatggacaccagccccagcggcctgcacagcaagctggccaacggcctgcccctgggccgggccgccggcacagacagcttcaacggccaccccccccagggctgtgccagcacccctgtggcccgggagctgaaggcctttgtggaggccaccttccagaggcagtttgtgctgaccctgtctgagctgaagaggctcttcaacctgcacctggccagcctgcccccaggccacaccctcttcagcggcatcagtgacaggatgctgcaggacacagtgctggccgccggctgcaagcagatcctggtgcccttccccccccagacagctgccagcccagatgagcagaaggtgtttgccctgtgggagagcggggacatgtctgaccaggactgctgcgtgtcctatggaggcatgtggtacctgaagggcaccgtgcagagctag

SEQ ID NO: 92476 - DNA, 2001 bp, Artificial Sequence
  derived and/or modified sequence
atggccaacgaggaggacgaccccgtggtgcaggagatcgacgtgtatcttgctaaatccttagctgagaagctgtacctgtttcaatatcccgtcaggccagctagtatgacctatgacgatatcccacaccttagcgcaaaaatcaagccgaagcagcaaaaagtggaactagaaatggccatcgatacactaaatcccaactattgccgctctaaaggggagcaaattgcactgaatgtggacggggcctgtgcagacgaaacttcaacttattccagtaagctcatggataagcaaactttttgttctagtcagaccaccagcaacacctcccgctatgcagctgccctgtatcggcaaggtgaacttcacctgacccctctccatggcattctccagctgagaccgagctttagctatttagacaaggcggatgcaaaacacagggagcgcgaagccgcaaacgaggcgggagatagctctcaggatgaagctgaagatgacgttaaacagataacggtgagattttcacgccccgaaagcgagcaggctcggcaacgtagggtacaaagttacgaatttttacagaagaaacacgctgaggaaccatgggtccatctgcattactatgggctgagagactccaggtccgaacatgagagacagtatctcctctgtccaggcagctcaggggtggagaacaccgaactcgttaagagcccatcagagtatcttatgatgttaatgcccccctctcaggaagaggaaaaggataagcccgtggcacccagcaacgtgttatccatggcacaactgcggaccctgcccctggcagatcagattaaaatcctgatgaagaatgtgaaggtgatgccgtttgcaaacttgatgtccctgctcggtccctccatagattccgtcgccgttctccgggggattcagaaggtggccatgctggtccagggcaattgggtggtcaaatccgatatcctgtatccgaaggatagcagttccccccatagcggcgtgccagctgaggtgctgtgtagaggccgggacttcgtgatgtggaagtttacccagagcagatgggtcgtgcgcaaggaagtggcaactgtgacaaaactctgcgctgaggacgttaaggatttcctggagcacatggccgtggtacgtattaataagggctgggaattcattctgccctatgacggcgaatttatcaagaaacaccccgacgtggtccagcgccagcacatgctctggaccggcattcaggccaaattggaaaaagtatacaacctggtcaaggaaactatgccaaagaagccggacgcacaatcgggacctgctgggcttgtgtgcggtgaccagaggatccaagtcgctaagacaaaggcccaacagaatcatgctcttcttgagcgcgagctccagagacggaaggaacagctgagggttcctgctgtccctccaggggtgcgcattaaggaagagccagtatctgaagaaggcgaagaagatgaggaacaggaggccgaggaagagcccatggacaccagcccatcaggcctccatagcaagttagctaacgggttgcccctcggaagagccgccggcactgactcttttaatggccatccgccacagggatgtgcgagtacccccgtggcccgcgaactgaaagctttcgtagaagctacgttccagagacagttcgttcttaccctaagcgagcttaagcgcttgttcaaccttcatctggctagtctgcctccaggacataccctgttttccggcattagtgatcgcatgctgcaggatacagtcctggccgcaggttgcaaacaaattctggtacctttcccccctcaaacagctgcatcacccgacgaacaaaaagtattcgcattatgggaatctggcgatatgtcggaccaagactgctgcgtaagttacggagggatgtggtatttgaaggggacagtgcagtcttag

SEQ ID NO: 92477 - DNA, 2001 bp, Artificial Sequence
  derived and/or modified sequence
atggccaatgaggaggacgaccctgtggttcaagagatcgacgtctatctggccaagtctctcgctgaaaaattatatctattccagtaccctgtgcgcccagctagtatgacgtatgatgacattccgcatctgagcgcgaagatcaagccgaagcaacagaaagtggaactcgagatggcaattgatactcttaatccgaattactgcagatccaaaggcgagcagatagcactgaatgtagacggcgcttgtgcagatgaaacatcaacctactcttctaaacttatggacaagcagactttctgttcatctcaaacgacctctaatacatcccgctacgccgctgcattatataggcagggggagcttcatctgacgccactgcatggcatcctgcagttgcggccatccttctcttacttagataaggcggacgctaagcacagagagagggaagctgctaatgaagccggagattcctcacaggatgaggccgaggatgacgtaaagcagatcactgtacgcttcagcagaccagagtccgagcaggcccgacagcgaagagtgcagtcctatgagtttcttcagaagaagcatgccgaggagccctgggtgcatctgcattactatgggctgcgtgactcacggagcgagcacgagcgccagtacctgttgtgtcctggctccagcggggtagagaacactgagttagtgaaatcaccctcggaatacctgatgatgctgatgcctccttcacaggaggaagaaaaggacaagcctgtggccccttctaacgtgctgtcgatggctcagctgagaactttgcctctggcagaccagataaagatcctgatgaaaaacgtcaaagtcatgcctttcgcgaatctgatgtctctgctaggcccatcgatcgattcggttgctgtactgcgcggaattcagaaagtcgccatgttggtccagggaaattgggtggtgaagtctgatatcctatacccaaaggattccagctctccacactccggtgtgccagcagaagttttgtgtaggggacgagattttgtgatgtggaagttcactcagtcacgatgggtagttcggaaggaggtggccacagtgactaagctgtgcgccgaagacgtaaaagacttcctcgaacatatggcagtcgtccggatcaacaagggatgggaattcattctgccttatgatggggaattcatcaaaaaacatcccgatgtagtgcaaaggcagcatatgctctggactgggattcaagcaaaactggaaaaggtgtataatctagtgaaggaaaccatgccaaagaagccggatgcacagagcggcccagccggattagtgtgtggcgaccaacgcatccaagtggctaagacaaaagcccagcaaaaccatgctcttcttgagagggagttgcagcggcgtaaagagcagttacgtgtgcctgctgtgcccccaggcgtgcgcattaaggaagagcccgtgtccgaagagggagaagaggacgaagagcaggaagccgaagaagaacccatggacacctctccttctgggctgcactcaaaactcgctaacggtttgccattggggagggccgctggtaccgactcatttaacggacacccccctcagggatgcgcatcaactccagtggcacgtgagcttaaagcctttgttgaagccactttccagaggcagtttgtcttaaccttgagcgagttaaagaggcttttcaacctccacctggctagcttgcctcctggccataccctgttctccggaataagcgaccgcatgcttcaggataccgtgcttgcggcagggtgcaagcaaatattggtcccgtttccaccccaaactgcagcctctcccgatgagcaaaaagtctttgcactctgggagtcaggggatatgtctgaccaggattgctgtgtctcatatggtggcatgtggtacctgaaaggcactgttcaatcctag

SEQ ID NO: 92478 - DNA, 2001 bp, Artificial Sequence
  derived and/or modified sequence
atggccaacgaggaggacgaccccgtggtgcaggagatcgacgtgtacctggccaagagcctggccgagaagctgtacctgttccagtaccccgtgagacccgccagcatgacctacgacgacatcccccacctgagcgccaagatcaagcccaagcagcagaaggtggagctggagatggccatcgacaccctgaaccccaactactgcagaagcaagggcgagcagatcgccctgaacgtggacggcgcctgcgccgacgagaccagcacctacagcagcaagctgatggacaagcagaccttctgcagcagccagaccaccagcaacaccagcagatacgccgccgccctgtacagacagggcgagctgcacctgacccccctgcacggcatcctgcagctgagacccagcttcagctacctggacaaggccgacgccaagcacagagagagagaggccgccaacgaggccggcgacagcagccaggacgaggccgaggacgacgtgaagcagatcaccgtgagattcagcagacccgagagcgagcaggccagacagagaagagtgcagagctacgagttcctgcagaagaagcacgccgaggagccctgggtgcacctgcactactacggcctgagagacagcagaagcgagcacgagagacagtacctgctgtgccccggcagcagcggcgtggagaacaccgagctggtgaagagccccagcgagtacctgatgatgctgatgccccccagccaggaggaggagaaggacaagcccgtggcccccagcaacgtgctgagcatggcccagctgagaaccctgcccctggccgaccagatcaagatcctgatgaagaacgtgaaggtgatgcccttcgccaacctgatgagcctgctgggccccagcatcgacagcgtggccgtgctgagaggcatccagaaggtggccatgctggtgcagggcaactgggtggtgaagagcgacatcctgtaccccaaggacagcagcagcccccacagcggcgtgcccgccgaggtgctgtgcagaggcagagacttcgtgatgtggaagttcacccagagcagatgggtggtgagaaaggaggtggccaccgtgaccaagctgtgcgccgaggacgtgaaggacttcctggagcacatggccgtggtgagaatcaacaagggctgggagttcatcctgccctacgacggcgagttcatcaagaagcaccccgacgtggtgcagagacagcacatgctgtggaccggcatccaggccaagctggagaaggtgtacaacctggtgaaggagaccatgcccaagaagcccgacgcccagagcggccccgccggcctggtgtgcggcgaccagagaatccaggtggccaagaccaaggcccagcagaaccacgccctgctggagagagagctgcagagaagaaaggagcagctgagagtgcccgccgtgccccccggcgtgagaatcaaggaggagcccgtgagcgaggagggcgaggaggacgaggagcaggaggccgaggaggagcccatggacaccagccccagcggcctgcacagcaagctggccaacggcctgcccctgggcagagccgccggcaccgacagcttcaacggccaccccccccagggctgcgccagcacccccgtggccagagagctgaaggccttcgtggaggccaccttccagagacagttcgtgctgaccctgagcgagctgaagagactgttcaacctgcacctggccagcctgccccccggccacaccctgttcagcggcatcagcgacagaatgctgcaggacaccgtgctggccgccggctgcaagcagatcctggtgcccttccccccccagaccgccgccagccccgacgagcagaaggtgttcgccctgtgggagagcggcgacatgagcgaccaggactgctgcgtgagctacggcggcatgtggtacctgaagggcaccgtgcagagctag

SEQ ID NO: 92479 - protein, 319 aa, Artificial Sequence
  derived and/or modified sequence
MDPQNQHGSGSSLVVIQQPSLDSRQRLDYEREIQPTAILSLDQIKAIRGSNEYTEGPSVVKRPAPRTAPRQEKHERTHEIIPINVNNNYEHRHTSHLGHAVLPSNARGPILSRSTSTGSAASSGSNSSASSEQGLLGRSPPTRPVPGHRSERAIRTQPKQLIVDDLKGSLKEDLTQHKFICEQCGKCKCGECTAPRTLPSCLACNRQCLCSAESMVEYGTCMCLVKGIFYHCSNDDEGDSYSDNPCSCSQSHCCSRYLCMGAMSLFLPCLLCYPPAKGCLKLCRRCYDWIHRPGCRCKNSNTVYCKLESCPSRGQGKPS

SEQ ID NO: 92480 - protein, 67 aa, Artificial Sequence
  derived and/or modified sequence
MDPQNQHGSGSSLVVIQQPSLDSRQRLDYEREIQPTAILSLDQIKAIRGSNEYTEGPSVVKRPAPRT

SEQ ID NO: 92481 - protein, 209 aa, Artificial Sequence
  derived and/or modified sequence
MDPQNQHGSGSSLVVIQQPSLDSRQRLDYEREIQPTAILSLDQIKAIRGSNEYTEGPSVVKRPAPRTAPRQEKHERTHEIIPINVNNNYEHRHTSHLGHAVLPSNARGPILSRSTSTGSAASSGSNSSASSEQGLLGRSPPTRPVPGHRSERAIRTQPKQLIVDDLKGSLKEDLTQHKFICEQCGKCKCGECTAPRTLPSCLACNRQCL

SEQ ID NO: 92482 - protein, 35 aa, Artificial Sequence
  derived and/or modified sequence
MDPQNQHGSGSSLVVIQQPSLDSRQRLDYEREIQP

SEQ ID NO: 92483 - DNA, 960 bp, Artificial Sequence
  derived and/or modified sequence
atggacccccagaaccagcacggcagcggcagcagcctggtggtgatccagcagcccagcctggacagcagacagagactggactacgagagagagatccagcccaccgccatcctgagcctggaccagatcaaggccatcagaggcagcaacgagtacaccgagggccccagcgtggtgaagagacccgcccccagaaccgcccccagacaggagaagcacgagagaacccacgagatcatccccatcaacgtgaacaacaactacgagcacagacacaccagccacctgggccacgccgtgctgcccagcaacgccagaggccccatcctgagcagaagcaccagcaccggcagcgccgccagcagcggcagcaacagcagcgccagcagcgagcagggcctgctgggcagaagcccccccaccagacccgtgcccggccacagaagcgagagagccatcagaacccagcccaagcagctgatcgtggacgacctgaagggcagcctgaaggaggacctgacccagcacaagttcatctgcgagcagtgcggcaagtgcaagtgcggcgagtgcaccgcccccagaaccctgcccagctgcctggcctgcaacagacagtgcctgtgcagcgccgagagcatggtggagtacggcacctgcatgtgcctggtgaagggcatcttctaccactgcagcaacgacgacgagggcgacagctacagcgacaacccctgcagctgcagccagagccactgctgcagcagatacctgtgcatgggcgccatgagcctgttcctgccctgcctgctgtgctacccccccgccaagggctgcctgaagctgtgcagaagatgctacgactggatccacagacccggctgcagatgcaagaacagcaacaccgtgtactgcaagctggagagctgccccagcagaggccagggcaagcccagctag

SEQ ID NO: 92484 - DNA, 204 bp, Artificial Sequence
  derived and/or modified sequence
atggacccccagaaccagcacggcagcggcagcagcctggtggtgatccagcagcccagcctggacagcagacagagactggactacgagagagagatccagcccaccgccatcctgagcctggaccagatcaaggccatcagaggcagcaacgagtacaccgagggccccagcgtggtgaagagacccgcccccagaacctag

SEQ ID NO: 92485 - DNA, 630 bp, Artificial Sequence
  derived and/or modified sequence
atggacccccagaaccagcacggcagcggcagcagcctggtggtgatccagcagcccagcctggacagcagacagagactggactacgagagagagatccagcccaccgccatcctgagcctggaccagatcaaggccatcagaggcagcaacgagtacaccgagggccccagcgtggtgaagagacccgcccccagaaccgcccccagacaggagaagcacgagagaacccacgagatcatccccatcaacgtgaacaacaactacgagcacagacacaccagccacctgggccacgccgtgctgcccagcaacgccagaggccccatcctgagcagaagcaccagcaccggcagcgccgccagcagcggcagcaacagcagcgccagcagcgagcagggcctgctgggcagaagcccccccaccagacccgtgcccggccacagaagcgagagagccatcagaacccagcccaagcagctgatcgtggacgacctgaagggcagcctgaaggaggacctgacccagcacaagttcatctgcgagcagtgcggcaagtgcaagtgcggcgagtgcaccgcccccagaaccctgcccagctgcctggcctgcaacagacagtgcctgtag

SEQ ID NO: 92486 - DNA, 108 bp, Artificial Sequence
  derived and/or modified sequence
atggacccccagaaccagcacggcagcggcagcagcctggtggtgatccagcagcccagcctggacagcagacagagactggactacgagagagagatccagccctag

SEQ ID NO: 92487 - DNA, 960 bp, Artificial Sequence
  derived and/or modified sequence
atggacccccaaaaccaacatggaagtgggtcatctctcgtagtgatccagcagccctcactggatagccgacagagactggactacgaacgggaaatacaaccgacggctattctgtcactagatcaaattaaggcgattcggggctcaaacgaatacaccgagggcccttctgttgttaagaggccagccccacggaccgctccacgccaagagaagcatgaacggacccacgagatcatacccataaacgtgaataacaattatgagcaccgacacacatctcacctgggccatgccgtgctccctagtaacgctagaggtccaatcctctcccgctccacctccactggaagtgctgcgagttcaggaagcaactctagcgcatcttccgagcagggactgctggggagaagcccccctacacgacccgtgccgggccatcgctctgagcgggctattcgaacacagcctaaacagctgattgtcgatgaccttaagggtagcctgaaagaggacctgactcagcataaatttatctgtgagcagtgtggcaagtgtaagtgcggagagtgcacagccccgcgcacacttcctagctgcctggcatgtaaccgtcagtgtttgtgctccgcggaaagcatggtggagtatggtacatgtatgtgcctcgttaagggaatcttttatcactgcagcaatgacgatgagggagattcctacagtgataatccctgctcctgttctcagtcacactgttgctcccgctatttgtgtatgggcgctatgtccctctttttgccttgtcttttgtgctacccaccagctaaaggctgtctgaaactctgccgacggtgctatgactggattcacagacccggatgcagatgcaaaaatagcaataccgtgtactgtaagctcgagtcttgtccatcacgagggcagggcaagccctcatag

SEQ ID NO: 92488 - DNA, 960 bp, Artificial Sequence
  derived and/or modified sequence
atggacccccagaatcagcacggcagtggttccagcctggtcgtgatccagcagccttcactcgactcacgccaaagactcgactacgagcgggagatccagccaacggctatcctttcactagatcagattaaagctattcgaggtagtaacgagtacactgaaggtccaagcgtggtcaaaagacccgctcctagaacggcccctagacaggaaaagcacgagaggacccacgagataatacctatcaatgtgaacaacaattatgaacatcggcatacctcccacttggggcacgccgttttacctagtaacgccaggggcccaatcctatctcgttccacaagcactggcagcgcggccagtagcggctctaattcttccgcgtcctcagaacaaggactcctcgggcgcagccctcctacgcgtccggtaccaggacatcggagcgaacgcgccataaggacccaaccaaaacagctgatagtggatgacctcaagggaagcctgaaagaagacctgacccagcataaattcatctgcgagcagtgtggaaaatgcaagtgtggagaatgtaccgctcctcgtacactgccttcctgtttagcctgcaaccggcaatgcctgtgtagcgcagagagcatggtggagtatgggacatgcatgtgcttggtgaagggaattttctatcactgcagtaacgacgatgagggtgattcctactccgacaatccctgctcctgtagtcagtcacactgttgttcgaggtacttatgcatgggcgcaatgagtctgttcctgccatgcctgctttgctatccaccagccaagggatgtttaaagctgtgtagacggtgttacgattggatacatagacccggctgtcgctgcaagaatagcaatacagtgtactgcaagcttgagagctgtcccagcagggggcagggcaagccaagttag

SEQ ID NO: 92489 - DNA, 204 bp, Artificial Sequence
  derived and/or modified sequence
atggacccacaaaatcaacatggctccggctctagtttggtcgtgatccagcagccttcccttgacagcagacagcggttggattacgagagagaaattcaacccaccgcaatactcagtctggaccagatcaaggccattcgcggcagcaatgaatatactgagggaccctccgtcgtgaaacgacctgcacctcgcacatag

SEQ ID NO: 92490 - DNA, 630 bp, Artificial Sequence
  derived and/or modified sequence
atggatccacaaaatcagcacggctccggctcttctttggtcgttatccaacagcccagtttggattcaagacagagactggattatgagcgagaaatccagccaaccgcgatcctgtctctcgatcagatcaaggccatccggggcagcaatgagtacacagaaggaccaagcgtcgtgaaaaggcctgctccaagaactgccccacggcaagagaaacacgagagaacccatgaaataatccccattaatgtcaacaataattatgagcaccgccacacctctcacttaggtcatgccgtgctgccgtccaacgcccgagggcctatactgagccgatctacctctacggggtctgccgcctcaagtgggagtaacagctccgcctcgtcggaacaaggtctgctgggcaggagtccacccaccagaccagtgcccggccacaggtctgagcgcgcaatccgtacccagcctaagcagcttatagtagacgacctgaagggaagcttgaaggaggatcttacacagcacaaattcatctgtgagcagtgtggcaagtgtaaatgcggcgagtgtactgcgcctcgcacattacccagttgccttgcttgcaatcgtcagtgcctgtag

SEQ ID NO: 92491 - DNA, 108 bp, Artificial Sequence
  derived and/or modified sequence
atggacccccagaaccagcatggctcaggatcctccttagtggtgatccaacagccttcactggactctcggcagcggctggactacgagagagaaatacagccatag

SEQ ID NO: 92492 - DNA, 960 bp, Artificial Sequence
  derived and/or modified sequence
atggacccccagaaccagcacggcagcggcagcagcctggtggtgatccagcagcccagcctggacagccggcagaggctggactatgagcgggagatccagcccacagccatcctgagcctggaccagatcaaggccatccggggcagcaatgagtacacagagggccccagcgtggtgaagaggcctgcccccaggacagccccccggcaggagaagcatgagaggacccatgagatcatccccatcaacgtgaacaacaactatgagcaccgccacaccagccacctgggccatgctgtgctgcccagcaatgcccggggccccatcctgagccgcagcaccagcactggatctgctgccagcagcggcagcaacagcagcgccagcagcgagcagggcctgctgggccgcagcccccccaccaggcctgtgcccggccacaggtctgagcgggccatccgcacccagcccaagcagctgattgtggatgacctgaagggcagcctgaaggaggacctgacccagcacaagttcatctgtgagcagtgtgggaagtgcaagtgtggagaatgtacagcccccaggaccctgcccagctgcctggcctgcaaccggcagtgcctgtgcagcgctgagagcatggtggagtatggcacctgcatgtgcctggtgaagggcatcttctaccactgcagcaatgatgatgaaggagacagctacagcgacaacccctgcagctgcagccagagccactgctgcagccgctacctgtgcatgggcgccatgagcctcttcctgccctgcctgctgtgctaccccccagccaagggctgcctgaagctgtgccgccgctgctatgactggatccacaggcctggctgccgctgcaagaacagcaacacagtgtactgcaagctggagagctgccccagccggggccagggcaagcccagctag

SEQ ID NO: 92493 - DNA, 204 bp, Artificial Sequence
  derived and/or modified sequence
atggacccccagaaccagcacggcagcggcagcagcctggtggtgatccagcagcccagcctggacagccggcagaggctggactatgagcgggagatccagcccacagccatcctgagcctggaccagatcaaggccatccggggcagcaatgagtacacagagggccccagcgtggtgaagaggcctgcccccaggacatag

SEQ ID NO: 92494 - DNA, 630 bp, Artificial Sequence
  derived and/or modified sequence
atggacccccagaaccagcacggcagcggcagcagcctggtggtgatccagcagcccagcctggacagccggcagaggctggactatgagcgggagatccagcccacagccatcctgagcctggaccagatcaaggccatccggggcagcaatgagtacacagagggccccagcgtggtgaagaggcctgcccccaggacagccccccggcaggagaagcatgagaggacccatgagatcatccccatcaacgtgaacaacaactatgagcaccgccacaccagccacctgggccatgctgtgctgcccagcaatgcccggggccccatcctgagccgcagcaccagcactggatctgctgccagcagcggcagcaacagcagcgccagcagcgagcagggcctgctgggccgcagcccccccaccaggcctgtgcccggccacaggtctgagcgggccatccgcacccagcccaagcagctgattgtggatgacctgaagggcagcctgaaggaggacctgacccagcacaagttcatctgtgagcagtgtgggaagtgcaagtgtggagaatgtacagcccccaggaccctgcccagctgcctggcctgcaaccggcagtgcctgtag

SEQ ID NO: 92495 - DNA, 108 bp, Artificial Sequence
  derived and/or modified sequence
atggacccccagaaccagcacggcagcggcagcagcctggtggtgatccagcagcccagcctggacagccggcagaggctggactatgagcgggagatccagccctag

SEQ ID NO: 92496 - DNA, 960 bp, Artificial Sequence
  derived and/or modified sequence
atggacccccagaaccagcacggcagcggcagcagcctggtggtgatccaacaaccgtcccttgattctcgacagcgattggactacgagcgcgaaatacagcctactgccatcctgagcttggaccagatcaaggccattcgcggcagcaacgaatacaccgagggcccttctgtggtgaaaaggccagcgccgcggaccgcccccagacaggaaaaacacgaaagaacgcatgagatcatacctatcaacgttaataataattatgagcatagacacacctcccacctgggccacgccgtcctcccttctaacgccaggggaccaattttaagccgcagcacatctacaggatcagccgcctcctcagggagcaattcaagtgcctccagtgaacaaggcctcttggggcgatccccacctacccgcccagttcccggccaccgctcggaacgcgccattagaactcaacctaagcaactaattgtggatgacttgaaggggtcactgaaagaagatctaacacagcataagttcatttgtgagcaatgtggaaaatgcaagtgcggggagtgcacggcgccaaggactctgcctagttgtctggcttgcaatcggcaatgtctgtgctccgctgaatccatggtggaatatggaacttgcatgtgcttagtcaaagggatcttctaccattgctccaacgatgacgaaggcgatagctactcggataatccgtgcagctgcagccagtcccattgttgtagtcggtatctctgcatgggagccatgtcgctgttcctgccttgcctgctttgctaccctccagccaaaggctgtcttaaactttgccggaggtgttacgactggatacataggcccgggtgtcggtgcaaaaatagtaacactgtctactgtaaactcgagagttgcccaagtcgaggccaggggaaaccttcttag

SEQ ID NO: 92497 - DNA, 960 bp, Artificial Sequence
  derived and/or modified sequence
atggacccccagaaccagcacggcagcggcagcagcctggtggtgatccagcaaccctccctggactcgcgacagcgactggattacgaaagggagatccaaccaaccgccatactgagtcttgaccaaatcaaagccatacgcggctctaatgaatacaccgagggtccaagcgtcgtgaaacgcccagctccacgaactgcccctcgtcaggagaagcacgagagaactcatgaaataatccctatcaacgtgaacaacaattacgaacacagacacacatcccacctgggacacgccgtgcttcccagcaatgccagagggccaatcctgtctaggtctaccagtactggatcagctgcctcgtcaggatcaaactcctctgcgagcagtgagcaggggttgctcgggcgtagccctcctaccagacccgtgccaggacatcgatccgagagggccatcaggactcaacctaagcagttaattgttgacgatttaaagggttctctcaaagaggacctgacacagcacaaatttatttgcgagcagtgcggcaagtgcaaatgtggagaatgcaccgcccctcgcacactgccttcttgccttgcgtgcaacaggcagtgtctttgtagcgctgagagtatggtggagtacggtacctgcatgtgccttgtgaagggcatcttttatcattgctctaatgatgatgagggagactcatatagtgataacccctgctcatgctcccagagtcactgctgctctcggtatttgtgcatgggggctatgagccttttcctgccctgtctcctgtgctatccgccagccaagggttgtctaaaactctgcaggcggtgttatgattggatccatcgtccagggtgcaggtgcaagaattccaataccgtgtattgcaagttggagagttgtcccagcaggggtcaggggaagccgtcatag

SEQ ID NO: 92498 - DNA, 204 bp, Artificial Sequence
  derived and/or modified sequence
atggacccccagaaccagcacggcagcggcagcagcctggtggtgattcaacagccttcactagatagtcggcagcgtttggactatgagcgggagattcagcccaccgccatactgtcactggaccagattaaggcaataaggggatccaacgagtacaccgagggcccctctgtggttaaaagacccgccccccggacgtag

SEQ ID NO: 92499 - DNA, 630 bp, Artificial Sequence
  derived and/or modified sequence
atggacccccagaaccagcacggcagcggcagcagcctggtggtgattcagcaacctagtctggattcacgccagcgcttggattatgaaagagagattcaacccactgctatcctgtcccttgaccagatcaaagccatccgcgggagcaatgagtatacggaagggccttccgtggtgaagcgacctgctcctcgcacagcacccagacaagagaaacatgagcgcacgcatgagatcatcccgatcaacgtaaataataactacgagcataggcacaccagccatctcggccacgccgttttgccgtctaatgcccgaggaccaatcctgtcccgcagtactagtaccgggtccgcggcgtcttccggttccaattcctctgccagctccgagcaggggttactgggtcggagcccccccaccagacccgtgcccggacatcgctccgagcgtgccatccgcacgcaacctaagcaactgatcgtggacgacctcaagggctctctcaaggaagacctgacccagcacaaatttatttgtgaacagtgcggcaagtgcaagtgtggggagtgtactgcccctaggacactgcctagctgcctcgcctgtaatcgacagtgtttatag

SEQ ID NO: 92500 - DNA, 108 bp, Artificial Sequence
  derived and/or modified sequence
atggacccccagaaccagcacggcagcggcagcagcctggtggtgattcagcagcccagcctcgactcgaggcagaggttagattacgagcgagaaatccagccatag

SEQ ID NO: 92501 - DNA, 960 bp, Artificial Sequence
  derived and/or modified sequence
atggacccgcagaatcagcacgggtcggggtcctccctggtcgtgatccaacagccctcactagatagtcgccagcgacttgactacgaaagggagatccagcccaccgccatactgagcctggatcagataaaggccatcaggggtagcaatgaatataccgaggggccttccgttgttaaaagaccagctccccgaacggccccacggcaagagaaacatgagcgcacacacgagattatccccataaacgttaacaacaactacgagcaccggcatacctcccacctgggtcatgcggttctgccctcaaacgctcggggtccaatactcagccgatccacttctacaggaagcgcagcctcttcagggtcaaactcttcggccagcagtgagcagggtctgctcgggcgttcaccaccaacccgaccagttcccggacacagaagtgagcgtgcaatccgcacacagcccaaacaactaatagtggatgacctcaaagggtctctgaaggaggacttaacgcagcacaagtttatatgcgaacaatgtggtaagtgtaagtgcggagaatgcactgctcccaggaccttaccctcatgcctcgcctgcaaccgacagtgcctgtgttctgccgagtccatggttgaatatggcacctgtatgtgtctggtaaagggaatcttctatcactgttccaatgacgacgagggagacagctattctgacaatccctgcagttgttcccaaagtcattgttgtagcagatacctgtgcatgggagccatgtccctgttcttgccttgcttactatgctacccccctgctaagggatgtctgaaactctgcaggagatgctacgactggatccaccgtcccggatgtcgatgtaagaacagcaacacagtgtattgtaagctcgaatcttgtccctctagaggccagggcaagccatcatag

SEQ ID NO: 92502 - DNA, 960 bp, Artificial Sequence
  derived and/or modified sequence
atggacccacaaaatcagcacggtagcggttccagtctggtcgtgatccagcaaccatccctggattcccgccaaaggctggactatgagagagagatccagcccactgcgatattgagcctcgaccagatcaaagcaatccgtggcagtaatgagtacacagaaggcccaagcgtggtaaaaaggcccgctcccagaacagcccctaggcaggagaagcatgagagaactcacgagataatcccaatcaacgtgaataacaactatgaacacaggcacaccagccacctaggacatgcagtgctgccatcaaatgccagggggccaatccttagcaggagcacttctaccggatccgcggctagttcaggttccaatagctccgcttcaagtgaacagggacttcttggcaggagtcctcccacgcgtcccgtgccaggacataggtcagagcgagcaattcgaactcagcctaaacagctgattgttgacgacttgaagggcagcctgaaggaggatctgacccaacacaaattcatatgcgagcaatgcggaaagtgtaagtgcggagagtgtactgctcccagaaccctcccctcttgcctggcttgtaatagacagtgcttatgttccgccgagtcaatggtcgaatacgggacatgcatgtgcttggtgaaaggaatcttctatcactgttctaacgatgacgaaggggacagctactctgacaatccttgctcttgtagccagagccactgttgttctaggtacttgtgtatgggggctatgtctctgttcttaccgtgtctcttgtgctacccccctgccaagggctgccttaaactgtgtcgccgttgctatgactggatccatagacctgggtgccggtgtaagaacagcaatacagtgtactgtaagctagaatcatgcccatcccggggacagggcaagccgtcctag

SEQ ID NO: 92503 - DNA, 204 bp, Artificial Sequence
  derived and/or modified sequence
atggacccacagaaccagcacggcagcggcagtagtctggttgtgatacagcagccaagtttagatagtagacagcgattagattacgaacgcgaaatccagcctacagcgattctgagcctggaccaaattaaggctatacggggtagcaatgaatacacggagggaccgtccgtggtcaagcggccagcgccacgtacatag

SEQ ID NO: 92504 - DNA, 630 bp, Artificial Sequence
  derived and/or modified sequence
atggatcctcagaaccaacacgggagcggcagcagcttggtggtgatccagcagccctcattggacagcaggcagcggctggattacgaaagggaaattcagccaactgccatcctttcactggatcagatcaaggccattcgcggaagcaacgagtacacagagggcccttctgtagttaagagacctgcacctcggaccgctcctcgtcaggagaagcatgagcggacacatgaaattatacccatcaacgtgaataataattacgagcaccgacacacctcgcacctaggacacgctgttctgcctagcaacgcccgaggccctatcctgagcaggtcgacatcaacggggtccgctgcctcttctggaagtaatagctcggcaagctcagagcagggcctgctggggcgatccccacccacacgcccagtgcctgggcatcgatccgagagggccatacgcactcagccaaaacagctcatagttgatgacttgaagggaagtctcaaagaagatttgactcagcacaagtttatttgtgaacaatgtgggaagtgtaagtgcggtgaatgcacagcacctcggacactgccttcatgccttgcctgtaacaggcagtgtctctag

SEQ ID NO: 92505 - DNA, 108 bp, Artificial Sequence
  derived and/or modified sequence
atggatccacagaaccagcacggttcaggaagttcactggtcgttattcagcagccctctctggactctcgacagagattagactacgagcgagaaatacagccctag

SEQ ID NO: 92506 - DNA, 2348 bp, Artificial Sequence
  derived and/or modified sequence
ggagtgagaccgctctgcaaaccactgcgtgctttgcagagtgattatcagcacagttccctgccctggataaggaacagctacagtcgctgttaaatgtgcctgaaaagcaatttgcaatctttgcattaggatttcagatgcatgccaggtttccactgattgccagaactcgagatcactacacatggatccccaaaatcaacatggcagtggcagttcgttagttgtgatccagcagccttctttggatagccgtcagagattagactatgagagagagattcagcctactgctattttgtccttagaccagatcaaggccataagaggcagcaatgaatacacagaagggccttcggtggtgaaaagacctgctcctcggacagcaccaagacaagaaaagcatgaaaggactcatgaaatcataccaattaatgtgaataataactacgagcacagacacacaagccacctgggacatgcagtactcccaagtaatgccaggggccccattttgagcagatcaaccagcactggaagtgcagccagctctgggagcaacagcagtgcctcttctgaacagggactgttaggaaggtcaccaccaaccagaccagtccctggtcataggtctgaaagggcaatccggacccagcccaagcaactgattgtggatgacttgaagggttccttgaaagaggacctgacacagcacaagttcatttgtgaacagtgtgggaagtgcaagtgtggagaatgcactgctcccaggaccctaccatcctgtttggcctgtaaccggcagtgcctttgctctgctgagagcatggtggaatatggaacctgcatgtgcttagtcaagggcatcttctaccactgctccaatgacgacgaaggggattcctattcagataatccttgctcctgttcacaatcacactgctgctctagatacctgtgtatgggagccatgtctttatttttaccttgcttactctgttatcctcctgctaaaggatgcctgaagctgtgcaggaggtgttatgactggatccatcgcccagggtgcagatgtaagaactccaacactgtctattgtaagctggagagctgcccctcccggggtcagggtaaaccatcatgatttttggaggtgggttgtacctcctgaacttttagctttcaagttgtggctgttttttgtttttgtttttgtttttgttttctttagaatttttccctgtttcccaccttctcttcccctgttgccaaggtctaactcatggatttttctctttcctcatggatgatcttcagcaagagtggactgggaagctgcacctggctcccactttcaacaagagcctctgccatccacttgagggtattgagagccagtgggcttttgtgtagcctttttgttctgcaagcaactttctaaagttgtgtacatgaacatacacccacatccagactacagtgatttagagttgttttgattgggtaccgtgggagcagggaaattggttttttaaaaagcaactgtttaattgcttaaataagctatgtattaaatctgtctccagttagggctatcttcctagcataggccccttaagtagcatgggggatatattttttgctataacgtaaaaattttcctttaaccactgccctctccttctttctccttcaaggttctttccccctcagttttgttgttgtcttactctggagatgccaagtgtattttttctttctatgtaattttagattcgccttacaatgtaaatcttcacattggagataatattggttggaccttgcccatcttcactctagccttcgtatttgtgaaggactcagccaccttccttcttcaccccatgcttctcaccaaatttttgttgtcattgagggcacttggataactcaagttgatatttatagctgatcaatctatatgtgtcacagaactatgctgcctaaagtgatcttggctccttaatggtccttttggccccttggatagttaacagctgagtaattctaatctcttctgtgttttccttgccttaaccacaaattgtggtgctttttgtatattttatgtataaatcacaaagttgaattctgactatttttaagacaaaagtctgttaaacttttttattgtaaagaatatttattatgcgaatctctattattttatggtatttattgcaaaagactgttgaaatgtactcatgtttgaatataacaaaatatcaatacttaacggaaaataaggtgacacgaagaaagtacatatgttaactataatgcagaaaatatattaattaatg

SEQ ID NO: 92507 - DNA, 2504 bp, Artificial Sequence
  derived and/or modified sequence
tatttattcagtgcggattgcagagggcgcagctccaccgtggtaacttgcaatgtggccgcccctgcgctggcttctttctcctcggccctcggtgaacccagcttttcctttaaagcatagacaaatccttgcttagggtcagccagaccgtgggcttgctttgggctcccgcgtggacgctgaaggctcttcatgatttctcagaaaccttggtgggccacccaaaaagtgtgttggaaatccacggtgatccttaatatggtgatgggattgtccgaaaaggatttcagatgcatgccaggtttccactgattgccagaactcgagatcactacacatggatccccaaaatcaacatggcagtggcagttcgttagttgtgatccagcagccttctttggatagccgtcagagattagactatgagagagagattcagcctactgctattttgtccttagaccagatcaaggccataagaggcagcaatgaatacacagaagggccttcggtggtgaaaagacctgctcctcggacagcaccaagacaagaaaagcatgaaaggactcatgaaatcataccaattaatgtgaataataactacgagcacagacacacaagccacctgggacatgcagtactcccaagtaatgccaggggccccattttgagcagatcaaccagcactggaagtgcagccagctctgggagcaacagcagtgcctcttctgaacagggactgttaggaaggtcaccaccaaccagaccagtccctggtcataggtctgaaagggcaatccggacccagcccaagcaactgattgtggatgacttgaagggttccttgaaagaggacctgacacagcacaagttcatttgtgaacagtgtgggaagtgcaagtgtggagaatgcactgctcccaggaccctaccatcctgtttggcctgtaaccggcagtgcctttgctctgctgagagcatggtggaatatggaacctgcatgtgcttagtcaagggcatcttctaccactgctccaatgacgacgaaggggattcctattcagataatccttgctcctgttcacaatcacactgctgctctagatacctgtgtatgggagccatgtctttatttttaccttgcttactctgttatcctcctgctaaaggatgcctgaagctgtgcaggaggtgttatgactggatccatcgcccagggtgcagatgtaagaactccaacactgtctattgtaagctggagagctgcccctcccggggtcagggtaaaccatcatgatttttggaggtgggttgtacctcctgaacttttagctttcaagttgtggctgttttttgtttttgtttttgtttttgttttctttagaatttttccctgtttcccaccttctcttcccctgttgccaaggtctaactcatggatttttctctttcctcatggatgatcttcagcaagagtggactgggaagctgcacctggctcccactttcaacaagagcctctgccatccacttgagggtattgagagccagtgggcttttgtgtagcctttttgttctgcaagcaactttctaaagttgtgtacatgaacatacacccacatccagactacagtgatttagagttgttttgattgggtaccgtgggagcagggaaattggttttttaaaaagcaactgtttaattgcttaaataagctatgtattaaatctgtctccagttagggctatcttcctagcataggccccttaagtagcatgggggatatattttttgctataacgtaaaaattttcctttaaccactgccctctccttctttctccttcaaggttctttccccctcagttttgttgttgtcttactctggagatgccaagtgtattttttctttctatgtaattttagattcgccttacaatgtaaatcttcacattggagataatattggttggaccttgcccatcttcactctagccttcgtatttgtgaaggactcagccaccttccttcttcaccccatgcttctcaccaaatttttgttgtcattgagggcacttggataactcaagttgatatttatagctgatcaatctatatgtgtcacagaactatgctgcctaaagtgatcttggctccttaatggtccttttggccccttggatagttaacagctgagtaattctaatctcttctgtgttttccttgccttaaccacaaattgtggtgctttttgtatattttatgtataaatcacaaagttgaattctgactatttttaagacaaaagtctgttaaacttttttattgtaaagaatatttattatgcgaatctctattattttatggtatttattgcaaaagactgttgaaatgtactcatgtttgaatataacaaaatatcaatacttaacggaaaataaggtgacacgaagaaagtacatatgttaactataatgcagaaaatatattaattaatgaaa

SEQ ID NO: 92508 - DNA, 641 bp, Artificial Sequence
  derived and/or modified sequence
gtagccggagtgagaccgctctgcaaaccactgcgtgctttgcagagtgattatcagcacagttccctgccctggataaggaacagctacagtcgctgttaaatgtgcctgaaaagcaatttgcaatctttgcattaggcatttcggccgtggaaccccaggctcggaggactgggtgtgagcgctgcccgggagaggctgacctgccgggaccggagtgcccggggacgctgtgcccccacttgcccaacgtgcggaatcggctaagcgcgtcggcctgcgcggggcacaagggacgacgcccgcctttctctctccgagaaggatccccaaacctcactctcttcactcctccccgctaaaaaaaaaaaaaaaaagaaaagggatttcagatgcatgccaggtttccactgattgccagaactcgagatcactacacatggatccccaaaatcaacatggcagtggcagttcgttagttgtgatccagcagccttctttggatagccgtcagagattagactatgagagagagattcagcctactgctattttgtccttagaccagatcaaggccataagaggcagcaatgaatacacagaagggccttcggtggtgaaaagacctgctcctcggacag

SEQ ID NO: 92509 - DNA, 1012 bp, Artificial Sequence
  derived and/or modified sequence
ttgtaaaaactggttcttggaaaggggctgcagaagacctcccgaggtggatgttactgagccgcccggcgagcaccagccgtgacaggtccgggcccggccgcgcggagccgcgggagaactgccctccgcagccggaagggggccgcggggagcgctcctggccggtggcggcgggggcgggggaggccgcgagccgaggcgctccaactccggcgatgccgcctcgccctccccgccgcggttgatgcggcacgtgcacgccgccgcccgcaccaggacctgggccgggtcgcacggcttggcccccggccaccgcttcggcctaggatttcagatgcatgccaggtttccactgattgccagaactcgagatcactacacatggatccccaaaatcaacatggcagtggcagttcgttagttgtgatccagcagccttctttggatagccgtcagagattagactatgagagagagattcagcctactgctattttgtccttagaccagatcaaggccataagaggcagcaatgaatacacagaagggccttcggtggtgaaaagacctgctcctcggacagcaccaagacaagaaaagcatgaaaggactcatgaaatcataccaattaatgtgaataataactacgagcacagacacacaagccacctgggacatgcagtactcccaagtaatgccaggggccccattttgagcagatcaaccagcactggaagtgcagccagctctgggagcaacagcagtgcctcttctgaacagggactgttaggaaggtcaccaccaaccagaccagtccctggtcataggtctgaaagggcaatccggacccagcccaagcaactgattgtggatgacttgaagggttccttgaaagaggacctgacacagcacaagttcatttgtgaacagtgtgggaagtgcaagtgtggagaatgcactgctcccaggaccctaccatcctgtttggcctgtaaccggcagtgccttt

SEQ ID NO: 92510 - DNA, 573 bp, Artificial Sequence
  derived and/or modified sequence
agtatgaagtttgttacaactatcattggaaatgcaaattgaagttgtgcctggtgttatgggttacactattcaaatcctctgcggttttgtgaatctggcttagtacttttagctaccttttgctttgaaagcactgagttaagaagttcttgaagaagaggaataattgtgcaggagtcaggattagatgttgaggactccgagactaaatccccgcaggttatgaatgtgttactcctcatgcgcaaagaaggtagaataaagtagaaactcgagagagctgagttgtgaaaacgagggggagctccaagaagttaacatgtaagacatagtttagagacattagtttaggaaatataggaaatggacttctttctgcgttgttccttaaaccatgttttttgcctcaggatttcagatgcatgccaggtttccactgattgccagaactcgagatcactacacatggatccccaaaatcaacatggcagtggcagttcgttagttgtgatccagcagccttctttggatagccgtcagagattagactatgagagagagattcagcct

SEQ ID NO: 92511 - protein, 469 aa, Artificial Sequence
  derived and/or modified sequence
MAERAALEELVKLQGERVRGLKQQKASAELIEEEVAKLLKLKAQLGPDESKQKFVLKTPKETLMGKYGEDSKLIYDLKDQGGELLSLRYDLTVPFARYLAMNKLTNIKRYHIAKVYRRDNPAMTRGRYREFYQCDFDIAGNFDPMIPDAECLKIMCEILSSLQIGDFLVKVNDRRILDGMFAICGVSDSKFRTICSSVDKLDKVSWEEVKNEMVGEKGLAPEVADRIGDYVQQHGGVSLVEQLLQDPKLSQNKQALEGLGDLKLLFEYLTLFGIDDKISFDLSLARGLDYYTGVIYEAVLLQTPAQAGEEPLGVGSVAAGGRYDGLVGMFDPKGRKVPCVGLSIGVERIFSIVEQRLEALEEKIRTTETQVLVASAQKKLLEERLKLVSELWDAGIKAELLYKKNPKLLNQLQYCEEAGIPLVAIIGEQELKDGVIKLRSVTSREEVDVRREDLVEEIKRRTGQPLCIC

SEQ ID NO: 92512 - protein, 314 aa, Artificial Sequence
  derived and/or modified sequence
MTRGRYREFYQCDFDIAGNFDPMIPDAECLKIMCEILSSLQIGDFLVKVSWEEVKNEMVGEKGLAPEVADRIGDYVQQHGGVSLVEQLLQDPKLSQNKQALEGLGDLKLLFEYLTLFGIDDKISFDLSLARGLDYYTGVIYEAVLLQTPAQAGEEPLGVGSVAAGGRYDGLVGMFDPKGRKVPCVGLSIGVERIFSIVEQRLEALEEKIRTTETQVLVASAQKKLLEERLKLVSELWDAGIKAELLYKKNPKLLNQLQYCEEAGIPLVAIIGEQELKDGVIKLRSVTSREEVDVRREDLVEEIKRRTGQPLCIC

SEQ ID NO: 92513 - DNA, 1410 bp, Artificial Sequence
  derived and/or modified sequence
atggctgagcgggctgccctagaagagctagttaaactgcaaggcgagagagtacgtggtctgaagcagcaaaaagcatcagccgagctgatagaagaggaggtcgccaagctcctcaaactcaaggcccagttggggccagatgagtctaagcaaaaatttgtgctcaaaacacccaaggagacactaatgggcaaatatggagaggattctaagttaatctatgacctgaaagatcagggcggggaactgctatctctgagatacgatttgactgttcctttcgcacgctaccttgccatgaacaagctgactaatatcaaacgatatcacatcgcaaaggtgtatcgtagagacaaccctgccatgacccggggaagataccgggagttctatcaatgtgactttgacattgcgggcaacttcgaccccatgatcccagacgctgaatgtctgaaaatcatgtgtgagatactatccagcctgcagatcggggactttctggtgaaggtgaatgatcgtaggatcctggacgggatgtttgccatctgcggtgtatccgattccaagttccggaccatttgttcttctgttgacaagcttgataaagtttcatgggaggaggtgaagaatgaaatggtgggagagaagggtttggccccagaagtagcagaccgaatcggagattacgtgcagcagcacggtggcgtttctctggtcgagcagttgcttcaagatcctaagttgtcccagaacaagcaggcgcttgaagggctgggggatctgaagctcctgtttgaatacctgacccttttcggcatcgatgataagatcagcttcgacctgtcgctagcacggggcctcgactactacaccggggtcatttacgaagcagtccttttacagacaccagcgcaggctggcgaagagcctttgggggttggcagtgtggcagccggcggaaggtacgacggactcgtgggaatgtttgaccccaaaggccggaaggtgccatgcgtgggtctttccatcggagtggaacgcattttctctatcgtggagcagcgtttggaagctttagaagaaaagattagaaccaccgaaacccaagtactcgtggccagcgcccagaagaagttgttggaagagcggctcaaactggtatcagaactatgggatgctggcattaaagccgagctgctgtacaaaaagaacccaaaacttctgaatcagctgcaatactgtgaggaggcagggatccccctcgtggccatcattggcgagcaggagttaaaggacggggttattaagctgagaagtgtcacttctagggaagaagtggatgtgcgcagagaagacctggtggaggagatcaaacgacgcacaggccagcccctctgtatctgctag

SEQ ID NO: 92514 - DNA, 945 bp, Artificial Sequence
  derived and/or modified sequence
atgaccagaggacggtatcgagagttctatcagtgtgactttgatattgcaggcaactttgatcccatgatcccagacgccgaatgcctcaagattatgtgcgagattctctccagcctccaaatcggtgatttcttagtaaaagtgtcctgggaagaggtgaaaaacgaaatggtcggagagaaggggttggccccggaggttgcagaccgcattggggattatgtgcaacaacacggtggagtctccttagtcgaacagctgctccaggaccccaagctctcccaaaataagcaggcactggagggtctgggagatcttaaactgttgttcgagtatctgacgctatttgggattgacgataagatcagtttcgatctgagcttagcacgcggcctggattattatacaggggttatctatgaagccgtgttgttgcagactcctgctcaggcaggtgaagaacccctaggggtcggtagcgtagcagccgggggcaggtacgatggtctggtcggaatgttcgacccaaaagggcgaaaggtgccttgtgtgggactctcaattggggtggagcgaatattctctatcgtggagcaaagacttgaagccctcgaggaaaaaatacgaaccacggaaacacaggtccttgtggccagcgctcagaagaagctccttgaggagcggcttaaacttgtgagcgaactttgggacgcagggatcaaggctgagcttctctacaaaaagaaccccaagcttctgaaccagctccaatattgtgaagaggccggaatcccgctagtggctatcataggcgagcaggaactcaaggacggcgtgatcaagttaaggtccgttacatcacgtgaggaggtggacgtacggcgggaggatctggtcgaggagatcaaaagaagaaccggtcaacctctgtgtatttgctag

SEQ ID NO: 92515 - DNA, 1789 bp, Artificial Sequence
  derived and/or modified sequence
aggtcgagacagcaggcggctcaagtggacagccgggatggcagagcgtgcggcgctggaggagctggtgaaacttcagggagagcgcgtgcgaggcctcaagcagcagaaggccagcgccgagctgatcgaggaggaggtggcgaaactcctgaaactgaaggcacagctgggtcctgatgaaagcaaacagaaatttgtgctcaaaacccccaaggaaacactgatgggaaagtatggggaagactccaagcttatctatgacctgaaggaccagggcggggagctcctgtcccttcgctatgacctcactgttccttttgctcggtatttggcaatgaataaactgaccaacattaaacgctaccacatagcaaaggtatatcggcgggataacccagccatgacccgtggccgataccgggaattctaccagtgtgattttgacattgctgggaactttgatcccatgatccctgatgcagagtgcctgaagatcatgtgcgagatcctgagttcacttcagataggcgacttcctggtcaaggtaaacgatcgacgcattctagatgggatgtttgctatctgtggtgtttctgacagcaagttccgtaccatctgctcctcagtagacaagctggacaaggtgtcctgggaagaggtgaagaatgagatggtgggagagaagggccttgcacctgaggtggctgaccgcattggggactatgtccagcaacatggtggggtatccctggtggaacagctgctccaggatcctaaactatcccaaaacaagcaggccttggagggcctgggagacctgaagttgctctttgagtacctgaccctatttggcattgatgacaaaatctcctttgacctgagccttgctcgagggctggattactacactggggtgatctatgaggcagtgctgctacagaccccagcccaggcaggggaagagcccctgggtgtgggcagtgtggctgctggaggacgctatgatgggctagtgggcatgttcgaccccaaagggcgcaaggtgccatgtgtggggctcagcattggggtggagcggattttctccatcgtggaacagagactagaggctttggaggagaagatacggaccacggagacacaggtgcttgtggcatctgcacagaagaagctgctagaggaaagactaaagcttgtctcagaactgtgggatgctgggatcaaggctgagctgctgtacaagaagaacccaaagctactgaaccagttacagtactgtgaggaggcaggcatcccactggtggctatcatcggcgagcaggaactcaaggatggggtcatcaagctccgttcagtgacgagcagggaagaggtggatgtccgaagagaagaccttgtggaggaaatcaaaaggagaacaggccagcccctctgcatctgctgaactgaacaaactatcagaggaaaggaagtgggactggcactatttgaggttaagacaaactgcatatgtacttcaattgctttgcacttttccgtttcagcggaagacctgaagagtggtcagaacagagcctttgatttttattatggttattttattgattattactggcaaaaacggccaggtacaacacctttttcatacaaggcccaggaggcttagtccagtctgtgctcctgggctacaaggacccagcctgagatggtcccatctgcagggccccgcaccagttggagcagatgcctccccaccaccaattgccaaaggtccaataaaatgcct

SEQ ID NO: 92516 - DNA, 1410 bp, Artificial Sequence
  derived and/or modified sequence
atggccgagagagctgccctggaggagctggtgaagctgcagggcgagcgggtgcggggcctgaagcagcagaaggccagcgctgagctgattgaggaggaggtggccaagctgctgaagctgaaggcccagctgggcccagatgagagcaagcagaagtttgtgctgaagacccccaaggagaccctgatgggcaagtatggagaggacagcaagctgatctatgacctgaaggaccagggcggggagctgctgagcctgcgctatgacctgactgtgccctttgcccgctacctggccatgaacaagctgaccaacatcaagcgctaccacatcgccaaggtgtacagaagagacaacccagccatgacccggggccgctaccgggagttctaccagtgtgactttgatattgctggcaactttgaccccatgatcccagatgctgagtgcctgaagatcatgtgtgagatcctgagcagcctgcagatcggggacttcctggtgaaggtgaatgaccggcgcatcctggatggcatgtttgccatctgtggggtgtctgacagcaagttccgcaccatctgcagctctgtggacaagctggacaaggtgtcctgggaggaggtgaagaatgagatggtgggggagaagggcctggcccctgaggtggccgacagaattggagactatgtgcagcagcacggcggcgtgtccctggtggagcagctgctgcaggaccccaagctgagccagaacaagcaggccctggagggcctgggggacctgaagctgctgtttgagtacctgaccctgtttggaattgatgacaagatcagctttgacctgagcctggcccggggcctggactactacacaggagtcatctatgaggccgtgctgctgcagaccccagcccaggccggggaggagcccctgggcgtgggctctgtggccgccggcggccgctatgatggcctggtgggcatgtttgaccccaagggcaggaaggtgccctgtgtgggcctgagcattggagtggagcgcatcttcagcatcgtggagcagaggctggaggccctggaggagaagatccgcaccacagagacccaggtgctggtggccagcgcccagaagaagctgctggaggagcggctgaagctggtgtctgagctgtgggatgctggcatcaaggccgagctgctgtacaagaagaaccccaagctgctgaaccagctgcagtactgtgaggaggccggcatccccctggtggccatcatcggggagcaggagctgaaggatggagtcatcaagctgcggtctgtgaccagccgggaggaggtggatgtgcggcgggaggacctggtggaggagatcaagagaagaacaggccagcccctgtgcatctgctag

SEQ ID NO: 92517 - DNA, 945 bp, Artificial Sequence
  derived and/or modified sequence
atgacccggggccgctaccgggagttctaccagtgtgactttgatattgctggcaactttgaccccatgatcccagatgctgagtgcctgaagatcatgtgtgagatcctgagcagcctgcagatcggggacttcctggtgaaggtgtcctgggaggaggtgaagaatgagatggtgggggagaagggcctggcccctgaggtggccgaccgcatcggggactatgtgcagcagcacggcggcgtgtccctggtggagcagctgctgcaggaccccaagctgagccagaacaagcaggccctggagggcctgggggacctgaagctgctgtttgagtacctgaccctgtttggaattgatgacaagatcagctttgacctgagcctggcccggggcctggactactacacaggagtcatctatgaagctgtgctgctgcagaccccagcccaggccggggaggagcccctgggcgtgggctctgtggccgccggcggccgctatgatggcctggtgggcatgtttgaccccaagggcaggaaggtgccctgtgtgggcctgagcattggagtggagcgcatcttcagcatcgtggagcagaggctggaggccctggaggagaagatccgcaccacagagacccaggtgctggtggccagcgcccagaagaagctgctggaggagcggctgaagctggtgtctgagctgtgggatgctggcatcaaggccgagctgctgtacaagaagaaccccaagctgctgaaccagctgcagtactgtgaggaggccggcatccccctggtggccatcattggagagcaggagctgaaggatggagtcatcaagctgcggtctgtgaccagccgggaggaggtggatgtgagaagagaggacctggtggaggagatcaagagaagaacaggccagcccctgtgcatctgctag

SEQ ID NO: 92518 - DNA, 1410 bp, Artificial Sequence
  derived and/or modified sequence
atggccgagcgggccgccctggaggagctggtgaagctgcagggcgaacgggtgcgtggtctcaaacagcagaaggcctcagccgagctgatcgaagaagaggtggctaaacttttaaagctgaaagcccaattgggccctgatgaatctaagcaaaagttcgtgttaaagacccctaaggaaaccctgatgggaaaatatggagaagactctaagctcatatatgatctgaaagatcaggggggagaactcctgtccttaagatacgacctgacagtgccatttgcacggtaccttgccatgaataagctcacaaatatcaaacggtaccatatcgctaaggtctatcgcagagataacccagctatgacaaggggcagatatcgcgaattctatcagtgcgacttcgacatcgcagggaacttcgacccaatgatcccggacgctgagtgtctgaagataatgtgcgagattctgtcctctctacaaatcggagactttctggtaaaggttaatgacaggcgaatactggatgggatgttcgccatctgcggggtctccgattctaagttcaggacaatttgcagctccgtggataagttagataaggtgagctgggaagaagttaagaatgaaatggtgggcgagaaggggctcgcccccgaggtagctgacaggattggtgattacgttcagcaacatggcggggtttctttagtggaacagttactgcaagaccctaagctttctcagaacaagcaagctctcgagggtttgggagacctgaagctgctcttcgagtacctgacactctttggcatcgacgacaaaataagcttcgatctgagtctagctcgtggcctggattactacaccggcgtcatctacgaggccgtgcttttacagacccccgctcaggccggcgaagagccactcggcgtggggtccgtggcagccgggggtagatacgacggcctggtcggtatgtttgatccaaaagggcgaaaagtcccttgtgtgggattatcgattggagtcgaacgaattttttctatcgtagagcagcgactggaagccctagaagaaaaaatcaggactaccgaaactcaggttcttgttgcctctgcccagaaaaagctcctcgaagaaagactgaagttggtgtcggagctctgggacgccgggataaaagcggagcttttatataagaagaatcccaaacttctaaaccagctgcagtactgtgaggaggcaggaatccccctcgtggcaatcatcggtgaacaggagctgaaagatggcgtgatcaagctgagatcagtgacgtccagagaggaagtggacgttcggcgggaggacctcgttgaagaaattaagaggaggaccggtcagcccttgtgtatttgctag

SEQ ID NO: 92519 - DNA, 945 bp, Artificial Sequence
  derived and/or modified sequence
atgacccggggccggtaccgggagttctaccagtgcgacttcgacatagcaggcaactttgatcccatgattccggatgctgagtgccttaagatcatgtgcgagatcctgtcatctctgcaaatcggggatttcctggtcaaggtttcatgggaagaggtcaaaaacgagatggtgggtgagaaaggcctggctccagaagtagcggatagaattggcgattatgtgcagcaacatggcggggtaagcctagtcgaacaactgttgcaggaccctaagctatcccaaaacaaacaggcgttagaggggctgggggacctgaaacttctcttcgagtacctgaccctgttcggcatcgatgacaaaatttcattcgatttgagtctcgcacgcggtctcgattactacactggtgtgatctatgaagccgtgctgctacaaacccccgcccaggccggcgaggagccccttggcgtaggctccgtggcagccgggggtaggtatgatgggctggtggggatgtttgaccccaagggaagaaaagttccctgtgtgggactatctatcggtgttgagaggatattcagcattgttgagcagcggctagaagccctagaagagaagatccgcacaaccgagacacaagtcctcgtggcctcggcccagaaaaagctgctggaagaacggttgaaacttgtttcagagctttgggacgccggcatcaaagcggagctgctgtataaaaagaaccctaagctgctgaaccagttacagtactgcgaagaggctggaattcctctggtcgcaataattggagagcaggaactaaaggacggagtgattaagctgcggtcagtgacaagtagggaagaggtagatgttcgtcgcgaagatctcgtagaggagattaaaagacgaacaggccagcctttgtgcatatgttag

SEQ ID NO: 92520 - DNA, 1410 bp, Artificial Sequence
  derived and/or modified sequence
atggctgaaagggccgctcttgaggagctggtgaaactacagggtgagcgggtacggggtcttaagcaacagaaggcttcagcagagctgattgaagaggaagtcgccaagttacttaaattaaaggctcagttgggacccgatgaaagcaaacaaaaattcgtgctgaagactcccaaggaaacgctgatgggcaagtacggcgaagactccaagctgatttacgacctgaaagaccagggaggggagctgttgagccttcgttatgacctgactgtaccctttgcccgataccttgctatgaacaagttgacgaatatcaaaagataccacatcgctaaggtttacagacgggataatccagctatgaccagaggtaggtacagagagttctatcaatgtgacttcgacattgccggtaactttgacccgatgatccccgatgcagaatgcttgaagattatgtgcgaaattctctcaagcctgcagattggcgactttcttgtcaaggtcaatgacaggcgcattctcgacggtatgttcgctatctgcggcgtgagcgacagtaagtttagaacaatatgctcgagtgttgataaattggacaaggtgtcctgggaggaggtgaagaatgagatggtgggggaaaagggactcgcccctgaggtagccgaccggatcggcgattatgttcaacagcacggaggagtgtcgctcgtagagcagctattgcaggatcccaagttaagtcagaacaaacaagctctggagggcttaggagatttaaaactgctgttcgaatacctgacactgttcggaattgatgataagataagctttgacttgagcctggcccgaggtctagactactatacaggcgtgatctacgaggcagttctgcttcaaacacctgcccaggcaggagaagagccactgggcgtcggctctgttgcagctggaggtaggtacgatgggctggtcggtatgttcgaccccaagggtagaaaagtcccgtgtgttggcttgtctattggagtggaaaggattttctccattgtggagcaacgcttggaggccctggaggagaaaatcaggacaaccgaaacccaagttctagtggcctcagcccagaagaaattgttggaagaacggctcaaactggtaagtgaactgtgggacgcaggaatcaaggccgaacttctttataagaaaaaccccaaactcttgaaccagttgcagtactgcgaggaggccggtatccctcttgtggccataatcggcgaacaggagctgaaagacggcgttataaagctccggtcagtaacttctagggaagaggtggatgtcaggagggaggatctggtagaggagattaagcgacgtactgggcaacccttgtgcatctgctag

SEQ ID NO: 92521 - DNA, 945 bp, Artificial Sequence
  derived and/or modified sequence
atgacccggggacgctatcgagaattctaccagtgtgactttgatatcgccggtaatttcgaccctatgatccccgacgccgaatgtctgaaaattatgtgtgagattctgagcagtctgcaaataggggatttcctagtgaaagtttcatgggaagaggttaagaatgagatggtgggcgagaagggtctggccccagaggtcgccgatcgaattggggattacgttcaacaacacggtggagtgtcattagtggaacagctcctgcaggacccaaaactcagtcagaataaacaggccctcgagggactgggagacttgaagctgctgttcgagtacttgactctcttcggcatagacgataagatctccttcgacctgagccttgctaggggattggactactatacaggggtaatctatgaggccgtgctcctgcagacccccgctcaagcaggtgaagaaccactaggagtcggcagcgtggctgccggtggcagatacgacggcctggtaggtatgtttgatccaaagggcaggaaagttccctgcgttgggctttcaatcggagtggagcgcatttttagtattgtggaacagcgactggaagcgctcgaagagaagatcaggacaacagagacacaggtactggtagcctcggctcagaaaaaactcctggaggaacggcttaagctggtttccgagctgtgggacgcaggcattaaggctgagctgctgtacaaaaagaacccgaagctcttgaaccagctacagtactgtgaagaggcgggaattccgttggtggctattattggagaacaagagctgaaagatggcgtcattaaacttcgatctgtaacaagtcgcgaggaggttgatgtaagacgcgaggatctagtggaagagattaagcggagaacagggcaacctctatgcatttgctag

SEQ ID NO: 92522 - DNA, 1410 bp, Artificial Sequence
  derived and/or modified sequence
atggccgagagagccgccctggaggagctggtgaagctgcagggcgagagagtgagaggcctgaagcagcagaaggccagcgccgagctgatcgaggaggaggtggccaagctgctgaagctgaaggcccagctgggccccgacgagagcaagcagaagttcgtgctgaagacccccaaggagaccctgatgggcaagtacggcgaggacagcaagctgatctacgacctgaaggaccagggcggcgagctgctgagcctgagatacgacctgaccgtgcccttcgccagatacctggccatgaacaagctgaccaacatcaagagataccacatcgccaaggtgtacagaagagacaaccccgccatgaccagaggcagatacagagagttctaccagtgcgacttcgacatcgccggcaacttcgaccccatgatccccgacgccgagtgcctgaagatcatgtgcgagatcctgagcagcctgcagatcggcgacttcctggtgaaggtgaacgacagaagaatcctggacggcatgttcgccatctgcggcgtgagcgacagcaagttcagaaccatctgcagcagcgtggacaagctggacaaggtgagctgggaggaggtgaagaacgagatggtgggcgagaagggcctggcccccgaggtggccgacagaatcggcgactacgtgcagcagcacggcggcgtgagcctggtggagcagctgctgcaggaccccaagctgagccagaacaagcaggccctggagggcctgggcgacctgaagctgctgttcgagtacctgaccctgttcggcatcgacgacaagatcagcttcgacctgagcctggccagaggcctggactactacaccggcgtgatctacgaggccgtgctgctgcagacccccgcccaggccggcgaggagcccctgggcgtgggcagcgtggccgccggcggcagatacgacggcctggtgggcatgttcgaccccaagggcagaaaggtgccctgcgtgggcctgagcatcggcgtggagagaatcttcagcatcgtggagcagagactggaggccctggaggagaagatcagaaccaccgagacccaggtgctggtggccagcgcccagaagaagctgctggaggagagactgaagctggtgagcgagctgtgggacgccggcatcaaggccgagctgctgtacaagaagaaccccaagctgctgaaccagctgcagtactgcgaggaggccggcatccccctggtggccatcatcggcgagcaggagctgaaggacggcgtgatcaagctgagaagcgtgaccagcagagaggaggtggacgtgagaagagaggacctggtggaggagatcaagagaagaaccggccagcccctgtgcatctgctag

SEQ ID NO: 92523 - DNA, 945 bp, Artificial Sequence
  derived and/or modified sequence
atgaccagaggcagatacagagagttctaccagtgcgacttcgacatcgccggcaacttcgaccccatgatccccgacgccgagtgcctgaagatcatgtgcgagatcctgagcagcctgcagatcggcgacttcctggtgaaggtgagctgggaggaggtgaagaacgagatggtgggcgagaagggcctggcccccgaggtggccgacagaatcggcgactacgtgcagcagcacggcggcgtgagcctggtggagcagctgctgcaggaccccaagctgagccagaacaagcaggccctggagggcctgggcgacctgaagctgctgttcgagtacctgaccctgttcggcatcgacgacaagatcagcttcgacctgagcctggccagaggcctggactactacaccggcgtgatctacgaggccgtgctgctgcagacccccgcccaggccggcgaggagcccctgggcgtgggcagcgtggccgccggcggcagatacgacggcctggtgggcatgttcgaccccaagggcagaaaggtgccctgcgtgggcctgagcatcggcgtggagagaatcttcagcatcgtggagcagagactggaggccctggaggagaagatcagaaccaccgagacccaggtgctggtggccagcgcccagaagaagctgctggaggagagactgaagctggtgagcgagctgtgggacgccggcatcaaggccgagctgctgtacaagaagaaccccaagctgctgaaccagctgcagtactgcgaggaggccggcatccccctggtggccatcatcggcgagcaggagctgaaggacggcgtgatcaagctgagaagcgtgaccagcagagaggaggtggacgtgagaagagaggacctggtggaggagatcaagagaagaaccggccagcccctgtgcatctgctag

SEQ ID NO: 92524 - protein, 489 aa, Artificial Sequence
  derived and/or modified sequence
MAERAALEELVKLQGERVRGLKQQKASAELIEEEVAKLLKLKAQLGPDESKQKFVLKTPKGTRDYSPRQMAVREKVFDVIIRCFKRHGAEVIDTPVFELKETLMGKYGEDSKLIYDLKDQGGELLSLRYDLTVPFARYLAMNKLTNIKRYHIAKDFDIAGNFDPMIPDAECLKIMCEILSSLQIGDFLVKVNDRRILDGMFAICGVSDSKFRTICSSVDKLDKVSWEEVKNEMVGEKGLAPEVADRIGDYVQQHGGVSLVEQLLQDPKLSQNKQALEGLGDLKLLFEYLTLFGIDDKISFDLSLARGLDYYTGVIYEAVLLQTPAQAGEEPLGVGSVAAGGRYDGLVGMFDPKGRKVPCVGLSIGVERIFSIVEQRLEALEEKIRTTETQVLVASAQKKLLEERLKLVSELWDAGIKAELLYKKNPKLLNQLQYCEEAGIPLVAIIGEQELKDGVIKLRSVTSREEVDVRREDLVEEIKRRTGQPLCIC

SEQ ID NO: 92525 - DNA, 1470 bp, Artificial Sequence
  derived and/or modified sequence
atggccgagcgggcggcactggaagagctggttaagttacagggcgaacgtgtgcggggtctcaagcagcagaaagcttcagcggagctcatcgaggaagaggtggccaaactactcaagttgaaagcccaattgggccccgatgaatcaaagcaaaagtttgtgctgaagacaccgaaggggacccgggattattccccaaggcagatggccgtccgtgagaaggtctttgatgtgataatccgctgctttaaaaggcacggagccgaagtcatagatactcctgtctttgagctgaaggagaccctaatgggaaaatacggggaagattccaaattaatttacgatctgaaggaccagggcggggagctcctgtctctgaggtacgatctgaccgtgcccttcgcccgctacttggcaatgaataagctgaccaatattaaacgatatcacatcgccaaagatttcgatatcgccggcaatttcgatcctatgattcccgacgccgagtgtctcaaaatcatgtgtgaaatcctgtcttctctgcaaatcggggacttcctcgtaaaggtcaacgacaggagaatccttgacggaatgttcgccatctgtggggtcagtgactctaaattcaggaccatctgctcatctgtggacaagctcgacaaagtgagctgggaagaggttaaaaatgagatggtgggggaaaagggactcgcacccgaagtagccgatcggatcggagattacgtacaacaacacggtggcgtctcgttggttgaacagttactgcaggatccaaagttaagtcaaaacaaacaggctctagaggggctgggcgatctcaagctgctatttgagtacctgacactgtttggaattgatgataaaatctcattcgatttgtcactggccagggggcttgactattacaccggcgtgatctacgaggccgttctgctgcagacacccgcacaggccggagaggaaccgcttggcgtgggatccgttgctgccggtggccggtatgacggactcgtggggatgtttgacccaaagggtcggaaagtgccatgtgtgggtctctctatcggagtggagcggatctttagcatcgtcgaacagcgcctggaagccctcgaggagaagatcaggacaactgagactcaagttcttgtggcatctgctcaaaagaaactgctcgaggagcgcctgaaattagtatctgagctctgggatgctgggataaaggcagagctcctgtataaaaaaaaccccaaactactgaatcaactgcagtattgcgaagaggcaggcatccccttagtggctataataggcgaacaggagcttaaagatggggttattaagctccgttctgtaacgtcaagagaagaggtggatgtcagaagagaagacctggtggaggagataaaaagaagaactggtcaaccattatgtatttgctag

SEQ ID NO: 92526 - DNA, 1896 bp, Artificial Sequence
  derived and/or modified sequence
ggaagtcatccttgctgaggctggggcaaccaccgcaggtcgagacagcaggcggctcaagtggacagccgggatggcagagcgtgcggcgctggaggagctggtgaaacttcagggagagcgcgtgcgaggcctcaagcagcagaaggccagcgccgagctgatcgaggaggaggtggcgaaactcctgaaactgaaggcacagctgggtcctgatgaaagcaaacagaaatttgtgctcaaaacccccaagggcacaagagactatagtccccggcagatggcagttcgcgagaaggtgtttgacgtaatcatccgttgcttcaagcgccacggtgcagaagtcattgatacacctgtatttgaactaaaggaaacactgatgggaaagtatggggaagactccaagcttatctatgacctgaaggaccagggcggggagctcctgtcccttcgctatgacctcactgttccttttgctcggtatttggcaatgaataaactgaccaacattaaacgctaccacatagcaaaggattttgacattgctgggaactttgatcccatgatccctgatgcagagtgcctgaagatcatgtgcgagatcctgagttcacttcagataggcgacttcctggtcaaggtaaacgatcgacgcattctagatgggatgtttgctatctgtggtgtttctgacagcaagttccgtaccatctgctcctcagtagacaagctggacaaggtgtcctgggaagaggtgaagaatgagatggtgggagagaagggccttgcacctgaggtggctgaccgcattggggactatgtccagcaacatggtggggtatccctggtggaacagctgctccaggatcctaaactatcccaaaacaagcaggccttggagggcctgggagacctgaagttgctctttgagtacctgaccctatttggcattgatgacaaaatctcctttgacctgagccttgctcgagggctggattactacactggggtgatctatgaggcagtgctgctacagaccccagcccaggcaggggaagagcccctgggtgtgggcagtgtggctgctggaggacgctatgatgggctagtgggcatgttcgaccccaaagggcgcaaggtgccatgtgtggggctcagcattggggtggagcggattttctccatcgtggaacagagactagaggctttggaggagaagatacggaccacggagacacaggtgcttgtggcatctgcacagaagaagctgctagaggaaagactaaagcttgtctcagaactgtgggatgctgggatcaaggctgagctgctgtacaagaagaacccaaagctactgaaccagttacagtactgtgaggaggcaggcatcccactggtggctatcatcggcgagcaggaactcaaggatggggtcatcaagctccgttcagtgacgagcagggaagaggtggatgtccgaagagaagaccttgtggaggaaatcaaaaggagaacaggccagcccctctgcatctgctgaactgaacaaactatcagaggaaaggaagtgggactggcactatttgaggttaagacaaactgcatatgtacttcaattgctttgcacttttccgtttcagcggaagacctgaagagtggtcagaacagagcctttgatttttattatggttattttattgattattactggcaaaaacggccaggtacaacacctttttcatacaaggcccaggaggcttagtccagtctgtgctcctgggctacaaggacccagcctgagatggtcccatctgcagggccccgcaccagttggagcagatgcctccccaccaccaattgccaaaggtccaataaaatgcctcaaccacggag

SEQ ID NO: 92527 - DNA, 1470 bp, Artificial Sequence
  derived and/or modified sequence
atggccgagagagctgccctggaggagctggtgaagctgcagggcgagcgggtgcggggcctgaagcagcagaaggccagcgctgagctgattgaggaggaggtggccaagctgctgaagctgaaggcccagctgggcccagatgagagcaagcagaagtttgtgctgaagacccccaagggcacccgggactacagcccccggcagatggctgtgcgggagaaggtgtttgatgtgatcatccgctgcttcaagagacatggagctgaggtgattgacacccctgtgtttgagctgaaggagaccctgatgggcaagtatggagaggacagcaagctgatctatgacctgaaggaccagggcggggagctgctgagcctgcgctatgacctgactgtgccctttgcccgctacctggccatgaacaagctgaccaacatcaagcgctaccacatcgccaaggactttgatattgctggcaactttgaccccatgatcccagatgctgagtgcctgaagatcatgtgtgagatcctgagcagcctgcagatcggggacttcctggtgaaggtgaatgaccggcgcatcctggatggcatgtttgccatctgtggggtgtctgacagcaagttccgcaccatctgcagctctgtggacaagctggacaaggtgtcctgggaggaggtgaagaatgagatggtgggggagaagggcctggcccctgaggtggccgacagaattggagactatgtgcagcagcacggcggcgtgtccctggtggagcagctgctgcaggaccccaagctgagccagaacaagcaggccctggagggcctgggggacctgaagctgctgtttgagtacctgaccctgtttggaattgatgacaagatcagctttgacctgagcctggcccggggcctggactactacacaggagtcatctatgaggccgtgctgctgcagaccccagcccaggccggggaggagcccctgggcgtgggctctgtggccgccggcggccgctatgatggcctggtgggcatgtttgaccccaagggcaggaaggtgccctgtgtgggcctgagcattggagtggagcgcatcttcagcatcgtggagcagaggctggaggccctggaggagaagatccgcaccacagagacccaggtgctggtggccagcgcccagaagaagctgctggaggagcggctgaagctggtgtctgagctgtgggatgctggcatcaaggccgagctgctgtacaagaagaaccccaagctgctgaaccagctgcagtactgtgaggaggccggcatccccctggtggccatcatcggggagcaggagctgaaggatggagtcatcaagctgcggtctgtgaccagccgggaggaggtggatgtgcggcgggaggacctggtggaggagatcaagagaagaacaggccagcccctgtgcatctgctag

SEQ ID NO: 92528 - DNA, 1470 bp, Artificial Sequence
  derived and/or modified sequence
atggccgagcgggccgccctggaggagctggtgaagctgcagggcgaaagggtgcggggactgaagcaacaaaaagctagtgccgagctgatcgaggaggaggtggccaaacttctcaaactgaaggcccagctcggtcccgatgagtccaaacagaaatttgtgcttaagacacctaaggggacccgggattattcacctcgacagatggctgtgagagaaaaggtgttcgacgtgatcatccggtgctttaagaggcatggggcagaggttattgatacccctgttttcgagctgaaggagacacttatgggcaagtacggggaggacagtaaactgatatacgacctgaaggatcagggtggagaactgttgtcactccggtacgacctgactgtgccgtttgcacgctacctcgccatgaataagctaaccaatatcaaacgttatcacatcgccaaggatttcgacatcgctggcaattttgaccccatgatacctgatgctgaatgtctgaagattatgtgtgagatcctgtccagccttcagatcggtgactttctagtgaaagttaatgacagacggatcctagacgggatgttcgcaatttgcggtgtctccgactcaaaatttagaaccatttgctcgtcagtggacaagctagacaaagtgtcctgggaggaggtgaagaatgagatggtgggagagaaagggctggcccctgaggtggctgaccggatcggcgactatgtgcagcagcacggtggtgtgtccctggtcgagcagctcctccaagatcccaaattgtcacagaacaaacaggccctggagggactgggggacctgaagctgctgttcgaatatctcaccttattcggaatagacgataagatctcttttgacctgagcctggcgagggggctggattactacacaggagtcatctatgaggcagttcttctgcagactccggcccaggccggggaagaacccctgggcgtaggatcagtggcggcaggtggtcgctatgacggcctagtgggtatgttcgaccccaaggggcgtaaggtgccatgtgtgggcctttctatcggcgttgaacgtattttttccattgttgagcagagactggaggctctggaagagaagatacgcaccacagagactcaggtgctggtcgcttccgcccagaaaaaactactggaagaaaggctcaaattggtgtcagaactttgggatgcgggcattaaggcagaattgttgtacaaaaaaaacccgaaattgctgaaccagctgcaatattgcgaggaggcaggtataccgcttgttgccataataggggagcaggagttaaaggatggagtgatcaaactcaggtctgtgacctccagagaagaagtggacgttcgtagggaagaccttgttgaggaaattaagcgccgaaccggccagccactgtgcatctgttag

SEQ ID NO: 92529 - DNA, 1470 bp, Artificial Sequence
  derived and/or modified sequence
atggctgaacgggctgcactcgaagagctggttaaattacagggtgaacgcgtgcgcggattgaagcaacagaaggctagcgccgaactgatcgaggaagaggtggcaaagctgctcaagctgaaggctcaactgggtcctgacgagtcaaagcagaagtttgtgttgaaaacccccaagggcacacgggactactcgccacggcagatggctgtcagggagaaggtgttcgatgtcattatcaggtgtttcaaaagacacggcgctgaagtcatcgataccccagtctttgagctcaaggaaaccttgatgggaaagtatggggaggactctaagttgatttacgatcttaaggaccagggtggagagctcctgagcctgcgctacgacctgaccgtgccattcgccaggtacctggctatgaataagctgaccaacattaagcgatatcatatcgcgaaggactttgatattgccggtaatttcgaccccatgatccccgacgccgagtgcctaaaaatcatgtgtgagatcctcagtagtcttcaaatcggtgacttcctagtgaaggtgaacgacaggcggatcctggacggcatgttcgctatttgcggtgtcagcgactcaaaatttaggaccatatgttcgtcagtggacaaactggataaagtgtcttgggaggaggtcaagaatgagatggtcggggagaaaggtctcgctcctgaggttgctgacagaattggcgattatgtccagcagcacggtggagtgtccttggtagagcagctactgcaggatcctaaattgagtcagaataagcaggccctggagggcctgggcgatctcaagctgctgtttgaatacttaaccctgttcggcatcgacgacaagattagctttgacctttctttggccagaggcctcgactactatacgggagtgatttacgaggccgtgctactgcagaccccagcccaggctggggaggaaccactgggcgttggctctgtggccgcaggcggtcgctacgatggtctggtaggtatgttcgaccctaagggaagaaaggtaccctgcgtcggcctgagtattggggtggagcggattttttcaattgtggaacagcggctggaggctctagaagaaaaaattagaactaccgagacccaggtgcttgttgcctccgctcaaaaaaagctcttggaggagcggctgaaactcgtgagcgaactttgggacgcgggaatcaaggcagaactgctgtataagaagaacccaaaactcctgaaccagctccaatattgtgaggaagccggtattcccctcgtcgcaatcatcggcgagcaggaactgaaggatggggtgatcaagctgaggtctgttacctctagggaggaggtcgacgtccgcagggaggacctcgtcgaggagatcaaacgacgaacaggtcaacccctgtgcatttgctag

SEQ ID NO: 92530 - DNA, 1470 bp, Artificial Sequence
  derived and/or modified sequence
atggccgagagagccgccctggaggagctggtgaagctgcagggcgagagagtgagaggcctgaagcagcagaaggccagcgccgagctgatcgaggaggaggtggccaagctgctgaagctgaaggcccagctgggccccgacgagagcaagcagaagttcgtgctgaagacccccaagggcaccagagactacagccccagacagatggccgtgagagagaaggtgttcgacgtgatcatcagatgcttcaagagacacggcgccgaggtgatcgacacccccgtgttcgagctgaaggagaccctgatgggcaagtacggcgaggacagcaagctgatctacgacctgaaggaccagggcggcgagctgctgagcctgagatacgacctgaccgtgcccttcgccagatacctggccatgaacaagctgaccaacatcaagagataccacatcgccaaggacttcgacatcgccggcaacttcgaccccatgatccccgacgccgagtgcctgaagatcatgtgcgagatcctgagcagcctgcagatcggcgacttcctggtgaaggtgaacgacagaagaatcctggacggcatgttcgccatctgcggcgtgagcgacagcaagttcagaaccatctgcagcagcgtggacaagctggacaaggtgagctgggaggaggtgaagaacgagatggtgggcgagaagggcctggcccccgaggtggccgacagaatcggcgactacgtgcagcagcacggcggcgtgagcctggtggagcagctgctgcaggaccccaagctgagccagaacaagcaggccctggagggcctgggcgacctgaagctgctgttcgagtacctgaccctgttcggcatcgacgacaagatcagcttcgacctgagcctggccagaggcctggactactacaccggcgtgatctacgaggccgtgctgctgcagacccccgcccaggccggcgaggagcccctgggcgtgggcagcgtggccgccggcggcagatacgacggcctggtgggcatgttcgaccccaagggcagaaaggtgccctgcgtgggcctgagcatcggcgtggagagaatcttcagcatcgtggagcagagactggaggccctggaggagaagatcagaaccaccgagacccaggtgctggtggccagcgcccagaagaagctgctggaggagagactgaagctggtgagcgagctgtgggacgccggcatcaaggccgagctgctgtacaagaagaaccccaagctgctgaaccagctgcagtactgcgaggaggccggcatccccctggtggccatcatcggcgagcaggagctgaaggacggcgtgatcaagctgagaagcgtgaccagcagagaggaggtggacgtgagaagagaggacctggtggaggagatcaagagaagaaccggccagcccctgtgcatctgctag

SEQ ID NO: 92531 - protein, 449 aa, Artificial Sequence
  derived and/or modified sequence
MAERAALEELVKLQGERVRGLKQQKASAELIEEEVAKLLKLKAQLGPDESKQKFVLKTPKETLMGKYGEDSKLIYDLKDQGGELLSLRYDLTVPFARYLAMNKLTNIKRYHIAKDFDIAGNFDPMIPDAECLKIMCEILSSLQIGDFLVKVNDRRILDGMFAICGVSDSKFRTICSSVDKLDKVSWEEVKNEMVGEKGLAPEVADRIGDYVQQHGGVSLVEQLLQDPKLSQNKQALEGLGDLKLLFEYLTLFGIDDKISFDLSLARGLDYYTGVIYEAVLLQTPAQAGEEPLGVGSVAAGGRYDGLVGMFDPKGRKVPCVGLSIGVERIFSIVEQRLEALEEKIRTTETQVLVASAQKKLLEERLKLVSELWDAGIKAELLYKKNPKLLNQLQYCEEAGIPLVAIIGEQELKDGVIKLRSVTSREEVDVRREDLVEEIKRRTGQPLCIC

SEQ ID NO: 92532 - DNA, 1350 bp, Artificial Sequence
  derived and/or modified sequence
atggccgaacgcgctgcactggaggaactggtgaagctgcagggggagcgtgtgcgggggctgaagcagcagaaggcttcagctgagttgatcgaagaagaagtggcgaaactgctgaaactcaaggcacagctgggccccgacgagagcaagcaaaaattcgtgctcaagactccgaaggaaacgctcatggggaaatacggagaagactccaagcttatttacgacctcaaagatcaggggggtgagctgctgagtttgagatacgacctcacggtgccttttgcaagatatctcgcaatgaataagctgacaaatattaagaggtaccatatagccaaagattttgacattgctggtaacttcgacccgatgatccctgacgctgagtgcctgaaaatcatgtgcgagatactgtcctcactgcagatcggtgattttctagttaaagtaaacgatagaaggatcctggacggaatgttcgccatttgtggggtgtcagacagcaaatttcgtacgatttgctcctccgtggacaaactcgacaaggtaagttgggaagaagtgaaaaacgagatggtaggtgaaaaaggtttagctcccgaggttgcagatcgaatcggtgactatgttcaacagcacgggggagtttcgcttgtagaacaactgctgcaggatcccaagttgagccagaataagcaagccttggaaggacttggagatctgaaattattattcgaatacctgacactgtttggcatcgatgacaaaataagtttcgacctgagcttagcgagaggcttggattactatactggtgtcatttatgaggctgtattgctacagacacctgctcaggccggggaagaaccgctaggagtgggctctgtggcagctggcgggaggtatgatggcctcgtgggcatgtttgaccctaagggacgcaaggtgccgtgcgtcgggttatccattggcgtggagaggattttctctatagtcgaacagagattagaagctctcgaagagaaaattaggacaaccgaaacccaagtgctggtcgcctccgctcaaaagaaactgctcgaagaacgcctgaagcttgtgagcgagctgtgggatgccggaataaaggcagagcttctatataagaaaaatccaaaattactcaaccagttgcagtactgcgaggaggccggaatccccctggtggcaataattggggagcaggagctaaaagatggcgtgataaagctgagaagtgtgaccagtcgggaagaggtggatgtgaggcgtgaggaccttgttgaggaaatcaaaagacgcacaggccaacctttgtgtatctgttag

SEQ ID NO: 92533 - DNA, 1780 bp, Artificial Sequence
  derived and/or modified sequence
atagccggaagtcatccttgctgaggctggggcaaccaccgcaggtcgagacagcaggcggctcaagtggacagccgggatggcagagcgtgcggcgctggaggagctggtgaaacttcagggagagcgcgtgcgaggcctcaagcagcagaaggccagcgccgagctgatcgaggaggaggtggcgaaactcctgaaactgaaggcacagctgggtcctgatgaaagcaaacagaaatttgtgctcaaaacccccaaggaaacactgatgggaaagtatggggaagactccaagcttatctatgacctgaaggaccagggcggggagctcctgtcccttcgctatgacctcactgttccttttgctcggtatttggcaatgaataaactgaccaacattaaacgctaccacatagcaaaggattttgacattgctgggaactttgatcccatgatccctgatgcagagtgcctgaagatcatgtgcgagatcctgagttcacttcagataggcgacttcctggtcaaggtaaacgatcgacgcattctagatgggatgtttgctatctgtggtgtttctgacagcaagttccgtaccatctgctcctcagtagacaagctggacaaggtgtcctgggaagaggtgaagaatgagatggtgggagagaagggccttgcacctgaggtggctgaccgcattggggactatgtccagcaacatggtggggtatccctggtggaacagctgctccaggatcctaaactatcccaaaacaagcaggccttggagggcctgggagacctgaagttgctctttgagtacctgaccctatttggcattgatgacaaaatctcctttgacctgagccttgctcgagggctggattactacactggggtgatctatgaggcagtgctgctacagaccccagcccaggcaggggaagagcccctgggtgtgggcagtgtggctgctggaggacgctatgatgggctagtgggcatgttcgaccccaaagggcgcaaggtgccatgtgtggggctcagcattggggtggagcggattttctccatcgtggaacagagactagaggctttggaggagaagatacggaccacggagacacaggtgcttgtggcatctgcacagaagaagctgctagaggaaagactaaagcttgtctcagaactgtgggatgctgggatcaaggctgagctgctgtacaagaagaacccaaagctactgaaccagttacagtactgtgaggaggcaggcatcccactggtggctatcatcggcgagcaggaactcaaggatggggtcatcaagctccgttcagtgacgagcagggaagaggtggatgtccgaagagaagaccttgtggaggaaatcaaaaggagaacaggccagcccctctgcatctgctgaactgaacaaactatcagaggaaaggaagtgggactggcactatttgaggttaagacaaactgcatatgtacttcaattgctttgcacttttccgtttcagcggaagacctgaagagtggtcagaacagagcctttgatttttattatggttattttattgattattactggcaaaaacggccaggtacaacacctttttcatacaaggcccaggaggcttagtccagtctgtgctcctgggctacaaggacccagcctgagatggtcccatctgcagggccccgcaccagttggagcagatgcctccccaccaccaattgccaaaggtccaataaaatgcctcaaccacgg

SEQ ID NO: 92534 - DNA, 1350 bp, Artificial Sequence
  derived and/or modified sequence
atggccgagagagctgccctggaggagctggtgaagctgcagggcgagcgggtgcggggcctgaagcagcagaaggccagcgctgagctgattgaggaggaggtggccaagctgctgaagctgaaggcccagctgggcccagatgagagcaagcagaagtttgtgctgaagacccccaaggagaccctgatgggcaagtatggagaggacagcaagctgatctatgacctgaaggaccagggcggggagctgctgagcctgcgctatgacctgactgtgccctttgcccgctacctggccatgaacaagctgaccaacatcaagcgctaccacatcgccaaggactttgatattgctggcaactttgaccccatgatcccagatgctgagtgcctgaagatcatgtgtgagatcctgagcagcctgcagatcggggacttcctggtgaaggtgaatgaccggcgcatcctggatggcatgtttgccatctgtggggtgtctgacagcaagttccgcaccatctgcagctctgtggacaagctggacaaggtgtcctgggaggaggtgaagaatgagatggtgggggagaagggcctggcccctgaggtggccgacagaattggagactatgtgcagcagcacggcggcgtgtccctggtggagcagctgctgcaggaccccaagctgagccagaacaagcaggccctggagggcctgggggacctgaagctgctgtttgagtacctgaccctgtttggaattgatgacaagatcagctttgacctgagcctggcccggggcctggactactacacaggagtcatctatgaggccgtgctgctgcagaccccagcccaggccggggaggagcccctgggcgtgggctctgtggccgccggcggccgctatgatggcctggtgggcatgtttgaccccaagggcaggaaggtgccctgtgtgggcctgagcattggagtggagcgcatcttcagcatcgtggagcagaggctggaggccctggaggagaagatccgcaccacagagacccaggtgctggtggccagcgcccagaagaagctgctggaggagcggctgaagctggtgtctgagctgtgggatgctggcatcaaggccgagctgctgtacaagaagaaccccaagctgctgaaccagctgcagtactgtgaggaggccggcatccccctggtggccatcatcggggagcaggagctgaaggatggagtcatcaagctgcggtctgtgaccagccgggaggaggtggatgtgcggcgggaggacctggtggaggagatcaagagaagaacaggccagcccctgtgcatctgctag

SEQ ID NO: 92535 - DNA, 1350 bp, Artificial Sequence
  derived and/or modified sequence
atggccgagcgggccgccctggaggagctggtgaagctgcagggcgaacgcgtgcgcggactcaaacaacagaaagcttcagccgagttaatcgaggaagaggtggccaaactcttaaaactgaaggcccaattgggacctgatgaaagcaagcagaaatttgtcctgaagacaccaaaagagaccctgatgggcaagtatggggaggatagcaaactcatttatgatttaaaagatcaaggaggggagctgctttcccttcgatatgatctgactgtgccctttgctaggtatctggccatgaacaagctgactaacattaaaaggtaccatatagcgaaggattttgacatcgccgggaatttcgatcccatgattcctgacgcagaatgcctgaagattatgtgtgaaatcctctctagtctccaaatcggggactttcttgtgaaagtgaacgatagacgtatcttggatgggatgttcgctatttgtggagtatcggacagtaagtttaggaccatctgcagcagcgtggataagctggataaggtgtcctgggaggaggtaaaaaatgagatggttggggagaaaggactcgcccccgaagtggctgacagaattggtgactacgtccaacagcacggaggagtgagcctggtagaacagcttctgcaggatccaaaactctcacaaaataagcaggctctagaaggtctaggagatcttaagctgctctttgaatatctgaccctgttcgggattgacgacaagataagcttcgaccttagcttagcgcgcggactggattactacacaggagtgatttatgaggccgttttgcttcagacacccgcccaggccggcgaggagcctctgggcgtcggcagcgtggccgctggggggcgctacgacggcctggttggaatgttcgatcctaaagggaggaaagtcccctgcgtggggctgagcattggtgtggaaagaatttttagtatcgtcgagcagagactggaagccttggaggagaagattcgcacaactgaaacacaagtcctcgtggcgagcgcccaaaagaaactgttggaggagcgcctaaaactggtgtctgaactttgggatgccggtattaaagcagagttgttgtacaaaaaaaaccctaagcttctgaatcagctccagtactgcgaagaggcggggatccctctggtggccatcatcggcgaacaagaacttaaagacggggttatcaagctgaggagtgtgaccagccgcgaggaggtggatgtccgtcgggaggacctggttgaggagataaagaggcgcacaggacaaccactgtgcatctgctag

SEQ ID NO: 92536 - DNA, 1350 bp, Artificial Sequence
  derived and/or modified sequence
atggcagagcgagcagctctggaagaactggttaagctgcaaggagagagggtacgcggacttaaacaacagaaggcttcggccgagctgattgaggaggaggtggctaagttgctgaaacttaaagcacaactaggcccagacgagagtaagcaaaaattcgtcttgaaaacccctaaagaaaccctcatggggaaatacggggaagatagcaaactaatctatgacctgaaggatcagggaggcgagttgctgtccctcagatacgacctaaccgtcccattcgccagatatcttgccatgaataagttgacaaacataaagcggtaccacatagctaaggatttcgacatagctggcaatttcgacccaatgattcccgatgccgaatgcctgaagatcatgtgcgaaatactgagctctctccagatcggtgactttttagtgaaggtcaatgacaggcggatactggatgggatgttcgccatttgcggagtaagcgattcaaaattccgcacaatttgcagctcagttgataaactggataaggtgagttgggaagaggttaagaatgaaatggtgggagagaaagggctggctcccgaagttgccgaccggatcggagactacgtacagcaacacgggggtgtgtcactggtcgaacagctacttcaggatcctaagctgtcccaaaacaaacaggctttagagggcctgggagaccttaaactgctatttgaatatcttaccctgttcggcattgacgacaaaatctcattcgatctttccctcgcacgcggtcttgactattataccggtgtgatttacgaagcagttctgctccaaacccctgcccaggccggtgaggagccactgggcgtgggaagcgttgcagcgggaggacgctacgatggacttgtgggaatgtttgatcctaaagggagaaaagtcccttgcgtcgggctctccataggggtggaaagaattttttccattgtggagcagcggctggaggcccttgaggagaaaatccgaacaactgagactcaagtgctcgtcgcgtcggcacaaaaaaaactgcttgaggagcgcctgaagctagtgagcgagctctgggatgcagggattaaagcagaactgctatataaaaaaaacccaaagctcctcaaccagcttcagtattgcgaagaggccggaatacccctggtcgcaattatcggcgagcaggagctgaaagacggagtgatcaagttgagatccgtcacttcccgagaggaagtggatgttcgcagagaagatctcgttgaagagattaagaggagaaccggacagcccctgtgtatttgttag

SEQ ID NO: 92537 - DNA, 1350 bp, Artificial Sequence
  derived and/or modified sequence
atggccgagagagccgccctggaggagctggtgaagctgcagggcgagagagtgagaggcctgaagcagcagaaggccagcgccgagctgatcgaggaggaggtggccaagctgctgaagctgaaggcccagctgggccccgacgagagcaagcagaagttcgtgctgaagacccccaaggagaccctgatgggcaagtacggcgaggacagcaagctgatctacgacctgaaggaccagggcggcgagctgctgagcctgagatacgacctgaccgtgcccttcgccagatacctggccatgaacaagctgaccaacatcaagagataccacatcgccaaggacttcgacatcgccggcaacttcgaccccatgatccccgacgccgagtgcctgaagatcatgtgcgagatcctgagcagcctgcagatcggcgacttcctggtgaaggtgaacgacagaagaatcctggacggcatgttcgccatctgcggcgtgagcgacagcaagttcagaaccatctgcagcagcgtggacaagctggacaaggtgagctgggaggaggtgaagaacgagatggtgggcgagaagggcctggcccccgaggtggccgacagaatcggcgactacgtgcagcagcacggcggcgtgagcctggtggagcagctgctgcaggaccccaagctgagccagaacaagcaggccctggagggcctgggcgacctgaagctgctgttcgagtacctgaccctgttcggcatcgacgacaagatcagcttcgacctgagcctggccagaggcctggactactacaccggcgtgatctacgaggccgtgctgctgcagacccccgcccaggccggcgaggagcccctgggcgtgggcagcgtggccgccggcggcagatacgacggcctggtgggcatgttcgaccccaagggcagaaaggtgccctgcgtgggcctgagcatcggcgtggagagaatcttcagcatcgtggagcagagactggaggccctggaggagaagatcagaaccaccgagacccaggtgctggtggccagcgcccagaagaagctgctggaggagagactgaagctggtgagcgagctgtgggacgccggcatcaaggccgagctgctgtacaagaagaaccccaagctgctgaaccagctgcagtactgcgaggaggccggcatccccctggtggccatcatcggcgagcaggagctgaaggacggcgtgatcaagctgagaagcgtgaccagcagagaggaggtggacgtgagaagagaggacctggtggaggagatcaagagaagaaccggccagcccctgtgcatctgctag

SEQ ID NO: 92538 - protein, 802 aa, Artificial Sequence
  derived and/or modified sequence
MPRIMIKGGVWRNTEDEILKAAVMKYGKNQWSRIASLLHRKSAKQCKARWYEWLDPSIKKTEWSREEEEKLLHLAKLMPTQWRTIAPIIGRTAAQCLEHYEFLLDKAAQRDNEEETTDDPRKLKPGEIDPNPETKPARPDPIDMDEDELEMLSEARARLANTQGKKAKRKAREKQLEEARRLAALQKRRELRAAGIEIQKKRKRKRGVDYNAEIPFEKKPALGFYDTSEENYQALDADFRKLRQQDLDGELRSEKEGRDRKKDKQHLKRKKESDLPSAILQTSGVSEFTKKRSKLVLPAPQISDAELQEVVKVGQASEIARQTAEESGITNSASSTLLSEYNVTNNSVALRTPRTPASQDRILQEAQNLMALTNVDTPLKGGLNTPLHESDFSGVTPQRQVVQTPNTVLSTPFRTPSNGAEGLTPRSGTTPKPVINSTPGRTPLRDKLNINPEDGMADYSDPSYVKQMERESREHLRLGLLGLPAPKNDFEIVLPENAEKELEEREIDDTYIEDAADVDARKQAIRDAERVKEMKRMHKAVQKDLPRPSEVNETILRPLNVEPPLTDLQKSEELIKKEMITMLHYDLLHHPYEPSGNKKGKTVGFGTNNSEHITYLEHNPYEKFSKEELKKAQDVLVQEMEVVKQGMSHGELSSEAYNQVWEECYSQVLYLPGQSRYTRANLASKKDRIESLEKRLEINRGHMTTEAKRAAKMEKKMKILLGGYQSRAMGLMKQLNDLWDQIEQAHLELRTFEELKKHEDSAIPRRLECLKEDVQRQQEREKELQHRYADLLLEKETLKSKF

SEQ ID NO: 92539 - protein, 791 aa, Artificial Sequence
  derived and/or modified sequence
MKAHPKEMVPLMGKRVAAPSGNPAILPEKRPAEITPTKKSAHFFLEIEGFEPNPTVAKTSPPVFSKPMDSNIRQCISGNCDDMDSPQSPQDDVTETPSNPNSPSAQLAKEEQRRKKRRLKKRIFAAVSEGCVEELVELLVELQELCRRRHDEDVPDFLMHKLTASDTGKTCLMKALLNINPNTKEIVRILLAFAEENDILGRFINAEYTEEAYEGQTALNIAIERRQGDIAALLIAAGADVNAHAKGAFFNPKYQHEGFYFGETPLALAACTNQPEIVQLLMEHEQTDITSRDSRGNNILHALVTVAEDFKTQNDFVKRMYDMILLRSGNWELETTRNNDGLTPLQLAAKMGKAEILKYILSREIKEKRLRSLSRKFTDWAYGPVSSSLYDLTNVDTTTDNSVLEITVYNTNIDNRHEMLTLEPLHTLLHMKWKKFAKHMFFLSFCFYFFYNITLTLVSYYRPREEEAIPHPLALTHKMGWLQLLGRMFVLIWAMCISVKEGIAIFLLRPSDLQSILSDAWFHFVFFIQAVLVILSVFLYLFAYKEYLACLVLAMALGWANMLYYTRGFQSMGMYSVMIQKVILHDVLKFLFVYIVFLLGFGVALASLIEKCPKDNKDCSSYGSFSDAVLELFKLTIGLGDLNIQQNSKYPILFLFLLITYVILTFVLLLNMLIALMGETVENVSKESERIWRLQRARTILEFEKMLPEWLRSRFRMGELCKVAEDDFRLCLRINEVKWTEWKTHVSFLNEDPGPVRRTADFNKIQDSSRNNSKTTLNAFEEVEEFPETSV

SEQ ID NO: 92540 - protein, 775 aa, Artificial Sequence
  derived and/or modified sequence
MSHHTWPSPALNLDFATYLLRDLGAHFFLEIEGFEPNPTVAKTSPPVFSKPMDSNIRQCISGNCDDMDSPQSPQDDVTETPSNPNSPSAQLAKEEQRRKKRRLKKRIFAAVSEGCVEELVELLVELQELCRRRHDEDVPDFLMHKLTASDTGKTCLMKALLNINPNTKEIVRILLAFAEENDILGRFINAEYTEEAYEGQTALNIAIERRQGDIAALLIAAGADVNAHAKGAFFNPKYQHEGFYFGETPLALAACTNQPEIVQLLMEHEQTDITSRDSRGNNILHALVTVAEDFKTQNDFVKRMYDMILLRSGNWELETTRNNDGLTPLQLAAKMGKAEILKYILSREIKEKRLRSLSRKFTDWAYGPVSSSLYDLTNVDTTTDNSVLEITVYNTNIDNRHEMLTLEPLHTLLHMKWKKFAKHMFFLSFCFYFFYNITLTLVSYYRPREEEAIPHPLALTHKMGWLQLLGRMFVLIWAMCISVKEGIAIFLLRPSDLQSILSDAWFHFVFFIQAVLVILSVFLYLFAYKEYLACLVLAMALGWANMLYYTRGFQSMGMYSVMIQKVILHDVLKFLFVYIVFLLGFGVALASLIEKCPKDNKDCSSYGSFSDAVLELFKLTIGLGDLNIQQNSKYPILFLFLLITYVILTFVLLLNMLIALMGETVENVSKESERIWRLQRARTILEFEKMLPEWLRSRFRMGELCKVAEDDFRLCLRINEVKWTEWKTHVSFLNEDPGPVRRTADFNKIQDSSRNNSKTTLNAFEEVEEFPETSV

SEQ ID NO: 92541 - DNA, 2376 bp, Artificial Sequence
  derived and/or modified sequence
atgaaggcccaccccaaggagatggtgcccctgatgggcaagagagtggccgcccccagcggcaaccccgccatcctgcccgagaagagacccgccgagatcacccccaccaagaagagcgcccacttcttcctggagatcgagggcttcgagcccaaccccaccgtggccaagaccagcccccccgtgttcagcaagcccatggacagcaacatcagacagtgcatcagcggcaactgcgacgacatggacagcccccagagcccccaggacgacgtgaccgagacccccagcaaccccaacagccccagcgcccagctggccaaggaggagcagagaagaaagaagagaagactgaagaagagaatcttcgccgccgtgagcgagggctgcgtggaggagctggtggagctgctggtggagctgcaggagctgtgcagaagaagacacgacgaggacgtgcccgacttcctgatgcacaagctgaccgccagcgacaccggcaagacctgcctgatgaaggccctgctgaacatcaaccccaacaccaaggagatcgtgagaatcctgctggccttcgccgaggagaacgacatcctgggcagattcatcaacgccgagtacaccgaggaggcctacgagggccagaccgccctgaacatcgccatcgagagaagacagggcgacatcgccgccctgctgatcgccgccggcgccgacgtgaacgcccacgccaagggcgccttcttcaaccccaagtaccagcacgagggcttctacttcggcgagacccccctggccctggccgcctgcaccaaccagcccgagatcgtgcagctgctgatggagcacgagcagaccgacatcaccagcagagacagcagaggcaacaacatcctgcacgccctggtgaccgtggccgaggacttcaagacccagaacgacttcgtgaagagaatgtacgacatgatcctgctgagaagcggcaactgggagctggagaccaccagaaacaacgacggcctgacccccctgcagctggccgccaagatgggcaaggccgagatcctgaagtacatcctgagcagagagatcaaggagaagagactgagaagcctgagcagaaagttcaccgactgggcctacggccccgtgagcagcagcctgtacgacctgaccaacgtggacaccaccaccgacaacagcgtgctggagatcaccgtgtacaacaccaacatcgacaacagacacgagatgctgaccctggagcccctgcacaccctgctgcacatgaagtggaagaagttcgccaagcacatgttcttcctgagcttctgcttctacttcttctacaacatcaccctgaccctggtgagctactacagacccagagaggaggaggccatcccccaccccctggccctgacccacaagatgggctggctgcagctgctgggcagaatgttcgtgctgatctgggccatgtgcatcagcgtgaaggagggcatcgccatcttcctgctgagacccagcgacctgcagagcatcctgagcgacgcctggttccacttcgtgttcttcatccaggccgtgctggtgatcctgagcgtgttcctgtacctgttcgcctacaaggagtacctggcctgcctggtgctggccatggccctgggctgggccaacatgctgtactacaccagaggcttccagagcatgggcatgtacagcgtgatgatccagaaggtgatcctgcacgacgtgctgaagttcctgttcgtgtacatcgtgttcctgctgggcttcggcgtggccctggccagcctgatcgagaagtgccccaaggacaacaaggactgcagcagctacggcagcttcagcgacgccgtgctggagctgttcaagctgaccatcggcctgggcgacctgaacatccagcagaacagcaagtaccccatcctgttcctgttcctgctgatcacctacgtgatcctgaccttcgtgctgctgctgaacatgctgatcgccctgatgggcgagaccgtggagaacgtgagcaaggagagcgagagaatctggagactgcagagagccagaaccatcctggagttcgagaagatgctgcccgagtggctgagaagcagattcagaatgggcgagctgtgcaaggtggccgaggacgacttcagactgtgcctgagaatcaacgaggtgaagtggaccgagtggaagacccacgtgagcttcctgaacgaggaccccggccccgtgagaagaaccgccgacttcaacaagatccaggacagcagcagaaacaacagcaagaccaccctgaacgccttcgaggaggtggaggagttccccgagaccagcgtgtag

SEQ ID NO: 92542 - DNA, 2328 bp, Artificial Sequence
  derived and/or modified sequence
atgagccaccacacctggcccagccccgccctgaacctggacttcgccacctacctgctgagagacctgggcgcccacttcttcctggagatcgagggcttcgagcccaaccccaccgtggccaagaccagcccccccgtgttcagcaagcccatggacagcaacatcagacagtgcatcagcggcaactgcgacgacatggacagcccccagagcccccaggacgacgtgaccgagacccccagcaaccccaacagccccagcgcccagctggccaaggaggagcagagaagaaagaagagaagactgaagaagagaatcttcgccgccgtgagcgagggctgcgtggaggagctggtggagctgctggtggagctgcaggagctgtgcagaagaagacacgacgaggacgtgcccgacttcctgatgcacaagctgaccgccagcgacaccggcaagacctgcctgatgaaggccctgctgaacatcaaccccaacaccaaggagatcgtgagaatcctgctggccttcgccgaggagaacgacatcctgggcagattcatcaacgccgagtacaccgaggaggcctacgagggccagaccgccctgaacatcgccatcgagagaagacagggcgacatcgccgccctgctgatcgccgccggcgccgacgtgaacgcccacgccaagggcgccttcttcaaccccaagtaccagcacgagggcttctacttcggcgagacccccctggccctggccgcctgcaccaaccagcccgagatcgtgcagctgctgatggagcacgagcagaccgacatcaccagcagagacagcagaggcaacaacatcctgcacgccctggtgaccgtggccgaggacttcaagacccagaacgacttcgtgaagagaatgtacgacatgatcctgctgagaagcggcaactgggagctggagaccaccagaaacaacgacggcctgacccccctgcagctggccgccaagatgggcaaggccgagatcctgaagtacatcctgagcagagagatcaaggagaagagactgagaagcctgagcagaaagttcaccgactgggcctacggccccgtgagcagcagcctgtacgacctgaccaacgtggacaccaccaccgacaacagcgtgctggagatcaccgtgtacaacaccaacatcgacaacagacacgagatgctgaccctggagcccctgcacaccctgctgcacatgaagtggaagaagttcgccaagcacatgttcttcctgagcttctgcttctacttcttctacaacatcaccctgaccctggtgagctactacagacccagagaggaggaggccatcccccaccccctggccctgacccacaagatgggctggctgcagctgctgggcagaatgttcgtgctgatctgggccatgtgcatcagcgtgaaggagggcatcgccatcttcctgctgagacccagcgacctgcagagcatcctgagcgacgcctggttccacttcgtgttcttcatccaggccgtgctggtgatcctgagcgtgttcctgtacctgttcgcctacaaggagtacctggcctgcctggtgctggccatggccctgggctgggccaacatgctgtactacaccagaggcttccagagcatgggcatgtacagcgtgatgatccagaaggtgatcctgcacgacgtgctgaagttcctgttcgtgtacatcgtgttcctgctgggcttcggcgtggccctggccagcctgatcgagaagtgccccaaggacaacaaggactgcagcagctacggcagcttcagcgacgccgtgctggagctgttcaagctgaccatcggcctgggcgacctgaacatccagcagaacagcaagtaccccatcctgttcctgttcctgctgatcacctacgtgatcctgaccttcgtgctgctgctgaacatgctgatcgccctgatgggcgagaccgtggagaacgtgagcaaggagagcgagagaatctggagactgcagagagccagaaccatcctggagttcgagaagatgctgcccgagtggctgagaagcagattcagaatgggcgagctgtgcaaggtggccgaggacgacttcagactgtgcctgagaatcaacgaggtgaagtggaccgagtggaagacccacgtgagcttcctgaacgaggaccccggccccgtgagaagaaccgccgacttcaacaagatccaggacagcagcagaaacaacagcaagaccaccctgaacgccttcgaggaggtggaggagttccccgagaccagcgtgtag

SEQ ID NO: 92543 - DNA, 2376 bp, Artificial Sequence
  derived and/or modified sequence
atgaaggcacatccaaaggagatggtgcctctgatggggaagagggtagctgccccgtcaggcaaccctgccatcttgccagagaagcgccctgctgaaatcacacccaccaagaagtctgcacacttctttctggagatcgaaggcttcgaacccaaccctactgtcgctaagacaagcccccccgtgttcagcaagccaatggactccaacatacggcaatgcatttcaggtaattgcgacgacatggacagtcctcaatctccacaggacgatgtgaccgaaaccccgtcaaatcctaattctccgtctgcccagctcgcgaaggaggaacagagaagaaagaagcgacggttgaagaaacgtattttcgccgcggtgagtgagggatgtgtggaggagctggttgaattactagtggagttgcaggaactgtgtaggagaaggcacgacgaggatgtgccagacttccttatgcacaagctcacagcttcagacacagggaagacatgcctcatgaaggccttgctgaacatcaacccaaacaccaaagaaatcgtacggattctactggccttcgctgaagaaaacgatatcctgggcagattcataaatgccgagtataccgaggaagcttacgaagggcagacagctctgaacattgctatcgaacgacgccagggcgacatagccgccctgctgatagccgcgggtgccgacgtgaacgcccatgccaagggggcctttttcaacccaaaatatcagcacgaggggttctacttcggggaaacaccactagccttggcagcatgtacgaaccagcctgagatcgtacagctgcttatggaacatgagcagacagatatcacatcgagagacagccgtgggaataacattctgcacgctttggttaccgtggcggaggacttcaaaacacaaaacgatttcgtcaagcggatgtacgacatgatcctgcttcggtcggggaattgggaactggaaactacccgcaacaacgacggcctcactcccttgcagctggcagccaagatggggaaggcagaaattctcaaatacatactatcaagggagatcaaggaaaaacgcttgagaagcttgtctcggaaattcacagattgggcctacggccctgtgtcttccagtctgtacgatctgaccaatgtcgatactactaccgacaactccgttctggaaatcactgtgtataacacaaacatcgataaccggcatgagatgctgactctggaacctttacatacgctgctgcacatgaagtggaaaaagttcgccaagcacatgttttttctgtctttctgcttttactttttttacaacattaccctgaccctcgtgtcttactatagacctcgcgaggaggaagctattccccaccctctggccttgactcacaaaatgggatggctacaacttctaggtaggatgtttgttctgatctgggccatgtgcattagtgtgaaggagggcatagctatcttcttgctgaggcccagcgatctgcagtccattttgtcagacgcctggtttcacttcgtgttctttatccaggccgtgttagtaatcctatctgtttttttatacctttttgcgtacaaagagtatctcgcgtgtctcgtgcttgcaatggccctcggctgggctaatatgttgtattacacacgcggcttccagtcgatgggaatgtactccgtaatgatccagaaggtgatacttcacgatgtgcttaagtttcttttcgtatatattgtctttctcctgggctttggagtggctttggcatccctcattgagaaatgtccaaaggataacaaggactgctctagctatggctccttctctgacgctgtgctggagctatttaagctgactataggcttgggagatctcaacatccagcagaactctaagtatcccatactgtttctctttctcctgatcacttacgttatcctgaccttcgtgctgttgcttaatatgctcatagccctgatgggagagaccgtggaaaatgtcagcaaggagtccgaaaggatttggcgcctgcagcgtgcaaggaccatcctcgagtttgagaagatgcttcccgagtggttaagatcccgcttcagaatgggcgaactctgcaaagtcgccgaggatgactttcgactgtgtttgagaattaacgaggtaaagtggaccgagtggaagacacacgtttctttcttgaatgaggaccctggcccagtccgaagaacggctgacttcaataaaatccaagattcttcaagaaataatagcaaaacaaccttgaatgcgtttgaggaagtggaagaatttcctgaaacaagtgtgtag

SEQ ID NO: 92544 - DNA, 2328 bp, Artificial Sequence
  derived and/or modified sequence
atgagccatcacacttggcccagcccagctctgaatcttgacttcgcaacgtacctgttgagagaccttggtgcacacttcttcttagaaattgagggctttgaaccaaatccgacggtcgcaaagacgtcccccccagtttttagcaaaccaatggactcaaacattcggcagtgtatctctggaaattgtgacgatatggatagcccacagtctccccaggatgacgtgaccgagacgccctctaatccgaactctccatcagctcaactggctaaggaggaacagagaagaaagaagcggcggcttaagaaacgaatctttgcagcagtgagcgagggatgcgtcgaggagctcgttgaactgctagtcgagctgcaggagttgtgtcgaaggagacatgacgaagacgtacccgattttctgatgcacaagctgaccgcttcggataccgggaagacatgccttatgaaggctctactgaacattaatcccaatactaaggaaattgtgagaatactcctcgcctttgctgaagagaatgatatcctggggagattcatcaacgccgaatacaccgaggaagcgtatgagggacagacagctctgaacatcgcaatagaaaggcgccagggtgacattgctgctctacttattgctgcaggcgcagatgttaatgcccatgcgaaaggggccttcttcaatccaaagtatcaacatgagggtttttattttggcgagacccccctcgcccttgcagcttgcacaaatcaacctgagattgtgcaactgttaatggagcacgagcagaccgatatcacgtcccgggactcgcggggcaataacatcctgcatgctcttgtgactgtcgctgaagattttaagacccagaacgatttcgtgaagcgtatgtacgacatgatcctccttcggtccggcaactgggagctggaaactacccggaacaacgatggacttactcctctacagctggcggcaaagatgggaaaggctgaaattctgaaatacatccttagccgcgagataaaggagaaacggctgagaagcctgagccgcaaatttactgattgggcatacggacctgtgagcagtagtctatatgatctaacaaatgtggacacaactactgataacagcgtactggagatcacggtgtacaataccaacattgacaacagacatgaaatgctgactcttgaaccattacacaccctgttgcacatgaaatggaagaagtttgcaaagcacatgttctttctgagcttttgcttctactttttctacaacattaccctgacactggtcagttattaccggcctagagaagaggaagcaatcccacatcccctggctttaacacataagatgggctggctgcaactgctggggcggatgtttgtgctgatatgggcgatgtgcatctctgtgaaagagggtattgccatctttcttctgcgaccttctgaccttcagtcaatcctcagcgacgcttggtttcacttcgtcttcttcatccaagccgtactggtgatcctgagcgtgtttctgtatctgttcgcctataaggagtatctggcctgtctggtgctcgccatggctcttgggtgggcaaacatgctgtattatactaggggcttccagtctatgggcatgtattccgtgatgatacagaaagtgattctccatgatgtattaaagtttctttttgtgtacatcgtgtttctgctcgggttcggtgtcgccctggcatcccttatcgaaaaatgtcccaaggacaataaggactgtagcagctatggaagttttagtgatgctgtgctggagttgttcaagctgacgatcgggcttggggatctgaacatccaacagaacagcaaatatccaattctgttccttttcctcctgatcacgtacgtgatcctcactttcgttctgttattaaacatgctaatcgccctcatgggggagaccgttgaaaacgtttccaaagagagtgagaggatctggcgtctgcagagagcgcgcaccatcttggagttcgagaaaatgctgccagagtggctgcgatccaggtttcgcatgggcgagctgtgcaaggtggccgaggacgatttccgactttgccttcgcatcaacgaagtcaaatggactgagtggaaaacacacgtgtcctttcttaatgaagacccggggcccgtgcggcgcacagctgattttaacaaaattcaggacagctcacgaaacaactcaaagaccacattgaacgctttcgaagaagtagaggagtttcctgaaacctcggtttag

SEQ ID NO: 92545 - DNA, 2376 bp, Artificial Sequence
  derived and/or modified sequence
atgaaggcccaccccaaggagatggtgcccctgatgggcaagagggtggccgcccccagcggcaacccagccatcctgcctgagaagaggcctgctgagatcacccccaccaagaagagcgcccacttcttcctggagattgagggctttgagcccaaccccaccgtggccaagaccagcccccctgtgttcagcaagcccatggacagcaacatccggcagtgcatcagcggcaactgtgatgacatggacagcccccagagcccccaggatgatgtgacagagacccccagcaaccccaacagccccagcgcccagctggccaaggaggagcagaggaggaagaagaggcggctgaagaagaggatctttgctgctgtgtctgagggctgtgtggaggagctggtggagctgctggtggagctgcaggagctgtgcagaagaagacatgatgaagatgtgcctgacttcctgatgcacaagctgacagccagtgacaccgggaagacctgcctgatgaaggccctgctgaacatcaaccccaacaccaaggagatcgtgcgcatcctgctggcctttgctgaggagaatgacatcctgggccgcttcatcaatgctgagtacacagaggaggcctatgagggccagacagccctgaacatcgccattgaaagacggcagggcgacattgctgccctgctgattgctgctggagcagatgtgaatgcccacgccaagggggccttcttcaaccccaagtaccagcacgagggcttctactttggagagacccccctggccctggccgcctgcaccaaccagcctgagatcgtgcagctgctgatggagcacgagcagacagacatcaccagccgggacagccggggcaacaacatcctgcacgccctggtgacagtggccgaggacttcaagacccagaatgactttgtgaagaggatgtatgacatgatcctgctgcggagcggcaactgggagctggagaccaccagaaataatgatggcctgacccccctgcagctggccgccaagatgggcaaggccgagatcctgaagtacatcctgagccgggagatcaaggagaagaggctgcggagcctgagcaggaagttcacagactgggcctacggccctgtgagcagcagcctgtatgacctgaccaacgtggacaccaccacagacaacagcgtgctggagatcaccgtgtacaacaccaacatcgacaacagacatgagatgctgaccctggagcccctgcacaccctgctgcacatgaagtggaagaagtttgccaagcacatgttcttcctgtccttctgcttctacttcttctacaacatcaccctgaccctggtgtcctactaccggccccgggaggaggaggccatcccccaccccctggccctgacccacaagatgggctggctgcagctgctgggccgcatgtttgtgctgatctgggccatgtgcatctctgtgaaggagggcatcgccatcttcctgctgcggcccagcgacctgcagagcatcctgagtgatgcctggttccactttgtgttcttcatccaggccgtgctggtgatcctgagcgtcttcctgtacctgtttgcctacaaggagtacctggcctgcctggtgctggccatggccctgggctgggccaacatgctgtactacacccggggcttccagagcatgggcatgtacagcgtgatgatccagaaggtgatcctgcatgatgtgctgaagttcctgtttgtgtacatcgtgttcctgctgggctttggagtggccctggccagcctgattgaaaaatgtcccaaggacaacaaggactgcagcagctatggcagcttcagtgatgctgtgctggagctgttcaagctgaccatcggcctgggggacctgaacatccagcagaacagcaagtaccccatcctcttcctgttcctgctgatcacctacgtgatcctgacctttgtgctgctgctgaacatgctgattgccctgatgggagagaccgtggagaatgtgtccaaggagagcgagcgcatctggaggctgcagagggcccggaccatcctggagtttgagaagatgctgcctgagtggctgcggagccgcttcaggatgggagagctgtgcaaggtggctgaagatgacttccggctgtgcctgcgcatcaatgaggtgaagtggacagagtggaagacccacgtgtccttcctgaatgaagatcctggccctgtgagaagaacagctgacttcaacaagatccaggacagcagcaggaacaacagcaagaccaccctgaatgcctttgaggaggtggaggagttccctgagacctctgtgtag

SEQ ID NO: 92546 - DNA, 2328 bp, Artificial Sequence
  derived and/or modified sequence
atgagccaccacacctggcccagccctgccctgaacctggactttgccacctacctgctgcgggacctgggcgcccacttcttcctggagattgagggctttgagcccaaccccaccgtggccaagaccagcccccctgtgttcagcaagcccatggacagcaacatccggcagtgcatcagcggcaactgtgatgacatggacagcccccagagcccccaggatgatgtgacagagacccccagcaaccccaacagccccagcgcccagctggccaaggaggagcagaggaggaagaagaggcggctgaagaagaggatctttgctgctgtgtctgagggctgtgtggaggagctggtggagctgctggtggagctgcaggagctgtgcagaagaagacatgatgaagatgtgcctgacttcctgatgcacaagctgacagccagtgacaccgggaagacctgcctgatgaaggccctgctgaacatcaaccccaacaccaaggagatcgtgcgcatcctgctggcctttgctgaggagaatgacatcctgggccgcttcatcaatgctgagtacacagaggaggcctatgagggccagacagccctgaacatcgccattgaaagacggcagggcgacattgctgccctgctgattgctgctggagcagatgtgaatgcccacgccaagggggccttcttcaaccccaagtaccagcacgagggcttctactttggagagacccccctggccctggccgcctgcaccaaccagcctgagatcgtgcagctgctgatggagcacgagcagacagacatcaccagccgggacagccggggcaacaacatcctgcacgccctggtgacagtggccgaggacttcaagacccagaatgactttgtgaagaggatgtatgacatgatcctgctgcggagcggcaactgggagctggagaccaccagaaataatgatggcctgacccccctgcagctggccgccaagatgggcaaggccgagatcctgaagtacatcctgagccgggagatcaaggagaagaggctgcggagcctgagcaggaagttcacagactgggcctacggccctgtgagcagcagcctgtatgacctgaccaacgtggacaccaccacagacaacagcgtgctggagatcaccgtgtacaacaccaacatcgacaacagacatgagatgctgaccctggagcccctgcacaccctgctgcacatgaagtggaagaagtttgccaagcacatgttcttcctgtccttctgcttctacttcttctacaacatcaccctgaccctggtgtcctactaccggccccgggaggaggaggccatcccccaccccctggccctgacccacaagatgggctggctgcagctgctgggccgcatgtttgtgctgatctgggccatgtgcatctctgtgaaggagggcatcgccatcttcctgctgcggcccagcgacctgcagagcatcctgagtgatgcctggttccactttgtgttcttcatccaggccgtgctggtgatcctgagcgtcttcctgtacctgtttgcctacaaggagtacctggcctgcctggtgctggccatggccctgggctgggccaacatgctgtactacacccggggcttccagagcatgggcatgtacagcgtgatgatccagaaggtgatcctgcatgatgtgctgaagttcctgtttgtgtacatcgtgttcctgctgggctttggagtggccctggccagcctgattgaaaaatgtcccaaggacaacaaggactgcagcagctatggcagcttcagtgatgctgtgctggagctgttcaagctgaccatcggcctgggggacctgaacatccagcagaacagcaagtaccccatcctcttcctgttcctgctgatcacctacgtgatcctgacctttgtgctgctgctgaacatgctgattgccctgatgggagagaccgtggagaatgtgtccaaggagagcgagcgcatctggaggctgcagagggcccggaccatcctggagtttgagaagatgctgcctgagtggctgcggagccgcttcaggatgggagagctgtgcaaggtggctgaagatgacttccggctgtgcctgcgcatcaatgaggtgaagtggacagagtggaagacccacgtgtccttcctgaatgaagatcctggccctgtgagaagaacagctgacttcaacaagatccaggacagcagcaggaacaacagcaagaccaccctgaatgcctttgaggaggtggaggagttccctgagacctctgtgtag

SEQ ID NO: 92547 - DNA, 2376 bp, Artificial Sequence
  derived and/or modified sequence
atgaaggcccaccccaaggagatggtgcccctgatgggcaagcgggtcgctgcaccctctggcaatcctgctattctacctgagaagcgccctgccgaaattacgcctaccaagaaatccgcccacttttttctggagatcgaggggtttgaaccaaaccctaccgtcgctaagacttcacctcctgtgttctccaaacctatggacagcaatattcgccagtgtatctctgggaactgcgatgacatggacagcccccaatcgccccaggacgatgtgactgagactccaagcaacccaaacagtccgtccgctcagcttgctaaggaagagcagagacgaaagaagcgccgcttgaagaaacgaatcttcgccgcagtgtccgaggggtgcgtagaagagttggtggagcttttagtagagcttcaggaactgtgtaggcgccggcatgacgaggatgtccctgacttcttgatgcacaaattgactgccagtgatacgggcaaaacgtgccttatgaaggccttactgaatataaaccctaatacaaaagaaatagtccggatacttcttgcctttgccgaagaaaatgatatcctcggacgattcattaacgcggagtacaccgaggaggcttatgaagggcagacagcattaaatattgcaatcgagagacgccagggcgacatcgccgcactgctgattgcagcaggcgccgatgtgaacgcccatgccaagggggctttcttcaacccgaaatatcaacacgaaggattctattttggcgagacacctcttgcgctggctgcctgtactaaccagccagaaattgtgcagttgctgatggaacatgaacagactgacatcacgagcagagatagccgaggcaataatattctgcatgccttggtaacagttgcggaggattttaagacacagaacgactttgtcaagaggatgtacgacatgatcttgttacgatccggaaattgggagcttgaaacgacccggaacaacgacgggctgacaccactccagcttgccgccaagatgggtaaggctgaaattctgaagtatatcctttcccgcgaaataaaagaaaagaggcttcggtctcttagccgcaagtttaccgactgggcctacggacctgtctcttcgtcactgtatgacctgaccaacgtcgataccacgaccgataacagcgttctggagattacagtatataacaccaatatcgacaataggcatgaaatgcttaccctggagcccctgcataccctactgcacatgaagtggaaaaagttcgcaaaacatatgttttttttatcattctgcttctactttttctataacatcaccctcacactggtatcctactatagaccgagggaggaagaggccatcccccaccctctcgctctcacacacaaaatggggtggctgcagctcttgggcaggatgttcgttctcatctgggctatgtgcatctccgtaaaagagggtattgccatattcttgctacggccaagcgatctccaatccattctgtccgacgcttggtttcacttcgtcttcttcattcaggctgtgctggtaattctgagtgtgtttctgtacctctttgcttacaaggaatatttagcatgcctggtattggcaatggctctaggctgggccaatatgctgtactatactagaggttttcaaagtatgggcatgtactccgtgatgattcagaaagttattctgcacgacgttctaaaattcctattcgtctacatcgtgtttttacttggcttcggggtggcactcgcgagcttgatcgagaagtgccctaaagataacaaggactgctctagttacggttcgttcagcgacgccgtgttagagctatttaagctaactattggcctgggcgaccttaatatccagcagaactcaaagtatcccattctgttcctgtttcttctcatcacctatgtcattcttacgttcgttctactgctgaatatgttaattgcactgatgggggaaacggtcgagaatgtaagcaaagagtccgagcggatctggaggctgcagcgagcccgcaccattttagagttcgaaaagatgctgcccgaatggctcagaagtaggttcaggatgggcgaactatgcaaggtagccgaggatgacttccgcctatgtctccgtatcaatgaggtgaaatggacggagtggaagacacacgtctccttcctgaacgaggacccaggacctgtccgcaggactgctgattttaataaaatacaggactcctcaagaaacaatagcaagacaacactcaatgcatttgaggaagttgaagagttccccgagactagtgtatag

SEQ ID NO: 92548 - DNA, 2328 bp, Artificial Sequence
  derived and/or modified sequence
atgagccaccacacctggcccagccccgccctgaacctggacttcgccacgtacctcttacgcgatttgggtgctcattttttcctggagatagagggcttcgagcccaatcctaccgttgcaaaaacgagccccccagtttttagtaagcctatggacagcaacatccgtcaatgcatttctggaaattgcgacgatatggattccccgcagtccccccaggacgacgtaactgagacaccatctaatccgaactctccgtccgcacaattggccaaggaggaacagcgcaggaaaaaacgacggctgaagaagcggatcttcgctgcagtgtccgaaggatgcgtagaggagctagtcgaattacttgttgaattacaagagctgtgccggcgccgacatgacgaagatgtcccagactttctgatgcacaagctcacagcttctgacacaggaaaaacctgccttatgaaagccctcctgaacattaacccaaacaccaaagagattgtgcggatccttctggcttttgctgaggagaacgatatattagggagattcattaatgcggagtacactgaggaagcctacgagggtcagactgcactcaatatcgctattgagcggcgacagggtgacatcgctgctctgctgatcgcagcaggcgctgacgtcaacgcccacgctaaaggcgctttcttcaaccctaagtaccagcatgagggcttttactttggagagactcctctagccctggccgcttgcacaaatcagccagaaattgtccagttgctgatggagcacgagcagacagatatcacatcaagggacagtcgagggaataatatactccacgcccttgtcactgttgcagaagactttaaaactcaaaacgatttcgtgaagagaatgtatgatatgatcctcctgcgctctggaaattgggagctggaaacgacacggaataatgatggcttgaccccactccaattggctgctaagatggggaaggccgagattctaaagtatattttgtcccgggagatcaaggagaagcgccttcgctccctgagtcgtaaatttaccgactgggcatacggacctgtctctagctctctttacgacttaaccaacgtagacaccaccacagataacagcgtcctggaaattacagtttacaacaccaacatcgacaatcggcacgagatgctgacgttggaacctctccatacccttctgcacatgaagtggaaaaaatttgctaagcacatgtttttcctgagcttttgcttctattttttttataacatcacattaacactcgtaagttactacaggccaagggaggaagaagccatacctcacccactggcactgacacataagatgggatggctgcaattgctgggaagaatgtttgttctgatatgggccatgtgtatctctgtgaaggaaggcatcgccatattcctgttgcggccctcagacctccagagcatcctgtctgatgcgtggttccattttgtcttcttcatccaggctgtcctcgtcatcctaagcgtctttctatacctttttgcctacaaggagtatttggcctgtttggtgctggcgatggcattgggctgggcaaacatgctttactataccagaggcttccagagtatggggatgtattccgtgatgattcagaaggtgattctgcacgacgtgctcaagttcctcttcgtgtacattgtctttttactcggatttggtgtggcattggccagcctcattgaaaaatgcccgaaagacaataaggactgctcctcctacggaagcttttctgacgcggtcctggaactattcaaactcacaattgggctcggggacctcaacatacagcagaactcgaaataccccatcctttttttattcttgctgattacttacgttattcttactttcgtgttgctgcttaacatgcttatcgccctgatgggcgagacagttgagaacgtgtccaaggaaagcgagagaatatggaggctacaacgtgcacggacaatactagagttcgaaaagatgctgccagagtggctgcgcagccgttttcgtatgggagagctgtgtaaggtggcagaggatgatttccgactgtgtcttaggatcaatgaagtaaagtggaccgagtggaagacacatgtcagttttctcaatgaggatcctgggcccgtcaggagaaccgcagacttcaacaaaattcaggacagcagtcgcaacaattcaaagactacattaaatgctttcgaagaggttgaagaattcccagagacatcagtgtag

SEQ ID NO: 92549 - DNA, 2376 bp, Artificial Sequence
  derived and/or modified sequence
atgaaggcgcaccccaaagagatggttcccctgatggggaagcgggtggccgctcctagtgggaatccagcaatcctcccagaaaagagaccagcagagatcacaccaactaagaaatccgctcacttcttcctggagattgagggatttgaacccaacccaaccgttgctaaaacctctccccctgtattcagtaaacctatggattccaacatccgccaatgcatcagtggtaactgcgatgatatggatagtccgcaaagccctcaggatgatgtgacagagacacctagtaacccaaattctcccagtgcccagctggcaaaagaggagcaacgccgaaaaaagaggagactgaaaaaacggatattcgccgctgtttctgagggttgcgtggaagaactggtcgaactgctggtggaactccaggagctgtgtcggcgacgtcatgatgaagatgtccccgacttcttgatgcacaagctcaccgcatcagacaccggaaaaacatgtcttatgaaggcactgttgaatatcaatcccaataccaaggagatagtgagaatccttctcgcatttgccgaggagaacgacatacttggcaggttcattaacgcggagtacaccgaagaggcttatgaaggtcagaccgcactgaatatagctattgaaagaagacagggcgatatcgcagccctcctgatcgctgccggtgccgacgtgaatgcgcacgccaagggggctttcttcaacccaaaataccagcatgagggcttctattttggagaaacccctttagcgctggctgcttgtactaatcaacctgaaatagtgcagctgttgatggagcacgaacagaccgacatcactagccgcgactcccggggtaacaacatcttgcacgctcttgttacggttgcagaagacttcaaaacacaaaacgacttcgtaaagaggatgtacgatatgattcttctgcgcagtggcaactgggaattagagactacacgaaacaacgatggtctaacacccttgcagctcgctgcaaagatggggaaagccgaaatcctgaagtacatcttgtccagggaaatcaaggaaaaacgtttgcgcagcctgtctcgaaagttcacagactgggcttacggcccagtgagctcaagcctctatgacctaactaatgtggatacgacaaccgataactccgtccttgagatcacggtttacaacacaaacatcgataaccgtcacgaaatgctgaccctggagcccttgcataccttgttgcacatgaagtggaagaaattcgcaaagcacatgttttttctgagtttctgtttttacttcttctacaacataacactgactctagtcagctattaccgcccacgtgaagaggaggctatcccccatcctcttgccctcacccacaagatgggctggttgcagctcttggggagaatgtttgtcctgatttgggcaatgtgcatctctgtcaaggaagggattgcgattttcctgctccgaccttccgacttgcagagcattctgtcggatgcctggtttcatttcgtcttctttatccaagctgtactggtcattcttagtgtgttcctgtatctcttcgcctataaagagtacttagcatgcctggtgttagccatggcgctgggatgggcgaacatgctttactacacacgcggtttccagtctatggggatgtatagcgtcatgatccagaaagttatcttgcatgacgtgttaaagttcttgttcgtttacatcgtctttctcttgggattcggggtggcgctggcatcactgatcgagaaatgtcccaaagataacaaagattgctcaagctatggcagtttctcggacgcagtgttggaacttttcaaactcactattggactgggagaccttaatatacagcagaactcaaagtatcctatcctatttttatttttactgattacatacgtcattctgacttttgtgttgctgctgaacatgctgatagctttaatgggagagacagtggaaaatgtgtccaaggagagcgaaaggatttggagactgcaaagagcgaggactatccttgaattcgaaaagatgctgcctgagtggctgcgttctcgatttcgcatgggggaactgtgcaaagttgccgaggatgactttcggctgtgtcttcgaatcaatgaggtcaaatggactgaatggaagacacatgtgtcctttcttaatgaagacccgggacctgtgcgcagaactgcagacttcaataaaattcaggattcaagccgcaataactccaaaacaacgctgaacgccttcgaagaggtggaggaatttccagaaacatcagtctag

SEQ ID NO: 92550 - DNA, 2328 bp, Artificial Sequence
  derived and/or modified sequence
atgtcccaccatacctggcctagccctgcgttgaatcttgactttgctacatacctgctccgggacttaggagcacactttttcctggagatcgagggatttgagccaaatcctacagtggcaaagacttctccccctgtgttcagtaagccgatggattccaatatccggcagtgtatcagcgggaattgtgacgacatggatagtcctcagtcaccccaggatgacgtgaccgaaaccccctcgaacccaaattccccttccgctcagctggcaaaagaggagcagaggcgtaagaaacgcaggctgaagaaacgcatttttgcagctgttagtgaaggttgcgtggaagaactggtcgaactgctcgtcgagcttcaggaactctgtaggcggcgacacgatgaagacgtgccagactttcttatgcacaaactaacggcctctgatacagggaagacgtgcctgatgaaagcattgctcaacattaatccaaacactaaagagattgtccggatcctgctggccttcgcggaagaaaacgatattcttggacggttcatcaacgccgagtacacagaggaagcctacgaaggacaaaccgctctgaatattgctatagagcgacgccagggggatattgctgctctgctcattgcagccggagccgacgtcaacgcccacgccaagggggcatttttcaatcctaagtatcaacacgagggattctattttggggaaactccccttgcgcttgcggcatgtacaaaccaacccgagatcgtacagcttctcatggaacacgagcagactgacatcacaagccgcgactccagaggcaacaacatcctgcacgctctggtcacagtcgctgaagattttaagacccaaaacgactttgtaaagagaatgtacgatatgatcctgctgagatctggcaattgggagctagagaccacccgaaataacgatggactcactccacttcaattggcagccaaaatgggaaaggccgagattctgaaatacatcctgagtagagagatcaaagagaaaaggctcagaagcttgtctaggaagttcacagattgggcttacgggcctgtttcctcctcgctttacgatcttaccaatgtcgatacaacaactgataactctgtgttggagatcacggtgtataacactaacatagacaatcgacacgagatgttgacactggaaccactgcataccttattgcacatgaagtggaagaagttcgctaagcacatgttttttctcagcttttgtttctactttttctacaacatcaccctgaccctggtgtcctactatcgccctcgggaggaggaagctatcccacatcccttggcactaactcacaagatggggtggctacagttgctcggccgtatgtttgtgctgatatgggctatgtgcatctccgtgaaagaaggcatcgctatttttctcctgaggccctcagacctgcagagcatcctaagtgacgcctggtttcacttcgtattctttattcaggcggtcctcgtgattctgagcgttttcttatatctgttcgcatacaaggaatatcttgcctgcctggtgctggcaatggcgctgggttgggcaaacatgctgtactacacaagggggttccagtctatgggcatgtattctgtcatgatccagaaagttattctgcacgacgtgctcaagttcctgtttgtttacattgtgtttctcttaggattcggtgtcgcactggcctctctgatcgagaagtgccccaaagataacaaagactgctccagttatggctccttttccgatgccgtcttagagctgtttaagctgacaatcggtctgggagaccttaatattcaacagaattctaagtacccgattctgtttctgttcttactaatcacttacgttatactaacattcgtgcttcttcttaatatgttgatagctctcatgggagaaaccgtggaaaatgtgagcaaggagagtgagcggatctggcgtttacagcgcgcaaggaccatcctcgaattcgaaaagatgctgcccgaatggctgagatccagattcaggatgggagaactctgcaaagtcgccgaggacgactttcgcctctgcctccggattaatgaagttaagtggactgaatggaaaacacatgtgagtttcctgaatgaagatcccggtccagtaagacgtaccgctgattttaataagatccaggactctagcaggaataactccaagaccaccttgaatgctttcgaggaggtcgaagagtttcccgagacctctgtgtag

SEQ ID NO: 92551 - DNA, 6113 bp, Artificial Sequence
  derived and/or modified sequence
ccacaacttcgatcttggcacctgcggcctcccctgccttttctccggtggggatgaggctgctgtgtgggtgtgggggtgactcacacgggccacgtgggtgggcgggtgctgcagctgtggctggtgggcgtggcctgcctggcgccgagggcaggtggctcagccagttctgcctctgacgcctcattccagccatccctctgcctgcaatgagagcttcccgccgcctcagccacagtcccacccgggggccttgggccccagacatgcggtgatctcagggcaagggttgccacgaccacccagaacctcaccagccatgaaagcccaccccaaggagatggtgcctctcatgggcaagagagttgctgcccccagtgggaaccctgccatcctgccagagaagaggccggcggagatcacccccacaaagaagagtgcacacttcttcctggagatagaagggtttgaacccaaccccacagttgccaagacctctcctcctgtcttctccaagcccatggattccaacatccggcagtgcatctctggtaactgtgatgacatggactccccccagtctcctcaggatgatgtgacagagaccccatccaatcccaacagccccagtgcacagctggccaaggaagagcagaggaggaaaaagaggcggctgaagaagcgcatctttgcagccgtgtctgagggctgcgtggaggagttggtagagttgctggtggagctgcaggagctttgcaggcggcgccatgatgaggatgtgcctgacttcctcatgcacaagctgacggcctccgacacggggaagacctgcctgatgaaggccttgttaaacatcaaccccaacaccaaggagatagtgcggatcctgcttgcctttgctgaagagaacgacatcctgggcaggttcatcaacgccgagtacacagaggaggcctatgaagggcagacggcgctgaacatcgccatcgagcggcggcagggggacatcgcagccctgctcatcgccgccggcgccgacgtcaacgcgcacgccaagggggccttcttcaaccccaagtaccaacacgaaggcttctacttcggtgagacgcccctggccctggcagcatgcaccaaccagcccgagattgtgcagctgctgatggagcacgagcagacggacatcacctcgcgggactcacgaggcaacaacatccttcacgccctggtgaccgtggccgaggacttcaagacgcagaatgactttgtgaagcgcatgtacgacatgatcctactgcggagtggcaactgggagctggagaccactcgcaacaacgatggcctcacgccgctgcagctggccgccaagatgggcaaggcggagatcctgaagtacatcctcagtcgtgagatcaaggagaagcggctccggagcctgtccaggaagttcaccgactgggcgtacggacccgtgtcatcctccctctacgacctcaccaacgtggacaccaccacggacaactcagtgctggaaatcactgtctacaacaccaacatcgacaaccggcatgagatgctgaccctggagccgctgcacacgctgctgcatatgaagtggaagaagtttgccaagcacatgttctttctgtccttctgcttttatttcttctacaacatcaccctgaccctcgtctcgtactaccgcccccgggaggaggaggccatcccgcaccccttggccctgacgcacaagatggggtggctgcagctcctagggaggatgtttgtgctcatctgggccatgtgcatctctgtgaaagagggcattgccatcttcctgctgagaccctcggatctgcagtccatcctctcggatgcctggttccactttgtcttttttatccaagctgtgcttgtgatactgtctgtcttcttgtacttgtttgcctacaaagagtacctcgcctgcctcgtgctggccatggccctgggctgggcgaacatgctctactatacgcggggtttccagtccatgggcatgtacagcgtcatgatccagaaggtcattttgcatgatgttctgaagttcttgtttgtatatatcgtgtttttgcttggatttggagtagccttggcctcgctgatcgagaagtgtcccaaagacaacaaggactgcagctcctacggcagcttcagcgacgcagtgctggaactcttcaagctcaccataggcctgggtgacctgaacatccagcagaactccaagtatcccattctctttctgttcctgctcatcacctatgtcatcctcacctttgttctcctcctcaacatgctcattgctctgatgggcgagactgtggagaacgtctccaaggagagcgaacgcatctggcgcctgcagagagccaggaccatcttggagtttgagaaaatgttaccagaatggctgaggagcagattccggatgggagagctgtgcaaagtggccgaggatgatttccgactgtgtttgcggatcaatgaggtgaagtggactgaatggaagacgcacgtctccttccttaacgaagacccggggcctgtaagacgaacagcagatttcaacaaaatccaagattcttccaggaacaacagcaaaaccactctcaatgcatttgaagaagtcgaggaattcccggaaacctcggtgtagaagcggaacccagagctggtgtgcgcgtgcgctgtctggcgctgcaggcggagtcaccgactctgtgcagagaggctttgagggatggtggagtccggctctgctggcctagaagcagagtgcaccctcgtgctcagtgctcagtgggtgtctgaactgaggggcagttgtcaatttgtctgagtgggaaacatcctggattttgttacttggcaaacagctggtgtaaacctacagccagcagcagtctggagcctgggagcctcctgaagtcccgggtgaagcctctggttttaccaattgcaggtcggcttggctgggagagatggatggcgggaaaggggcagcagtcttgaggagcagggagaggagtctttcctcctgccagcttcccccgtcagccccaaccccagcccacacattgtaccatctcttctgctgtgactgggttgcctgaatttgtgggagacccgtgatcccatcccagagtgtgcgggggacggaggtaagctggatatcctgggggaggaggggaatgcgctctggaaacacccttccggaacccttcggggaaaaggagaccatccttggagtgaacgtcccctgacaccccaaggttcaaactgtctcaagctgagagatgtttttagtagcagaattaacacagggttttaacttgcaatacggaaaagacatttcagttgagaatgaaaattactacaatgaagtttgtgattttaaaagtggagacagactgggggctttggggctggatgtaagtattatatatttggcctcagggtgcccagagcaagacaaaaagcttttcttcacacacacaaaagtctgcatgagacactccgggcaagtcctgctgggccgccgcgatctgggtgaaaggtcctggctcttttcctcgtcctgacctcacagtagcgcgtgcctgtgtgctgggatcgtggctttcgctgaagcagaaatagcagctgctcgatcgatatcatcttggaactcagcagttagtcgcatacctcagtatgtctcagtgggggaatttaacaaaatgcctcaactgctttggtacgaagtattttttttttaattttaactgtgaattttgaagctgaaggggaagcttgtgagagaaaagcatttgccaagactttgagcttatttttaggtcctcgtcctctgatgttctctttctgaaatgacacggagtcagtctggggggcagaggtgaagtggagacggaaggattttccaggtgactggggccgaaaccaccagaaaatccactctgccgccgttatctggtgaaaggattcatgtaaaaatgttcgaggtggaattataaaaatagtaaccataaatgttaatcttaaatggcagaaatagaaatttggccttcagataacatggcgatagataagttcatctggcttgaggcaaactgaagagtcggggcctagcagtgcactctgggccagtttctctgccctgggccactctgtgtgccagactagctggacagatagagactttgtgcccctgatggggccgattggggagaggtgggctggggtgtgtgaggcttcacaatccacagcagcccctgccctcccagctgacccagggagtaatcgcgtgctctaagccacagtggtcggggctgggcatgggcctctggagaagagaagatttgaggagaactgtcctagaggcaggaggagcagatgtgtttcagaatgggcagaattaggaaattgagaaagattttggctcaacagaatccagcaactgctccagatgttggagatgtttaagcagaagctggttgcgcacttaatgaggaatgttgttgaaaatggtcattggaagaagtttaaggtcccttttagcctggagattgtacaaatcagcattccacatctggagttagctacccgcattaagcctgaacagacatcttggtctgaaaggaagtggtttggattcatgatgccaagctccacactatggagctgggaattccagaattgctttgactcagatattaatggagaaagtcatatccattaatggataaagccgtatctgttatggataaagccgtatccagagttgctttgactcggatgttaatggataaagccaattattgatttctatttgcctaacctgccagcttttgtccaagtggggaatggagagccatagggatgtttgtcatctcacatgttttggtgatctgctgtctgtgggtctggatggaatttgttggcaagaccattttctgtattggatattcttcccaacagtgtccaccccaaaaggctttcagccaaaacgtctgagcctaggtaggtttaccaagggaagccataagtcaagaagcatcagagtgaaaaggagcacttccttcattttacgcccagaggctaatgctccgagaggaatgtgtacttgggcaaagtcatgcaggaaggtcatatcagagctgtggaggctggagtgtcctgattcttggaccacagatgtctccctgagccattatttatttatttttaaaaagcacagttattccatcattttgagtctttgtatttcgcttatattggggggcaggactattttctcaggtgtctcatttggcagtcaacattgtcccctatgttccctatgactagttgaaaattcaagtgtgcccacaggggtgcacaaaaccacacccatgcacacacacaccctcagcccccacacacaccccgttgaacccgtgggtctatcaggacatcctaaaactccgtgattgacatttcagtaatttcaggggaaggtgttttccagggatggggtctcccaggttcagatagtgcctttggctgcaaatgctcctttagctaaacttttcctcaggaagaattcattattctagacattatgtgatatatctgttaggaataaaaggtgcttaaccttcctccctgggatgtgggagaaggtgctggaggttgtactgtgaagtcttcaggctcttagaaggctccagcctgagagagccctttattattgacattcctgtccttcctcaaggcctggtgacctgtgacctttcgctctgggcagggcccaggtagatgggccgtcatccgggcctgtaagccgtacttgatttctgcattgatttacatattttttactgtgatcttggttccaaacacagaatcgtcaccccattctcccttgaatgtgccggatccttgtaaattctcatttacctacttgttcttagtgtgtatgtgtgtgcgaaactctatgttcaagaaagaaatcatacaaagagtaagaacatgtttgtgccattgaagaaatggttttttgatttctaataaatatttgttttgcctcgtta

SEQ ID NO: 92552 - DNA, 2735 bp, Artificial Sequence
  derived and/or modified sequence
gcctcagccacagtcccacccgggggccttgggccccagacatgcggtgatctcagggcaagggttgccacgaccacccagaacctcaccagccatgaaagcccaccccaaggagatggtgcctctcatgggcaagagagttgctgcccccagtgggaaccctgccatcctgccagagaagaggccggcggagatcacccccacaaagaagagtagacatggggtttcaccatgttggcgaggctggtctcaaactcccgacctcaactgatctgcccactttgacctcccagagggctgggattacaggcatgagccaccacacctggcctagcccagctttgaatctggactttgctacctatctgctgcgtgaccttggtgcacacttcttcctggagatagaagggtttgaacccaaccccacagttgccaagacctctcctcctgtcttctccaagcccatggattccaacatccggcagtgcatctctggtaactgtgatgacatggactccccccagtctcctcaggatgatgtgacagagaccccatccaatcccaacagccccagtgcacagctggccaaggaagagcagaggaggaaaaagaggcggctgaagaagcgcatctttgcagccgtgtctgagggctgcgtggaggagttggtagagttgctggtggagctgcaggagctttgcaggcggcgccatgatgaggatgtgcctgacttcctcatgcacaagctgacggcctccgacacggggaagacctgcctgatgaaggccttgttaaacatcaaccccaacaccaaggagatagtgcggatcctgcttgcctttgctgaagagaacgacatcctgggcaggttcatcaacgccgagtacacagaggaggcctatgaagggcagacggcgctgaacatcgccatcgagcggcggcagggggacatcgcagccctgctcatcgccgccggcgccgacgtcaacgcgcacgccaagggggccttcttcaaccccaagtaccaacacgaaggcttctacttcggtgagacgcccctggccctggcagcatgcaccaaccagcccgagattgtgcagctgctgatggagcacgagcagacggacatcacctcgcgggactcacgaggcaacaacatccttcacgccctggtgaccgtggccgaggacttcaagacgcagaatgactttgtgaagcgcatgtacgacatgatcctactgcggagtggcaactgggagctggagaccactcgcaacaacgatggcctcacgccgctgcagctggccgccaagatgggcaaggcggagatcctgaagtacatcctcagtcgtgagatcaaggagaagcggctccggagcctgtccaggaagttcaccgactgggcgtacggacccgtgtcatcctccctctacgacctcaccaacgtggacaccaccacggacaactcagtgctggaaatcactgtctacaacaccaacatcgacaaccggcatgagatgctgaccctggagccgctgcacacgctgctgcatatgaagtggaagaagtttgccaagcacatgttctttctgtccttctgcttttatttcttctacaacatcaccctgaccctcgtctcgtactaccgcccccgggaggaggaggccatcccgcaccccttggccctgacgcacaagatggggtggctgcagctcctagggaggatgtttgtgctcatctgggccatgtgcatctctgtgaaagagggcattgccatcttcctgctgagaccctcggatctgcagtccatcctctcggatgcctggttccactttgtcttttttatccaagctgtgcttgtgatactgtctgtcttcttgtacttgtttgcctacaaagagtacctcgcctgcctcgtgctggccatggccctgggctgggcgaacatgctctactatacgcggggtttccagtccatgggcatgtacagcgtcatgatccagaaggtcattttgcatgatgttctgaagttcttgtttgtatatatcgtgtttttgcttggatttggagtagccttggcctcgctgatcgagaagtgtcccaaagacaacaaggactgcagctcctacggcagcttcagcgacgcagtgctggaactcttcaagctcaccataggcctgggtgacctgaacatccagcagaactccaagtatcccattctctttctgttcctgctcatcacctatgtcatcctcacctttgttctcctcctcaacatgctcattgctctgatgggcgagactgtggagaacgtctccaaggagagcgaacgcatctggcgcctgcagagagccaggaccatcttggagtttgagaaaatgttaccagaatggctgaggagcagattccggatgggagagctgtgcaaagtggccgaggatgatttccgactgtgtttgcggatcaatgaggtgaagtggactgaatggaagacgcacgtctccttccttaacgaagacccggggcctgtaagacgaacagcagatttcaacaaaatccaagattcttccaggaacaacagcaaaaccactctcaatgcatttgaagaagtcgaggaattcccggaaacctcggtgtagaagcggaacccagagctggtgtgcgcgtgcgctgtctggcgctgcaggcggagtcaccgactctgtgcagagaggctttgagggatggtggagtcc

SEQ ID NO: 92553 - protein, 748 aa, Artificial Sequence
  derived and/or modified sequence
MSQFLCLKNIRTFLSTCCEKFGLKRSELFEAFDLFDVQDFGKVIYTLSALSWTPIAQNRGIMPFPTEEESVGDEDIYSGLSDQIDDTVEEDEDLYDCVENEEAEGDEIYEDLMRSEPVSMPHFLKPLQRFLKPQDIEIIFINIEDLLRVHTHFLKEMKEALGTPGAANLYQVFIKYKERFLVYGRYCSQVESASKHLDRVAAAREDVQMKLEECSQRANNGRFTLRDLLMVPMQRVLKYHLLLQELVKHTQEAMEKENLRLALDAMRDLAQCVNEVKRDNETLRQITNFQLSIENLDQSLAHYGRPKIDGELKITSVERRSKMDRYAFLLDKALLICKRRGDSYDLKDFVNLHSFQVRDDSSGDRDNKKWSHMFLLIEDQGAQGYELFFKTRELKKKWMEQFEMAISNIYPENATANGHDFQMFSFEETTSCKACQMLLRGTFYQGYRCHRCRASAHKECLGRVPPCGRHGQDFPGTMKKDKLHRRAQDKKRNELGLPKMEVFQEYYGLPPPPGAIGPFLRLNPGDIVELTKAEAEQNWWEGRNTSTNEIGWFPCNRVKPYVHGPPQDLSVHLWYAGPMERAGAESILANRSDGTFLVRQRVKDAAEFAISIKYNVEVKHIKIMTAEGLYRITEKKAFRGLTELVEFYQQNSLKDCFKSLDTTLQFPFKEPEKRTISRPAVGSTKYFGTAKARYDFCARDRSELSLKEGDIIKILNKKGQQGWWRGEIYGRVGWFPANYVEEDYSEYC

SEQ ID NO: 92554 - protein, 813 aa, Artificial Sequence
  derived and/or modified sequence
MELWRQCTHWLIQCRVLPPSHRVTWDGAQVCELAQALRDGVLLCQLLNNLLPHAINLREVNLRPQMSQFLCLKNIRTFLSTCCEKFGLKRSELFEAFDLFDVQDFGKVIYTLSALSWTPIAQNRGIMPFPTEEESVGDEDIYSGLSDQIDDTVEEDEDLYDCVENEEAEGDEIYEDLMRSEPVSMPHFLKPLQRFLKPQDIEIIFINIEDLLRVHTHFLKEMKEALGTPGAANLYQVFIKYKERFLVYGRYCSQVESASKHLDRVAAAREDVQMKLEECSQRANNGRFTLRDLLMVPMQRVLKYHLLLQELVKHTQEAMEKENLRLALDAMRDLAQCVNEVKRDNETLRQITNFQLSIENLDQSLAHYGRPKIDGELKITSVERRSKMDRYAFLLDKALLICKRRGDSYDLKDFVNLHSFQVRDDSSGDRDNKKWSHMFLLIEDQGAQGYELFFKTRELKKKWMEQFEMAISNIYPENATANGHDFQMFSFEETTSCKACQMLLRGTFYQGYRCHRCRASAHKECLGRVPPCGRHGQDFPGTMKKDKLHRRAQDKKRNELGLPKMEVFQEYYGLPPPPGAIGPFLRLNPGDIVELTKAEAEQNWWEGRNTSTNEIGWFPCNRVKPYVHGPPQDLSVHLWYAGPMERAGAESILANRSDGTFLVRQRVKDAAEFAISIKYNVEVKHIKIMTAEGLYRITEKKAFRGLTELVEFYQQNSLKDCFKSLDTTLQFPFKEPEKRTISRPAVGSTKYFGTAKARYDFCARDRSELSLKEGDIIKILNKKGQQGWWRGEIYGRVGWFPANYVEEDYSEYC

SEQ ID NO: 92555 - DNA, 2247 bp, Artificial Sequence
  derived and/or modified sequence
atgagccagttcctgtgcctgaagaacatcagaaccttcctgagcacctgctgcgagaagttcggcctgaagagaagcgagctgttcgaggccttcgacctgttcgacgtgcaggacttcggcaaggtgatctacaccctgagcgccctgagctggacccccatcgcccagaacagaggcatcatgcccttccccaccgaggaggagagcgtgggcgacgaggacatctacagcggcctgagcgaccagatcgacgacaccgtggaggaggacgaggacctgtacgactgcgtggagaacgaggaggccgagggcgacgagatctacgaggacctgatgagaagcgagcccgtgagcatgccccacttcctgaagcccctgcagagattcctgaagccccaggacatcgagatcatcttcatcaacatcgaggacctgctgagagtgcacacccacttcctgaaggagatgaaggaggccctgggcacccccggcgccgccaacctgtaccaggtgttcatcaagtacaaggagagattcctggtgtacggcagatactgcagccaggtggagagcgccagcaagcacctggacagagtggccgccgccagagaggacgtgcagatgaagctggaggagtgcagccagagagccaacaacggcagattcaccctgagagacctgctgatggtgcccatgcagagagtgctgaagtaccacctgctgctgcaggagctggtgaagcacacccaggaggccatggagaaggagaacctgagactggccctggacgccatgagagacctggcccagtgcgtgaacgaggtgaagagagacaacgagaccctgagacagatcaccaacttccagctgagcatcgagaacctggaccagagcctggcccactacggcagacccaagatcgacggcgagctgaagatcaccagcgtggagagaagaagcaagatggacagatacgccttcctgctggacaaggccctgctgatctgcaagagaagaggcgacagctacgacctgaaggacttcgtgaacctgcacagcttccaggtgagagacgacagcagcggcgacagagacaacaagaagtggagccacatgttcctgctgatcgaggaccagggcgcccagggctacgagctgttcttcaagaccagagagctgaagaagaagtggatggagcagttcgagatggccatcagcaacatctaccccgagaacgccaccgccaacggccacgacttccagatgttcagcttcgaggagaccaccagctgcaaggcctgccagatgctgctgagaggcaccttctaccagggctacagatgccacagatgcagagccagcgcccacaaggagtgcctgggcagagtgcccccctgcggcagacacggccaggacttccccggcaccatgaagaaggacaagctgcacagaagagcccaggacaagaagagaaacgagctgggcctgcccaagatggaggtgttccaggagtactacggcctgccccccccccccggcgccatcggccccttcctgagactgaaccccggcgacatcgtggagctgaccaaggccgaggccgagcagaactggtgggagggcagaaacaccagcaccaacgagatcggctggttcccctgcaacagagtgaagccctacgtgcacggccccccccaggacctgagcgtgcacctgtggtacgccggccccatggagagagccggcgccgagagcatcctggccaacagaagcgacggcaccttcctggtgagacagagagtgaaggacgccgccgagttcgccatcagcatcaagtacaacgtggaggtgaagcacatcaagatcatgaccgccgagggcctgtacagaatcaccgagaagaaggccttcagaggcctgaccgagctggtggagttctaccagcagaacagcctgaaggactgcttcaagagcctggacaccaccctgcagttccccttcaaggagcccgagaagagaaccatcagcagacccgccgtgggcagcaccaagtacttcggcaccgccaaggccagatacgacttctgcgccagagacagaagcgagctgagcctgaaggagggcgacatcatcaagatcctgaacaagaagggccagcagggctggtggagaggcgagatctacggcagagtgggctggttccccgccaactacgtggaggaggactacagcgagtactgctag

SEQ ID NO: 92556 - DNA, 2442 bp, Artificial Sequence
  derived and/or modified sequence
atggagctgtggagacagtgcacccactggctgatccagtgcagagtgctgccccccagccacagagtgacctgggacggcgcccaggtgtgcgagctggcccaggccctgagagacggcgtgctgctgtgccagctgctgaacaacctgctgccccacgccatcaacctgagagaggtgaacctgagaccccagatgagccagttcctgtgcctgaagaacatcagaaccttcctgagcacctgctgcgagaagttcggcctgaagagaagcgagctgttcgaggccttcgacctgttcgacgtgcaggacttcggcaaggtgatctacaccctgagcgccctgagctggacccccatcgcccagaacagaggcatcatgcccttccccaccgaggaggagagcgtgggcgacgaggacatctacagcggcctgagcgaccagatcgacgacaccgtggaggaggacgaggacctgtacgactgcgtggagaacgaggaggccgagggcgacgagatctacgaggacctgatgagaagcgagcccgtgagcatgccccacttcctgaagcccctgcagagattcctgaagccccaggacatcgagatcatcttcatcaacatcgaggacctgctgagagtgcacacccacttcctgaaggagatgaaggaggccctgggcacccccggcgccgccaacctgtaccaggtgttcatcaagtacaaggagagattcctggtgtacggcagatactgcagccaggtggagagcgccagcaagcacctggacagagtggccgccgccagagaggacgtgcagatgaagctggaggagtgcagccagagagccaacaacggcagattcaccctgagagacctgctgatggtgcccatgcagagagtgctgaagtaccacctgctgctgcaggagctggtgaagcacacccaggaggccatggagaaggagaacctgagactggccctggacgccatgagagacctggcccagtgcgtgaacgaggtgaagagagacaacgagaccctgagacagatcaccaacttccagctgagcatcgagaacctggaccagagcctggcccactacggcagacccaagatcgacggcgagctgaagatcaccagcgtggagagaagaagcaagatggacagatacgccttcctgctggacaaggccctgctgatctgcaagagaagaggcgacagctacgacctgaaggacttcgtgaacctgcacagcttccaggtgagagacgacagcagcggcgacagagacaacaagaagtggagccacatgttcctgctgatcgaggaccagggcgcccagggctacgagctgttcttcaagaccagagagctgaagaagaagtggatggagcagttcgagatggccatcagcaacatctaccccgagaacgccaccgccaacggccacgacttccagatgttcagcttcgaggagaccaccagctgcaaggcctgccagatgctgctgagaggcaccttctaccagggctacagatgccacagatgcagagccagcgcccacaaggagtgcctgggcagagtgcccccctgcggcagacacggccaggacttccccggcaccatgaagaaggacaagctgcacagaagagcccaggacaagaagagaaacgagctgggcctgcccaagatggaggtgttccaggagtactacggcctgccccccccccccggcgccatcggccccttcctgagactgaaccccggcgacatcgtggagctgaccaaggccgaggccgagcagaactggtgggagggcagaaacaccagcaccaacgagatcggctggttcccctgcaacagagtgaagccctacgtgcacggccccccccaggacctgagcgtgcacctgtggtacgccggccccatggagagagccggcgccgagagcatcctggccaacagaagcgacggcaccttcctggtgagacagagagtgaaggacgccgccgagttcgccatcagcatcaagtacaacgtggaggtgaagcacatcaagatcatgaccgccgagggcctgtacagaatcaccgagaagaaggccttcagaggcctgaccgagctggtggagttctaccagcagaacagcctgaaggactgcttcaagagcctggacaccaccctgcagttccccttcaaggagcccgagaagagaaccatcagcagacccgccgtgggcagcaccaagtacttcggcaccgccaaggccagatacgacttctgcgccagagacagaagcgagctgagcctgaaggagggcgacatcatcaagatcctgaacaagaagggccagcagggctggtggagaggcgagatctacggcagagtgggctggttccccgccaactacgtggaggaggactacagcgagtactgctag

SEQ ID NO: 92557 - DNA, 2247 bp, Artificial Sequence
  derived and/or modified sequence
atgtcacagtttctttgtctaaagaatattcggactttcttgagtacttgttgtgagaagtttggtctgaaaaggtctgagctgttcgaagccttcgacctcttcgacgttcaagacttcgggaaggtgatttataccctgtcggccctctcatggacccccattgcacagaacaggggcatcatgccgtttcccacggaggaagagagcgtcggagacgaagatatttactctggactgagcgatcaaatcgatgacacggtagaggaagacgaggatctgtacgactgcgtggagaacgaagaagccgagggagatgagatttacgaagatctgatgaggagcgagccagtcagcatgccccacttcctgaagcctctgcagcgcttcctaaagccccaggatatagaaattattttcattaacatagaggatctgttgagggtgcacactcatttcctgaaggagatgaaggaagcgctgggaacgcctggagccgccaacctgtaccaagtgtttataaaatacaaggagcggttccttgtctacggcagatactgcagccaagtggaatctgcgtcaaaacatttagatcgggtcgcagcagcccgggaggatgtacagatgaaactcgaggagtgttctcagagagctaataacggccgctttacattgcgagacttactcatggtccccatgcagcgtgtgttaaagtatcatctgcttttacaagaattggttaagcatacccaggaggccatggagaaggaaaatttgaggctcgccctcgatgctatgagagacctggcgcagtgcgtgaacgaggtaaaacgagacaacgaaacccttcgccagataaccaatttccagctcagcattgagaacctcgatcagagcttggcgcattatgggcgccccaagatcgacggggagctcaaaattacctccgtggagagaagatcaaagatggatagatacgcattcctactagacaaagccctcttgatttgtaaacgaagaggcgattcctacgatcttaaggactttgtgaatttgcactcctttcaggtcagagacgacagttcaggcgatcgcgataacaaaaagtggtcccatatgttcctgctcattgaagaccagggagcccaaggatacgagcttttttttaagactagagaactgaaaaagaaatggatggagcagttcgaaatggccatatccaatatctatcctgagaatgctacagctaatggtcacgatttccagatgttcagctttgaggaaacgacaagctgcaaggcatgtcagatgctgctgagaggaacattctaccaaggctatagatgtcacaggtgtcgggccagtgcacacaaggagtgtctgggacgggtgcccccatgcggccgtcacggtcaggacttccccggaaccatgaagaaggacaagttgcaccggcgcgcccaggataaaaaacgcaacgagttagggttaccgaagatggaggtattccaggagtattatggcctcccgccacccccgggagctatcggccccttcctccgcctgaaccccggggatattgtggagcttactaaagcggaagccgaacagaactggtgggaggggcgcaataccagcaccaacgaaatagggtggttcccttgcaaccgcgttaaaccgtacgttcatgggcccccccaggacctctctgttcacttgtggtatgctggcccgatggaacgtgcaggtgctgaaagtatcctggctaacaggtccgacggcacatttctggtccggcagagagtgaaggacgcggcagagtttgctatcagcattaagtacaatgtggaggtcaagcatatcaagattatgactgcagaggggctatacagaatcacagagaagaaggcttttcggggattgacagaactggtggaattctatcagcagaacagtttgaaggattgttttaaatccctggatactaccctgcagttcccgtttaaggagccggagaagcgtaccatttctaggccagccgtggggtcgacaaagtactttgggacagcaaaggcacgttatgatttttgtgcacgtgaccggtcagaactttctctgaaggaaggtgacattatcaagatacttaacaagaaagggcaacagggctggtggcgtggagagatctacggacgtgttggctggtttccagcaaattatgtggaggaggactattcagaatactgttag

SEQ ID NO: 92558 - DNA, 2442 bp, Artificial Sequence
  derived and/or modified sequence
atggaactgtggaggcagtgtacccactggctaattcagtgccgcgttctgcccccttcccatcgcgtgacttgggacggcgcccaagtgtgtgagttagcgcaggcattgcgggatggcgttctactgtgccaactccttaacaatctgttacctcacgccatcaacctgagggaagtcaaccttagaccccaaatgagccagttcttgtgtctcaagaacattagaacctttctttctacatgctgtgagaagtttggcctcaaacgatcagagttgttcgaagccttcgacctctttgatgtgcaggactttggaaaagtgatctacacactgtccgcgctctcttggaccccaatcgcgcagaatagaggaataatgccatttcccactgaagaggaatccgtgggtgatgaggatatttatagcggtttatctgatcagattgacgataccgtggaggaggacgaagacctgtacgattgtgtggagaatgaagaagcggagggtgatgaaatctacgaagaccttatgcggtccgagccagtttcgatgccacatttcctcaaaccgctccagaggttcctaaaacctcaggatatagaaatcatctttattaatatagaggaccttctgcgcgtgcatacacacttcctgaaggagatgaaagaggccctggggacccctggggccgcaaacctctatcaggtctttatcaagtataaggagaggtttttggtttacggcagatactgctcacaggttgaaagtgcatccaaacatttagatcgcgtggcggcggcacgtgaagacgtgcagatgaagcttgaggaatgctctcagagggctaacaatggtagatttactctacgggatttgctgatggttcccatgcaaagagtgctgaagtaccatctcttactccaggaattggtgaagcatactcaggaagcaatggagaaagagaatctacgcctggcattggacgccatgcgggatcttgctcagtgcgtgaacgaggttaaacgcgacaatgagaccttgcgccagataaccaactttcagctcagcatcgaaaatctggatcagtccctggcccactacggcagacctaagattgatggagagctgaaaatcacgtccgtggaaagacgatcaaagatggatagatacgcctttctgcttgacaaagcgctgttaatatgcaagaggaggggcgacagctacgacctaaaagatttcgtgaacctgcattctttccaggtacgcgatgacagctcaggcgacagggataataagaaatggagtcacatgttcttactaattgaggaccagggcgcgcaaggctacgaattgttttttaagaccagggaactaaaaaagaagtggatggagcaattcgagatggccattagtaatatctatccagagaatgctactgctaatggccatgatttccagatgtttagctttgaggaaaccacaagctgcaaggcatgccagatgctgcttagggggaccttctaccagggataccgctgtcacaggtgccgggcaagcgctcacaaggagtgcctggggcgtgtgcccccatgcgggagacatgggcaggatttcccgggaacaatgaaaaaggataaactgcaccggagggcccaagacaagaaacgcaacgagcttgggcttcctaaaatggaggtatttcaggaatactacggcctcccgcctccaccaggggctattggcccgtttctgcgcttgaaccccggagatattgttgaattgactaaagcagaggcagagcaaaactggtgggaaggaaggaatacatccacaaacgagattggatggttcccatgtaatcgggtgaagccctacgtccatgggcccccccaggatctgagtgtccacctgtggtatgccggccccatggagcgcgccggcgcagagtccattctggctaacaggagtgatggcacttttctcgttcgacagagagtaaaggacgctgcggaatttgccattagcattaaatacaatgtggaggtcaagcatatcaaaataatgacagccgaaggcctgtataggattaccgagaaaaaagcatttcgcggcttaacagagctggtggaattctaccagcaaaattcactgaaggattgtttcaagagcctcgacaccactctgcaattcccttttaaggaacccgagaagcggacgataagtcgcccagcggtggggagcacaaaatacttcggcaccgctaaggcccgatatgacttttgcgcccgggatagaagcgaattgagcctgaaggaaggtgatattattaaaattctgaacaaaaaggggcagcagggctggtggcgtggggaaatttatggacgagtggggtggtttcctgccaattatgtagaggaagattactctgagtattgctag

SEQ ID NO: 92559 - DNA, 2247 bp, Artificial Sequence
  derived and/or modified sequence
atgagccagttcctgtgcctgaagaacatccgcaccttcctgagcacctgctgtgagaagtttggcctgaagaggtctgagctgtttgaggcctttgacctgtttgatgtgcaggactttgggaaggtgatctacaccctgagcgccctgtcctggacccccatcgcccagaacagaggcatcatgcccttccccacagaggaggagagcgtgggagatgaggacatctacagcggcctgagtgaccagattgatgacacagtggaggaggatgaggacctgtatgactgtgtggagaatgaggaggccgagggagatgagatctatgaggacctgatgaggtctgagcctgtgtccatgccccacttcctgaagcccctgcagcgcttcctgaagccccaggacatcgagatcatcttcatcaacatcgaggacctgctgcgggtgcacacccacttcctgaaggagatgaaggaggccctgggcacccctggggccgccaacctgtaccaggtgttcatcaagtacaaggagcgcttcctggtgtatggccgctactgcagccaggtggagagcgccagcaagcacctggacagagtggccgccgccagagaagatgtgcagatgaagctggaggagtgcagccagagggccaacaacggccgcttcaccctgcgggacctgctgatggtgcccatgcagagggtgctgaagtaccacctgctgctgcaggagctggtgaagcacacccaggaggccatggagaaggagaacctgcggctggccctggatgccatgagggacctggcccagtgtgtgaatgaggtgaagagggacaatgagaccctgcggcagatcaccaacttccagctgagcattgagaacctggaccagagcctggcccactacggccggcccaagattgatggagagctgaagatcacctctgtggagaggaggagcaagatggacagatatgccttcctgctggacaaggccctgctgatctgcaagagaagaggagacagctatgacctgaaggactttgtgaacctgcacagcttccaggtgagagatgacagcagcggggaccgggacaacaagaagtggagccacatgttcctgctgattgaggaccagggcgcccagggctatgagctgttcttcaagacccgggagctgaagaagaagtggatggagcagtttgagatggccatcagcaacatctacccagaaaatgccacagccaatggacatgacttccagatgttctcctttgaggagaccaccagctgcaaggcctgccagatgctgctgcggggcaccttctaccagggctaccgctgccaccgctgccgggccagcgcccacaaggaatgtctgggccgggtgcccccctgtggccgccacggccaggacttccctggcaccatgaagaaggacaagctgcacagaagagcccaggacaagaagagaaatgagctgggcctgcccaagatggaggtgttccaggagtactacggcctgcccccacctcctggggccatcggccccttcctgcggctgaaccctggggacatcgtggagctgaccaaggccgaggccgagcagaactggtgggagggcaggaacaccagcaccaatgagatcggctggttcccctgcaacagagtgaagccctacgtgcacggccccccccaggacctgtctgtgcacctgtggtacgccggccccatggagcgggccggggctgagagcatcctggccaacagaagtgatggcaccttcctggtgcggcagagggtgaaggatgctgctgagtttgccatcagcatcaagtacaacgtggaggtgaagcacatcaagatcatgacagctgagggcctgtaccgcatcacagagaagaaggccttccggggcctgacagagctggtggagttctaccagcagaacagcctgaaggactgcttcaagagcctggacaccaccctgcagttccccttcaaggagcctgagaagaggaccatcagcaggcctgctgtgggcagcaccaagtactttggaacagccaaggcccgctatgacttctgtgcccgggacagaagtgagctgagcctgaaggagggggacatcatcaagatcctgaacaagaagggccagcagggctggtggagaggagagatctacggccgggtgggctggttccctgccaactacgtggaggaggactacagcgagtactgctag

SEQ ID NO: 92560 - DNA, 2442 bp, Artificial Sequence
  derived and/or modified sequence
atggagctgtggaggcagtgcacccactggctgatccagtgccgggtgctgccccccagccaccgggtgacctgggatggagcccaggtgtgtgagctggcccaggccctgagagatggagtgctgctgtgccagctgctgaacaacctgctgccccacgccatcaacctgcgggaggtgaacctgcggccccagatgagccagttcctgtgcctgaagaacatccgcaccttcctgagcacctgctgtgagaagtttggcctgaagaggtctgagctgtttgaggcctttgacctgtttgatgtgcaggactttgggaaggtgatctacaccctgagcgccctgtcctggacccccatcgcccagaacagaggcatcatgcccttccccacagaggaggagagcgtgggagatgaggacatctacagcggcctgagtgaccagattgatgacacagtggaggaggatgaggacctgtatgactgtgtggagaatgaggaggccgagggagatgagatctatgaggacctgatgaggtctgagcctgtgtccatgccccacttcctgaagcccctgcagcgcttcctgaagccccaggacatcgagatcatcttcatcaacatcgaggacctgctgcgggtgcacacccacttcctgaaggagatgaaggaggccctgggcaccccaggagctgccaacctgtaccaggtgttcatcaagtacaaggagcgcttcctggtgtatggccgctactgcagccaggtggagagcgccagcaagcacctggacagagtggccgccgcccgggaggatgtgcagatgaagctggaggagtgcagccagagggccaacaacggccgcttcaccctgcgggacctgctgatggtgcccatgcagagggtgctgaagtaccacctgctgctgcaggagctggtgaagcacacccaggaggccatggagaaggagaacctgcggctggccctggatgccatgagggacctggcccagtgtgtgaatgaggtgaagagggacaatgagaccctgcggcagatcaccaacttccagctgagcattgagaacctggaccagagcctggcccactacggccggcccaagattgatggagagctgaagatcacctctgtggagcggcgcagcaagatggacagatatgccttcctgctggacaaggccctgctgatctgcaagagaagaggagacagctatgacctgaaggactttgtgaacctgcacagcttccaggtgagagatgacagcagcggggaccgggacaacaagaagtggagccacatgttcctgctgattgaggaccagggcgcccagggctatgagctgttcttcaagacccgggagctgaagaagaagtggatggagcagtttgagatggccatcagcaacatctacccagaaaatgccacagccaacggccatgacttccagatgttctcctttgaggagaccaccagctgcaaggcctgccagatgctgctgcggggcaccttctaccagggctaccgctgccaccgctgccgggccagcgcccacaaggagtgcctgggccgggtgcccccctgtggcagacatggccaggacttccctggcaccatgaagaaggacaagctgcaccggcgggcccaggacaagaagagaaatgagctgggcctgcccaagatggaggtgttccaggagtactacggcctgcccccacctcctggggccatcggccccttcctgcggctgaaccctggggacatcgtggagctgaccaaggccgaggccgagcagaactggtgggagggcaggaacaccagcaccaatgaaattggctggttcccctgcaacagagtgaagccctacgtgcacggccccccccaggacctgtctgtgcacctgtggtacgccggccccatggagagagctggagctgagagcatcctggccaacagaagtgatggcaccttcctggtgcggcagagggtgaaggatgctgctgagtttgccatcagcatcaagtacaacgtggaggtgaagcacatcaagatcatgacagctgagggcctgtaccgcatcacagagaagaaggccttccggggcctgacagagctggtggagttctaccagcagaacagcctgaaggactgcttcaagagcctggacaccaccctgcagttccccttcaaggagcctgagaagaggaccatcagcaggcctgctgtgggcagcaccaagtacttcggcacagccaaggcccgctatgacttctgtgcccgggacagaagtgagctgagcctgaaggagggggacatcatcaagatcctgaacaagaagggccagcagggctggtggagaggagagatctacggccgggtgggctggttccctgccaactacgtggaggaggactacagcgagtactgctag

SEQ ID NO: 92561 - DNA, 2247 bp, Artificial Sequence
  derived and/or modified sequence
atgagccagttcctgtgcctgaagaacatccggaccttcctgagcacgtgttgtgaaaaatttggcctaaaacgttctgagcttttcgaggcgttcgatttattcgacgtccaggattttggcaaggtgatctatacactgagcgcactaagctggacacccatagctcaaaatcgcggaatcatgccgttccctacagaggaagagtctgtaggagatgaggacatctattccggcctgtccgatcagattgatgacaccgttgaagaagacgaggatttgtatgactgtgtggaaaacgaggaggctgagggcgatgagatctacgaagatcttatgcgaagcgagccagtgtcaatgcctcactttctcaaacctcttcagcgcttcctgaagccacaggacattgaaattatttttatcaatatcgaagatctgctacgagtgcacacgcattttttaaaggagatgaaggaggccctcggcaccccgggcgccgcaaacctctaccaggtgttcatcaaatacaaagaacgatttctggtgtacggacgatattgcagtcaggtggagtccgcctctaagcacctggaccgggttgccgctgcccgcgaggatgtacagatgaaactggaggaatgtagtcagcgtgccaataacgggcgatttactctacgggacttgctgatggtacccatgcagagagtactgaaataccatctgctccttcaggagctggtgaaacatacccaagaagctatggaaaaagagaatctcagactggctttggacgccatgagggatctggcccagtgtgtaaatgaagtcaaaagagacaacgagactctccgccagatcacaaattttcagttgtcaattgaaaatttggaccaatccctggcccactatggaagaccaaaaattgacggcgaactcaagataacgagtgtagagaggcgcagcaagatggacaggtacgcgtttctgcttgataaggccctcctcatttgcaaaaggagaggtgactcatatgaccttaaagatttcgttaacctccattcttttcaggttcgggatgatagcagcggcgatagggacaacaagaaatggagccatatgtttctgctgattgaggatcagggcgcgcaagggtatgaacttttctttaagaccagagagttgaaaaaaaagtggatggagcagtttgagatggccatcagtaatatatatcctgaaaacgccactgccaacggtcacgacttccagatgttctcttttgaagaaacaacgtcctgcaaagcttgtcaaatgctgctccgcggtacattctatcaggggtacagatgccacaggtgcagagcctccgcgcataaagaatgcttggggcgggttccaccatgtggacggcacgggcaggactttcctgggacgatgaagaaagataaattacaccggcgagcccaggacaaaaagcgcaacgagttgggactgcctaagatggaagtgttccaagagtactatgggctgccaccacctcctggagccattggaccattcttacggctgaaccccggcgacatcgtcgagttaacaaaggccgaagccgagcagaattggtgggaaggccgaaatacctctacaaatgaaatcggatggttcccttgcaatagagtgaaaccctatgtccacgggcctccacaagatctgtctgtgcatctctggtatgccggacctatggagcgagccggggctgagtcgatcctagctaaccggagcgacgggaccttcctcgtacggcagagagtgaaggatgccgctgagttcgccatatctataaagtacaacgtagaggtcaagcacataaaaattatgactgctgagggcttgtaccgaataacagagaaaaaagctttcagaggactgacagagttggtagaattctaccagcagaacagtcttaaagactgcttcaaatctctggacactactttgcagtttccgttcaaagagccagaaaagcgcactatctcgaggcccgcagtcggctccaccaaatattttggaacagcaaaagccaggtatgatttttgtgcccgtgacagatctgaactgtcacttaaggagggagacatcataaaaattctgaataaaaaaggacagcagggctggtggaggggggagatttacggcagggtcggatggtttccagccaactacgtagaggaagactacagtgaatactgttag

SEQ ID NO: 92562 - DNA, 2442 bp, Artificial Sequence
  derived and/or modified sequence
atggagctgtggcggcagtgcacccactggctgatccagtgccgggtgctgcctccaagccatagagtcacctgggacggcgcccaggtctgcgagttggcccaagcactgagagatggcgtgctcttatgtcagctgctcaataacctgctgccccacgctatcaatttacgtgaggtcaatcttcggccccaaatgtctcagttcttatgcctgaaaaatatccgcactttcctgtccacttgttgcgagaaatttggtcttaaacgtagcgaattatttgaggctttcgacctgttcgacgtgcaggactttggcaaggttatttatacactctctgctctgagctggacaccaattgcccaaaatagaggcatcatgccgttcccgaccgaagaggaatcagtgggagacgaggacatttactctggcctcagcgatcagattgacgacacggtggaagaagatgaagatttgtatgactgtgtggaaaatgaagaagctgaaggagacgagatctacgaggacttaatgcgctcagagcctgtgtccatgccacattttttaaaacctctccagcgtttcctcaaaccacaggatatcgaaatcatctttattaacatcgaggatcttttgcgggtacacacacactttctgaaagagatgaaggaggctttaggcacgcctggcgcagctaatctgtaccaggttttcataaagtataaggagcgctttctggtttacggaagatactgttctcaggttgaaagcgcttcgaagcatctggacagggtagccgcagctcgtgaagacgtccaaatgaaactggaggagtgttctcagcgggctaacaacgggagattcacgctccgcgacctcctgatggttccaatgcagagagtcctgaaataccatttgctccttcaggaactcgttaaacatacacaggaagcaatggagaaggagaacttgaggctggcgctagacgctatgcgtgatcttgcacagtgcgttaatgaggtgaaacgcgacaatgagactctaagacagataactaacttccagctatcaatcgagaaccttgaccaaagtttagctcactacggaagacctaagatcgacggggaactgaagatcactagcgtggagagaaggtccaaaatggaccggtatgcctttttgttggacaaagctctgctgatctgcaagcggcgcggtgattcctacgatctgaaggacttcgtcaacctgcatagcttccaggtccgcgatgatagttcgggggatagagataacaaaaaatggtctcacatgtttctactcatagaggaccagggggcacaaggctacgagctattctttaagacaagagagctgaaaaagaaatggatggagcagttcgaaatggctatcagtaacatctatcccgaaaatgctacagcaaatggtcatgactttcagatgttttcatttgaggagactacaagttgcaaggcctgtcaaatgctgctaagaggtactttttatcagggctacaggtgccataggtgccgcgcctctgcacacaaagagtgcctcgggcgggttccaccatgcggccgacatggccaggacttcccaggaacaatgaagaaggacaagttgcaccgcagagctcaggataagaagcggaatgaacttggattgccgaagatggaggtgttccaggagtattatggactgccaccacctcctggcgcgatcggaccctttctgagactcaaccctggcgacattgtggaactgacgaaggccgaagcagagcaaaattggtgggagggccggaatacttctaccaatgagattggttggttcccttgcaatcgcgtaaagccgtatgtccacggccctccgcaggatctgtctgtgcacctttggtatgccggtcccatggagagggccggcgccgagtccattctcgcaaaccggagcgacggtacctttctggtgcgacagcgggttaaagacgccgccgagtttgccatcagtatcaaatataacgtggaagtaaaacacattaaaattatgacagccgagggactgtacaggataaccgaaaaaaaggccttccgaggcctgacggagctggtggagttctaccagcagaatagcctcaaggattgctttaagagcctagacactacactccaattccccttcaaggagcctgagaagagaacgatatcaagaccggccgtagggtccaccaagtattttggaactgcgaaggcacgctatgatttctgcgctcgagatcgcagcgagttgtctcttaaagaaggggacatcattaagattttgaataaaaagggccagcaaggttggtggagaggggagatctacggtagggtcggctggtttccggcaaactacgttgaggaggactactctgagtattgttag

SEQ ID NO: 92563 - DNA, 2247 bp, Artificial Sequence
  derived and/or modified sequence
atgtctcagttcctgtgtctcaagaacattcggacctttctctccacatgctgtgagaagttcggattgaaacggtccgagcttttcgaggctttcgatttgtttgacgtacaggatttcggcaaagtgatatacaccttgagcgcccttagttggacccccatcgctcagaaccggggtattatgccctttccaaccgaggaggaatccgtgggcgacgaggatatttactccgggttgagtgatcagatcgacgacacagtggaagaggacgaggacctttacgattgcgtggagaacgaggaggctgaaggagatgagatttatgaggacctgatgaggagcgagcccgtgagtatgcctcatttcctcaaaccgctgcagcgtttcctgaagccccaggacattgagatcatatttatcaatattgaggacctgctgcgcgtacacactcacttcttaaaggaaatgaaagaggcactgggcacgcccggagcagcgaatctgtaccaggtgttcattaagtacaaagagcgcttccttgtttacggaaggtactgttcacaagtggagtctgcctctaaacatctcgatcgggtagcagccgctcgcgaggatgtgcaaatgaagctcgaagagtgctcacaacgggctaataacggtcgatttacgttgcgagacttgttgatggtcccgatgcagcgggtccttaaatatcatctactcctgcaggaactggtgaagcacacccaggaggcgatggaaaaggaaaatctgcggctcgccctcgatgccatgcgagatcttgcacagtgcgtaaatgaagtgaagcgagacaatgagacgctccgccagattactaattttcaattaagcattgaaaatttagaccagagcctagctcactacggtcggcctaagatcgacggggagctgaagattacaagcgtcgaaagacggagcaagatggaccgctacgcttttctgctcgacaaagccctgctaatttgtaaacgtcggggtgactcttacgacctcaaagatttcgtgaatttacactcttttcaggtgcgcgatgacagtagtggggatcgcgataacaagaagtggtctcatatgttcctcctaatcgaggaccagggtgcccaggggtacgagcttttcttcaaaactcgggagctgaagaagaagtggatggagcagttcgaaatggccatcagcaatatctacccagagaacgctaccgccaacggccacgatttccagatgttcagttttgaagagacaacttcctgtaaagcttgccagatgcttctgaggggcaccttctatcaaggataccggtgtcatcggtgccgcgcatctgctcacaaggagtgcctggggcgtgtgccgccttgcggtaggcacggacaagattttccgggaactatgaaaaaagacaagctgcaccggcgagctcaggataagaaacgaaatgagttaggacttcccaagatggaggtattccaggagtactacggtttgccaccgccacctggcgcaatcggcccttttctcaggcttaatcctggagatatcgttgaattgaccaaggcagaagcagagcagaactggtgggaagggcgaaacacatccacaaatgaaattgggtggttcccctgcaatcgggttaagccttatgtgcacgggccaccacaggatttgtctgtccacctgtggtacgccggtccaatggagcgagctggtgccgagtctattctagctaacagatcagacgggacctttttggttaggcaaagggtcaaggatgcagcagaatttgcaatcagcatcaaatacaatgtggaggtgaaacacattaaaattatgaccgccgaggggctctacaggattacagagaagaaggccttcaggggtctgactgaattggtggaattttatcaacagaatagcctcaaagattgctttaagagcctggacacaactctccagttcccatttaaggagcccgagaagcgaacaatctcaagaccggctgttggcagcacaaagtactttggcaccgctaaggcgagatacgacttctgcgccagggaccgcagtgaactctcactgaaggagggcgatattataaagatactcaacaaaaaaggtcagcaaggctggtggaggggtgaaatttacggcagggtgggatggtttcccgctaattacgtggaggaagactattccgagtattgttag

SEQ ID NO: 92564 - DNA, 2442 bp, Artificial Sequence
  derived and/or modified sequence
atggagctgtggagacagtgtactcactggcttatccaatgccgcgtactcccgccttcacacagggtgacctgggatggagcacaggtttgtgagctcgcccaggcccttagagatggcgtccttctgtgccagttactcaataacctccttccccacgctatcaatcttagggaggttaatcttcgacctcagatgtcccagtttctgtgcctcaagaatatccgcacctttctgagcacttgttgcgaaaaatttggacttaaaaggtccgagctgttcgaagccttcgacttgttcgatgtgcaagatttcggaaaagtgatctacaccctgagcgccctatcctggactccaatcgctcagaaccgcggaattatgccattccccacagaggaggagagcgtgggggacgaggacatctactctggtctttcagatcagatcgacgataccgtcgaggaggacgaggatctctacgactgtgtcgaaaacgaggaggccgaaggcgatgaaatttacgaggacctgatgaggtctgaacctgtgtcaatgccacattttctcaagccgcttcaacggttcctgaaaccccaggacatcgagataatctttataaacattgaggacctccttcgggtacacactcactttcttaaggaaatgaaagaagctctcggcaccccgggagccgcaaacttgtaccaggtgttcataaagtacaaggagaggtttctggtttacggtcggtactgctcccaggttgaatcagcttccaaacaccttgaccgagtagctgcggctagagaggacgtccagatgaagctggaagagtgcagccagcgggcaaataacggcaggttcaccctgagggacttgcttatggtacctatgcaacgtgttctgaaataccacctgctcttacaggagctggtaaagcacacacaagaggccatggagaaagaaaacctgagactcgccctcgacgccatgagggacctagcccagtgcgtaaatgaggttaaacgagataatgagactctgaggcagatcaccaacttccagttatcgatagaaaatctggatcagtccctggcccattatggtcggcctaaaatcgacggggaacttaagattacttctgtggaaagaagatcaaagatggatagatacgctttcctgttggacaaagccctgctgatctgcaagcgcaggggggactcgtatgacctgaaggattttgtcaacctgcattctttccaggtgagagacgatagttcgggtgaccgtgacaacaagaagtggtcacatatgttcttgctcatcgaggaccagggggcacaaggctatgaactgttcttcaagacccgcgagctgaagaagaaatggatggaacaattcgagatggctatctcaaatatttaccctgagaacgctactgccaacggccatgacttccagatgttttcctttgaggagactacaagctgtaaggcctgtcaaatgctgctccggggaaccttttatcagggttatcgctgtcaccgctgcagagccagcgcccataaggaatgcctgggcagagtgccgccatgtggacgccatggccaggactttcccggtaccatgaaaaaggacaagctgcatcgtcgggctcaagacaagaagcgaaacgaattaggcctccctaaaatggaagtttttcaggaatattacggcctgcctccacctcctggggctattggtccatttctgagactgaaccccggagacatagttgaactcaccaaggccgaggctgagcagaattggtgggagggccgaaatacctctacaaacgagatcggatggtttccatgtaatcgagtaaagccctacgtgcacggacctcctcaagatctgagcgtccacctgtggtatgctggaccaatggaacgggctggggctgagtccatcctggctaaccggtccgacggcacatttctcgtgcgccagcgggtcaaagacgcagccgagtttgctatttctattaagtacaacgtggaggtcaagcatattaaaattatgaccgccgaagggctgtatcggattactgagaaaaaggcttttcgcggactaacggagctcgtcgagttctatcagcagaattctttgaaggactgttttaagtctctggacactacactgcaattcccttttaaggagccagaaaagagaactattagccggccagcagtcgggagtacgaaatattttggcacagccaaagctaggtatgacttttgtgctagagaccgcagcgagttatctctgaaagagggagacatcattaaaatcttgaacaagaaaggccaacaggggtggtggaggggagaaatatacggccgtgttgggtggttccctgccaattacgtggaggaagactattcagagtattgttag

SEQ ID NO: 92565 - DNA, 2545 bp, Artificial Sequence
  derived and/or modified sequence
ctaccccatgccatcaacctgcgtgaggtcaacctgcgcccccagatgtcccagttcctgtgccttaagaacattagaaccttcctgtccacctgctgtgagaagttcggcctcaagcggagcgagctcttcgaagcctttgacctcttcgatgtgcaggattttggcaaggtcatctacaccctgtctgctctgtcctggaccccgatcgcccagaacagggggatcatgcccttccccaccgaggaggagagtgtaggtgatgaagacatctacagtggcctgtccgaccagatcgacgacacggtggaggaggatgaggacctgtatgactgcgtggagaatgaggaggcggaaggcgacgagatctatgaggacctcatgcgctcggagcccgtgtccatgccgcatttcttgaagcccctgcaacggttcctgaaacctcaagacattgagatcatctttatcaacattgaggacctgcttcgtgttcatactcacttcctaaaggagatgaaggaagccctgggcacccctggcgcagccaatctctaccaggtcttcatcaaatacaaggagaggttcctcgtctatggccgctactgcagccaggtggagtcagccagcaaacacctggaccgtgtggccgcagcccgggaggacgtgcagatgaagctggaggaatgttctcagagagccaacaacgggaggttcaccctgcgggacctgctgatggtgcctatgcagcgagttctcaaatatcacctccttctccaggagctggtgaaacacacgcaggaggcgatggagaaggagaacctgcggctggccctggatgccatgagggacctggctcagtgcgtgaacgaggtcaagcgagacaacgagacactgcgacagatcaccaatttccagctgtccattgagaacctggaccagtctctggctcactatggccggcccaagatcgacggggaactcaagatcacctcggtggaacggcgctccaagatggacaggtatgccttcctgctcgacaaagctctactcatctgtaagcgcaggggagactcctatgacctcaaggactttgtaaacctgcacagcttccaggttcgggatgactcttcaggagaccgagacaacaagaagtggagccacatgttcctcctgatcgaggaccaaggtgcccagggctatgagctgttcttcaagacaagagaattgaagaagaagtggatggagcagtttgagatggccatctccaacatctatccggagaatgccaccgccaacgggcatgacttccagatgttctcctttgaggagaccacatcctgcaaggcctgtcagatgctgcttagaggtaccttctatcagggctaccgctgccatcggtgccgggcatctgcacacaaggagtgtctggggagggtccctccatgtggccgacatgggcaagatttcccaggaactatgaagaaggacaaactacatcgcagggctcaggacaaaaagaggaatgagctgggtctgcccaagatggaggtgtttcaggaatactacgggcttcctccaccccctggagccattggaccctttctacggctcaaccctggagacattgtggagctcacgaaggctgaggctgaacagaactggtgggagggcagaaatacatctactaatgaaattggctggtttccttgtaacagggtgaagccctatgtccatggccctcctcaggacctgtctgttcatctctggtacgcaggccccatggagcgggcaggggcagagagcatcctggccaaccgctcggacgggactttcttggtgcggcagagggtgaaggatgcagcagaatttgccatcagcattaaatataacgtcgaggtcaagcacattaaaatcatgacagcagaaggactgtaccggatcacagagaaaaaggctttccgggggcttacggagctggtggagttttaccagcagaactctctaaaggattgcttcaagtctctggacaccaccttgcagttccccttcaaggagcctgaaaagagaaccatcagcaggccagcagtgggaagcacaaagtattttggcacagccaaagcccgctatgacttctgcgcccgagaccgatcagagctgtcgctcaaggagggtgacatcatcaagatccttaacaagaagggacagcaaggctggtggcgaggggagatctatggccgggttggctggttccctgccaactacgtggaggaagattattctgaatactgctgagccctggtgccttggcagagagacgagaaactccaggctctgagcccggcgtgggcaggcagcggagccaggggctgtgacagctcccggcgggtggagactttgggatggactggaggaggccagcgtccagctggcggtgctcccgggatgtgccctgacatggttaatttataacaccccgatttcctcttgggtcccctcaagcagacggggctcaagggggttacatttaataaaaggatgaagatgg

SEQ ID NO: 92566 - DNA, 2775 bp, Artificial Sequence
  derived and/or modified sequence
aggcgagcagggcaggcgtgcgggcgggtgggtggtggaggctgcgagggtgcacggccggccctgggcaggcggtagccatggagctgtggcgccaatgcacccactggctcatccagtgccgggtgctgccgcccagccaccgcgtgacctgggatggggctcaggtgtgtgaactggcccaggccctccgggatggtgtccttctgtgtcagctgcttaacaacctgctaccccatgccatcaacctgcgtgaggtcaacctgcgcccccagatgtcccagttcctgtgccttaagaacattagaaccttcctgtccacctgctgtgagaagttcggcctcaagcggagcgagctcttcgaagcctttgacctcttcgatgtgcaggattttggcaaggtcatctacaccctgtctgctctgtcctggaccccgatcgcccagaacagggggatcatgcccttccccaccgaggaggagagtgtaggtgatgaagacatctacagtggcctgtccgaccagatcgacgacacggtggaggaggatgaggacctgtatgactgcgtggagaatgaggaggcggaaggcgacgagatctatgaggacctcatgcgctcggagcccgtgtccatgccgcatttcttgaagcccctgcaacggttcctgaaacctcaagacattgagatcatctttatcaacattgaggacctgcttcgtgttcatactcacttcctaaaggagatgaaggaagccctgggcacccctggcgcagccaatctctaccaggtcttcatcaaatacaaggagaggttcctcgtctatggccgctactgcagccaggtggagtcagccagcaaacacctggaccgtgtggccgcagcccgggaggacgtgcagatgaagctggaggaatgttctcagagagccaacaacgggaggttcaccctgcgggacctgctgatggtgcctatgcagcgagttctcaaatatcacctccttctccaggagctggtgaaacacacgcaggaggcgatggagaaggagaacctgcggctggccctggatgccatgagggacctggctcagtgcgtgaacgaggtcaagcgagacaacgagacactgcgacagatcaccaatttccagctgtccattgagaacctggaccagtctctggctcactatggccggcccaagatcgacggggaactcaagatcacctcggtggaacggcgctccaagatggacaggtatgccttcctgctcgacaaagctctactcatctgtaagcgcaggggagactcctatgacctcaaggactttgtaaacctgcacagcttccaggttcgggatgactcttcaggagaccgagacaacaagaagtggagccacatgttcctcctgatcgaggaccaaggtgcccagggctatgagctgttcttcaagacaagagaattgaagaagaagtggatggagcagtttgagatggccatctccaacatctatccggagaatgccaccgccaacgggcatgacttccagatgttctcctttgaggagaccacatcctgcaaggcctgtcagatgctgcttagaggtaccttctatcagggctaccgctgccatcggtgccgggcatctgcacacaaggagtgtctggggagggtccctccatgtggccgacatgggcaagatttcccaggaactatgaagaaggacaaactacatcgcagggctcaggacaaaaagaggaatgagctgggtctgcccaagatggaggtgtttcaggaatactacgggcttcctccaccccctggagccattggaccctttctacggctcaaccctggagacattgtggagctcacgaaggctgaggctgaacagaactggtgggagggcagaaatacatctactaatgaaattggctggtttccttgtaacagggtgaagccctatgtccatggccctcctcaggacctgtctgttcatctctggtacgcaggccccatggagcgggcaggggcagagagcatcctggccaaccgctcggacgggactttcttggtgcggcagagggtgaaggatgcagcagaatttgccatcagcattaaatataacgtcgaggtcaagcacattaaaatcatgacagcagaaggactgtaccggatcacagagaaaaaggctttccgggggcttacggagctggtggagttttaccagcagaactctctaaaggattgcttcaagtctctggacaccaccttgcagttccccttcaaggagcctgaaaagagaaccatcagcaggccagcagtgggaagcacaaagtattttggcacagccaaagcccgctatgacttctgcgcccgagaccgatcagagctgtcgctcaaggagggtgacatcatcaagatccttaacaagaagggacagcaaggctggtggcgaggggagatctatggccgggttggctggttccctgccaactacgtggaggaagattattctgaatactgctgagccctggtgccttggcagagagacgagaaactccaggctctgagcccggcgtgggcaggcagcggagccaggggctgtgacagctcccggcgggtggagactttgggatggactggaggaggccagcgtccagctggcggtgctcccgggatgtgccctgacatggttaatttataacaccccgatttcctcttgggtcccctcaagcagacggggctcaagggggttacatttaataaaaggatgaagatgg

SEQ ID NO: 92567 - protein, 321 aa, Artificial Sequence
  derived and/or modified sequence
MSGNGNAAATAEENSPKMRVIRVGTRKSQLARIQTDSVVATLKASYPGLQFEIIAMSTTGDKILDTALSKIGEKSLFTKELEHALEKNEVDLVVHSLKDLPTVLPPGFTIGAICKRENPHDAVVFHPKFVGKTLETLPEKSVVGTSSLRRAAQLQRKFPHLEFRSIRGNLNTRLRKLDEQQEFSAIILATAGLQRMGWHNRVGQILHPEECMYAVGQEGGCSVPVAVHTAMKDGQLYLTGGVWSLDGSDSIQETMQATIHVPAQHEDGPEDDPQLVGITARNIPRGPQLAAQNLGISLANLLLSKGAKNILDVARQLNDAH

SEQ ID NO: 92568 - protein, 304 aa, Artificial Sequence
  derived and/or modified sequence
MRVIRVGTRKSQLARIQTDSVVATLKASYPGLQFEIIAMSTTGDKILDTALSKIGEKSLFTKELEHALEKNEVDLVVHSLKDLPTVLPPGFTIGAICKRENPHDAVVFHPKFVGKTLETLPEKSVVGTSSLRRAAQLQRKFPHLEFRSIRGNLNTRLRKLDEQQEFSAIILATAGLQRMGWHNRVGQILHPEECMYAVGQEGGCSVPVAVHTAMKDGQLYLTGGVWSLDGSDSIQETMQATIHVPAQHEDGPEDDPQLVGITARNIPRGPQLAAQNLGISLANLLLSKGAKNILDVARQLNDAH

SEQ ID NO: 92569 - protein, 187 aa, Artificial Sequence
  derived and/or modified sequence
MRVIRVGTRKSQLARIQTDSVVATLKASYPGLQFEIIAMSTTGDKILDTALSKIGEKSLFTKELEHALEKNEVDLVVHSLKDLPTVLPPGFTIGAICKRENPHDAVVFHPKFVGKTLETLPEKSVVGTSSLRRAAQLQRKFPHLEFRSIRGNLNTRLRKLDEQQEFSAIILATAGLQRMGWHNRVGQ

SEQ ID NO: 92570 - DNA, 966 bp, Artificial Sequence
  derived and/or modified sequence
atgagcggcaacggcaacgccgccgccaccgccgaggagaacagccccaagatgagagtgatcagagtgggcaccagaaagagccagctggccagaatccagaccgacagcgtggtggccaccctgaaggccagctaccccggcctgcagttcgagatcatcgccatgagcaccaccggcgacaagatcctggacaccgccctgagcaagatcggcgagaagagcctgttcaccaaggagctggagcacgccctggagaagaacgaggtggacctggtggtgcacagcctgaaggacctgcccaccgtgctgccccccggcttcaccatcggcgccatctgcaagagagagaacccccacgacgccgtggtgttccaccccaagttcgtgggcaagaccctggagaccctgcccgagaagagcgtggtgggcaccagcagcctgagaagagccgcccagctgcagagaaagttcccccacctggagttcagaagcatcagaggcaacctgaacaccagactgagaaagctggacgagcagcaggagttcagcgccatcatcctggccaccgccggcctgcagagaatgggctggcacaacagagtgggccagatcctgcaccccgaggagtgcatgtacgccgtgggccaggagggcggctgcagcgtgcccgtggccgtgcacaccgccatgaaggacggccagctgtacctgaccggcggcgtgtggagcctggacggcagcgacagcatccaggagaccatgcaggccaccatccacgtgcccgcccagcacgaggacggccccgaggacgacccccagctggtgggcatcaccgccagaaacatccccagaggcccccagctggccgcccagaacctgggcatcagcctggccaacctgctgctgagcaagggcgccaagaacatcctggacgtggccagacagctgaacgacgcccactag
